(19) United States
(12) Patent Application Publication
(10) Pub. No.: US 2009/0100536 A1
(43) Pub. Date: Apr. 16, 2009

(54) Transgenic plants with enhanced agronomic traits

(75) Inventors: Thomas Adams, St. Louis, MO (US); Ameeta K. Agarwa, Oxford, MS (US); Jeffrey Ahrens, Fenton, MO (US); James A. Ball, Ledyard, CT (US); Amarjit Basra, Chesterfield, MO (US); Erin Bell, St. Louis, MO (US); Terry L. Bradshaw, Mebane, NC (US); Paul S. Chomet, Mystic, CT (US); James H. Crowley, Manchester, MO (US); Jill Deikman, Davis, CA (US); Molian Deng, Grover, MO (US); Meghan Donnarummo, Westerly, RI (US); Kimberly Faye Zobrist Duff, St. Louis, MO (US); Stephen Duff, St. Louis, MO (US); Michael D. Edgerton, St. Louis, MO (US); Banu Gopalan, University Heights, OH (US); Xiaoping He, St. Louis, MO (US); Mackenzie Heal, Stonington, CT (US); Brendan S. Hinchey, Mystic, CT (US); Shihshieh Huang, Woodland, CA (US); Richard G. Johnson, Urbana, IL (US); Vincent Jung, Belmont, MA (US); Keith Kretzmer, Eureka, MO (US); Lucille B. Laccetti, Groton, CT (US); Chao Qiang Lai, Belmont, MA (US); Garrett J. Lee, Wayne, NJ (US); Michael H. Luethy, Mystic, CT (US); Timothy J. Leland, St. Charles, MO (US); Jingdong Liu, Chesterfield, MO (US); Bin Lu, Waterford, CT (US); Adrian A. Lund, Chesterfield, MO (US); Linda L. Madson, New London, CT (US); Kathleen P. Malloy, Mystic, CT (US); Marcus Paul McNabnay, Edwardsville, IL (US); Manchikanti Padmavati, Kharapur (IN); Thomas Ruff, Wildwood, MO (US); William Start, Ledyard, CT (US); Daniel Tennessen, St. Louis, MO (US); Carl P. Urwin, Dardenne Prairie, MO (US); Gabriela Vaduva, Wildwood, MO (US); K.R. Vidya, Bangalore (IN); Steven Thomas Voss, Edwardsville, IL (US); Christine Voyles, West Kingston, RI (US); Zhango Xin, Lubbock, TX (US); Nanfei Xu, Cary, NC (US); Qingzhang Xu, O'Fallon, MO (US); Qiang Zhang, Pawcatuck, CT (US); Yajuan Zhao, Lexington, MA (US); Li Zhou, West Roxbury, MA (US)

Correspondence Address: MONSANTO COMPANY, 800 N. LINDBERGH BLVD., ATTENTION: GAIL P. WUELLNER, IP PARALEGAL, (E2NA), ST. LOUIS, MO, 63167, US

(73) Assignee: Monsanto Company, St. Louis, MO (US)

(21) Appl. No.: 11/879,785

(22) Filed: Jul. 18, 2007

Related U.S. Application Data
(63) Continuation-in-part of application No. 10/319,154, filed on Dec. 13, 2002, now abandoned.
Application No. 10/319,154 is a continuation-in-part of application No. 10/310,154, filed on Dec. 4, 2002.
(60) Provisional application No. 60/337,358, filed on Dec. 4, 2001.

(51) Int. Cl. A01H 1/02; C12N 1/00; C12N 5/00; A01H 5/00

(52) U.S. Cl. 800/260; 435/317.1; 435/410; 800/298; 800/312; 800/314; 800/320.2; 800/320.3

(57) ABSTRACT

This invention provides transgenic plant cells with recombinant DNA for expression of proteins that are useful for imparting enhanced agronomic trait(s) to transgenic crop plants. This invention also provides transgenic plants and progeny seed comprising the transgenic plant cells where the plants are selected for having an enhanced trait selected from the group of traits consisting of enhanced water use efficiency, enhanced cold tolerance, increased yield, enhanced nitrogen use efficiency, enhanced seed protein and enhanced seed oil. Also disclosed are methods for manufacturing transgenic seed and plants with enhanced traits.

### CROSS-REFERENCE TO RELATED APPLICATIONS

[0001] This application is a continuation-in-part of prior application Ser. No. 10/310,154 filed Dec. 4, 2002, which application claims priority under 35 U.S.C. § 119(e) of U.S. Provisional Application No. 60/337,358 filed Dec. 4, 2001, all of which applications are incorporated herein by reference in their entirety.

### INCORPORATION OF SEQUENCE LISTING

[0002] Two copies of the sequence listing (Copy 1 and Copy 2) and a computer readable form (CRF) of the sequence listing, all on CD-R5, each containing the text file named 38-21(52796)DIV_seqListing.txt, which is 87,272, 189 bytes (measured in MS-WINDOWS), were created on July 13 and 16, 2007 and are herein incorporated by reference.

### INCORPORATION OF COMPUTER PROGRAM LISTING

[0003] Two copies of the Computer Program Listing (Copy 1 and Copy 2) containing folders hmmer-2.3.2 and 164pfamDir, all on CD-R5 are incorporated herein by reference in their entirety. Folder hmmer-2.3.2 contains the source code and other associated file for implementing the HMMer software for Pfam analysis. Folder 164pfamDir contains 164 Pfam Hidden Markov Models. Both folders were created on CD-R on Jul. 17, 2007, having a total size of 15,204,353 bytes (measured in MS-WINDOWS).

### INCORPORATION OF TABLES

[0004] Two copies of Table 7 (Copy 1 and Copy 2), all on CD-R5, each containing the file named 38-21(52796)DIV_table7.doc, which is 512 kilobytes (measured in MS-WINDOWS), were created on Jul. 16, 2007, and comprise 68 pages when viewed in MS Word, are herein incorporated by reference.

### FIELD OF THE INVENTION

[0005] Disclosed herein are inventions in the field of plant genetics and developmental biology. More specifically, the present inventions provide plant cells with recombinant DNA for providing an enhanced trait in a transgenic plant, plants comprising such cells, seed and pollen derived from such plants, methods of making and using such cells, plants, seeds and pollen.

### BACKGROUND OF THE INVENTION

[0006] Transgenic plants with enhanced agronomic traits such as yield, environmental stress tolerance, pest resistance, herbicide tolerance, improved seed compositions, and the like are desired by both farmers and consumers. Although considerable efforts in plant breeding have provided significant gains in desired traits, the ability to introduce specific DNA into plant genomes provides further opportunities for generation of plants with improved and/or unique traits. The ability to develop transgenic plants with enhanced traits depends in part on the identification of useful recombinant DNA for production of transformed plants with enhanced properties, e.g. by actually selecting a transgenic plant from a screen for such enhanced property. An object of this invention is to provide transgenic plant cell nuclei, plant cells, plants and seeds by screening transgenic crop plants for one of more enhanced agronomic traits where the nucleus in cells of the plant or seed has recombinant DNA provided herein. A further object of the invention is to provide screening methods requiring routine experimentation by which such transgenic plant cell nuclei, cells, plants and seeds can be identified by making a reasonable number of transgenic events and engaging in screening identified in this specification and illustrated in the examples.

### SUMMARY OF THE INVENTION

[0007] This invention provides plant cell nuclei with recombinant DNA that imparts enhanced agronomic traits in transgenic plants having the nuclei in their cells, e.g. enhanced water use efficiency, enhanced cold tolerance, increased yield, enhanced nitrogen use efficiency, enhanced seed protein or enhanced seed oil. Such recombinant DNA in a plant cell nucleus of this invention is provided in as a construct comprising a promoter that is functional in plant cells and that is operably linked to DNA that encodes a protein. Such DNA in the construct is sometimes defined by protein domains of an encoded protein targeted for production or suppression, e.g. a “Pfam domain module” (as defined herein below) from the group of Pfam domain modules identified in Table 21 (page 72). Alternatively, e.g. where a Pfam domain module is not available, such DNA in the construct is defined a consensus amino acid sequence of an encoded protein that is targeted for production e.g. a protein having amino acid sequence with at least 90% identity to a consensus amino acid sequence in the group of SEQ ID NO: 24153 through SEQ ID NO: 24174. Alternatively, in other cases where neither a Pfam domain module nor a consensus amino acid sequence is available, such DNA in the construct is defined by the sequence of a specific encoded and/or its homologous proteins.

[0008] Other aspects of the invention are specifically directed to transgenic plant cells comprising the recombinant DNA of the invention, transgenic plants comprising a plurality of such plant cells, progeny transgenic seed, embryo and transgenic pollen from such plants. Such plant cells are selected from a population of transgenic plants regenerated from plant cells transformed with recombinant DNA and that express the protein by screening transgenic plants in the population for an enhanced trait as compared to control plants that do not have said recombinant DNA, where the enhanced trait is selected from group of enhanced traits consisting of enhanced water use efficiency, enhanced cold tolerance, increased yield, enhanced nitrogen use efficiency, enhanced seed protein and enhanced seed oil.

[0009] In yet another aspect of the invention the plant cells, plants, seeds, embryo and pollen further comprise DNA expressing a protein that provides tolerance from exposure to an herbicide applied at levels that are lethal to a wild type of said plant cell. Such tolerance is especially useful not only as an advantageous trait in such plants but is also useful in a selection step in the methods of the invention. In aspects of the invention the agent of such herbicide is a glyphosate, dicamba, or glufosinate compound.

[0010] Yet other aspects of the invention provide transgenic plants which are homozygous for the recombinant DNA and transgenic seed of the invention from corn, soybean, cotton, canola, alfalfa, wheat or rice plants.

[0011] This invention also provides methods for manufacturing non-natural, transgenic seed that can be used to produce a crop of transgenic plants with an enhanced trait resulting from expression of stably-integrated, recombinant DNA in the nucleus of the plant cells. More specifically the method comprises (a) screening a population of plants for an enhanced trait and recombinant DNA, where individual plants in the population can exhibit the trait at a level less than, essentially the same as or greater than the level that the trait is exhibited in control plants which do not express the recombinant DNA; (b) selecting from the population one or more plants that exhibit the trait at a level greater than the level that said trait is exhibited in control plants and (c) collecting seed from a selected plant. Such method further comprises steps (d) verifying that the recombinant DNA is stably integrated in said selected plants; and (e) analyzing tissue of a selected plant to determine the production of a protein having the function of a protein encoded by a recombinant DNA with a sequence of one of SEQ ID NO: 1-339; In one aspect of the invention the plants in the population further comprise DNA expressing a protein that provides tolerance to exposure to an herbicide applied at levels that are lethal to wild type plant cells and where the selecting is effected by treating the population with the herbicide, e.g. a glyphosate, dicamba, or glufosinate compound. In another aspect of the invention the transgenic plants are selected by identifying plants with the enhanced trait. The methods are especially useful for manufacturing corn, soybean, cotton, alfalfa, wheat or rice seed selected as having one of the enhanced traits described above.

[0012] Another aspect of the invention provides a method of producing hybrid corn seed comprising acquiring hybrid corn seed from a herbicide tolerant corn plant which also has stably-integrated, recombinant DNA comprising a promoter that is (a) functional in plant cells and (b) is operably linked to DNA that encodes a protein having at least one domain of amino acids in a sequence that exceeds the Pfam gathering cutoff for amino acid sequence alignment with a protein domain family identified by a Pfam name in the group of Pfam names identified in Table 12. The methods further comprise producing corn plants from said hybrid corn seed, wherein a fraction of the plants produced from said hybrid corn seed is homozygous for said recombinant DNA, a fraction of the plants produced from said hybrid corn seed is hemizygous for said recombinant DNA, and a fraction of the plants produced from said hybrid corn seed has none of said recombinant DNA; selecting corn plants which are homozygous and hemizygous for said recombinant DNA by treating with an herbicide; collecting seed from herbicide-treated-surviving corn plants and planting said seed to produce further progeny corn plants; repeating the selecting and collecting steps at least once to produce an inbred corn line; and crossing the inbred corn line with a second corn line to produce hybrid seed.

### BRIEF DESCRIPTION OF THE DRAWINGS

[0013] FIG. 1 is a consensus amino acid sequence of SEQ ID NO: 358 and its homologs.

[0014] FIGS. 2-4 are plasmid maps.

### DETAILED DESCRIPTION OF THE INVENTION

[0015] In the attached sequence listing:

[0016] SEQ ID NO: 1-339 are nucleotide sequences of the coding strand of DNA for “genes” used in the recombinant DNA imparting an enhanced trait in plant cells, i.e. each represents a coding sequence for a protein;

[0017] SEQ ID NO: 340-678 are amino acid sequences of the cognate protein of the “genes” with nucleotide coding sequences 1-339;

[0018] SEQ ID NO: 679-24149 are amino acid sequences of homologous proteins;

[0019] SEQ ID NO: 24150 is a nucleotide sequence of a plasmid base vector useful for corn transformation;

[0020] SEQ ID NO: 24151 is a nucleotide sequence of a plasmid base vector useful for soybean transformation;

[0021] SEQ ID NO: 24152 is a nucleotide sequence of a plasmid base vector useful for cotton transformation; and

[0022] SEQ ID NO: 24153-24174 are consensus sequences.

[0023] Table 1 lists the protein SEQ ID Nos and their corresponding consensus SEQ ID Nos.

TABLE 1

| PEP SEQ ID NO | Gene ID | Consensus SEQ ID NO |
|---|---|---|
| 357 | PHE0000025 | 24153 |
| 358 | PHE0000026 | 24154 |
| 369 | PHE0000033 | 24155 |
| 397 | PHE0000063 | 24156 |
| 468 | PHE0000168 | 24157 |
| 497 | PHE0000223 | 24158 |
| 508 | PHE0000235 | 24159 |
| 512 | PHE0000240 | 24160 |
| 514 | PHE0000242 | 24161 |
| 516 | PHE0000249 | 24162 |
| 518 | PHE0000251 | 24163 |
| 541 | PHE0000276 | 24164 |
| 551 | PHE0000289 | 24165 |
| 570 | PHE0000309 | 24166 |
| 578 | PHE0000317 | 24167 |
| 608 | PHE0000353 | 24168 |
| 645 | PHE0000421 | 24169 |
| 653 | PHE0000430 | 24170 |
| 658 | PHE0000435 | 24171 |
| 660 | PHE0000437 | 24172 |
| 668 | PHE0000454 | 24173 |
| 669 | PHE0000455 | 24174 |

### DETAILED DESCRIPTION OF THE INVENTION

[0024] As used herein a “plant cell” means a plant cell that is transformed with stably-integrated, non-natural, recombinant DNA, e.g. by Agrobacterium-mediated transformation or by bombardment using microparticles coated with recombinant DNA or other means. A plant cell of this invention can be an originally-transformed plant cell that exists as a microorganism or as a progeny plant cell that is regenerated into differentiated tissue, e.g. into a transgenic plant with stably-integrated, non-natural recombinant DNA, or seed or pollen derived from a progeny transgenic plant.

[0025] As used herein a “transgenic plant” means a plant whose genome has been altered by the stable integration of recombinant DNA. A transgenic plant includes a plant regenerated from an originally-transformed plant cell and progeny transgenic plants from later generations or crosses of a transformed plant.

[0026] As used herein “recombinant DNA” means DNA which has been a genetically engineered and constructed outside of a cell including DNA containing naturally occurring DNA or cDNA or synthetic DNA.

[0027] As used herein “consensus sequence” means an artificial sequence of amino acids in a conserved region of an alignment of amino acid sequences of homologous proteins, e.g. as determined by a CLUSTALW alignment of amino acid sequence of homolog proteins.

[0028] As used herein “homolog” means a protein in a group of proteins that perform the same biological function, e.g. proteins that belong to the same Pfam protein family and that provide a common enhanced trait in transgenic plants of this invention. Homologs are expressed by homologous genes. Homologous genes include naturally occurring alleles and artificially-created variants. Degeneracy of the genetic code provides the possibility to substitute at least one base of the protein encoding sequence of a gene with a different base without causing the amino acid sequence of the polypeptide produced from the gene to be changed. Hence, a recombinant DNA molecule useful in the present invention may have any base sequence that has been changed from SEQ ID NO: 1 through SEQ ID NO: 339 substitution in accordance with degeneracy of the genetic code. Homologs are proteins that, when optimally aligned, have at least 60% identity, more preferably about 70% or higher, more preferably at least 80% and even more preferably at least 90% identity over the full length of a protein identified as being associated with imparting an enhanced trait when expressed in plant cells. Homologs include proteins with an amino acid sequence that has at least 90% identity to a consensus amino acid sequence of proteins and homologs disclosed herein.

[0029] Homologs are identified by comparison of amino acid sequence, e.g. manually or by use of a computer-based tool using known homology-based search algorithms such as those commonly known and referred to as BLAST, FASTA, and Smith-Waterman. A local sequence alignment program, e.g. BLAST, can be used to search a database of sequences to find similar sequences, and the summary Expectation value (E-value) used to measure the sequence base similarity. As a protein hit with the best E-value for a particular organism may not necessarily be an ortholog or the only ortholog, a reciprocal query is used in the present invention to filter hit sequences with significant E-values for ortholog identification. The reciprocal query entails search of the significant hits against a database of amino acid sequences from the base organism that are similar to the sequence of the query protein. A hit is a likely ortholog, when the reciprocal query's best hit is the query protein itself or a protein encoded by a duplicated gene after speciation. A further aspect of the invention comprises functional homolog proteins that differ in one or more amino acids from those of disclosed protein as the result of conservative amino acid substitutions, for example substitutions are among: acidic (negatively charged) amino acids such as aspartic acid and glutamic acid; basic (positively charged) amino acids such as arginine, histidine, and lysine; neutral polar amino acids such as glycine, serine, threonine, cysteine, tyrosine, asparagine, and glutamine; neutral nonpolar (hydrophobic) amino acids such as alanine, leucine, isoleucine, valine, proline, phenylalanine, tryptophan, and methionine; amino acids having aliphatic side chains such as glycine, alanine, valine, leucine, and isoleucine; amino acids having aliphatic-hydroxyl side chains such as serine and threonine; amino acids having amide-containing side chains such as asparagine and glutamine; amino acids having aromatic side chains such as phenylalanine, tyrosine, and tryptophan; amino acids having basic side chains such as lysine, arginine, and histidine; amino acids having sulfur-containing side chains such as cysteine and methionine; naturally conservative amino acids such as valine-leucine, valine-isoleucine, phenylalanine-tyrosine, lysine-arginine, alanine-valine, aspartic acid-glutamic acid, and asparagine-glutamine. A further aspect of the homologs encoded by DNA useful in the transgenic plants of the invention are those proteins that differ from a disclosed protein as the result of deletion or insertion of one or more amino acids in a native sequence.

[0030] As used herein, “percent identity” means the extent to which two optimally aligned DNA or protein segments are invariant throughout a window of alignment of components, for example nucleotide sequence or amino acid sequence. An “identity fraction” for aligned segments of a test sequence and a reference sequence is the number of identical components that are shared by sequences of the two aligned segments divided by the total number of sequence components in the reference segment over a window of alignment which is the smaller of the full test sequence or the full reference sequence. “Percent identity” (“% identity”) is the identity fraction times 100.

[0031] The “Pfam” database is a large collection of multiple sequence alignments and hidden Markov models covering many common protein families, e.g. Pfam version 19.0 (December 2005) contains alignments and models for 8183 protein families and is based on the Swissprot 47.0 and SP-TrEMBL 30.0 protein sequence databases. See S. R. Eddy, “Profile Hidden Markov Models”, Bioinformatics 14:755-763, 1998. The Pfam database is currently maintained and updated by the Pfam Consortium. The alignments represent some evolutionary conserved structure that has implications for the protein's function. Profile hidden Markov models (profile HMMs) built from the protein family alignments are useful for automatically recognizing that a new protein belongs to an existing protein family even if the homology by alignment appears to be low.

[0032] A “Pfam domain module” is a representation of Pfam domains in a protein, in order from N terminus to C terminus. In a Pfam domain module individual Pfam domains are separated by double colons “::”. The order and copy number of the Pfam domains from N to C terminus are attributes of a Pfam domain module. Although the copy number of repetitive domains is important, varying copy number often enables a similar function. Thus, a Pfam domain module with multiple copies of a domain should define an equivalent Pfam domain module with variance in the number of multiple copies. A Pfam domain module is not specific for distance between adjacent domains, but contemplates natural distances and variations in distance that provide equivalent function. The Pfam database contains both narrowly- and broadly-defined domains, leading to identification of overlapping domains on some proteins. A Pfam domain module is characterized by non-overlapping domains. Where there is overlap, the domain having a function that is more closely associated with the function of the protein (based on the E value of the Pfam match) is selected.

[0033] Once one DNA is identified as encoding a protein which imparts an enhanced trait when expressed in transgenic plants, other DNA encoding proteins with the same Pfam domain module are identified by querying the amino acid sequence of protein encoded by candidate DNA against the Hidden Markov Models which characterizes the Pfam domains using HMMER software, a current version of which is provided in the appended computer listing. Candidate proteins meeting the same Pfam domain module are in the protein family and have cognate DNA that is useful in constructing recombinant DNA for the use in the plant cells of this invention. Hidden Markov Model databases for use with HMMER software in identifying DNA expressing protein with a common Pfam domain module for recombinant DNA in the plant cells of this invention are also included in the appended computer listing.

[0034] Version 19.0 of the HMMER software and Pfam databases were used to identify known domains in the proteins corresponding to amino acid sequence of SEQ ID NO: 340 through SEQ ID NO: 678. All DNA encoding proteins that have scores higher than the gathering cutoff disclosed in Table 23 by Pfam analysis disclosed herein can be used in recombinant DNA of the plant cells of this invention, e.g. for selecting transgenic plants having enhanced agronomic traits. The relevant Pfams modules for use in this invention, as more specifically disclosed below, are bZIP_{—}1, AOX, DUF902::DUF906, LRRNT_{—}2::LRR_{—}1::LRR_{—}1::LRR_{—}1::LRR_{—}1::LRR_{—}1::LRR_{—}1::LRR_{—}1::LRR_{—}1::LRR_{—}1::LRR_{—}1::LRR_{—}1::LRR_{—}1::LRR_{—}1::LRR_{—}1::LRR_{—}1::LRR_{—}1::LRR_{—}1::LRR_{—}1::LRR_{—}1::LRR_{—}1::LRR_{—}1::LRR_{—}1::Pkinase, ABC_tran::ABC2_membrane::PDR_CDR::ABC_tran::ABC2_membrane, Redoxin, RNase_PH::RNase_PH_C, AAA, GFO_IDH_MocA::GFO_IDH_MocA_C, GRAS, Metallophos, Ribosomal_L18p, Sugar_tr, CDC48_N::AAA::AAA, Pkinase, PAS_{—}3::PAS_{—}3::Pkinase, CRAL_TRIO_N::CRAL_TRIO, p450, RRM_{—}1::RRM_{—}1, SRF-TF, G-alpha, TPR_{—}1::TPR_{—}1, FAE1_CUT1_RppA::ACP_syn_III_C, Globin::FAD_binding_{—}6::NAD_binding_{—}1, TPR_{—}1::TPR_{—}2, IF4E, F-box::LRR_{—}2, FBPase, LRR_{—}2::LRR_{—}1::LRR_{—}1::LRR_{—}1, HSF_DNA-bind, Dehydrin, TP_methylase, Response_reg::Myb_DNA-binding, KNOX1::KNOX2::ELK::Homeobox, Catalase, GTP_EFTU::GTP_EFTU_D2::GTP_EFTU_D3, TPR_{—}1::TPR_{—}1::TPR_{—}1::TPR_{—}1, ADH_zinc_N, Globin, CS, GH3, HLH, Ribonuclease_T2, TPR_{—}1::TPR_{—}1::TPR_{—}1::U-box, Dicty_CAR, Cyclin_N::Cyclin_C, MFS_{—}1, Acid_phosphat_A, Methyltransf_{—}7, TPR_{—}1::TPR_{—}1::TPR_{—}2, IBN_N, polyprenyl_synt, AhpC-TSA, Oxidored_FMN, Hydrolase, DS, Response_reg::CCT, Aa_trans, peroxidase, E1-E2_ATPase, F-box::Tub, Response_reg, Rho_GDI, E2F_TDP, 14-3-3, AT_hook::AT_hook::AT_hook::AT_hook::YDG_SRA::Pre-SET::SET, Tub, KOW::eIF-5a, MtN3_slv::MtN3_sIv, GTP_EFTU, UQ_con, MAT1, E2F_TDP::E2F_TDP, HEAT::HEAT::HEAT::FAT::PI3_PI4_kinase::FATC, HMG_CoA_synt_N::HMG_CoA_synt_C, TAP42, DEAD::Helicase_C::DSHCT, NDK, Clp_N::Clp_N::AAA::AAA_{—}2, Cyclin_N, OPT, Orn_Arg_deC_N::Orn_DAP_Arg_deC, PAS::Pkinase, FtsH_ext::AAA::Peptidase_M41, Wzy_C, Mlo, AP2::B3, SET, FKBP_C::FKBP_C::FKBP_C::TPR_{—}1::TPR_{—}1, TPR_{—}2::TPR_{—}1::TPR_{—}1::TPR_{—}2::TPR_{—}1::TPR_{—}1::TPR_{—}1::TPR_{—}1::TPR_{—}1, Pyridoxal_deC, RNase_PH, RB_A::RB_B, WD40::WD40::WD40::WD40::WD40::WD40, SNF2_N::Helicase_C, Aminotran_{—}1_{—}2, Gemini_AL1::Gemini_AL1_M, Hexapep::Hexapep::Hexapep::Hexapep, AP2::AP2, Abhydrolase_{—}1, PAS_{—}2::GAF::Phytochrome::PAS::PAS::H isKA::HATPase_c, Cystatin::Cystatin, Pfam module annoation, Cystatin, F-box::FBA_{—}1, 2OG-FeII_Oxy, FA_desaturase, HSP20, FBPase_glpX, E1-E2_ATPase::Hydrolase, Mito_carr::Mito_carr::Mito_carr, Cellulose_synt, Linker_histone::AT_hook::AT_hook::AT_hook::AT_hook, UPF0016::UPF0016, GDI, Glyco_hydro_{—}32N::Glyco_hydro_{—}32C, TPR_{—}1::TPR_{—}1::TPR_{—}2::U-box, ADH_N::ADH_zinc_N, GDA1_CD39, MIP, CRAL_TRIO, TPR_{—}1::TPR_{—}1::TPR_{—}1::TPR_{—}1::TPR_{—}1::TPR_{—}1::TPR_{—}1::TPR_{—}1, LEA_{—}4::LEA_{—}4, Carb_anhydrase, PTR2, Cu_bind_like, HD-ZIP_N::Homeobox::HALZ, eIF-5a, Asp, S1::S1::S1, SAM_decarbox, WD40::WD40, Citrate_synt, SRF-TF::K-box, HSP9_HSP12, PI3_PI4_kinase, Ferritin, Xan_ur_permease, Myb_DNA-binding::Myb_DNA-binding, zf-NF-X1::zf-NF-X1::zf-NF-X1::zf-NF-X1::zf-NF-X1, AP2, and Myb_DNA-binding.

[0035] As used herein “promoter” means regulatory DNA for initializing transcription. A “plant promoter” is a promoter capable of initiating transcription in plant cells whether or not its origin is a plant cell, e.g. is it well known that Agrobacterium promoters are functional in plant cells. Thus, plant promoters include promoter DNA obtained from plants, plant viruses and bacteria such as Agrobacterium and Bradyrhizobium bacteria. Examples of promoters under developmental control include promoters that preferentially initiate transcription in certain tissues, such as leaves, roots, or seeds. Such promoters are referred to as “tissue preferred”. Promoters that initiate transcription only in certain tissues are referred to as “tissue specific”. A “cell type” specific promoter primarily drives expression in certain cell types in one or more organs, for example, vascular cells in roots or leaves. An “inducible” or “repressible” promoter is a promoter which is under environmental control. Examples of environmental conditions that may effect transcription by inducible promoters include anaerobic conditions, or certain chemicals, or the presence of light. Tissue specific, tissue preferred, cell type specific, and inducible promoters constitute the class of “non-constitutive” promoters. A “constitutive” promoter is a promoter which is active under most conditions.

[0036] As used herein “operably linked” means the association of two or more DNA fragments in a DNA construct so that the function of one, e.g. protein-encoding DNA, is controlled by the other, e.g. a promoter.

[0037] As used herein “expressed” means produced, e.g. a protein is expressed in a plant cell when its cognate DNA is transcribed to mRNA that is translated to the protein.

[0038] As used herein a “control plant” means a plant that does not contain the recombinant DNA that expressed a protein that impart an enhanced trait. A control plant is to identify and select a transgenic plant that has an enhance trait. A suitable control plant can be a non-transgenic plant of the parental line used to generate a transgenic plant, i.e. devoid of recombinant DNA. A suitable control plant may in some cases be a progeny of a hemizygous transgenic plant line that is does not contain the recombinant DNA, known as a negative segregant.

[0039] As used herein an “enhanced trait” means a characteristic of a transgenic plant that includes, but is not limited to, an enhance agronomic trait characterized by enhanced plant morphology, physiology, growth and development, yield, nutritional enhancement, disease or pest resistance, or environmental or chemical tolerance. In more specific aspects of this invention enhanced trait is selected from group of enhanced traits consisting of enhanced water use efficiency, enhanced cold tolerance, increased yield, enhanced nitrogen use efficiency, enhanced seed protein and enhanced seed oil. In an important aspect of the invention the enhanced trait is enhanced yield including increased yield under non-stress conditions and increased yield under environmental stress conditions. Stress conditions may include, for example, drought, shade, fungal disease, viral disease, bacterial disease, insect infestation, nematode infestation, cold temperature exposure, heat exposure, osmotic stress, reduced nitrogen nutrient availability, reduced phosphorus nutrient availability and high plant density. “Yield” can be affected by many properties including without limitation, plant height, pod number, pod position on the plant, number of internodes, incidence of pod shatter, grain size, efficiency of nodulation and nitrogen fixation, efficiency of nutrient assimilation, resistance to biotic and abiotic stress, carbon assimilation, plant architecture, resistance to lodging, percent seed germination, seedling vigor, and juvenile traits. Yield can also be affected by efficiency of germination (including germination in stressed conditions), growth rate (including growth rate in stressed conditions), ear number, seed number per ear, seed size, composition of seed (starch, oil, protein) and characteristics of seed fill.

[0040] Increased yield of a transgenic plant of the present invention can be measured in a number of ways, including test weight, seed number per plant, seed weight, seed number per unit area (i.e. seeds, or weight of seeds, per acre), bushels per acre, tonnes per acre, tons per acre, kilo per hectare. For example, maize yield may be measured as production of shelled corn kernels per unit of production area, for example in bushels per acre or metric tons per hectare, often reported on a moisture adjusted basis, for example at 15.5 percent moisture. Increased yield may result from improved utilization of key biochemical compounds, such as nitrogen, phosphorous and carbohydrate, or from improved responses to environmental stresses, such as cold, heat, drought, salt, and attack by pests or pathogens. Recombinant DNA used in this invention can also be used to provide plants having improved growth and development, and ultimately increased yield, as the result of modified expression of plant growth regulators or modification of cell cycle or photosynthesis pathways. Also of interest is the generation of transgenic plants that demonstrate enhanced yield with respect to a seed component that may or may not correspond to an increase in overall plant yield. Such properties include enhancements in seed oil, seed molecules such as tocopherol, protein and starch, or oil particular oil components as may be manifest by alterations in the ratios of seed components.

[0041] A subset of the nucleic molecules of this invention includes fragments of the disclosed recombinant DNA consisting of oligonucleotides of at least 15, preferably at least 16 or 17, more preferably at least 18 or 19, and even more preferably at least 20 or more, consecutive nucleotides. Such oligonucleotides are fragments of the larger molecules having a sequence selected from the group consisting of SEQ ID NO:1 through SEQ ID NO: 339, and find use, for example as probes and primers for detection of the polynucleotides of the present invention.

[0042] DNA constructs are assembled using methods well known to persons of ordinary skill in the art and typically comprise a promoter operably linked to DNA, the expression of which provides the enhanced agronomic trait. Other construct components may include additional regulatory elements, such as 5′ leasders and introns for enhancing transcription, 3′ untranslated regions (such as polyadenylation signals and sites), DNA for transit or signal peptides.

[0043] Numerous promoters that are active in plant cells have been described in the literature. These include promoters present in plant genomes as well as promoters from other sources, including nopaline synthase (NOS) promoter and octopine synthase (OCS) promoters carried on tumor-inducing plasmids of Agrobacterium tumefaciens, caulimovirus promoters such as the cauliflower mosaic virus. For instance, see U.S. Pat. Nos. 5,858,742 and 5,322,938, which disclose versions of the constitutive promoter derived from cauliflower mosaic virus (CaMV35S), U.S. Pat. No. 5,641,876, which discloses a rice actin promoter, U.S. Patent Application Publication 2002/0192813A1, which discloses 5′, 3′ and intron elements useful in the design of effective plant expression vectors, U.S. patent application Ser. No. 09/757,089, which discloses a maize chloroplast aldolase promoter, U.S. patent application Ser. No. 08/706,946, which discloses a rice glutelin promoter, U.S. patent application Ser. No. 09/757,089, which discloses a maize aldolase (FDA) promoter, and U.S. Patent Application Ser. No. 60/310,370, which discloses a maize nicotianamine synthase promoter, all of which are incorporated herein by reference. These and numerous other promoters that function in plant cells are known to those skilled in the art and available for use in recombinant polynucleotides of the present invention to provide for expression of desired genes in transgenic plant cells.

[0044] In other aspects of the invention, preferential expression in plant green tissues is desired. Promoters of interest for such uses include those from genes such as Arabidopsis thaliana ribulose-1,5-bisphosphate carboxylase (Rubisco) small subunit (Fischhoff et al. (1992) Plant Mol. Biol. 20:81-93), aldolase and pyruvate orthophosphate dikinase (PPDK) (Taniguchi et al. (2000) Plant Cell Physiol. 41(1):42-48).

[0045] Furthermore, the promoters may be altered to contain multiple “enhancer sequences” to assist in elevating gene expression. Such enhancers are known in the art. By including an enhancer sequence with such constructs, the expression of the selected protein may be enhanced. These enhancers often are found 5′ to the start of transcription in a promoter that functions in eukaryotic cells, but can often be inserted upstream (5′) or downstream (3′) to the coding sequence. In some instances, these 5′ enhancing elements are introns. Particularly useful as enhancers are the 5′ introns of the rice actin 1 (see U.S. Pat. No. 5,641,876) and rice actin 2 genes, the maize alcohol dehydrogenase gene intron, the maize heat shock protein 70 gene intron (U.S. Pat. No. 5,593,874) and the maize shrunken 1 gene.

[0046] In other aspects of the invention, sufficient expression in plant seed tissues is desired to affect improvements in seed composition. Exemplary promoters for use for seed composition modification include promoters from seed genes such as napin (U.S. Pat. No. 5,420,034), maize L3 oleosin (U.S. Pat. No. 6,433,252), zein Z27 (Russell et al. (1997) Transgenic Res. 6(2):157-166), globulin 1 (Belanger et al (1991) Genetics 129:863-872), glutelin 1 (Russell (1997) supra), and peroxiredoxin antioxidant (Per1) (Stacy et al. (1996) Plant Mol. Biol. 31(6):1205-1216).

[0047] Recombinant DNA constructs prepared in accordance with the invention will also generally include a 3′ element that typically contains a polyadenylation signal and site. Well-known 3′ elements include those from Agrobacterium tumefaciens genes such as nos 3′, tml 3′, tmr 3′, tms 3′, ocs 3′, tr7 3′, for example disclosed in U.S. Pat. No. 6,090,627, incorporated herein by reference; 3′ elements from plant genes such as wheat (Triticum aesevitum) heat shock protein 17 (Hsp17 3′), a wheat ubiquitin gene, a wheat fructose-1,6-biphosphatase gene, a rice glutelin gene a rice lactate dehydrogenase gene and a rice beta-tubulin gene, all of which are disclosed in U.S. published patent application 2002/0192813 A1, incorporated herein by reference; and the pea (Pisum sativum) ribulose biphosphate carboxylase gene (rbs 3′), and 3′ elements from the genes within the host plant.

[0048] Constructs and vectors may also include a transit peptide for targeting of a gene to a plant organelle, particularly to a chloroplast, leucoplast or other plastid organelle. For descriptions of the use of chloroplast transit peptides see U.S. Pat. No. 5,188,642 and U.S. Pat. No. 5,728,925, incorporated herein by reference. For description of the transit peptide region of an Arabidopsis EPSPS gene useful in the present invention, see Klee, H. J. et al (MGG (1987) 210:437-442).

[0049] Transgenic plants comprising or derived from plant cells of this invention transformed with recombinant DNA can be further enhanced with stacked traits, e.g. a crop plant having an enhanced trait resulting from expression of DNA disclosed herein in combination with herbicide and/or pest resistance traits. For example, genes of the current invention can be stacked with other traits of agronomic interest, such as a trait providing herbicide resistance, or insect resistance, such as using a gene from Bacillus thuringensis to provide resistance against lepidopteran, coliopteran, homopteran, hemiopteran, and other insects. Herbicides for which transgenic plant tolerance has been demonstrated and the method of the present invention can be applied include, but are not limited to, glyphosate, dicamba, glufosinate, sulfonylurea, bromoxynil and norflurazon herbicides. Polynucleotide molecules encoding proteins involved in herbicide tolerance are well-known in the art and include, but are not limited to, a polynucleotide molecule encoding 5-enolpyruvylshikimate-3-phosphate synthase (EPSPS) disclosed in U.S. Pat. Nos. 5,094,945; 5,627,061; 5,633,435 and 6,040,497 for imparting glyphosate tolerance; polynucleotide molecules encoding a glyphosate oxidoreductase (GOX) disclosed in U.S. Pat. No. 5,463,175 and a glyphosate-N-acetyl transferase (GAT) disclosed in U.S. Patent Application publication 2003/0083480 A1 also for imparting glyphosate tolerance; dicamba monooxygenase disclosed in U.S. Patent Application publication 2003/0135879 A1 for imparting dicamba tolerance; a polynucleotide molecule encoding bromoxynil nitrilase (Bxn) disclosed in U.S. Pat. No. 4,810,648 for imparting bromoxynil tolerance; a polynucleotide molecule encoding phytoene desaturase (crtI) described in Misawa et al, (1993) Plant J. 4:833-840 and in Misawa et al, (1994) Plant J. 6:481-489 for norflurazon tolerance; a polynucleotide molecule encoding acetohydroxyacid synthase (AHAS, aka ALS) described in Sathasiivan et al. (1990) Nucl. Acids Res. 18:2188-2193 for imparting tolerance to sulfonylurea herbicides; polynucleotide molecules known as bar genes disclosed in DeBlock, et al. (1987) EMBO J. 6:2513-2519 for imparting glufosinate and bialaphos tolerance; polynucleotide molecules disclosed in U.S. Patent Application Publication 2003/010609 A1 for imparting N-amino methyl phosphonic acid tolerance; polynucleotide molecules disclosed in U.S. Pat. No. 6,107,549 for imparting pyridine herbicide resistance; molecules and methods for imparting tolerance to multiple herbicides such as glyphosate, atrazine, ALS inhibitors, isoxoflutole and glufosinate herbicides are disclosed in U.S. Pat. No. 6,376,754 and U.S. Patent Application Publication 2002/0112260, all of said U.S. Patents and Patent Application Publications are incorporated herein by reference. Molecules and methods for imparting insect/nematode/virus resistance are disclosed in U.S. Pat. Nos. 5,250,515; 5,880,275; 6,506,599; 5,986,175 and U.S. Patent Application Publication 2003/0150017 A1, all of which are incorporated herein by reference.

### Plant Cell Transformation Methods

[0050] Numerous methods for transforming plant cells with recombinant DNA are known in the art and may be used in the present invention. Two commonly used methods for plant transformation are Agrobacteriun-mediated transformation and microprojectile bombardment. Microprojectile bombardment methods are illustrated in U.S. Pat. Nos. 5,015,580 (soybean); 5,550,318 (corn); 5,538,880 (corn); 5,914,451 (soybean); 6,160,208 (corn); 6,399,861 (corn) and 6,153,812 (wheat) and Agrobacterium-mediated transformation is described in U.S. Pat. Nos. 5,159,135 (cotton); 5,824,877 (soybean); 5,463,174 (canola); 5,591,616 (corn); and 6,384,301 (soybean), all of which are incorporated herein by reference. For Agrobacterium tumefaciens based plant transformation system, additional elements present on transformation constructs will include T-DNA left and right border sequences to facilitate incorporation of the recombinant polynucleotide into the plant genome.

[0051] In general it is useful to introduce recombinant DNA randomly, i.e. at a non-specific location, in the genome of a target plant line. In special cases it may be useful to target recombinant DNA insertion in order to achieve site-specific integration, for example to replace an existing gene in the genome, to use an existing promoter in the plant genome, or to insert a recombinant polynucleotide at a predetermined site known to be active for gene expression. Several site specific recombination systems exist which are known to function inplants including cre-lox as disclosed in U.S. Pat. No. 4,959,317 and FLP-FRT as disclosed in U.S. Pat. No. 5,527,695, both incorporated herein by reference.

[0052] Transformation methods of this invention are preferably practiced in tissue culture on media and in a controlled environment. “Media” refers to the numerous nutrient mixtures that are used to grow cells in vitro, that is, outside of the intact living organism. Recipient cell targets include, but are not limited to, meristem cells, hypocotyls, calli, immature embryos and gametic cells such as microspores, pollen, sperm and egg cells. It is contemplated that any cell from which a fertile plant may be regenerated is useful as a recipient cell. Callus may be initiated from tissue sources including, but not limited to, immature embryos, hypocotyls, seedling apical meristems, microspores and the like. Cells capable of proliferating as callus are also recipient cells for genetic transformation. Practical transformation methods and materials for making transgenic plants of this invention, for example various media and recipient target cells, transformation of immature embryo cells and subsequent regeneration of fertile transgenic plants are disclosed in U.S. Pat. Nos. 6,194,636 and 6,232,526, which are incorporated herein by reference.

[0053] The seeds of transgenic plants can be harvested from fertile transgenic plants and be used to grow progeny generations of transformed plants of this invention including hybrid plants line for selection of plants having an enhanced trait. In addition to direct transformation of a plant with a recombinant DNA, transgenic plants can be prepared by crossing a first plant having a recombinant DNA with a second plant lacking the DNA. For example, recombinant DNA can be introduced into a first plant line that is amenable to transformation to produce a transgenic plant which can be crossed with a second plant line to introgress the recombinant DNA into the second plant line. A transgenic plant with recombinant DNA providing an enhanced trait, e.g. enhanced yield, can be crossed with transgenic plant line having other recombinant DNA that confers another trait, for example herbicide resistance or pest resistance, to produce progeny plants having recombinant DNA that confers both traits. Typically, in such breeding for combining traits the transgenic plant donating the additional trait is a male line and the transgenic plant carrying the base traits is the female line. The progeny of this cross will segregate such that some of the plants will carry the DNA for both parental traits and some will carry DNA for one parental trait; such plants can be identified by markers associated with parental recombinant DNA, e.g. marker identification by analysis for recombinant DNA or, in the case where a selectable marker is linked to the recombinant, by application of the selecting agent such as a herbicide for use with a herbicide tolerance marker, or by selection for the enhanced trait. Progeny plants carrying DNA for both parental traits can be crossed back into the female parent line multiple times, for example usually 6 to 8 generations, to produce a progeny plant with substantially the same genotype as one original transgenic parental line but for the recombinant DNA of the other transgenic parental line

[0054] In the practice of transformation DNA is typically introduced into only a small percentage of target plant cells in any one transformation experiment. Marker genes are used to provide an efficient system for identification of those cells that are stably transformed by receiving and integrating a recombinant DNA molecule into their genomes. Preferred marker genes provide selective markers which confer resistance to a selective agent, such as an antibiotic or herbicide. Any of the herbicides to which plants of this invention may be resistant are useful agents for selective markers. Potentially transformed cells are exposed to the selective agent. In the population of surviving cells will be those cells where, generally, the resistance-conferring gene is integrated and expressed at sufficient levels to permit cell survival. Cells may be tested further to confirm stable integration of the exogenous DNA. Commonly used selective marker genes include those conferring resistance to antibiotics such as kanamycin and paromomycin (nptII), hygromycin B (aph IV) spectinomycin (aadA) and gentamycin (aac3 and aacC4) or resistance to herbicides such as glufosinate (bar or pat), dicamba (DMO) and glyphosate (aroA or EPSPS). Examples of such selectable markers are illustrated in U.S. Pat. Nos. 5,550,318; 5,633,435; 5,780,708 and 6,118,047, all of which are incorporated herein by reference. Selectable markers which provide an ability to visually identify transformants can also be employed, for example, a gene expressing a colored or fluorescent protein such as a luciferase or green fluorescent protein (GFP) or a gene expressing a beta-glucuronidase or uidA gene (GUS) for which various chromogenic substrates are known.

[0055] Plant cells that survive exposure to the selective agent, or plant cells that have been scored positive in a screening assay, may be cultured in regeneration media and allowed to mature into plants. Developing plantlets regenerated from transformed plant cells can be transferred to plant growth mix, and hardened off, for example, in an environmentally controlled chamber at about 85% relative humidity, 600 ppm CO₂, and 25-250 microeinsteins m⁻² s⁻¹ of light, prior to transfer to a greenhouse or growth chamber for maturation. Plants are regenerated from about 6 weeks to 10 months after a transformant is identified, depending on the initial tissue, and the plant species. Plants may be pollinated using conventional plant breeding methods known to those of skill in the art and seed produced, for example self-pollination is commonly used with transgenic corn. The regenerated transformed plant or its progeny seed or plants can be tested for expression of the recombinant DNA and selected for the presence of enhanced agronomic trait.

### Transgenic Plants and Seed

[0056] Transgenic plants derived from the plant cells of this invention are grown to generate transgenic plants having an enhanced trait as compared to a control plant and produce transgenic seed and haploid pollen of this invention. Such plants with enhanced traits are identified by selection of transformed plants or progeny seed for the enhanced trait. For efficiency a selection method is designed to evaluate multiple transgenic plants (events) comprising the recombinant DNA, for example multiple plants from 2 to 20 or more transgenic events. Transgenic plants grown from transgenic seed provided herein demonstrate improved agronomic traits that contribute to increased yield or other trait that provides increased plant value, including, for example, improved seed quality. Of particular interest are plants having enhanced water use efficiency, enhanced cold tolerance, increased yield, enhanced nitrogen use efficiency, enhanced seed protein and enhanced seed oil.

[0057] Table 2 provides a list of protein encoding DNA (“genes”) that are useful as recombinant DNA for production of transgenic plants with enhanced agronomic trait.

[0058] Column headings in Table 2 refer to the following information:
[0059] “PEP SEQ ID NO” refers to a particular amino acid sequence in the Sequence Listing
[0060] “PHE ID” refers to an arbitrary number used to identify a particular recombinant DNA corresponding to the translated protein encoded by the polynucleotide.
[0061] “NUC SEQ ID NO” refers to a particular nucleic acid sequence in the Sequence Listing which defines a polynucleotide used in a recombinant DNA of this invention.
[0062] “GENE NAME” refers to a common name for the recombinant DNA.
[0063] “CODING SEQUENCE” refers to peptide coding segments of the corresponding recombinant DNA.
[0064] “SPECIES” refers to the organism from which the recombinant DNA was derived.

TABLE 2

| PEP | | NUC | | | |
|---|---|---|---|---|---|
| SEQ ID | | SEQ ID | | | |
| NO | Phe ID | NO | Gene Name | CODING SEQUENCE | Species |
| 340 | PHE0000001 | 1 | maize cellulose synthase | 113-3061 | Zea mays |
| | | | (eskimo 2) | | |
| 341 | PHE0000006 | 2 | Arabidopsis RAV2/G9 | 81-1136 | Arabidopsis thaliana |
| 342 | PHE0000007 | 3 | rice G9-like 1 | 336-1430 | Oryza sativa |
| 343 | PHE0000008 | 4 | rice G9-like 2 | 572-1522 | Oryza sativa |
| 344 | PHE0000010 | 5 | rice G975 | 201-283, 516-1161 | Oryza sativa |
| 345 | PHE0000278 | 6 | corn G975 | 41-679 | Zea mays |
| 346 | PHE0000011 | 7 | corn Glossy 15 | 385-1722 | Zea mays |
| 347 | PHE0000012 | 8 | corn aquaporin RS81 | 1-747 | Zea mays |
| 348 | PHE0000014 | 9 | rice cycD2 | 13-324, 623-709, 813-911 | Oryza sativa |
| | | | | 1003-1204, 1314-1438, | |
| | | | | 1529-1774 | |
| 349 | PHE0000215 | 10 | invW | 1108-1489, 1813-2684, 6105-6266, | Oryza sativa |
| | | | | 6417-6658, | |
| 350 | PHE0000015 | 11 | rice GCR1 | 312-500, 1123-1154, 1384-1553, | Oryza sativa |
| | | | | 2048-2163, 2724-2825, | |
| | | | | 2946-3002, 3331-3474, | |
| | | | | 3930-4000, 4118-4223 | |
| 351 | PHE0000016 | 12 | corn Knotted1 | 181-1257 | Zea mays |
| 352 | PHE0000018 | 13 | corn AAA-ATPase 2 | 104-2533 | Zea mays |
| 353 | PHE0000019 | 14 | rice AOX1b (alternative | 4531-4851, 5011-5139, 6072-6560, | Oryza sativa |
| | | | oxidase) | 6663-6722 | |
| 354 | PHE0000020 | 15 | Emericella nidulans alxA | 2189-2442, 2492-2783, 2843-3352 | Emericella nidulans |
| 355 | PHE0000022 | 16 | corn AAP6-like | 96-1547 | Zea mays |
| 356 | PHE0000024 | 17 | corn unknown protein | 441-2390 | Zea mays |
| 357 | PHE0000025 | 18 | corn GRF1-like protein | 55-1470 | Zea mays |
| 358 | PHE0000026 | 19 | rice GRF1 | 193-1380 | Oryza sativa |
| 359 | PHE0000227 | 20 | soy omega-3 fatty acid | 138-1496 | Glycine max |
| | | | desaturase | | |
| 360 | PHE0000258 | 21 | AtFAD7 | 132-1472 | Arabidopsis thaliana |
| 361 | PHE0000259 | 22 | AtFAD8 | 61-1368 | Arabidopsis thaliana |
| 362 | PHE0000049 | 23 | rice phyA with corn phyC | 4626-6690, 6913-7729, 8011-8307, | Oryza sativa |
| | | | intron 1 | 8410-8617 | |
| 363 | PHE0000027 | 24 | sorghum phyA with corn | 238-3633 | Sorghum bicolor |
| | | | phyC intron 1 | | |
| 364 | PHE0000028 | 25 | rice phyB with corn phyC | 67-3582 | Oryza sativa |
| | | | intron 1 | | |
| 365 | PHE0000029 | 26 | sorghum phyB with corn | 429-2640, 3333-4140, 5819-6112, | Sorghum bicolor |
| | | | phyC intron 1 | 7491-7713 | |
| 366 | PHE0000030 | 27 | rice phyC with corn phyC | 1036-3100, 3205-4021, 4418-4711, | Oryza sativa |
| | | | intron 1 | 5272-5509 | |
| 367 | PHE0000031 | 28 | sorghum phyC with corn | 303-3710 | Sorghum bicolor |
| | | | phyC intron 1 | | |
| 368 | PHE0000032 | 29 | rice PF1 | 35-676 | Oryza sativa |
| 369 | PHE0000033 | 30 | rice GT2 | 58-2271 | Oryza sativa |
| 370 | PHE0000034 | 31 | Synechocystis biliverdin | 9-992 | Synechocystis sp. |
| | | | reductase | | PCC 6803 |
| 371 | PHE0000038 | 32 | corn cycD2.1 | 125-1156 | Zea mays |
| 372 | PHE0000039 | 33 | corn nph1 | 415-3150 | Zea mays |
| 373 | PHE0000040 | 34 | corn hemoglobin 1 | 172-669 | Zea mays |
| 374 | PHE0000043 | 35 | rice cyclin 2 | 148-1407 | Oryza sativa |
| 375 | PHE0000044 | 36 | rice cycC | 97-870 | Oryza sativa |
| 376 | PHE0000045 | 37 | rice cycB2 | 74-1336 | Oryza sativa |
| 377 | PHE0000046 | 38 | rice cycA1 | 97-1623 | Oryza sativa |
| 378 | PHE0000047 | 39 | rice cycB5 | 292-361, 1019-1347, 1447-1572, | Oryza sativa |
| | | | | 1657-1908, 2059-2217, | |
| | | | | 2315-2493, 3276-3432 | |
| 379 | PHE0000244 | 40 | corn SVP-like | 177-860 | Zea mays |
| 380 | PHE0000245 | 41 | corn SVP-like | 93-791 | Zea mays |
| 381 | PHE0000246 | 42 | soy SVP-like | 96-713 | Glycine max |
| 382 | PHE0000247 | 43 | soy jointless-like | 60-674 | Glycine max |
| 383 | PHE0000106 | 44 | corn cycA1 | 107-1633 | Zea mays |
| 384 | PHE0000050 | 45 | corn cycA2 | 107-1222 | Zea mays |
| 385 | PHE0000051 | 46 | corn cycB2 | 137-1408 | Zea mays |
| 386 | PHE0000052 | 47 | corn cycB5 | 82-1518 | Zea mays |
| 387 | PHE0000382 | 48 | LIB3279-180-C9_FLI- | 114-1385 | Zea mays |
| | | | maize cyclin III | | |
| 388 | PHE0000053 | 49 | corn cycB4 | 254-1579 | Zea mays |
| 389 | PHE0000054 | 50 | corn cycD3.2 | 220-1380 | Zea mays |
| 390 | PHE0000055 | 51 | corn cycDx.1 | 218-1180 | Zea mays |
| 391 | PHE0000056 | 52 | corn cycD1.1 | 288-1334 | Zea mays |
| 392 | PHE0000057 | 53 | corn mt NDK- | 60-725 | Zea mays |
| | | | LIB189022Q1E1E9 | | |
| 393 | PHE0000058 | 54 | corn cp NDK- | 103-816 | Zea mays |
| | | | 700479629 | | |
| 394 | PHE0000059 | 55 | corn NDK- | 49-495 | Zea mays |
| | | | LIB3597020Q1K6C3 | | |
| 395 | PHE0000060 | 56 | corn NDK-700241377 | 162-608 | Zea mays |
| 396 | PHE0000062 | 57 | sRAD54-with NLS | 437-3556 | Synechocystis sp. |
| | | | | | PCC 6803 |
| 397 | PHE0000063 | 58 | T4 endonuclease VII | 603-1148 | coliphage T4 |
| | | | (gp49)-with NLS | | |
| 398 | PHE0000064 | 59 | corn NDPK-fC- | 91-624 | Zea mays |
| | | | zmemLIB3957015Q1K6H6 | | |
| 399 | PHE0000065 | 60 | TOR1 | 302-7714 | Saccharomyces |
| | | | | | cerevisiae |
| 400 | PHE0000292 | 61 | corn eIF-5A | 85-564 | Zea mays |
| 401 | PHE0000067 | 62 | yeast eIF-5A | 569-1042 | Saccharomyces |
| | | | | | cerevisiae |
| 402 | PHE0000068 | 63 | yeast deoxyhypusine | 173-1336 | Saccharomyces |
| | | | synthase | | cerevisiae |
| 403 | PHE0000069 | 64 | yeast L5 | 987-1880 | Saccharomyces |
| | | | | | cerevisiae |
| 404 | PHE0000070 | 65 | yeast ornithine | 576-1976 | Saccharomyces |
| | | | decarboxylase | | cerevisiae |
| 405 | PHE0000071 | 66 | rice exportin 4-like | 501-750, 1257-1417, 1735-1800, | Oryza sativa |
| | | | | 3104-3218, 3318-3427, | |
| | | | | 3525-3620, 7587-7744, | |
| | | | | 7828-7915, 8565-8669, | |
| | | | | 8774-8878, 9421-9450, | |
| | | | | 9544-9656, 9732-9819, | |
| | | | | 9961-10180, 11034-11164, | |
| | | | | 12058-12204, 12770-12898, | |
| | | | | 12975-13073, 13221-13259, | |
| | | | | 14674-14823 | |
| 406 | PHE0000072 | 67 | yeast S- | 415-1605 | Saccharomyces |
| | | | adenosylmethionine | | cerevisiae |
| | | | decarboxylase | | |
| 407 | PHE0000073 | 68 | corn S- | 268-1365 | Zea mays |
| | | | adenosylmethionine | | |
| | | | decarboxylase 1 | | |
| 408 | PHE0000074 | 69 | corn S- | 581-1780 | Zea mays |
| | | | adenosylmethionine | | |
| | | | decarboxylase 2 | | |
| 409 | PHE0000075 | 70 | retinoblastoma-related | 37-2634 | Zea mays |
| | | | protein 1 | | |
| 410 | PHE0000076 | 71 | C1 protein | 49-843 | Wheat dwarf virus |
| 411 | PHE0000077 | 72 | yeast flavohemoglobin- | 1695-2894 | Saccharomyces |
| | | | mitochondrial | | cerevisiae |
| 412 | PHE0000009 | 73 | Arabidopsis G975 | 58-654 | Arabidopsis thaliana |
| 413 | PHE0000079 | 74 | CUT1 | 372-1082, 1176-1946 | Oryza sativa |
| 414 | PHE0000082 | 75 | corn cycB3 | 88-1425 | Zea mays |
| 415 | PHE0000083 | 76 | PDR5 | 1552-6087 | Saccharomyces |
| | | | | | cerevisiae |
| 416 | PHE0000084 | 77 | rice cyclin H | 235-1227 | Oryza sativa |
| 417 | PHE0000085 | 78 | rice cdc2+/CDC28- | 173-1447 | Oryza sativa |
| | | | related protein kinase | | |
| 418 | PHE0000086 | 79 | Cdk-activating kinase 1 | 14-1240 | Glycine max |
| 419 | PHE0000089 | 80 | CHL1 | 85-1857 | Arabidopsis thaliana |
| 420 | PHE0000090 | 81 | NTR1 | 144-1898 | Oryza sativa |
| 421 | PHE0000091 | 82 | Zm SET domain 2 | 101-1009 | Zea mays |
| 422 | PHE0000092 | 83 | Zm SET domain 1 | 528-1544 | Zea mays |
| 423 | PHE0000095 | 84 | HSF1 | 1017-3518 | Saccharomyces |
| | | | | | cerevisiae |
| 424 | PHE0000096 | 85 | Zm HSP101 | 436-1773, 1878-2159, 2281-2621, | Zea mays |
| | | | | 2711-2990, 3079-3276, | |
| | | | | 3371-3670 | |
| 425 | PHE0000098 | 86 | E. coli clpB | 557-3130 | Escherichia coli |
| 426 | PHE0000099 | 87 | Synechocystis clpB | 316-2931 | Synechocystis sp. |
| | | | | | PCC 6803 |
| 427 | PHE0000100 | 88 | Xylella clpB | 187-2769 | Xylella fastidiosa |
| 428 | PHE0000101 | 89 | corn cycD3.1 | 250-1422 | Zea mays |
| 429 | PHE0000102 | 90 | AnFPPS (farnesyl- | 146-1186 | Emericella nidulans |
| | | | pyrophosphate | | |
| | | | synthetase) | | |
| 430 | PHE0000103 | 91 | OsFPPS | 42-1103 | Oryza sativa |
| 431 | PHE0000104 | 92 | 700331819_FLI-corn | 313-1377 | Zea mays |
| | | | FPPS 2 | | |
| 432 | PHE0000105 | 93 | corn cycD1.2 | 229-1275 | Zea mays |
| 433 | PHE0000107 | 94 | corn cycD1.3 | 206-1252 | Zea mays |
| 434 | PHE0000108 | 95 | ASH1 | 61-801 | Arabidopsis thaliana |
| 435 | PHE0000109 | 96 | rice ASH1-like1 | 136-1008 | Oryza sativa |
| 436 | PHE0000110 | 97 | rice MtN2-like | 425-464, 546-582, 672-783, | Oryza sativa |
| | | | | 812-898, 988-1149, 1556-1675, | |
| | | | | 1776-1952 | |
| 437 | PHE0000111 | 98 | PAS domain kinase | 358-2613 | Zea mays |
| 438 | PHE0000114 | 99 | Su(var) 3-9-like | 71-814 | Zea mays |
| 439 | PHE0000115 | 100 | Receiver domain (RR3- | 277-1002 | Zea mays |
| | | | like) 7 | | |
| 440 | PHE0000116 | 101 | Receiver domain | 188-2245 | Zea mays |
| | | | (ARR2-like) 1 | | |
| 441 | PHE0000117 | 102 | Receiver domain (TOC1- | 112-2238 | Zea mays |
| | | | like) 2 | | |
| 442 | PHE0000118 | 103 | Receiver domain (TOC1- | 84-1976 | Zea mays |
| | | | like) 3 | | |
| 443 | PHE0000119 | 104 | Receiver domain (ARR2- | 39-1931 | Zea mays |
| | | | like) 4 | | |
| 444 | PHE0000120 | 105 | Receiver domain (RR11- | 61-1812 | Zea mays |
| | | | like) 5 | | |
| 445 | PHE0000121 | 106 | Receiver domain (RR3- | 391-1116 | Zea mays |
| | | | like) 6 | | |
| 446 | PHE0000122 | 107 | Receiver domain (RR3- | 335-1066 | Zea mays |
| | | | like) 8 | | |
| 447 | PHE0000123 | 108 | Receiver domain 9 | 55-759 | Zea mays |
| 448 | PHE0000124 | 109 | ZmRR2 | 154-624 | Zea mays |
| 449 | PHE0000125 | 110 | Receiver domain (TOC1- | 374-722, 791-2019 | Zea mays |
| | | | like) 10 | | |
| 450 | PHE0000126 | 111 | corn HY5-like | 32-541 | Zea mays |
| 451 | PHE0000127 | 112 | scarecrow 1 (PAT1-like) | 295-1929 | Zea mays |
| 452 | PHE0000128 | 113 | scarecrow 2 | 153-1934 | Zea mays |
| 453 | PHE0000133 | 114 | G protein b subunit | 90-1229 | Zea mays |
| 454 | PHE0000152 | 115 | 14-3-3-like protein 2 | 85-861 | Glycine max |
| 455 | PHE0000153 | 116 | 14-3-3-like protein D | 42-824 | Glycine max |
| 456 | PHE0000154 | 117 | 14-3-3 protein 1 | 49-834 | Glycine max |
| 457 | PHE0000155 | 118 | Rice FAP1-like protein | 654-1862, 2310-2426, 3407-3492, | Oryza sativa |
| | | | | 3590-3752, 3845-3890, | |
| | | | | 4476-4522, 4985-5191, | |
| | | | | 5306-5392, 5473-5640 | |
| 458 | PHE0000156 | 119 | rice TAP42-like | 199-1338 | Oryza sativa |
| 459 | PHE0000158 | 120 | BMH1 | 79-882 | Saccharomyces |
| | | | | | cerevisiae |
| 460 | PHE0000159 | 121 | rice chloroplastic | 41-1261 | Oryza sativa |
| | | | fructose-1,6- | | |
| | | | bisphosphatase | | |
| 461 | PHE0000160 | 122 | E. coli fructose-1,6- | 208-1206 | Escherichia coli |
| | | | bisphosphatase | | |
| 462 | PHE0000161 | 123 | Synechocystis fructose- | 1-1164 | Synechocystis sp. |
| | | | 1,6-bisphosphatase F-I | | PCC 6803 |
| 463 | PHE0000162 | 124 | Synechocystis fructose- | 480-1523 | Synechocystis sp. |
| | | | 1,6-bisphosphatase F-II | | PCC 6803 |
| 464 | PHE0000164 | 125 | Yeast RPT5 | 883-2187 | Saccharomyces |
| | | | | | cerevisiae |
| 465 | PHE0000165 | 126 | Yeast RRP5 | 331-5520 | Saccharomyces |
| | | | | | cerevisiae |
| 466 | PHE0000166 | 127 | Rice CBP-like gene | 277-436, 479-1524, 1790-2065, | Oryza sativa |
| | | | | 2150-2425, 3134-3262, | |
| | | | | 3380-3580, 3683-3825, | |
| | | | | 3905-4190, 4294-4433, | |
| | | | | 4711-4789, 4874-4929, | |
| | | | | 5754-5946 | |
| 467 | PHE0000167 | 128 | rice BAB09754 | 616-903, 1848-1940, 2046-2165, | Oryza sativa |
| | | | | 2254-2355, 2443-2693, | |
| | | | | 2849-2994, 3165-3363, | |
| | | | | 3475-4141, 4438-4770, | |
| | | | | 5028-5309 | |
| 468 | PHE0000168 | 129 | LIB3061-001-H7_FLI | 309-1037 | Zea mays |
| 469 | PHE0000169 | 130 | maize p23 | 106-708 | Zea mays |
| 470 | PHE0000170 | 131 | maize cyclophilin | 99-1757 | Zea mays |
| 471 | PHE0000172 | 132 | yeast SIT1 | 361-2130 | Saccharomyces |
| | | | | | cerevisiae |
| 472 | PHE0000173 | 133 | yeast CNS1 | 762-1919 | Saccharomyces |
| | | | | | cerevisiae |
| 473 | PHE0000176 | 134 | RNAse S | 85-771 | Zea mays |
| 474 | PHE0000177 | 135 | maize ecto-apyrase | 210-2312 | Zea mays |
| 475 | PHE0000178 | 136 | PHO5 | 1-1404 | Saccharomyces |
| | | | | | cerevisiae |
| 476 | PHE0000179 | 137 | high affinity phosphate | 105-1703 | Glycine max |
| | | | translocator | | |
| 477 | PHE0000180 | 138 | high affinity phosphate | 128-1750 | Zea mays |
| | | | translocator | | |
| 478 | PHE0000181 | 139 | Xylella citrate synthase | 256-1545 | Xylella fastidiosa |
| 479 | PHE0000182 | 140 | E. coli citrate synthase | 309-1592 | Escherichia coli |
| 480 | PHE0000183 | 141 | rice citrate synthase | 105-1523 | Oryza sativa |
| 481 | PHE0000184 | 142 | citrate synthase | 56-1564 | Zea mays |
| 482 | PHE0000185 | 143 | citrate synthase | 153-1691 | Glycine max |
| 483 | PHE0000186 | 144 | maize ferritin 2 | 3-758 | Zea mays |
| 484 | PHE0000187 | 145 | maize ferritin 1 | 34-795 | Zea mays |
| 485 | PHE0000188 | 146 | E. coli cytoplasmic | 245-742 | Escherichia coli |
| | | | ferritin | | |
| 486 | PHE0000190 | 147 | corn LEA3 | 171-755 | Zea mays |
| 487 | PHE0000192 | 148 | soy HSF | 23-1114 | Glycine max |
| 488 | PHE0000193 | 149 | soy HSF | 93-992 | Glycine max |
| 489 | PHE0000204 | 150 | deoxyhypusine synthase | 26-1129 | Glycine max |
| 490 | PHE0000219 | 151 | thylakoid carbonic | 62-994 | Chlamydomonas |
| | | | anhydrase, cah3 | | reinhardtii |
| 491 | PHE0000216 | 152 | thylakoid carbonic | 49-843 | Nostoc PCC7120 |
| | | | anhydrase, ecaA | | |
| 492 | PHE0000217 | 153 | Chlamydomonas | 156-1232 | Chlamydomonas |
| | | | reinhardtii envelope | | reinhardtii |
| | | | protein LIP-36G1 | | |
| 493 | PHE0000218 | 154 | psbO transit | 271-1674 | Synechococcus sp. |
| | | | peptide::Synechococcus | | PCC 7942 |
| | | | sp. PCC 7942 ictB | | |
| 494 | PHE0000220 | 155 | corn RNase PH | 86-805 | Zea mays |
| 495 | PHE0000221 | 156 | SKI2 | 1351-5211 | Saccharomyces |
| | | | | | cerevisiae |
| 496 | PHE0000222 | 157 | SKI3 | 793-5091 | Saccharomyces |
| | | | | | cerevisiae |
| 497 | PHE0000223 | 158 | SKI4 | 323-1201 | Saccharomyces |
| | | | | | cerevisiae |
| 527 | PHE0000262 | 188 | cytochrome P450-like | 29-1495 | Zea mays |
| | | | protein | | |
| 528 | PHE0000263 | 189 | cytochrome P450 | 141-1637 | Zea mays |
| 529 | PHE0000264 | 190 | cytochrome P450-like | 104-1657 | Zea mays |
| 530 | PHE0000265 | 191 | CYP90 protein | 81-1589 | Zea mays |
| 531 | PHE0000266 | 192 | cytochrome P450 | 92-1648 | Zea mays |
| | | | DWARF3 | | |
| 532 | PHE0000267 | 193 | cytochrome P450 | 134-1543 | Zea mays |
| 533 | PHE0000268 | 194 | rice receptor protein | 183-476, 706-735, 2796-6734 | Oryza sativa |
| | | | kinase | | |
| 534 | PHE0000269 | 195 | soy E2F-like | 80-1117 | Glycine max |
| 535 | PHE0000270 | 196 | nuclear matrix constituent | 243-3371 | Zea mays |
| | | | protein | | |
| 536 | PHE0000271 | 197 | OsE2F1 | 93-1403 | Oryza sativa |
| 537 | PHE0000272 | 198 | corn GCR1 | 74-1036 | Zea mays |
| 538 | PHE0000273 | 199 | soy mlo-like | 15-1532 | Glycine max |
| 539 | PHE0000274 | 200 | soy mlo-like | 48-1841 | Glycine max |
| 540 | PHE0000275 | 201 | rice G alpha 1 | 106-1248 | Oryza sativa |
| 541 | PHE0000276 | 202 | soy G-gamma subunit | 210-536 | Glycine max |
| 542 | PHE0000277 | 203 | wheat G28-like | 65-877 | Triticum aestivum |
| 543 | PHE0000279 | 204 | sorghum proline | 16-1341 | Sorghum bicolor |
| | | | permease | | |
| 544 | PHE0000280 | 205 | rice AA transporter | 61-1485 | Oryza sativa |
| 545 | PHE0000282 | 206 | SET-domain protein-like | 478-3045 | Zea mays |
| 546 | PHE0000283 | 207 | scarecrow 6 | 520-2145 | Zea mays |
| 547 | PHE0000284 | 208 | menage a trois-like | 164-745 | Zea mays |
| 548 | PHE0000286 | 209 | oryzacystatin | 108-527 | Oryza sativa |
| 549 | PHE0000287 | 210 | Similar to cysteine | 18-767 | Oryza sativa |
| | | | proteinase inhibitor | | |
| 550 | PHE0000288 | 211 | cysteine proteinase | 135-461 | Sorghum bicobor |
| | | | inhibitor | | |
| 551 | PHE0000289 | 212 | Zm-GRF1 (GA | 96-1202 | Zea mays |
| | | | responsive factor) | | |
| 552 | PHE0000290 | 213 | ZmSE001-like | 253-2115 | Zea mays |
| 553 | PHE0000291 | 214 | deoxyhypusine synthase | 54-1163 | Zea mays |
| 554 | PHE0000293 | 215 | gibberellin response | 131-2020 | Zea mays |
| | | | modulator | | |
| 555 | PHE0000294 | 216 | scarecrow-like protein | 266-1948 | Zea mays |
| 556 | PHE0000295 | 217 | ubiquitin-conjugating | 114-599 | Zea mays |
| | | | enzyme-like protein | | |
| 557 | PHE0000296 | 218 | unknown protein | 90-785 | Zea mays |
| | | | recognized by PF01169 | | |
| 558 | PHE0000297 | 219 | 26S protease regulatory | 57-1343 | Oryza sativa |
| | | | subunit 6A homolog | | |
| 559 | PHE0000298 | 220 | rice p23 co-chaperone | 68-706 | Oryza sativa |
| 560 | PHE0000299 | 221 | corn p23 co-chaperone | 71-565 | Zea mays |
| 561 | PHE0000300 | 222 | rice p23 co-chaperone | 124-642 | Oryza sativa |
| 562 | PHE0000301 | 223 | corn p23 co-chaperone | 90-617 | Zea mays |
| 563 | PHE0000302 | 224 | putative purple acid | 22-1038 | Oryza sativa |
| | | | phosphatase precursor | | |
| 564 | PHE0000303 | 225 | acid phosphatase type 5 | 143-1186 | Zea mays |
| 565 | PHE0000304 | 226 | aleurone ribonuclease | 47-814 | Oryza sativa |
| 566 | PHE0000305 | 227 | putative ribonuclease | 55-888 | Zea mays |
| 567 | PHE0000306 | 228 | S-like RNase | 15-770 | Zea mays |
| 568 | PHE0000307 | 229 | ribonuclease | 95-781 | Zea mays |
| 569 | PHE0000308 | 230 | helix-loop-helix protein | 202-756 | Zea mays |
| | | | (PIF3-like) | | |
| 570 | PHE0000309 | 231 | SKI4-like protein | 36-632 | Zea mays |
| 571 | PHE0000310 | 232 | putative 3 | 238-1098 | Zea mays |
| | | | exoribonuclease | | |
| 572 | PHE0000311 | 233 | GF14-c protein | 81-848 | Oryza sativa |
| 573 | PHE0000312 | 234 | 14-3-3-like protein | 6-785 | Oryza sativa |
| 574 | PHE0000313 | 235 | rice eIF-(iso)4F | 96-713 | Oryza sativa |
| 575 | PHE0000314 | 236 | rice eIF-4F | 46-726 | Oryza sativa |
| 576 | PHE0000315 | 237 | sorghum eIF-(iso)4F | 78-707 | Sorghum bicolor |
| 577 | PHE0000316 | 238 | sorghum eIF-4F | 9-668 | Sorghum bicolor |
| 578 | PHE0000317 | 239 | rice FIP37-like | 73-1128 | Oryza sativa |
| 579 | PHE0000318 | 240 | scarecrow 17 | 441-2102 | Zea mays |
| 580 | PHE0000322 | 241 | maize catalase-1 | 208-1683 | Zea mays |
| 581 | PHE0000323 | 242 | maize catalase-3 | 30-1511 | Zea mays |
| 582 | PHE0000324 | 243 | ascorbate peroxidase | 197-1063 | Zea mays |
| 583 | PHE0000325 | 244 | corn GDI | 57-1397 | Zea mays |
| 584 | PHE0000326 | 245 | soy GDI | 45-1418 | Glycine max |
| 585 | PHE0000327 | 246 | corn rho GDI | 463-1203 | Zea mays |
| 586 | PHE0000328 | 247 | basic blue copper protein | 13-408 | Zea mays |
| 587 | PHE0000329 | 248 | plantacyanin | 109-489 | Zea mays |
| 588 | PHE0000330 | 249 | basic blue copper protein | 83-463 | Glycine max |
| 589 | PHE0000331 | 250 | Similar to blue copper | 323-868 | Zea mays |
| | | | protein precursor | | |
| 590 | PHE0000332 | 251 | lamin | 62-646 | Zea mays |
| 591 | PHE0000333 | 252 | fC-zmfl700551169a-allyl | 56-1105 | Zea mays |
| | | | alcohol dehydrogenase | | |
| 592 | PHE0000334 | 253 | allyl alcohol | 103-1128 | Glycine max |
| | | | dehydrogenase | | |
| 593 | PHE0000335 | 254 | allyl alcohol | 6-1079 | Zea mays |
| | | | dehydrogenase | | |
| 594 | PHE0000336 | 255 | quinone oxidoreductase | 47-1051 | Zea mays |
| 595 | PHE0000337 | 256 | E. nidulans cysA- | 384-1961 | Emericella nidulans |
| | | | AF029885 | | |
| 596 | PHE0000338 | 257 | BAA18167- | 801-1547 | Synechocystis sp. |
| | | | Synechocystis cysE | | PCC 6803 |
| 597 | PHE0000339 | 258 | Synechocystis thiol- | 36-638 | Synechocystis sp. |
| | | | specific antioxidant | | PCC 6803 |
| | | | protein-BAA10136 | | |
| 598 | PHE0000340 | 259 | yeast TSA2-NP_010741 | 108-698 | Saccharomyces |
| | | | | | cerevisiae |
| 599 | PHE0000341 | 260 | yeast mTPx-Z35825 | 730-1512 | Saccharomyces |
| | | | | | cerevisiae |
| 600 | PHE0000343 | 261 | yeast TPx III- | 657-1187 | Saccharomyces |
| | | | NP_013210 | | cerevisiae |
| 601 | PHE0000345 | 262 | soy putative 2-cys | 160-939 | Glycine max |
| | | | peroxiredoxin | | |
| 602 | PHE0000346 | 263 | soy peroxiredoxin | 104-745 | Glycine max |
| 603 | PHE0000347 | 264 | heat shock protein 26, | 117-836 | Zea mays |
| | | | plastid-localized | | |
| 604 | PHE0000349 | 265 | heat shock protein | 112-735 | Zea mays |
| 605 | PHE0000350 | 266 | low molecular weight | 28-690 | Zea mays |
| | | | heat shock protein | | |
| 606 | PHE0000351 | 267 | 18 kDa heat shock protein | 103-597 | Zea mays |
| 607 | PHE0000352 | 268 | heat shock protein 16.9 | 229-690 | Zea mays |
| 608 | PHE0000353 | 269 | HSP21-like protein | 73-696 | Zea mays |
| 609 | PHE0000354 | 270 | Opt1p-NP_012323 | 508-2904 | Saccharomyces |
| | | | | | cerevisiae |
| 610 | PHE0000355 | 271 | SVCT2-like permease | 220-1779 | Zea mays |
| 611 | PHE0000356 | 272 | SVCT2-like permease | 34-1632 | Zea mays |
| 612 | PHE0000357 | 273 | maize tubby-like | 519-1958 | Zea mays |
| 613 | PHE0000358 | 274 | maize tubby-like | 517-1269 | Zea mays |
| 614 | PHE0000359 | 275 | soy HMG CoA synthase | 80-1441 | Glycine max |
| 615 | PHE0000360 | 276 | yeast HMGS-X96617 | 220-1695 | Saccharomyces |
| | | | | | cerevisiae |
| 616 | PHE0000361 | 277 | PAT1-like scarecrow 9 | 191-1900 | Zea mays |
| 617 | PHE0000362 | 278 | CDC28-related protein | 198-1484 | Zea mays |
| | | | kinase | | |
| 618 | PHE0000385 | 279 | H+ transporting ATPase | 176-2836 | Zea mays |
| 619 | PHE0000386 | 280 | cation-transporting | 222-2168 | Zea mays |
| | | | ATPase | | |
| 620 | PHE0000387 | 281 | yeast DRS2 (ALA1-like)- | 170-4237 | Saccharomyces |
| | | | L01795 | | cerevisiae |
| 621 | PHE0000388 | 282 | S. pombe ALA1-like- | 56-3832 | Schizosaccharomyces |
| | | | CAA21897 | | pombe |
| 622 | PHE0000389 | 283 | rice ALA1-like 1- | 47-1538, 1619-1925, 3116-3824, | Oryza sativa |
| | | | BAA89544 | 3920-4043, 4143-4362, | |
| | | | | 4590-5048, 5937-6153 | |
| 623 | PHE0000390 | 284 | rice chloroplastic | 136-1311 | Oryza sativa |
| | | | sedoheptulose-1,7- | | |
| | | | bisphosphatase- | | |
| 624 | PHE0000391 | 285 | rice cytosolic fructose- | 171-1187 | Oryza sativa |
| | | | 1,6-bisphosphatase | | |
| 625 | PHE0000392 | 286 | Wheat sedoheptulose-1,7- | 14-1192 | Triticum aestivum |
| | | | bisphosphatase | | |
| 626 | PHE0000394 | 287 | sedoheptulose-1,7- | 90-1238 | Chlorella sorokiniana |
| | | | bisphosphatase | | |
| 627 | PHE0000395 | 288 | soy phantastica | 275-1345 | Glycine max |
| 628 | PHE0000396 | 289 | soy phantastica 2 | 178-1260 | Glycine max |
| 629 | PHE0000397 | 290 | maize rough sheath 1 | 92-1144 | Zea mays |
| 630 | PHE0000398 | 291 | soy lg3-like 1 | 103-1026 | Glycine max |
| 631 | PHE0000399 | 292 | soy rough sheath1-like 1 | 144-1076 | Glycine max |
| 632 | PHE0000400 | 293 | soy G559-like | 301-1560 | Glycine max |
| 633 | PHE0000401 | 294 | soy G1635-like 1 | 28-888 | Glycine max |
| 634 | PHE0000402 | 295 | rice amino acid | 89-1426 | Oryza sativa |
| | | | transporter-like protein | | |
| 635 | PHE0000403 | 296 | corn amino acid permease | 116-1453 | Zea mays |
| 636 | PHE0000404 | 297 | rice proline transport | 313-1731 | Oryza sativa |
| | | | protein | | |
| 637 | PHE0000412 | 298 | corn monosaccharide | 75-1643 | Zea mays |
| | | | transporter 1 | | |
| 638 | PHE0000413 | 299 | soy monosaccharide | 132-1685 | Glycine max |
| | | | transporter 3 | | |
| 639 | PHE0000414 | 300 | corn monosaccharide | 141-1670 | Zea mays |
| | | | transporter 3 | | |
| 640 | PHE0000415 | 301 | soy monosaccharide | 160-1899 | Glycine max |
| | | | transporter 1 | | |
| 641 | PHE0000416 | 302 | corn monosaccharide | 74-1690 | Zea mays |
| | | | transporter 6 | | |
| 642 | PHE0000418 | 303 | corn monosaccharide | 146-1744 | Zea mays |
| | | | transporter 4 | | |
| 643 | PHE0000419 | 304 | soy monosaccharide | 63-1505 | Glycine max |
| | | | transporter 2 | | |
| 644 | PHE0000420 | 305 | soy sucrose transporter | 63-1595 | Glycine max |
| 645 | PHE0000421 | 306 | corn sucrose transporter 2 | 76-1599 | Zea mays |
| 646 | PHE0000422 | 307 | corn monosaccharide | 201-1763 | Zea mays |
| | | | transporter 8 | | |
| 647 | PHE0000423 | 308 | corn monosaccharide | 93-1634 | Zea mays |
| | | | transporter 7 | | |
| 648 | PHE0000425 | 309 | soy isoflavone synthase | 45-1607 | Glycine max |
| 649 | PHE0000426 | 310 | soy ttg1-like 2 | 52-1059 | Glycine max |
| 650 | PHE0000427 | 311 | GATES-corn SPA1-like 1 | 227-3139 | Zea mays |
| 651 | PHE0000428 | 312 | corn PIF3-like | 173-856 | Zea mays |
| 652 | PHE0000429 | 313 | soy Athb-2-like 1 | 78-932 | Glycine max |
| 653 | PHE0000430 | 314 | corn SUB1-like 1 | 44-1954 | Zea mays |
| 654 | PHE0000431 | 315 | soy GH3 protein | 42-1820 | Glycine max |
| 655 | PHE0000432 | 316 | corn 12- | 128-1240 | Zea mays |
| | | | oxophytodienoate | | |
| | | | reductase 1 | | |
| 656 | PHE0000433 | 317 | corn 12-oxo- | 166-1242 | Zea mays |
| | | | phytodienoate reductase- | | |
| | | | like 3 | | |
| 657 | PHE0000434 | 318 | corn 12- | 92-1210 | Zea mays |
| | | | oxophytodienoate | | |
| | | | reductase-like 4 | | |
| 658 | PHE0000435 | 319 | corn hydroperoxide lyase | 83-1594 | Zea mays |
| 659 | PHE0000436 | 320 | rice cns1-like | 121-1242 | Oryza sativa |
| 660 | PHE0000437 | 321 | corn HCH1-like 1 | 42-1100 | Zea mays |
| 661 | PHE0000438 | 322 | corn HOP-like 1 | 88-1830 | Zea mays |
| 662 | PHE0000439 | 323 | corn HOP-like 2 | 65-1261 | Zea mays |
| 663 | PHE0000440 | 324 | rice CHIP-like 1 | 121-939 | Oryza sativa |
| 664 | PHE0000441 | 325 | corn CHIP-like 2 | 115-939 | Zea mays |
| 665 | PHE0000451 | 326 | wheat SVP-like 1 | 149-736 | Triticum aestivum |
| 666 | PHE0000452 | 327 | corn SVP-like 3 | 75-749 | Zea mays |
| 667 | PHE0000453 | 328 | corn SVP-like 5 | 304-774, 956-1219 | Zea mays |
| 668 | PHE0000454 | 329 | fC-zmhuLIB3062-044- | 113-853 | Zea mays |
| | | | Q1-K1-B8 | | |
| 669 | PHE0000455 | 330 | corn E4/E8 binding | 253-2259 | Zea mays |
| | | | protein-like | | |
| 670 | PHE0000469 | 331 | yeast YKL091c-Z28091 | 110-1042 | Saccharomyces |
| | | | | | cerevisiae |
| 671 | PHE0000470 | 332 | corn Ssh1-like protein 1 | 57-1037 | Zea mays |
| 672 | PHE0000471 | 333 | corn Ssh1-like protein 3 | 89-841 | Zea mays |
| 673 | PHE0000472 | 334 | corn Ssh1-like protein 4 | 309-1196 | Zea mays |
| 674 | PHE0000473 | 335 | soy Ssh1-like protein 2 | 209-976 | Glycine max |
| | | | [ssh2] | | |
| 675 | PHE0000484 | 336 | soy JMT-like protien 1 | 26-1135 | Glycine max |
| 676 | PHE0000485 | 337 | corn JMT-like protein 1 | 39-1184 | Zea mays |
| 677 | PHE0000486 | 338 | corn JMT-like protein 2 | 63-1208 | Zea mays |
| 678 | PHE0000017 | 339 | corn AAA-ATPase 1 | 184-2214 | Zea mays |

Selection Methods for Transgenic Plants with Enhanced Agronomic Trait

[0065] Within a population of transgenic plants regenerated from plant cells transformed with the recombinant DNA many plants that survive to fertile transgenic plants that produce seeds and progeny plants will not exhibit an enhanced agronomic trait. Selection from the population is necessary to identify one or more transgenic plant cells that can provide plants with the enhanced trait. Transgenic plants having enhanced traits are selected from populations of plants regenerated or derived from plant cells transformed as described herein by evaluating the plants in a variety of assays to detect an enhanced trait, e.g. enhanced water use efficiency, enhanced cold tolerance, increased yield, enhanced nitrogen use efficiency, enhanced seed protein and enhanced seed oil. These assays also may take many forms including, but not limited to, direct screening for the trait in a greenhouse or field trial or by screening for a surrogate trait. Such analyses can be directed to detecting changes in the chemical composition, biomass, physiological properties, morphology of the plant. Changes in chemical compositions such as nutritional composition of grain can be detected by analysis of the seed composition and content of protein, free amino acids, oil, free fatty acids, starch or tocopherols. Changes in biomass characteristics can be made on greenhouse or field grown plants and can include plant height, stem diameter, root and shoot dry weights; and, for corn plants, ear length and diameter. Changes in physiological properties can be identified by evaluating responses to stress conditions, for example assays using imposed stress conditions such as water deficit, nitrogen deficiency, cold growing conditions, pathogen or insect attack or light deficiency, or increased plant density. Changes in morphology can be measured by visual observation of tendency of a transformed plant with an enhanced agronomic trait to also appear to be a normal plant as compared to changes toward bushy, taller, thicker, narrower leaves, striped leaves, knotted trait, chlorosis, albino, anthocyanin production, or altered tassels, ears or roots. Other selection properties include days to pollen shed, days to silking, leaf extension rate, chlorophyll content, leaf temperature, stand, seedling vigor, internode length, plant height, leaf number, leaf area, tillering, brace roots, stay green, stalk lodging, root lodging, plant health, barreness/prolificacy, green snap, and pest resistance. In addition, phenotypic characteristics of harvested grain may be evaluated, including number of kernels per row on the ear, number of rows of kernels on the ear, kernel abortion, kernel weight, kernel size, kernel density and physical grain quality. Although the plant cells and methods of this invention can be applied to any plant cell, plant, seed or pollen, e.g. any fruit, vegetable, grass, tree or ornamental plant, the various aspects of the invention are preferably applied to corn, soybean, cotton, canola, alfalfa, wheat and rice plants.

[0066] The following examples are included to demonstrate aspects of the invention, those of skill in the art should, in light of the present disclosure, appreciate that many changes can be made in the specific aspects which are disclosed and still obtain a like or similar results without departing from the spirit and scope of the invention.

### EXAMPLES

### Example 1

### Plant Expression Constructs

[0067] This example illustrates the construction of plasmids for transferring recombinant DNA into plant cells which can be regenerated into transgenic plants of this invention

### A. Plant Expression Constructs for Corn Transformation

[0068] A GATEWAY™ Destination (Invitrogen Life Technologies, Carlsbad, Calif.) plant expression vector, pMON65154, is constructed for use in preparation of constructs comprising recombinant polynucleotides for corn transformation. The elements of the expression vector are summarized in Table 3 below. Generally, pMON65154 comprises a selectable marker expression cassette comprising a Cauliflower Mosaic Virus 35S promoter operably linked to a gene encoding neomycin phosphotransferase II (nptIII). The 3′ region of the selectable marker expression cassette comprises the 3′ region of the Agrobacterium tumefaciense nopaline synthase gene (nos) followed 3′ by the 3′ region of the potato proteinase inhibitor II (pinII) gene. The plasmid pMON 65154 further comprises a plant expression cassette into which a gene of interest may be inserted using GATEWAY™ cloning methods. The GATEWAY™ cloning cassette is flanked 5′ by a rice actin 1 promoter, exon and intron and flanked 3′ by the 3′ region of the potato pinII gene. Using GATEWAY™ methods, the cloning cassette may be replaced with a gene of interest. The vector pMON65154, and derivatives thereof comprising a gene of interest, are particularly useful in methods of plant transformation via direct DNA delivery, such as microprojectile bombardment.

TABLE 3
Elements of Plasmid pMON65154

| FUNCTION | ELEMENT | REFERENCE |
|---|---|---|
| Plant gene of interest | Rice actin 1 promoter | U.S. Pat. No. 5,641,876 |
| expression cassette | Rice actin 1 exon 1, intron 1 | U.S. Pat. No. 5,641,876 |
| | enhancer | |
| Gene of interest insertion | AttR1 | GATEWAY ™ Cloning Technology |
| site | | Instruction Manual |
| | CmR gene | GATEWAY ™ Cloning Technology |
| | | Instruction Manual |
| | ccdA, ccdB genes | GATEWAY ™ Cloning Technology |
| | | Instruction Manual |
| | attR2 | GATEWAY ™ Cloning Technology |
| | | Instruction Manual |
| Plant gene of interest | Potato pinII 3′ region | An et al. (1989) Plant Cell 1: 115-122 |
| expression cassette | | |
| Plant selectable marker | CaMV 35S promoter | U.S. Pat. No. 5,858,742 |
| expression cassette | nptII selectable marker | U.S. Pat. No. 5,858,742 |
| | nos 3′ region | U.S. Pat. No. 5,858,742 |
| | PinII 3′ region | An et al. (1989) Plant Cell 1: 115-122 |
| Maintenance in E. coli | ColE1 origin of replication | |
| | F1 origin of replication | |
| | Bla ampicillin resistance | |

[0069] A similar plasmid vector, pMON72472, is constructed for use in Agrobacterium mediated methods of plant transformation. pMON72472 comprises the gene of interest plant expression cassette, GATEWAY™ cloning, and plant selectable marker expression cassettes present in pMON65154. In addition, left and right T-DNA border sequences from Agrobacterium are added to the plasmid (Zambryski et al. (1982)). The right border sequence is located 5′ to the rice actin 1 promoter and the left border sequence is located 3′ to the pinII 3′ sequence situated 3′ to the nptII gene. Furthermore, pMON72472 comprises a plasmid backbone to facilitate replication of the plasmid in both E. coli and Agrobacterium tumefaciens. The backbone has an oriV wide host range origin of DNA replication functional in Agrobacterium, a pBR322 origin of replication functional in E. coli, and a spectinomycin/stretptomycin resistance gene for selection in both E. coli and Agrobacterium.

[0070] Vectors similar to those described above may be constructed for use in Agrobacterium or microprojectile bombardment maize transformation systems where the rice actin 1 promoter in the plant expression cassette portion is replaced with other desirable promoters including, but not limited to a corn globulin 1 promoter, a maize oleosin promoter, a glutelin 1 promoter, an aldolase promoter, a zein Z27 promoter, a pyruvate orthophosphate dikinase (PPDK) promoter, a a soybean 7S alpha promoter, a peroxiredoxin antioxidant (Per1) promoter and a CaMV 35S promoter. Protein coding segments are amplified by PCR prior to insertion into vectors such as described above. Primers for PCR amplification can be designed at or near the start and stop codons of the coding sequence, in order to eliminate most of the 5′ and 3′ untranslated regions. For GATEWAY cloning methods, PCR products are tailed with attB1 and attB2 sequences, purified then recombined into a destination vectors to produce an expression vector for use in transformation.

[0071] Another base corn plant transformation vector pMON93039, as set forth in SEQ ID NO: 24150, illustrated in Table 4 and FIG. 2, was fabricated for use in preparing recombinant DNA for Agrobacterium-mediated transformation into corn tissue.

TABLE 4

| | | | Coordinates of SEQ |
|---|---|---|---|
| function | Name | Annotation | ID NO: 24150 |
| Agrobacterium | B-AGRtu.right border | Agro right border sequence, | 11364-11720 |
| T-DNA transfer | | essential for transfer of T- | |
| | | DNA. | |
| Gene of interest | E-Os.Act1 | upstream promoter region of | 19-775 |
| expression | | the rice actin 1 gene | |
| cassette | E-CaMV.35S.2xA1-B3 | duplicated 35S A1-B3 | 788-1120 |
| | | domain without TATA box | |
| | P-Os.Act1 | promoter region of the rice | 1125-1204 |
| | | actin 1 gene | |
| | L-Ta.Lhcb1 | 5′ untranslated leader of | 1210-1270 |
| | | wheat major chlorophyll a/b | |
| | | binding protein | |
| | I-Os.Act1 | first intron and flanking | 1287-1766 |
| | | UTR exon sequences from | |
| | | the rice actin 1 gene | |
| | T-St.Pis4 | 3′ non-translated region of | 1838-2780 |
| | | the potato proteinase | |
| | | inhibitor II gene which | |
| | | functions to direct | |
| | | polyadenylation of the | |
| | | mRNA | |
| Plant selectable | P-Os.Act1 | Promoter from the rice actin | 2830-3670 |
| marker | | 1 gene | |
| expression | L-Os.Act1 | first exon of the rice actin 1 | 3671-3750 |
| cassette | | gene | |
| | I-Os.Act1 | first intron and flanking | 3751-4228 |
| | | UTR exon sequences from | |
| | | the rice actin 1 gene | |
| | TS-At.ShkG-CTP2 | Transit peptide region of | 4238-4465 |
| | | Arabidopsis EPSPS | |
| | CR-AGRtu.aroA-CP4.nat | Coding region for bacterial | 4466-5833 |
| | | strain CP4 native aroA gene. | |
| | T-AGRtu.nos | A 3′ non-translated region of | 5849-6101 |
| | | the nopaline synthase gene | |
| | | of Agrobacterium | |
| | | tumefaciens Ti plasmid | |
| | | which functions to direct | |
| | | polyadenylation of the | |
| | | mRNA. | |
| Agrobacterium | B-AGRtu.left border | Agro left border sequence, | 6168-6609 |
| T-DNA transfer | | essential for transfer of T- | |
| | | DNA. | |
| Maintenance in | OR-Ec.oriV-RK2 | The vegetative origin of | 6696-7092 |
| E. coli | | replication from plasmid | |
| | | RK2. | |
| | CR-Ec.rop | Coding region for repressor | 8601-8792 |
| | | of primer from the ColE1 | |
| | | plasmid. Expression of this | |
| | | gene product interferes with | |
| | | primer binding at the origin | |
| | | of replication, keeping | |
| | | plasmid copy number low. | |
| | OR-Ec.ori-ColE1 | The minimal origin of | 9220-9808 |
| | | replication from the E. coli | |
| | | plasmid ColE1. | |
| | P-Ec.aadA-SPC/STR | romoter for Tn7 | 10339-10380 |
| | | adenylyltransferase | |
| | | (AAD(3″)) | |
| | CR-Ec.aadA-SPC/STR | Coding region for Tn7 | 10381-11169 |
| | | adenylyltransferase | |
| | | (AAD(3″)) conferring | |
| | | spectinomycin and | |
| | | streptomycin resistance. | |
| | T-Ec.aadA-SPC/STR | 3′ UTR from the Tn7 | 11170-11227 |
| | | adenylyltransferase | |
| | | (AAD(3″)) gene of E. coli. | |

### B. Plant Expression Constructs for Soy and Canola Transformation

[0072] Plasmids for use in transformation of soybean and canola were also prepared. Elements of an exemplary common expression vector pMON82053 are shown in Table 5 below and FIG. 3.

TABLE 5

| | | | Coordinates of |
|---|---|---|---|
| Function | Name | Annotation | SEQ ID NO: 24151 |
| Agrobacterium T- | B-AGRtu.left border | Agro left border sequence, essential for | 6144-6585 |
| DNA transfer | | transfer of T-DNA. | |
| Plant selectable | P-At.Act7 | Promoter from the Arabidopsis actin 7 gene | 6624-7861 |
| marker expression | L-At.Act7 | 5′UTR of Arabidopsis Act7 gene | |
| cassette | I-At.Act7 | Intron from the Arabidopsis actin7 gene | |
| | TS-At.ShkG-CTP2 | Transit peptide region of Arabidopsis | 7864-8091 |
| | | EPSPS | |
| | CR-AGRtu.aroA- | Synthetic CP4 coding region with dicot | 8092-9459 |
| | CP4.nno_At | preferred codon usage. | |
| | T-AGRtu.nos | A 3′ non-translated region of the nopaline | 9466-9718 |
| | | synthase gene of Agrobacterium | |
| | | tumefaciens Ti plasmid which functions to | |
| | | direct polyadenylation of the mRNA. | |
| Gene of interest | P-CaMV.35S-enh | Promoter for 35S RNA from CaMV | 1-613 |
| expression cassette | | containing a duplication of the −90 to −350 | |
| | | region. | |
| | T-Gb.E6-3b | 3′ untranslated region from the fiber protein | 688-1002 |
| | | E6 gene of sea-island cotton. | |
| Agrobacterium T- | B-AGRtu.right | Agro right border sequence, essential for | 1033-1389 |
| DNA transfer | border | transfer of T-DNA. | |
| Maintenance in E. coli | OR-Ec.oriV-RK2 | The vegetative origin of replication from | 5661-6057 |
| | | plasmid RK2. | |
| | CR-Ec.rop | Coding region for repressor of primer from | 3961-4152 |
| | | the ColE1 plasmid. Expression of this gene | |
| | | product interferes with primer binding at the | |
| | | origin of replication, keeping plasmid copy | |
| | | number low. | |
| | OR-Ec.ori-ColE1 | The minimal origin of replication from the | 2945-3533 |
| | | E. coli plasmid ColE1. | |
| | P-Ec.aadA-SPC/STR | Promoter for Tn7 adenylyltransferase | 2373-2414 |
| | | (AAD(3″)) | |
| | CR-Ec.aadA- | Coding region for Tn7 adenylyltransferase | 1584-2372 |
| | SPC/STR | (AAD(3″)) conferring spectinomycin and | |
| | | streptomycin resistance. | |
| | T-Ec.aadA-SPC/STR | 3′ UTR from the Tn7 adenylyltransferase | 1526-1583 |
| | | (AAD(3″)) gene of E. coli. | |

[0073] Primers for PCR amplification of protein coding nucleotides of recombinant DNA are designed at or near the start and stop codons of the coding sequence, in order to eliminate most of the 5′ and 3′ untranslated regions. Each recombinant DNA coding for a protein identified in Table 2 is amplified by PCR prior to insertion into the insertion site within the gene of interest expression cassette of one of the base vectors.

[0074] Vectors similar to that described above may be constructed for use in Agrobacterium mediated soybean transformation systems where the enhanced 35S promoter in the plant expression cassette portion is replaced with other desirable promoters including, but not limited to a napin promoter and an Arabidopsis SSU promoter. Protein coding segments are amplified by PCR prior to insertion into vectors such as described above. Primers for PCR amplification can be designed at or near the start and stop codons of the coding sequence, in order to eliminate most of the 5′ and 3′ untranslated regions.

### C. Cotton Transformation Vector

[0075] Plasmids for use in transformation of cotton are also prepared. Elements of an exemplary common expression vector plasmid pMON99053 are shown in Table 6 below and FIG. 4. Primers for PCR amplification of protein coding nucleotides of recombinant DNA are designed at or near the start and stop codons of the coding sequence, in order to eliminate most of the 5′ and 3′ untranslated regions. Each recombinant DNA coding for a protein identified in Table 2 is amplified by PCR prior to insertion into the insertion site within the gene of interest expression cassette of one of the base vectors.

TABLE 6

| | | | Coordinates of |
|---|---|---|---|
| | | | SEQ ID NO: |
| function | Name | annotation | 24152 |
| Agrobacterium | B-AGRtu.right border | Agro right border sequence, | 11364-11720 |
| T-DNA transfer | | essential for transfer of T-DNA. | |
| Gene of interest | Exp-CaMV.35S- | Enhanced version of the 35S | 7794-8497 |
| expression | enh + ph.DnaK | RNA promoter from CaMV plus | |
| cassette | | the petunia hsp70 5′ untranslated | |
| | | region | |
| | T-Ps.RbcS2-E9 | The 3′ non-translated region of | 67-699 |
| | | the pea RbcS2 gene which | |
| | | functions to direct | |
| | | polyadenylation of the mRNA. | |
| Plant selectable | Exp-CaMV.35S | Promoter from the rice actin 1 | 730-1053 |
| marker | | gene | |
| expression | CR-Ec.nptII-Tn5 | first exon of the rice actin 1 gene | 1087-1881 |
| cassette | T-AGRtu.nos | A 3′ non-translated region of the | 1913-2165 |
| | | nopaline synthase gene of | |
| | | Agrobacterium tumefaciens Ti | |
| | | plasmid which functions to | |
| | | direct polyadenylation of the | |
| | | mRNA. | |
| Agrobacterium | B-AGRtu.left border | Agro left border sequence, | 2211-2652 |
| T-DNA transfer | | essential for transfer of T-DNA. | |
| Maintenance in | OR-Ec.oriV-RK2 | The vegetative origin of | 2739-3135 |
| E. coli | | replication from plasmid RK2. | |
| | CR-Ec.rop | Coding region for repressor of | 4644-4835 |
| | | primer from the ColE1 plasmid. | |
| | | Expression of this gene product | |
| | | interferes with primer binding at | |
| | | the origin of replication, keeping | |
| | | plasmid copy number low. | |
| | OR-Ec.ori-ColE1 | The minimal origin of | 5263-5851 |
| | | replication from the E. coli | |
| | | plasmid ColE1. | |
| | P-Ec.aadA-SPC/STR | romoter for Tn7 | 6382-6423 |
| | | adenylyltransferase (AAD(3″)) | |
| | CR-Ec.aadA-SPC/STR | Coding region for Tn7 | 6424-7212 |
| | | adenylyltransferase (AAD(3″)) | |
| | | conferring spectinomycin and | |
| | | streptomycin resistance. | |
| | T-Ec.aadA-SPC/STR | 3′ UTR from the Tn7 | 7213-7270 |
| | | adenylyltransferase (AAD(3″)) | |
| | | gene of E. coli. | |

### Example 2

### Corn Transformation

[0076] This example illustrates plant cell transformation methods useful in producing transgenic corn plant cells, plants, seeds and pollen of this invention and the production and identification of transgenic corn plants and seed with an enhanced trait, i.e. enhanced water use efficiency, enhanced cold tolerance, increased yield, enhanced nitrogen use efficiency, enhanced seed protein and enhanced seed oil. Plasmid vectors were prepared by cloning DNA identified in Table 1 in the identified base vectors for use in corn transformation of corn plant cells to produce transgenic corn plants and progeny plants, seed and pollen.

[0077] For Agrobacterium-mediated transformation of corn embryo cells corn plants of a readily transformable line (designated LH59) is grown in the greenhouse and ears harvested when the embryos are 1.5 to 2.0 mm in length. Ears are surface sterilized by spraying or soaking the ears in 80% ethanol, followed by air drying. Immature embryos are isolated from individual kernels on surface sterilized ears. Prior to inoculation of maize cells, Agrobacterium cells are grown overnight at room temperature. Immature maize embryo cells are inoculated with Agrobacterium shortly after excision, and incubated at room temperature with Agrobacterium for 5-20 minutes. Immature embryo plant cells are then co-cultured with Agrobacterium for 1 to 3 days at 23° C. in the dark. Co-cultured embryos are transferred to selection media and cultured for approximately two weeks to allow embryogenic callus to develop. Embryogenic callus is transferred to culture medium containing 100 mg/L paromomycin and subcultured at about two week intervals. Transformed plant cells are recovered 6 to 8 weeks after initiation of selection.

[0078] For Agrobacterium-mediated transformation of maize callus immature embryos are cultured for approximately 8-21 days after excision to allow callus to develop. Callus is then incubated for about 30 minutes at room temperature with the Agrobacterium suspension, followed by removal of the liquid by aspiration. The callus and Agrobacterium are co-cultured without selection for 3-6 days followed by selection on paromomycin for approximately 6 weeks, with biweekly transfers to fresh media, and paromomycin resistant callus identified as containing the recombinant DNA in an expression cassette.

[0079] For transformation by microprojectile bombardment immature maize embryos are isolated and cultured 3-4 days prior to bombardment. Prior to microprojectile bombardment, a suspension of gold particles is prepared onto which the desired recombinant DNA expression cassettes are precipitated. DNA is introduced into maize cells as described in U.S. Pat. Nos. 5,550,318 and 6,399,861 using the electric discharge particle acceleration gene delivery device. Following microprojectile bombardment, tissue is cultured in the dark at 27 degrees C. Additional transformation methods and materials for making transgenic plants of this invention, for example, various media and recipient target cells, transformation of immature embryos and subsequence regeneration of fertile transgenic plants are disclosed in U.S. Pat. Nos. 6,194,636 and 6,232,526 and U.S. patent application Ser. No. 09/757,089, which are incorporated herein by reference.

[0080] To regenerate transgenic corn plants a callus of transgenic plant cells resulting from transformation is placed on media to initiate shoot development in plantlets which are transferred to potting soil for initial growth in a growth chamber at 26 degrees C. followed by a mist bench before transplanting to 5 inch pots where plants are grown to maturity. The regenerated plants are self fertilized and seed is harvested for use in one or more methods to select seed, seedlings or progeny second generation transgenic plants (R2 plants) or hybrids, e.g. by selecting transgenic plants exhibiting an enhanced trait as compared to a control plant.

[0081] Transgenic corn plant cells are transformed with recombinant DNA from each of the genes identified in Table 2. Progeny transgenic plants and seed of the transformed plant cells are screened for enhanced water use efficiency, enhanced cold tolerance, increased yield, enhanced nitrogen use efficiency, enhanced seed protein and enhanced seed oil as reported in Example 5.

### Example 3

### Soybean Transformation

[0082] This example illustrates plant transformation useful in producing the transgenic soybean plants of this invention and the production and identification of transgenic seed for transgenic soybean having enhanced water use efficiency, enhanced cold tolerance, increased yield, enhanced nitrogen use efficiency, enhanced seed protein and enhanced seed oil.

[0083] For Agrobacterium mediated transformation, soybean seeds are germinated overnight and the meristem explants excised. The meristems and the explants are placed in a wounding vessel. Soybean explants and induced Agrobacterium cells from a strain containing plasmid DNA with the gene of interest cassette and a plant selectable marker cassette are mixed no later than 14 hours from the time of initiation of seed germination and wounded using sonication. Following wounding, explants are placed in co-culture for 2-5 days at which point they are transferred to selection media for 6-8 weeks to allow selection and growth of transgenic shoots. Trait positive shoots are harvested approximately 6-8 weeks and placed into selective rooting media for 2-3 weeks. Shoots producing roots are transferred to the greenhouse and potted in soil. Shoots that remain healthy on selection, but do not produce roots are transferred to non-selective rooting media for an additional two weeks. Roots from any shoots that produce roots off selection are tested for expression of the plant selectable marker before they are transferred to the greenhouse and potted in soil. Additionally, a DNA construct can be transferred into the genome of a soybean cell by particle bombardment and the cell regenerated into a fertile soybean plant as described in U.S. Pat. No. 5,015,580, herein incorporated by reference.

[0084] Transgenic soybean plant cells are transformed with recombinant DNA from each of the genes identified in Table 2. Progeny transgenic plants and seed of the transformed plant cells are screened for enhanced water use efficiency, enhanced cold tolerance, increased yield, enhanced nitrogen use efficiency, enhanced seed protein and enhanced seed oil as reported in Example 5.

### Example 4

### Cotton Transgenic Plants with Enhanced Agronomic Traits

[0085] Cotton transformation is performed as generally described in WO0036911 and in U.S. Pat. No. 5,846,797. Transgenic cotton plants containing each of the recombinant DNA having a sequence of SEQ ID NO: 1 through SEQ ID NO: 339 are obtained by transforming with recombinant DNA from each of the genes identified in Table 2. Progeny transgenic plants are selected from a population of transgenic cotton events under specified growing conditions and are compared with control cotton plants. Control cotton plants are substantially the same cotton genotype but without the recombinant DNA, for example, either a parental cotton plant of the same genotype that was not transformed with the identical recombinant DNA or a negative isoline of the transformed plant. Additionally, a commercial cotton cultivar adapted to the geographical region and cultivation conditions, i.e. cotton variety ST474, cotton variety FM 958, and cotton variety Siokra L-23, are used to compare the relative performance of the transgenic cotton plants containing the recombinant DNA. The specified culture conditions are growing a first set of transgenic and control plants under “wet” conditions, i.e. irrigated in the range of 85 to 100 percent of evapotranspiration to provide leaf water potential of −14 to −18 bars, and growing a second set of transgenic and control plants under “dry” conditions, i.e. irrigated in the range of 40 to 60 percent of evapotranspiration to provide a leaf water potential of −21 to −25 bars. Pest control, such as weed and insect control is applied equally to both wet and dry treatments as needed. Data gathered during the trial includes weather records throughout the growing season including detailed records of rainfall; soil characterization information; any herbicide or insecticide applications; any gross agronomic differences observed such as leaf morphology, branching habit, leaf color, time to flowering, and fruiting pattern; plant height at various points during the trial; stand density; node and fruit number including node above white flower and node above crack boll measurements; and visual wilt scoring. Cotton boll samples are taken and analyzed for lint fraction and fiber quality. The cotton is harvested at the normal harvest timeframe for the trial area. Enhanced water use efficiency is indicated by increased yield, improved relative water content, enhanced leaf water potential, increased biomass, enhanced leaf extension rates, and improved fiber parameters.

[0086] The transgenic cotton plants of this invention are identified from among the transgenic cotton plants by agronomic trait screening as having increased yield and enhanced water use efficiency.

### Example 5

### Canola Transformation

[0087] This example illustrates plant transformation useful in producing the transgenic canola plants of this invention and the production and identification of transgenic seed for transgenic canola having enhanced water use efficiency, enhanced cold tolerance, increased yield, enhanced nitrogen use efficiency, enhanced seed protein and enhanced seed oil.

[0088] Tissues from in vitro grown canola seedlings are prepared and inoculated with overnight-grown Agrobacterium cells containing plasmid DNA with the gene of interest cassette and a plant selectable marker cassette. Following co-cultivation with Agrobacterium, the infected tissues are allowed to grow on selection to promote growth of transgenic shoots, followed by growth of roots from the transgenic shoots. The selected plantlets are then transferred to the greenhouse and potted in soil. Molecular characterization are performed to confirm the presence of the gene of interest, and its expression in transgenic plants and progenies. Progeny transgenic plants are selected from a population of transgenic canola events under specified growing conditions and are compared with control canola plants. Control canola plants are substantially the same canola genotype but without the recombinant DNA, for example, either a parental canola plant of the same genotype that is not transformed with the identical recombinant DNA or a negative isoline of the transformed plant

[0089] Transgenic canola plant cells are transformed with recombinant DNA from each of the genes identified in Table 2. Transgenic progeny plants and seed of the transformed plant cells are screened for enhanced water use efficiency, enhanced cold tolerance, increased yield, enhanced nitrogen use efficiency, enhanced seed protein and enhanced seed oil as reported in Example 7.

### Example 6

### Homolog Identification

[0090] This example illustrates the identification of homologs of proteins encoded by the DNA identified in Table 2 which is used to provide transgenic seed and plants having enhanced agronomic traits. From the sequence of the homologs, homologous DNA sequence can be identified for preparing additional transgenic seeds and plants of this invention with enhanced agronomic traits.

[0091] An “All Protein Database” was constructed of known protein sequences using a proprietary sequence database and the National Center for Biotechnology Information (NCBI) non-redundant amino acid database (nr.aa). For each organism from which a polynucleotide sequence provided herein was obtained, an “Organism Protein Database” was constructed of known protein sequences of the organism; it is a subset of the All Protein Database based on the NCBI taxonomy ID for the organism.

[0092] The All Protein Database was queried using amino acid sequences provided herein as SEQ ID NO: 340 through SEQ ID NO: 678 using NCBI “blastp” program with E-value cutoff of 1e-8. Up to 1000 top hits were kept, and separated by organism names. For each organism other than that of the query sequence, a list was kept for hits from the query organism itself with a more significant E-value than the best hit of the organism. The list contains likely duplicated genes of the polynucleotides provided herein, and is referred to as the Core List. Another list was kept for all the hits from each organism, sorted by E-value, and referred to as the Hit List.

[0093] The Organism Protein Database was queried using polypeptide sequences provided herein as SEQ ID NO: 340 through SEQ ID NO: 678 using NCBI “blastp” program with E-value cutoff of 1e-4. Up to 1000 top hits were kept. A BLAST searchable database was constructed based on these hits, and is referred to as “SubDB”. SubDB was queried with each sequence in the Hit List using NCBI “blastp” program with E-value cutoff of 1e-8. The hit with the best E-value was compared with the Core List from the corresponding organism. The hit is deemed a likely ortholog if it belongs to the Core List, otherwise it is deemed not a likely ortholog and there is no further search of sequences in the Hit List for the same organism. Homologs from a large number of distinct organisms were identified and are reported by amino acid sequences of SEQ ID NO: 679 through SEQ ID NO: 24149. These relationship of proteins of SEQ ID NO: 340 through 678 and homologs of SEQ ID NO: 679 through 24149 is identified in Table 7. The source organism for each homolog is found in the Sequence Listing.

### Example 7

### Selection of Transgenic Plants with Enhanced Agronomic Trait(s)

[0094] This example illustrates identification of plant cells of the invention by screening derived plants and seeds for enhanced trait. Transgenic corn seed and plants with recombinant DNA identified in Table 2 are prepared by plant cells transformed with DNA that is stably integrated into the genome of the corn cell. Transgenic corn plant cells are transformed with recombinant DNA from each of the genes identified in Table 2. Progeny transgenic plants and seed of the transformed plant cells are screened for enhanced water use efficiency, enhanced cold tolerance, increased yield, enhanced nitrogen use efficiency, enhanced seed protein and enhanced seed oil as compared to control plants.

### A. Selection for Enhanced Nitrogen Use Efficiency

[0095] The physiological efficacy of transgenic corn plants (tested as hybrids) can be tested for nitrogen use efficiency (NUE) traits in a high-throughput nitrogen (N) selection method. The collected data are compared to the measurements from wildtype controls using a statistical model to determine if the changes are due to the transgene. Raw data were analyzed by SAS software. Results shown herein are the comparison of transgenic plants relative to the wildtype controls.

### (1) Media Preparation for Planting a NUE Protocol

[0096] Planting materials used: Metro Mix 200 (vendor: Hummert) Cat. # 10-0325, Scotts Micro Max Nutrients (vendor: Hummert) Cat. # 07-6330, OS 4⅓″×3⅞″ pots (vendor: Hummert) Cat. # 16-1415, OS trays (vendor: Hummert) Cat. # 16-1515, Hoagland's macronutrients solution, Plastic 5″ stakes (vendor: Hummert) yellow Cat. # 49-1569, white Cat. # 49-1505, Labels with numbers indicating material contained in pots. Fill 500 pots to rim with Metro Mix 200 to a weight of ˜140 g/pot. Pots are filled uniformly by using a balancer. Add 0.4 g of Micro Max nutrients to each pot. Stir ingredients with spatula to a depth of 3 inches while preventing material loss.

### (2) Planting a NUE Selection in the Greenhouse

[0097] (a) Seed Germination—Each pot is lightly altered twice using reverse osmosis purified water. The first watering is scheduled to occur just before planting; and the second watering, after the seed has been planted in the pot. Ten Seeds of each entry (1 seed per pot) are planted to select eight healthy uniform seedlings. Additional wild type controls are planted for use as border rows. Alternatively, 15 seeds of each entry (1 seed per pot) are planted to select 12 healthy uniform seedlings (this larger number of plantings is used for the second, or confirmation, planting). Place pots on each of the 12 shelves in the Conviron growth chamber for seven days. This is done to allow more uniform germination and early seedling growth. The following growth chamber settings are 25° C./day and 22° C./night, 14 hours light and ten hours dark, humidity ˜80%, and light intensity ˜350 μmol/m²/s (at pot level). Watering is done via capillary matting similar to greenhouse benches with duration of ten minutes three times a day.

[0098] (b) Seedling transfer—After seven days, the best eight or 12 seedlings for the first or confirmation pass runs, respectively, are chosen and transferred to greenhouse benches. The pots are spaced eight inches apart (center to center) and are positioned on the benches using the spacing patterns printed on the capillary matting. The Vattex matting creates a 384-position grid, randomizing all range, row combinations. Additional pots of controls are placed along the outside of the experimental block to reduce border effects.

[0099] Plants are allowed to grow for 28 days under the low N run or for 23 days under the high N run. The macronutrients are dispensed in the form of a macronutrient solution (see composition below) containing precise amounts of N added (2 mM NH₄NO₃ for limiting N selection and 20 mM NH₄NO₃ for high N selection runs). Each pot is manually dispensed 100 ml of nutrient solution three times a week on alternate days starting at eight and ten days after planting for high N and low N runs, respectively. On the day of nutrient application, two 20 min waterings at 05:00 and 13:00 are skipped. The vattex matting should be changed every third run to avoid N accumulation and buildup of root matter. Table 8 shows the amount of nutrients in the nutrient solution for either the low or high nitrogen selection.

TABLE 8

| | 2 mM NH₄NO₃ | 20 mM NH₄NO₃ (high |
|---|---|---|
| | (Low Nitrogen Growth | Nitrogen Growth |
| | Condition, Low N) | Condition, High N) |
| Nutrient Stock | mL/L | mL/L |
| 1 M NH₄N0₃ | 2 | 20 |
| 1 M KH₂PO₄ | 0.5 | 0.5 |
| 1 M MgSO₄•7H₂O | 2 | 2 |
| 1 M CaCl₂ | 2.5 | 2.5 |
| 1 M K₂SO₄ | 1 | 1 |

Note:
Adjust pH to 5.6 with HCl or KOH

[0100] (c) Harvest Measurements and Data Collection—After 28 days of plant growth for low N runs and 23 days of plant growth for high N runs, the following measurements are taken (phenocodes in parentheses): total shoot fresh mass (g) (SFM) measured by Sartorius electronic balance, V6 leaf chlorophyll measured by Minolta SPAD meter (relative units) (LC), V6 leaf area (cm²) (LA) measured by a Li-Cor leaf area meter, V6 leaf fresh mass (g) (LFM) measured by Sartorius electronic balance, and V6 leaf dry mass (g) (LDM) measured by Sartorius electronic balance. Raw data were analyzed by SAS software. Results shown are the comparison of transgenic plants relative to the wildtype controls.

[0101] To take a leaf reading, samples were excised from the V6 leaf. Since chlorophyll meter readings of corn leaves are affected by the part of the leaf and the position of the leaf on the plant that is sampled, SPAD meter readings were done on leaf six of the plants. Three measurements per leaf were taken, of which the first reading was taken from a point one-half the distance between the leaf tip and the collar and halfway from the leaf margin to the midrib while two were taken toward the leaf tip. The measurements were restricted in the area from ½ to ¾ of the total length of the leaf (from the base) with approximately equal spacing between them. The average of the three measurements was taken from the SPAD machine.

[0102] Leaf fresh mass is recorded for an excised V6 leaf, the leaf is placed into a paper bag. The paper bags containing the leaves are then placed into a forced air oven at 80° C. for 3 days. After 3 days, the paper bags are removed from the oven and the leaf dry mass measurements are taken.

[0103] From the collected data, two derived measurements are made: (1) Leaf chlorophyll area (LCA), which is a product of V6 relative chlorophyll content and its leaf area (relative units). Leaf chlorophyll area=leaf chlorophyll X leaf area. This parameter gives an indication of the spread of chlorophyll over the entire leaf area; (2) specific leaf area (LSA) is calculated as the ratio of V6 leaf area to its dry mass (cm²/g dry mass), a parameter also recognized as a measure of NUE.

A list of recombinant DNA constructs which improved growth in high nitrogen in transgenic plants is illustrated in Table 9.

TABLE 9

| | | | | | Confirmed |
|---|---|---|---|---|---|
| | | | | Positive | events/Actual |
| NUC | PEP | | | events/Total | events with |
| SEQ | SEQ | | | events | confirmation |
| ID | ID | PHE ID | Construct | screened | attempted |
| 8 | 347 | PHE0000012 | PMON67808 | 1/5 | 0/0 |
| 12 | 351 | PHE0000016 | PMON67750 | 1/3 | 0/0 |
| 16 | 355 | PHE0000022 | PMON67826 | 1/1 | 0/0 |
| 16 | 355 | PHE0000022 | PMON67826 | 1/3 | 0/0 |
| 33 | 372 | PHE0000039 | PMON67807 | 1/2 | 0/0 |
| 34 | 373 | PHE0000040 | PMON77889 | 1/4 | 0/0 |
| 46 | 385 | PHE0000051 | PMON68859 | 1/2 | 0/0 |
| 47 | 386 | PHE0000052 | PMON67813 | 2/2 | 0/0 |
| 54 | 393 | PHE0000058 | PMON68351 | 1/2 | 0/0 |
| 62 | 401 | PHE0000067 | PMON67816 | 4/4 | 3/4 |
| 64 | 403 | PHE0000069 | PMON67821 | 1/1 | 0/0 |
| 68 | 407 | PHE0000073 | PMON68357 | 3/3 | 0/0 |
| 72 | 411 | PHE0000077 | PMON67827 | 3/4 | 1/4 |
| 101 | 440 | PHE0000116 | PMON68367 | 2/2 | 0/0 |
| 105 | 444 | PHE0000120 | PMON68853 | 2/2 | 0/0 |
| 108 | 447 | PHE0000123 | PMON68855 | 2/3 | 0/2 |
| 112 | 451 | PHE0000127 | PMON68887 | 1/1 | 0/0 |
| 116 | 455 | PHE0000153 | PMON67817 | 4/5 | 4/5 |
| 117 | 456 | PHE0000154 | PMON67818 | 1/2 | 0/2 |
| 120 | 459 | PHE0000158 | PMON73169 | 2/2 | 0/2 |
| 135 | 474 | PHE0000177 | PMON68881 | 1/2 | 1/2 |
| 136 | 475 | PHE0000178 | PMON73166 | 1/2 | 0/0 |
| 143 | 482 | PHE0000185 | PMON69468 | 1/3 | 0/0 |
| 146 | 485 | PHE0000188 | PMON73167 | 2/2 | 0/0 |
| 169 | 508 | PHE0000235 | PMON73161 | 1/2 | 0/0 |
| 176 | 515 | PHE0000243 | PMON72467 | 2/2 | 0/2 |
| 190 | 529 | PHE0000264 | PMON68866 | 3/3 | 0/0 |
| 193 | 532 | PHE0000267 | PMON68867 | 2/2 | 1/2 |
| 204 | 543 | PHE0000279 | PMON68896 | 3/3 | 2/2 |
| 214 | 553 | PHE0000291 | PMON72455 | 3/3 | 1/2 |
| 234 | 573 | PHE0000312 | PMON72456 | 1/3 | 0/2 |
| 235 | 574 | PHE0000313 | PMON68378 | 1/2 | 1/2 |
| 236 | 575 | PHE0000314 | PMON68379 | 4/4 | 1/4 |
| 237 | 576 | PHE0000315 | PMON68381 | 2/4 | 0/2 |
| 239 | 578 | PHE0000317 | PMON68380 | 2/2 | 0/0 |
| 249 | 588 | PHE0000330 | PMON73164 | 2/3 | 0/0 |
| 264 | 603 | PHE0000347 | PMON68386 | 1/2 | 0/0 |
| 265 | 604 | PHE0000349 | PMON68389 | 1/1 | 0/0 |
| 266 | 605 | PHE0000350 | PMON74410 | 1/2 | 1/2 |
| 268 | 607 | PHE0000352 | PMON74409 | 1/5 | 0/5 |
| 269 | 608 | PHE0000353 | PMON73160 | 2/2 | 0/0 |
| 284 | 623 | PHE0000390 | PMON67836 | 1/2 | 0/0 |
| 296 | 635 | PHE0000403 | PMON67831 | 1/2 | 0/0 |
| 301 | 640 | PHE0000415 | PMON67846 | 4/5 | 0/5 |
| 303 | 642 | PHE0000418 | PMON69497 | 2/4 | 1/4 |
| 304 | 643 | PHE0000419 | PMON67848 | 1/2 | 0/2 |
| 324 | 663 | PHE0000440 | PMON72473 | 3/5 | 0/0 |
| 331 | 670 | PHE0000469 | PMON68636 | 1/3 | 0/0 |

A list of recombinant DNA constructs which improved growth in limited nitrogen in transgenic plants is illustrated in Table 10.

TABLE 10

| | | | | | Confirmed |
|---|---|---|---|---|---|
| | | | | Positive | events/Actual |
| NUC | PEP | | | events/Total | events with |
| SEQ | SEQ | | | events | confirmation |
| ID | ID | PHE ID | Construct | screened | attempted |
| 2 | 341 | PHE0000006 | PMON68861 | 1/5 | 0/1 |
| 5 | 344 | PHE0000010 | PMON67800 | 4/5 | 2/4 |
| 8 | 347 | PHE0000012 | PMON67806 | 1/3 | 1/1 |
| 16 | 355 | PHE0000022 | PMON67826 | 3/3 | 1/3 |
| 17 | 356 | PHE0000024 | PMON68354 | 1/4 | 0/4 |
| 20 | 359 | PHE0000227 | PMON68376 | 2/4 | 0/0 |
| 24 | 363 | PHE0000027 | PMON85009 | 2/6 | 0/0 |
| 31 | 370 | PHE0000034 | PMON67805 | 2/6 | 0/2 |
| 32 | 371 | PHE0000038 | PMON68383 | 1/6 | 0/2 |
| 33 | 372 | PHE0000039 | PMON67807 | 1/3 | 0/2 |
| 34 | 373 | PHE0000040 | PMON67801 | 1/5 | 0/0 |
| 34 | 373 | PHE0000040 | PMON77889 | 4/4 | 4/4 |
| 34 | 373 | PHE0000040 | PMON92405 | 1/6 | 0/0 |
| 37 | 376 | PHE0000045 | PMON81293 | 2/8 | 0/0 |
| 40 | 379 | PHE0000244 | PMON68372 | 2/2 | 1/2 |
| 41 | 380 | PHE0000245 | PMON68373 | 3/4 | 1/4 |
| 41 | 380 | PHE0000245 | PMON84737 | 1/7 | 0/6 |
| 42 | 381 | PHE0000246 | PMON68374 | 2/3 | 0/0 |
| 43 | 382 | PHE0000247 | PMON68375 | 1/3 | 0/0 |
| 44 | 383 | PHE0000106 | PMON69457 | 1/1 | 0/0 |
| 44 | 383 | PHE0000106 | PMON92483 | 3/6 | 0/1 |
| 46 | 385 | PHE0000051 | PMON68859 | 2/2 | 1/2 |
| 47 | 386 | PHE0000052 | PMON67813 | 1/4 | 0/2 |
| 51 | 390 | PHE0000055 | PMON68355 | 1/3 | 0/2 |
| 53 | 392 | PHE0000057 | PMON68350 | 1/4 | 1/4 |
| 54 | 393 | PHE0000058 | PMON68351 | 1/4 | 0/3 |
| 56 | 395 | PHE0000060 | PMON68356 | 1/3 | 0/2 |
| 59 | 398 | PHE0000064 | PMON67804 | 1/6 | 0/0 |
| 61 | 400 | PHE0000292 | PMON68888 | 1/2 | 0/0 |
| 62 | 401 | PHE0000067 | PMON67816 | 4/4 | 2/4 |
| 62 | 401 | PHE0000067 | PMON92814 | 1/6 | 0/0 |
| 63 | 402 | PHE0000068 | PMON67824 | 1/2 | 0/0 |
| 64 | 403 | PHE0000069 | PMON67821 | 4/5 | 2/3 |
| 65 | 404 | PHE0000070 | PMON67825 | 1/3 | 0/0 |
| 67 | 406 | PHE0000072 | PMON67828 | 1/2 | 0/0 |
| 72 | 411 | PHE0000077 | PMON67827 | 2/6 | 0/2 |
| 72 | 411 | PHE0000077 | PMON77890 | 1/2 | 0/0 |
| 74 | 413 | PHE0000079 | PMON67752 | 2/5 | 0/0 |
| 79 | 418 | PHE0000086 | PMON67812 | 1/4 | 0/0 |
| 80 | 419 | PHE0000089 | PMON84111 | 2/4 | 0/0 |
| 99 | 438 | PHE0000114 | PMON68361 | 1/2 | 0/0 |
| 100 | 439 | PHE0000115 | PMON68362 | 1/1 | 0/0 |
| 101 | 440 | PHE0000116 | PMON68367 | 1/7 | 0/2 |
| 102 | 441 | PHE0000117 | PMON68368 | 1/2 | 0/2 |
| 103 | 442 | PHE0000118 | PMON67811 | 6/7 | 2/6 |
| 104 | 443 | PHE0000119 | PMON68363 | 1/4 | 0/1 |
| 105 | 444 | PHE0000120 | PMON68853 | 2/6 | 0/5 |
| 108 | 447 | PHE0000123 | PMON68855 | 3/4 | 0/3 |
| 110 | 449 | PHE0000125 | PMON68369 | 3/7 | 0/4 |
| 111 | 450 | PHE0000126 | PMON69458 | 4/7 | 1/4 |
| 112 | 451 | PHE0000127 | PMON68887 | 2/5 | 0/0 |
| 114 | 453 | PHE0000133 | PMON68860 | 1/4 | 0/0 |
| 116 | 455 | PHE0000153 | PMON67817 | 1/6 | 0/5 |
| 117 | 456 | PHE0000154 | PMON67818 | 2/2 | 1/2 |
| 120 | 459 | PHE0000158 | PMON73169 | 2/2 | 2/2 |
| 129 | 468 | PHE0000168 | PMON68857 | 1/5 | 0/5 |
| 135 | 474 | PHE0000177 | PMON68881 | 2/3 | 2/3 |
| 135 | 474 | PHE0000177 | PMON92800 | 4/6 | 0/0 |
| 138 | 477 | PHE0000180 | PMON83753 | 1/7 | 0/0 |
| 140 | 479 | PHE0000182 | PMON74420 | 3/3 | 1/2 |
| 141 | 480 | PHE0000183 | PMON80258 | 2/5 | 0/5 |
| 142 | 481 | PHE0000184 | PMON84985 | 2/5 | 0/0 |
| 143 | 482 | PHE0000185 | PMON69468 | 3/4 | 1/4 |
| 146 | 485 | PHE0000188 | PMON73167 | 1/4 | 0/2 |
| 151 | 490 | PHE0000219 | PMON68865 | 1/2 | 0/0 |
| 169 | 508 | PHE0000235 | PMON73161 | 1/2 | 1/2 |
| 176 | 515 | PHE0000243 | PMON72467 | 1/2 | 0/2 |
| 182 | 521 | PHE0000254 | PMON73172 | 1/4 | 0/0 |
| 183 | 522 | PHE0000255 | PMON72459 | 1/1 | 1/1 |
| 190 | 529 | PHE0000264 | PMON68866 | 1/4 | 0/3 |
| 192 | 531 | PHE0000266 | PMON69470 | 3/3 | 1/3 |
| 193 | 532 | PHE0000267 | PMON68867 | 2/5 | 2/2 |
| 196 | 535 | PHE0000270 | PMON84751 | 2/4 | 0/0 |
| 197 | 536 | PHE0000271 | PMON84981 | 3/9 | 0/0 |
| 204 | 543 | PHE0000279 | PMON68896 | 2/3 | 2/3 |
| 205 | 544 | PHE0000280 | PMON72451 | 2/2 | 0/2 |
| 210 | 549 | PHE0000287 | PMON68898 | 1/2 | 0/0 |
| 214 | 553 | PHE0000291 | PMON72455 | 3/3 | 3/3 |
| 216 | 555 | PHE0000294 | PMON68897 | 2/3 | 0/0 |
| 217 | 556 | PHE0000295 | PMON68894 | 2/4 | 0/4 |
| 221 | 560 | PHE0000299 | PMON68875 | 1/2 | 0/2 |
| 223 | 562 | PHE0000301 | PMON68877 | 1/6 | 0/0 |
| 224 | 563 | PHE0000302 | PMON68878 | 1/1 | 0/0 |
| 227 | 566 | PHE0000305 | PMON68880 | 1/1 | 0/0 |
| 228 | 567 | PHE0000306 | PMON68882 | 1/1 | 0/0 |
| 234 | 573 | PHE0000312 | PMON72456 | 2/4 | 2/3 |
| 234 | 573 | PHE0000312 | PMON92811 | 11/11 | 0/0 |
| 235 | 574 | PHE0000313 | PMON68378 | 2/2 | 0/2 |
| 236 | 575 | PHE0000314 | PMON68379 | 4/4 | 4/4 |
| 237 | 576 | PHE0000315 | PMON68381 | 2/4 | 1/2 |
| 238 | 577 | PHE0000316 | PMON68382 | 1/3 | 1/2 |
| 239 | 578 | PHE0000317 | PMON68380 | 1/7 | 1/2 |
| 241 | 580 | PHE0000322 | PMON74403 | 1/1 | 0/0 |
| 243 | 582 | PHE0000324 | PMON73162 | 1/5 | 0/0 |
| 245 | 584 | PHE0000326 | PMON72463 | 1/1 | 0/0 |
| 246 | 585 | PHE0000327 | PMON69481 | 1/5 | 0/3 |
| 247 | 586 | PHE0000328 | PMON74416 | 1/4 | 0/4 |
| 249 | 588 | PHE0000330 | PMON73164 | 1/5 | 0/3 |
| 255 | 594 | PHE0000336 | PMON74414 | 2/4 | 0/0 |
| 262 | 601 | PHE0000345 | PMON74411 | 1/3 | 0/0 |
| 264 | 603 | PHE0000347 | PMON68386 | 2/2 | 1/2 |
| 266 | 605 | PHE0000350 | PMON74410 | 2/6 | 2/2 |
| 268 | 607 | PHE0000352 | PMON74409 | 3/5 | 1/5 |
| 269 | 608 | PHE0000353 | PMON73160 | 2/4 | 2/2 |
| 269 | 608 | PHE0000353 | PMON92582 | 3/8 | 0/0 |
| 270 | 609 | PHE0000354 | PMON81879 | 2/7 | 1/6 |
| 272 | 611 | PHE0000356 | PMON72464 | 1/4 | 0/0 |
| 284 | 623 | PHE0000390 | PMON67836 | 1/2 | 1/2 |
| 286 | 625 | PHE0000392 | PMON76335 | 2/2 | 1/2 |
| 295 | 634 | PHE0000402 | PMON67833 | 1/3 | 0/1 |
| 298 | 637 | PHE0000412 | PMON67843 | 2/3 | 2/3 |
| 301 | 640 | PHE0000415 | PMON67846 | 2/5 | 2/5 |
| 302 | 641 | PHE0000416 | PMON67847 | 2/2 | 1/2 |
| 303 | 642 | PHE0000418 | PMON69497 | 3/4 | 2/4 |
| 304 | 643 | PHE0000419 | PMON67848 | 3/3 | 2/3 |
| 306 | 645 | PHE0000421 | PMON83760 | 1/8 | 0/0 |
| 312 | 651 | PHE0000428 | PMON74417 | 1/1 | 0/0 |
| 313 | 652 | PHE0000429 | PMON74418 | 1/2 | 0/2 |
| 321 | 660 | PHE0000437 | PMON68630 | 1/2 | 0/1 |
| 324 | 663 | PHE0000440 | PMON72473 | 3/6 | 2/5 |
| 325 | 664 | PHE0000441 | PMON72474 | 1/5 | 0/1 |
| 326 | 665 | PHE0000451 | PMON72475 | 1/3 | 0/0 |
| 327 | 666 | PHE0000452 | PMON72476 | 1/1 | 0/0 |
| 338 | 677 | PHE0000486 | PMON69496 | 3/5 | 0/0 |
| 339 | 678 | PHE0000017 | PMON68850 | 4/4 | 0/3 |

### Nitrogen Use Field Efficacy Assay

[0104] Level I. Transgenic plants provided by the present invention are planted in field without any nitrogen source being applied. Transgenic plants and control plants are grouped by genotype and construct with controls arranged randomly within genotype blocks. Each type of transgenic plants are tested by 3 replications and across 5 locations. Nitrogen levels in the fields are analyzed in early April pre-planting by collecting 30 sample soil cores from 0-24″ and 24 to 48″ 110 soil layer. Soil samples are analyzed for nitrate-nitrogen, phosphorus (P), Potassium (K), organic matter and pH to provide baseline values. P, K and micronutrients are applied based upon soil test recommendations. A list of recombinant DNA constructs which improved growth without any nitrogen source in transgenic plants is illustrated in Table 11.

TABLE 11

| | | | | | Confirmed |
|---|---|---|---|---|---|
| | | | | Positive | events/Actual |
| NUC | PEP | | | events/Total | events with |
| SEQ | SEQ | | | events | confirmation |
| ID | ID | PHE | Construct | screened | attempted |
| 34 | 373 | PHE0000040 | PMON92405 | 1/3 | 0/0 |
| 62 | 401 | PHE0000067 | PMON92814 | 1/3 | 0/0 |
| 61 | 400 | PHE0000292 | PMON93851 | 1/3 | 0/0 |
| 236 | 575 | PHE0000314 | PMON94123 | 2/3 | 0/0 |

Level II. Transgenic plants provided by the present invention are planted in field with three levels of nitrogen (N) fertilizer being applied, i.e. low level (0 N), medium level (80 lb/ac) and high level (180 lb/ac). Liquid 28% or 32% UAN (Urea, Ammonium Nitrogen) are used as the N source and apply by broadcast boom and incorporate with a field cultivator with rear rolling basket in the same direction as intended crop rows. Although there is no N applied to the 0 N treatment the soil should still be disturbed in the same fashion as the treated area. Transgenic plants and control plants are grouped by genotype and construct with controls arranged randomly within genotype blocks. Each type of transgenic plants is tested by 3 replications and across 4 locations. Nitrogen levels in the fields are analyzed in early April pre-planting by collecting 30 sample soil cores from 0-24″ and 24 to 48″ soil layer. Soil samples are analyzed for nitrate-nitrogen, phosphorus (P), Potassium (K), organic matter and pH to provide baseline values. P, K and micronutrients are applied based upon soil test recommendations.

### B. Selection for Increased Yield

[0105] Many transgenic plants of this invention exhibit improved yield as compared to a control plant. Improved yield can result from enhanced seed sink potential, i.e. the number and size of endosperm cells or kernels and/or enhanced sink strength, i.e. the rate of starch biosynthesis. Sink potential can be established very early during kernel development, as endosperm cell number and size are determined within the first few days after pollination.

[0106] Much of the increase in corn yield of the past several decades has resulted from an increase in planting density. During that period, corn yield has been increasing at a rate of 2.1 bushels/acre/year, but the planting density has increased at a rate of 250 plants/acre/year. A characteristic of modern hybrid corn is the ability of these varieties to be planted at high density. Many studies have shown that a higher than current planting density should result in more biomass production, but current germplasm does not perform. well at these higher densities. One approach to increasing yield is to increase harvest index (HI), the proportion of biomass that is allocated to the kernel compared to total biomass, in high density plantings.

[0107] Effective yield selection of enhanced yielding transgenic corn events uses hybrid progeny of the transgenic event over multiple locations with plants grown under optimal production management practices, and maximum pest control. A useful target for improved yield is a 5% to 10% increase in yield as compared to yield produced by plants grown from seed for a control plant. Selection methods may be applied in multiple and diverse geographic locations, for example up to 16 or more locations, over one or more plating seasons, for example at least two planting seasons to statistically distinguish yield improvement from natural environmental effects. It is to plant multiple transgenic plants, positive and negative control plants, and pollinator plants in standard plots, for example 2 row plots, 20 feet long by 5 feet wide with 30 inches distance between rows and a 3 foot alley between ranges. Transgenic events can be grouped by recombinant DNA constructs with groups randomly placed in the field. A pollinator plot of a high quality corn line is planted for every two plots to allow open pollination when using male sterile transgenic events. A useful planting density is about 30,000 plants/acre. High planting density is greater than 30,000 plants/acre, preferably about 40,000 plants/acre, more preferably about 42,000 plants/acre, most preferably about 45,000 plants/acre. Surrogate indicators for yield improvement include source capacity (biomass), source output (sucrose and photosynthesis), sink components (kernel size, ear size, starch in the seed), development (light response, height, density tolerance), maturity, early flowering trait and physiological responses to high density planting, for example at 45,000 plants per acre, for example as illustrated in Table 12 and 13.

TABLE 12

| Timing | Evaluation | Description | comments |
|---|---|---|---|
| V2-3 | Early stand | Can be taken any time after | |
| | | germination and prior to | |
| | | removal of any plants. | |
| Pollen shed | GDU to 50% shed | GDU to 50% plants shedding | |
| | | 50% tassel. | |
| Silking | GDU to 50% silk | GDU to 50% plants showing | |
| | | silks. | |
| Maturity | Plant height | Height from soil surface to | 10 plants per plot - Yield |
| | | flag leaf attachment (inches). | team assistance |
| Maturity | Ear height | Height from soil surface to | 10 plants per plot - Yield |
| | | primary ear attachment node. | team assistance |
| Maturity | Leaves above ear | visual scores: erect, size, | |
| | | rolling | |
| Maturity | Tassel size | Visual scores +/− vs. WT | |
| Pre-Harvest | Final Stand | Final stand count prior to | |
| | | harvest, exclude tillers | |
| Pre-Harvest | Stalk lodging | No. of stalks broken below | |
| | | the primary ear attachment. | |
| | | Exclude leaning tillers | |
| Pre-Harvest | Root lodging | No. of stalks leaning >45° | |
| | | angle from perpendicular. | |
| Pre-Harvest | Stay green | After physiological maturity | |
| | | and when differences among | |
| | | genotypes are evident: Scale | |
| | | 1 (90-100% tissue green) − 9 | |
| | | (0-19% tissue green). | |
| Harvest | Grain Yield | Grain yield/plot (Shell | |
| | | weight) | |

TABLE 13

| Timing | Evaluation | Description |
|---|---|---|
| V8-V12 | Chlorophyll | |
| V12-VT | Ear leaf area | |
| V15-15DAP | Chl fluorescence | |
| V15-15DAP | CER | |
| 15-25 DAP | Carbohydrates | sucrose, starch |
| Pre-Harvest | 1st internode diameter | |
| Pre-Harvest | Base 3 internode diameter | |
| Pre-Harvest | Ear internode diameter | |
| Maturity | Ear traits | diameter, length, kernel |
| | | number, kernel weight |

[0108] Electron transport rates (ETR) and CO2 exchange rates (CER): ETR and CER are measured with Li6400LCF (Licor, Lincoln, Nebr.) around V9-R1 stages. Leaf chlorophyll fluorescence is a quick way to monitor the source activity and is reported to be highly correlated with CO₂ assimilation under varies conditions (Photosyn Research, 37: 89-102). The youngest fully expanded leaf or 2 leaves above the ear leaf is measured with actinic light 1500 (with 10% blue light) micromol m⁻² so⁻¹, 28° C., CO2 levels 450 ppm. Ten plants are measured in each event. There are 2 readings for each plant.

[0109] A hand-held chlorophyll meter SPAD-502 (Minolta—Japan) is used to measure the total chlorophyll level on live transgenic plants and the wild type counterparts a. Three trifoliates from each plant are analyzed, and each trifoliate were analyzed three times. Then 9 data points are averaged to obtain the chlorophyll level. The number of analyzed plants of each genotype ranges from 5 to 8.

[0110] When selecting for yield improvement a useful statistical measurement approach comprises three components, i.e. modeling spatial autocorrelation of the test field separately for each location, adjusting traits of recombinant DNA events for spatial dependence for each location, and conducting an across location analysis. The first step in modeling spatial autocorrelation is estimating the covariance parameters of the semivariogram. A spherical covariance model is assumed to model the spatial autocorrelation. Because of the size and nature of the trial, it is likely that the spatial autocorrelation may change. Therefore, anisotropy is also assumed along with spherical covariance structure. The following set of equations describes the statistical form of the anisotropic spherical covariance model.

$$C ( h ; θ ) = vI ( h = 0 ) + {σ}^{2} ( 1 - \frac{3}{2} h + \frac{1}{2} {h}^{3} ) I ( h < 1 ) ,$$

where I(•) is the indicator function, h=\sqrt{\dot{x}²+\dot{y}²}, and

\dot{x}=[cos(ρπ/180)(x₁−x₂)−sin(ρπ/180)(y₁−y₂)]/ω_{X}

\dot{y}=[sin(ρπ/180)(x₁−x₂)+cos(ρπ/180)(y₁−y₂)]/ω_{y}

where s₁=(x₁, y₁) are the spatial coordinates of one location and s₂=(x₂, y₂) are the spatial coordinates of the second location. There are 5 covariance parameters, θ=(ν, σ₂, ρ, ωₙ, ωⱼ), where ν is the nugget effect, σ² is the partial sill, ρ is a rotation in degrees clockwise from north, ωₙ is a scaling parameter for the minor axis and ωⱼ is a scaling parameter for the major axis of an anisotropical ellipse of equal covariance. The five covariance parameters that defines the spatial trend will then be estimated by using data from heavily replicated pollinator plots via restricted maximum likelihood approach. In a multi-location field trial, spatial trend are modeled separately for each location.

[0111] After obtaining the variance parameters of the model, a variance-covariance structure is generated for the data set to be analyzed. This variance-covariance structure contains spatial information required to adjust yield data for spatial dependence. In this case, a nested model that best represents the treatment and experimental design of the study is used along with the variance-covariance structure to adjust the yield data. During this process the nursery or the seed batch effects can also be modeled and estimated to adjust the yields for any yield parity caused by seed batch differences. After spatially adjusted data from different locations are generated, all adjusted data is combined and analyzed assuming locations as replications. In this analysis, intra and inter-location variances are combined to estimate the standard error of yield from transgenic plants and control plants. Relative mean comparisons are used to indicate statistically significant yield improvements. A list of recombinant DNA constructs which show improved yield in transgenic plants is illustrated in Table 14.

TABLE 14

| | | | | | Confirmed |
|---|---|---|---|---|---|
| | | | | Positive | events/Actual |
| NUC | PEP | | | events/Total | events with |
| SEQ | SEQ | | | events | confirmation |
| ID | ID | PHE ID | Construct | screened | attempted |
| 12 | 351 | PHE0000016 | PMON67750 | 1/4 | 0/2 |
| 14 | 353 | PHE0000019 | PMON80879 | 1/3 | 0/0 |
| 15 | 354 | PHE0000020 | PMON81241 | 1/8 | 0/0 |
| 31 | 370 | PHE0000034 | PMON67805 | 1/6 | 0/4 |
| 32 | 371 | PHE0000038 | PMON68383 | 1/7 | 0/0 |
| 33 | 372 | PHE0000039 | PMON67807 | 1/3 | 0/2 |
| 41 | 380 | PHE0000245 | PMON68373 | 1/4 | 0/1 |
| 42 | 381 | PHE0000246 | PMON68374 | 1/3 | 0/2 |
| 43 | 382 | PHE0000247 | PMON68375 | 1/4 | 0/2 |
| 68 | 407 | PHE0000073 | PMON68357 | 1/6 | 0/5 |
| 72 | 411 | PHE0000077 | PMON67827 | 2/8 | 1/4 |
| 95 | 434 | PHE0000108 | PMON67849 | 1/4 | 0/3 |
| 101 | 440 | PHE0000116 | PMON68367 | 1/7 | 0/6 |
| 102 | 441 | PHE0000117 | PMON68368 | 1/2 | 0/1 |
| 103 | 442 | PHE0000118 | PMON67811 | 1/7 | 0/4 |
| 105 | 444 | PHE0000120 | PMON68853 | 1/6 | 0/2 |
| 112 | 451 | PHE0000127 | PMON68887 | 2/5 | 0/3 |
| 116 | 455 | PHE0000153 | PMON67817 | 1/6 | 0/5 |
| 117 | 456 | PHE0000154 | PMON67818 | 1/3 | 1/2 |
| 123 | 462 | PHE0000161 | PMON82231 | 1/4 | 0/0 |
| 135 | 474 | PHE0000177 | PMON68881 | 1/3 | 0/2 |
| 136 | 475 | PHE0000178 | PMON73166 | 1/2 | 0/1 |
| 143 | 482 | PHE0000185 | PMON69468 | 1/4 | 1/2 |
| 146 | 485 | PHE0000188 | PMON73167 | 1/4 | 0/4 |
| 148 | 487 | PHE0000192 | PMON68394 | 1/7 | 0/5 |
| 214 | 553 | PHE0000291 | PMON72455 | 1/3 | 0/3 |
| 230 | 569 | PHE0000308 | PMON68884 | 2/3 | 0/1 |
| 257 | 596 | PHE0000338 | PMON68628 | 1/2 | 0/2 |
| 263 | 602 | PHE0000346 | PMON73165 | 1/3 | 0/2 |
| 264 | 603 | PHE0000347 | PMON68386 | 1/2 | 0/2 |
| 265 | 604 | PHE0000349 | PMON68389 | 1/4 | 1/1 |
| 280 | 619 | PHE0000386 | PMON67834 | 1/3 | 0/3 |
| 303 | 642 | PHE0000418 | PMON69497 | 1/4 | 0/2 |
| 326 | 665 | PHE0000451 | PMON72475 | 1/3 | 0/0 |

### C. Selection for Enhanced Water Use Efficiency (WUE)

[0112] Described in this example is a high-throughput method for greenhouse selection of transgenic corn plants to wild type corn plants (tested as inbreds or hybrids) for water use efficiency. This selection process imposes 3 drought/re-water cycles on plants over a total period of 15 days after an initial stress free growth period of 11 days. Each cycle consists of 5 days, with no water being applied for the first four days and a water quenching on the 5th day of the cycle. The primary phenotypes analyzed by the selection method are the changes in plant growth rate as determined by height and biomass during a vegetative drought treatment. The hydration status of the shoot tissues following the drought is also measured. The plant height are measured at three time points. The first is taken just prior to the onset drought when the plant is 11 days old, which is the shoot initial height (SIH). The plant height is also measured halfway throughout the drought/re-water regimen, on day 18 after planting, to give rise to the shoot mid-drought height (SMH). Upon the completion of the final drought cycle on day 26 after planting, the shoot portion of the plant is harvested and measured for a final height, which is the shoot wilt height (SWH) and also measured for shoot wilted biomass (SWM). The shoot is placed in water at 40 degree Celsius in the dark. Three days later, the shoot is weighted to give rise to the shoot turgid weight (STM). After drying in an oven for four days, the shoots are weighted for shoot dry biomass (SDM). The shoot average height (SAH) is the mean plant height across the 3 height measurements. The procedure described above may be adjusted for +/−˜one day for each step given the situation.

To correct for slight differences between plants, a size corrected growth value is derived from SIH and SWH. This is the Relative Growth Rate (RGR). Relative Growth Rate (RGR) is calculated for each shoot using the formula [RGR %=(SWH−SIH)/((SWH+SIH)/2)*100]. Relative water content (RWC) is a measurement of how much (%) of the plant was water at harvest. Water Content (RWC) is calculated for each shoot using the formula [RWC %=(SWM−SDM)/(STM−SDM)*100]. Fully watered corn plants of this age run around 98% RWC. A list of recombinant DNA constructs which improved water use efficiency in transgenic plants is illustrated in Table 15.

TABLE 15

| | | | | | Confirmed |
|---|---|---|---|---|---|
| | | | | Positive | events/Actual |
| NUC | PEP | | | events/Total | events with |
| SEQ | SEQ | | | events | confirmation |
| ID | ID | PHE | Construct | screened | attempted |
| 2 | 341 | PHE0000006 | PMON68861 | 3/5 | 0/4 |
| 5 | 344 | PHE0000010 | PMON67800 | 2/5 | 0/4 |
| 8 | 347 | PHE0000012 | PMON67806 | 4/9 | 1/8 |
| 12 | 351 | PHE0000016 | PMON67750 | 3/4 | 1/4 |
| 15 | 354 | PHE0000020 | PMON81241 | 2/8 | 0/0 |
| 16 | 355 | PHE0000022 | PMON67826 | 2/3 | 1/2 |
| 17 | 356 | PHE0000024 | PMON68354 | 5/7 | 1/5 |
| 20 | 359 | PHE0000227 | PMON68376 | 3/5 | 0/4 |
| 23 | 362 | PHE0000049 | PMON80912 | 1/5 | 0/0 |
| 31 | 370 | PHE0000034 | PMON67805 | 4/7 | 0/7 |
| 32 | 371 | PHE0000038 | PMON68383 | 1/8 | 0/1 |
| 33 | 372 | PHE0000039 | PMON67807 | 2/3 | 0/2 |
| 34 | 373 | PHE0000040 | PMON67801 | 3/5 | 0/5 |
| 34 | 373 | PHE0000040 | PMON77889 | 1/4 | 0/0 |
| 37 | 376 | PHE0000045 | PMON81293 | 1/8 | 0/4 |
| 41 | 380 | PHE0000245 | PMON68373 | 2/5 | 1/3 |
| 42 | 381 | PHE0000246 | PMON68374 | 2/3 | 1/2 |
| 43 | 382 | PHE0000247 | PMON68375 | 3/4 | 1/2 |
| 46 | 385 | PHE0000051 | PMON68859 | 2/4 | 1/2 |
| 47 | 386 | PHE0000052 | PMON67813 | 3/5 | 0/5 |
| 48 | 387 | PHE0000382 | PMON74401 | 1/3 | 0/3 |
| 51 | 390 | PHE0000055 | PMON68355 | 1/3 | 1/3 |
| 53 | 392 | PHE0000057 | PMON68350 | 4/4 | 1/4 |
| 54 | 393 | PHE0000058 | PMON68351 | 2/3 | 1/2 |
| 56 | 395 | PHE0000060 | PMON68356 | 3/4 | 2/3 |
| 61 | 400 | PHE0000292 | PMON68888 | 2/2 | 0/2 |
| 62 | 401 | PHE0000067 | PMON67816 | 2/4 | 0/3 |
| 64 | 403 | PHE0000069 | PMON67821 | 4/5 | 0/5 |
| 65 | 404 | PHE0000070 | PMON67825 | 3/3 | 1/3 |
| 67 | 406 | PHE0000072 | PMON67828 | 2/2 | 2/2 |
| 68 | 407 | PHE0000073 | PMON68357 | 6/9 | N/A |
| 72 | 411 | PHE0000077 | PMON67827 | 1/6 | 1/5 |
| 74 | 413 | PHE0000079 | PMON67752 | 5/5 | 1/5 |
| 79 | 418 | PHE0000086 | PMON67812 | 3/5 | 0/0 |
| 83 | 422 | PHE0000092 | PMON68359 | 6/7 | 0/4 |
| 95 | 434 | PHE0000108 | PMON67849 | 3/4 | 1/4 |
| 99 | 438 | PHE0000114 | PMON68361 | 1/2 | 0/1 |
| 101 | 440 | PHE0000116 | PMON68367 | 3/7 | 0/7 |
| 102 | 441 | PHE0000117 | PMON68368 | 1/2 | 1/2 |
| 103 | 442 | PHE0000118 | PMON67811 | 5/7 | 3/6 |
| 104 | 443 | PHE0000119 | PMON68363 | 2/4 | 1/2 |
| 105 | 444 | PHE0000120 | PMON68853 | 2/6 | 0/2 |
| 108 | 447 | PHE0000123 | PMON68855 | 2/4 | 0/3 |
| 110 | 449 | PHE0000125 | PMON68369 | 2/7 | 0/3 |
| 111 | 450 | PHE0000126 | PMON69458 | 1/6 | 0/6 |
| 112 | 451 | PHE0000127 | PMON68887 | 1/5 | 0/4 |
| 114 | 453 | PHE0000133 | PMON68860 | 3/4 | 0/4 |
| 115 | 454 | PHE0000152 | PMON77899 | 1/7 | 0/4 |
| 116 | 455 | PHE0000153 | PMON67817 | 3/6 | 1/6 |
| 117 | 456 | PHE0000154 | PMON67818 | 2/3 | 2/2 |
| 123 | 462 | PHE0000161 | PMON82231 | 2/4 | 0/0 |
| 124 | 463 | PHE0000162 | PMON75488 | 2/6 | 0/0 |
| 129 | 468 | PHE0000168 | PMON68857 | 1/5 | 0/2 |
| 134 | 473 | PHE0000176 | PMON68388 | 1/4 | 0/2 |
| 135 | 474 | PHE0000177 | PMON68881 | 1/3 | 0/2 |
| 136 | 475 | PHE0000178 | PMON73166 | 2/2 | 0/2 |
| 143 | 482 | PHE0000185 | PMON69468 | 3/4 | 0/3 |
| 144 | 483 | PHE0000186 | PMON69460 | 2/2 | 1/1 |
| 146 | 485 | PHE0000188 | PMON73167 | 1/4 | 0/4 |
| 148 | 487 | PHE0000192 | PMON68394 | 6/7 | 0/1 |
| 169 | 508 | PHE0000235 | PMON73161 | 2/2 | 0/2 |
| 170 | 509 | PHE0000237 | PMON68891 | 2/2 | 0/2 |
| 171 | 510 | PHE0000238 | PMON69466 | 3/3 | 0/3 |
| 172 | 511 | PHE0000239 | PMON72466 | 1/5 | 1/4 |
| 177 | 516 | PHE0000249 | PMON74422 | 1/2 | 0/0 |
| 180 | 519 | PHE0000252 | PMON74407 | 1/4 | 0/0 |
| 186 | 525 | PHE0000260 | PMON75487 | 2/6 | 0/0 |
| 190 | 529 | PHE0000264 | PMON68866 | 2/3 | 1/3 |
| 193 | 532 | PHE0000267 | PMON68867 | 1/5 | 1/3 |
| 203 | 542 | PHE0000277 | PMON68890 | 1/2 | 0/1 |
| 204 | 543 | PHE0000279 | PMON68896 | 2/3 | 0/2 |
| 210 | 549 | PHE0000287 | PMON68898 | 2/3 | 0/2 |
| 214 | 553 | PHE0000291 | PMON72455 | 1/3 | 0/3 |
| 216 | 555 | PHE0000294 | PMON68897 | 1/3 | 0/0 |
| 217 | 556 | PHE0000295 | PMON68894 | 2/2 | 0/2 |
| 219 | 558 | PHE0000297 | PMON68899 | 2/4 | 0/4 |
| 221 | 560 | PHE0000299 | PMON68875 | 1/2 | 1/2 |
| 223 | 562 | PHE0000301 | PMON68877 | 2/6 | 0/5 |
| 228 | 567 | PHE0000306 | PMON68882 | 1/1 | 0/1 |
| 233 | 572 | PHE0000311 | PMON72458 | 1/1 | 0/0 |
| 234 | 573 | PHE0000312 | PMON72456 | 2/4 | 0/4 |
| 235 | 574 | PHE0000313 | PMON68378 | 1/3 | 1/2 |
| 236 | 575 | PHE0000314 | PMON68379 | 2/4 | 2/4 |
| 237 | 576 | PHE0000315 | PMON68381 | 1/4 | 0/4 |
| 238 | 577 | PHE0000316 | PMON68382 | 1/4 | 0/3 |
| 239 | 578 | PHE0000317 | PMON68380 | 5/5 | 1/5 |
| 241 | 580 | PHE0000322 | PMON74403 | 1/1 | 1/1 |
| 242 | 581 | PHE0000323 | PMON68400 | 1/7 | 0/0 |
| 243 | 582 | PHE0000324 | PMON73162 | 4/5 | 1/5 |
| 245 | 584 | PHE0000326 | PMON72463 | 2/5 | 1/5 |
| 246 | 585 | PHE0000327 | PMON69481 | 1/5 | 0/5 |
| 247 | 586 | PHE0000328 | PMON74416 | 2/4 | 0/4 |
| 249 | 588 | PHE0000330 | PMON73164 | 1/5 | 0/5 |
| 251 | 590 | PHE0000332 | PMON68385 | 1/3 | 0/1 |
| 252 | 591 | PHE0000333 | PMON75470 | 1/6 | 0/0 |
| 253 | 592 | PHE0000334 | PMON68395 | 2/9 | 0/2 |
| 262 | 601 | PHE0000345 | PMON74411 | 6/8 | 2/8 |
| 263 | 602 | PHE0000346 | PMON73165 | 1/3 | 0/3 |
| 264 | 603 | PHE0000347 | PMON68386 | 1/2 | 0/1 |
| 265 | 604 | PHE0000349 | PMON68389 | 1/2 | 0/2 |
| 266 | 605 | PHE0000350 | PMON74410 | 1/6 | 0/6 |
| 268 | 607 | PHE0000352 | PMON74409 | 1/5 | 0/5 |
| 269 | 608 | PHE0000353 | PMON73160 | 4/4 | 3/4 |
| 272 | 611 | PHE0000356 | PMON72464 | 2/4 | 0/3 |
| 280 | 619 | PHE0000386 | PMON67834 | 1/3 | 0/0 |
| 294 | 633 | PHE0000401 | PMON67837 | 4/5 | 0/0 |
| 301 | 640 | PHE0000415 | PMON67846 | 1/5 | 0/0 |
| 303 | 642 | PHE0000418 | PMON69497 | 2/4 | 0/0 |
| 304 | 643 | PHE0000419 | PMON67848 | 2/3 | 0/0 |
| 310 | 649 | PHE0000426 | PMON74408 | 1/5 | 0/0 |
| 313 | 652 | PHE0000429 | PMON74418 | 2/3 | 0/2 |
| 339 | 678 | PHE0000017 | PMON68850 | 3/4 | 1/4 |

### D. Selection for Growth Under Cold Stress

[0113] (1) Cold germination assay—Three sets of seeds are used for the assay. The first set consists of positive transgenic events (F1 hybrid) where the genes of the present invention are expressed in the seed. The second seed set is nontransgenic, wild-type negative control made from the same genotype as the transgenic events. The third set consisted of two cold tolerant and one cold sensitive commercial check lines of corn. All seeds are treated with a fungicide “Captan” (MAESTRO® 80DF Fungicide, Arvesta Corporation, San Francisco, Calif., USA). 0.43 mL Captan is applied per 45 g of corn seeds by mixing it well and drying the fungicide prior to the experiment.

[0114] Corn kernels are placed embryo side down on blotter paper within an individual cell (8.9×8.9 cm) of a germination tray (54×36 cm). Ten seeds from an event are placed into one cell of the germination tray. Each tray can hold 21 transgenic events and 3 replicates of wildtype (LH244SDms+LH59), which is randomized in a complete block design. For every event there are five replications (five trays). The trays are placed at 9.7° C. for 24 days (no light) in a Convrion growth chamber (Conviron Model PGV36, Controlled Environments, Winnipeg, Canada). Two hundred and fifty millilters of deionized water are added to each germination tray. Germination counts are taken 10th, 11th, 12th, 13th, 14th, 17th, 19th, 21st, and 24th day after start date of the experiment. Seeds are considered germinated if the emerged radicle size is 1 cm. From the germination counts germination index is calculated.

[0115] The germination index is calculated as per:

Germination index=(Σ([T+1−nᵢ]*[Pᵢ−Pᵢ₋₁]))/T

Where T is the total number of days for which the germination assay is performed. The number of days after planting is defined by n. “i” indicated the number of times the germination had been counted, including the current day. P is the percentage of seeds germinated during any given rating. Statistical differences are calculated between transgenic events and wild type control. After statistical analysis, the events that show a statistical significance at the p level of less than 0.1 relative to wild-type controls will advance to a secondary cold selection. The secondary cold screen is conducted in the same manner of the primary selection only increasing the number of repetitions to ten. Statistical analysis of the data from the secondary selection is conducted to identify the events that show a statistical significance at the p level of less than 0.05 relative to wild-type controls. A list of recombinant DNA constructs which improve growth in seed under cold stress in transgenic plants is illustrated in Table 16.

TABLE 16

| | | | | | Confirmed |
|---|---|---|---|---|---|
| | | | | Positive | events/Actual |
| NUC | PEP | | | events/Total | events with |
| SEQ | SEQ | | | events | confirmation |
| ID | ID | PHE | Construct | screened | attempted |
| 2 | 341 | PHE0000006 | PMON68861 | 1/4 | 0/1 |
| 5 | 344 | PHE0000010 | PMON67800 | 1/5 | 0/5 |
| 8 | 347 | PHE0000012 | PMON67808 | 3/7 | 0/3 |
| 12 | 351 | PHE0000016 | PMON67750 | 0/4 | 0/1 |
| 14 | 353 | PHE0000019 | PMON80879 | 1/8 | 0/0 |
| 16 | 355 | PHE0000022 | PMON67826 | 1/4 | 0/2 |
| 17 | 356 | PHE0000024 | PMON68354 | 1/7 | 0/5 |
| 29 | 368 | PHE0000032 | PMON83627 | 3/7 | 1/7 |
| 31 | 370 | PHE0000034 | PMON67805 | 5/7 | 4/6 |
| 33 | 372 | PHE0000039 | PMON67807 | 1/3 | 0/2 |
| 34 | 373 | PHE0000040 | PMON67801 | 2/5 | 1/4 |
| 34 | 373 | PHE0000040 | PMON92405 | 1/7 | 0/0 |
| 41 | 380 | PHE0000245 | PMON68373 | 1/3 | 0/2 |
| 42 | 381 | PHE0000246 | PMON68374 | 2/3 | 1/2 |
| 43 | 382 | PHE0000247 | PMON68375 | 2/4 | 0/2 |
| 44 | 383 | PHE0000106 | PMON92483 | 1/7 | 0/0 |
| 53 | 392 | PHE0000057 | PMON68350 | 3/4 | 1/3 |
| 56 | 395 | PHE0000060 | PMON68356 | 3/3 | 2/3 |
| 61 | 400 | PHE0000292 | PMON68888 | 1/2 | 0/2 |
| 62 | 401 | PHE0000067 | PMON67816 | 2/4 | 2/4 |
| 64 | 403 | PHE0000069 | PMON67821 | 1/5 | 0/3 |
| 68 | 407 | PHE0000073 | PMON68357 | 5/9 | 4/9 |
| 72 | 411 | PHE0000077 | PMON67827 | 1/6 | 0/5 |
| 74 | 413 | PHE0000079 | PMON67752 | 0/5 | 0/0 |
| 86 | 425 | PHE0000098 | PMON73168 | 1/2 | 0/0 |
| 92 | 431 | PHE0000104 | PMON68608 | 4/6 | 3/4 |
| 95 | 434 | PHE0000108 | PMON67849 | 1/4 | 0/2 |
| 101 | 440 | PHE0000116 | PMON68367 | 4/7 | 2/7 |
| 103 | 442 | PHE0000118 | PMON67811 | 5/7 | 2/6 |
| 105 | 444 | PHE0000120 | PMON68853 | 5/6 | 2/5 |
| 108 | 447 | PHE0000123 | PMON68855 | 1/5 | 0/3 |
| 109 | 448 | PHE0000124 | PMON68856 | 1/5 | 0/3 |
| 111 | 450 | PHE0000126 | PMON69458 | 2/7 | 1/7 |
| 112 | 451 | PHE0000127 | PMON68887 | 4/5 | 3/4 |
| 114 | 453 | PHE0000133 | PMON68860 | 3/4 | 0/4 |
| 115 | 454 | PHE0000152 | PMON77899 | 4/7 | 3/7 |
| 116 | 455 | PHE0000153 | PMON67817 | 6/6 | 5/6 |
| 117 | 456 | PHE0000154 | PMON67818 | 1/2 | 1/1 |
| 117 | 456 | PHE0000154 | PMON85035 | 1/7 | 0/0 |
| 120 | 459 | PHE0000158 | PMON73169 | 1/2 | 0/1 |
| 123 | 462 | PHE0000161 | PMON82231 | 1/4 | 0/0 |
| 124 | 463 | PHE0000162 | PMON75488 | 1/5 | 0/0 |
| 129 | 468 | PHE0000168 | PMON68857 | 3/5 | 2/3 |
| 133 | 472 | PHE0000173 | PMON73171 | 1/3 | 0/0 |
| 135 | 474 | PHE0000177 | PMON68881 | 1/3 | 0/2 |
| 136 | 475 | PHE0000178 | PMON73166 | 1/2 | 0/1 |
| 141 | 480 | PHE0000183 | PMON80258 | 3/5 | 0/5 |
| 143 | 482 | PHE0000185 | PMON69468 | 3/4 | 1/3 |
| 146 | 485 | PHE0000188 | PMON73167 | 1/4 | 1/2 |
| 148 | 487 | PHE0000192 | PMON68394 | 1/1 | 0/0 |
| 165 | 504 | PHE0000231 | PMON72498 | 3/7 | 2/7 |
| 168 | 507 | PHE0000234 | PMON73159 | 1/1 | 0/0 |
| 169 | 508 | PHE0000235 | PMON73161 | 2/2 | 0/2 |
| 170 | 509 | PHE0000237 | PMON68891 | 2/2 | 0/2 |
| 171 | 510 | PHE0000238 | PMON69466 | 3/3 | 0/3 |
| 172 | 511 | PHE0000239 | PMON72466 | 2/5 | 1/4 |
| 173 | 512 | PHE0000240 | PMON72468 | 3/5 | 1/5 |
| 182 | 521 | PHE0000254 | PMON73172 | 1/6 | 0/0 |
| 190 | 529 | PHE0000264 | PMON68866 | 4/4 | 3/4 |
| 191 | 530 | PHE0000265 | PMON69469 | 1/1 | 0/0 |
| 192 | 531 | PHE0000266 | PMON69470 | 3/4 | 2/3 |
| 193 | 532 | PHE0000267 | PMON68867 | 2/6 | 1/4 |
| 196 | 535 | PHE0000270 | PMON84751 | 1/5 | 0/1 |
| 199 | 538 | PHE0000273 | PMON74423 | 1/2 | 0/0 |
| 204 | 543 | PHE0000279 | PMON68896 | 1/3 | 0/2 |
| 210 | 549 | PHE0000287 | PMON68898 | 3/4 | 1/2 |
| 214 | 553 | PHE0000291 | PMON72455 | 3/3 | 2/3 |
| 217 | 556 | PHE0000295 | PMON68894 | 3/4 | 0/2 |
| 219 | 558 | PHE0000297 | PMON68899 | 1/4 | 1/3 |
| 220 | 559 | PHE0000298 | PMON68874 | 2/5 | 1/3 |
| 230 | 569 | PHE0000308 | PMON68884 | 3/3 | 2/2 |
| 234 | 573 | PHE0000312 | PMON72456 | 1/4 | 1/3 |
| 234 | 573 | PHE0000312 | PMON92811 | 2/7 | 0/7 |
| 236 | 575 | PHE0000314 | PMON68379 | 1/4 | 0/3 |
| 237 | 576 | PHE0000315 | PMON68381 | 2/4 | 0/2 |
| 239 | 578 | PHE0000317 | PMON68380 | 3/7 | 1/7 |
| 242 | 581 | PHE0000323 | PMON68400 | 4/5 | 2/5 |
| 246 | 585 | PHE0000327 | PMON69481 | 1/5 | 1/3 |
| 247 | 586 | PHE0000328 | PMON74416 | 2/6 | 1/2 |
| 249 | 588 | PHE0000330 | PMON73164 | 3/5 | 1/5 |
| 252 | 591 | PHE0000333 | PMON75470 | 2/3 | 0/0 |
| 253 | 592 | PHE0000334 | PMON68395 | 4/9 | 1/5 |
| 254 | 593 | PHE0000335 | PMON74413 | 1/6 | 0/2 |
| 260 | 599 | PHE0000341 | PMON68397 | 2/2 | 0/0 |
| 262 | 601 | PHE0000345 | PMON74411 | 7/8 | 3/6 |
| 266 | 605 | PHE0000350 | PMON74410 | 1/6 | 0/3 |
| 268 | 607 | PHE0000352 | PMON74409 | 1/5 | 0/3 |
| 269 | 608 | PHE0000353 | PMON73160 | 4/4 | 3/4 |
| 272 | 611 | PHE0000356 | PMON72464 | 4/4 | 0/4 |
| 280 | 619 | PHE0000386 | PMON67834 | 1/3 | 0/0 |
| 295 | 634 | PHE0000402 | PMON67833 | 2/3 | 0/1 |
| 300 | 639 | PHE0000414 | PMON67845 | 1 | 0/0 |
| 306 | 645 | PHE0000421 | PMON83760 | 1/8 | 0/0 |
| 317 | 656 | PHE0000433 | PMON74424 | 1/2 | 0/0 |
| 324 | 663 | PHE0000440 | PMON72473 | 5/6 | 1/6 |
| 325 | 664 | PHE0000441 | PMON72474 | 2/5 | 1/5 |
| 328 | 667 | PHE0000453 | PMON92409 | 1/4 | 0/0 |
| 337 | 676 | PHE0000485 | PMON69498 | 4/7 | 2/7 |
| 338 | 677 | PHE0000486 | PMON69496 | 2/5 | 1/5 |

[0116] (2) Cold Shock assay—The experimental set-up for the cold shock assay is the same as described in the above cold germination assay except seeds were grown in potted media for the cold shock assay.

[0117] The desired numbers of 2.5″ square plastic pots are placed on flats (n=32, 4×8). Pots were filled with Metro Mix 200 soil-less media containing 19:6:12 fertilizer (6 lbs/cubic yard) (Metro Mix, Pots and Flat are obtained from Hummert International, Earth City, Mo.). After planting seeds, pots are placed in a growth chamber set at 23° C., relative humidity of 65% with 12 hour day and night photoperiod (300 uE/m2-min). Planted seeds are watered for 20 minute every other day by sub-irrigation and flats were rotated every third day in a growth chamber for growing corn seedlings.

[0118] On the 10^{th} day after planting the transgenic positive and wild-type negative (WT) plants are positioned in flats in an alternating pattern. Chlorophyll fluorescence of plants is measured on the 10^{th} day during the dark period of growth by using a PAM-2000 portable fluorometer as per the manufacturer's instructions (Walz, Germany). After chlorophyll measurements, leaf samples from each event are collected for confirming the expression of genes of the present invention. For expression analysis six V1 leaf tips from each selection are randomly harvested. The flats are moved to a growth chamber set at 5° C. All other conditions such as humidity, day/night cycle and light intensity are held constant in the growth chamber. The flats are sub-irrigated every day after transfer to the cold temperature. On the 4^{th} day chlorophyll fluorescence is measured. Plants are transferred to normal growth conditions after six days of cold shock treatment and allowed to recover for the next three days. During this recovery period the length of the V3 leaf is measured on the 1^{st} and 3^{rd} days. After two days of recovery V2 leaf damage is determined visually by estimating percent of green V2 leaf.

[0119] Statistical differences in V3 leaf growth, V2 leaf necrosis and fluorescence during pre-shock and cold shock can be used for estimation of cold shock damage on corn plants.

[0120] (3) Early seedling growth assay—Three sets of seeds are used for the experiment. The first set consists of positive transgenic events (F1 hybrid) where the genes of the present invention are expressed in the seed. The second seed set is nontransgenic, wild-type negative control made from the same genotype as the transgenic events. The third seed set consists of two cold tolerant and two cold sensitive commercial check lines of corn. All seeds are treated with a fungicide “Captan”, (3a,4,7,a-tetrahydro-2-[(trichloromethly)thio]-1H-isoindole-1,3(2H)-dione, Drex Chemical Co. Memphis, Tenn.).

[0121] Seeds are grown in germination paper for the early seedling growth assay. Three 12″×18″ pieces of germination paper (Anchor Paper #SD7606) are used for each entry in the test (three repetitions per transgenic event). The papers are wetted in a solution of 0.5% KNO₃ and 0.1% Thyram.

[0122] For each paper fifteen seeds are placed on the line evenly spaced down the length of the paper. The fifteen seeds are positioned on the paper such that the radical would grow downward, for example longer distance to the paper's edge. The wet paper is rolled up starting from one of the short ends. The paper is rolled evenly and tight enough to hold the seeds in place. The roll is secured into place with two large paper clips, one at the top and one at the bottom. The rolls are incubated in a growth chamber at 23° C. for three days in a randomized complete block design within an appropriate container. The chamber is set for 65% humidity with no light cycle. For the cold stress treatment the rolls are then incubated in a growth chamber at 12° C. for twelve days. The chamber is set for 65% humidity with no light cycle.

[0123] After the cold treatment the germination papers are unrolled and the seeds that did not germinate are discarded. The lengths of the radicle and coleoptile for each seed are measured through an automated imaging program that automatically collects and processes the images. The imaging program automatically measures the shoot length, root length, and whole seedling length of every individual seedling and then calculates the average of each roll.

[0124] After statistical analysis, the events that show a statistical significance at the p level of less than 0.1 relative to wild-type controls will advance to a secondary cold selection. The secondary cold selection is conducted in the same manner of the primary selection only increasing the number of repetitions to five. Statistical analysis of the data from the secondary selection is conducted to identify the events that show a statistical significance at the p level of less than 0.05 relative to wild-type controls.

### 4. Cold Field Efficacy Trial

[0125] This example sets forth a cold field efficacy trial to identify gene constructs that confer enhanced cold vigor at germination and early seedling growth under early spring planting field conditions in conventional-till and simulated no-till environments. Seeds are planted into the ground around two weeks before local farmers are beginning to plant corn so that a significant cold stress is exerted onto the crop, named as cold treatment. Seeds also are planted under local optimal planting conditions such that the crop has little or no exposure to cold condition, named as normal treatment. The cold field efficacy trials are carried out in five locations, including Glyndon Minn., Mason Mich., Monmouth Ill., Dayton Iowa, Mystic Conn. At each location, seeds are planted under both cold and normal conditions with 3 repetitions per treatment, 20 kernels per row and single row per plot. Seeds are planted 1.5 to 2 inch deep into soil to avoid muddy conditions. Two temperature monitors are set up at each location to monitor both air and soil temperature daily.

[0126] Seed emergence is defined as the point when the growing shoot breaks the soil surface. The number of emerged seedling in each plot is counted everyday from the day the earliest plot begins to emerge until no significant changes in emergence occur. In addition, for each planting date, the latest date when emergence is 0 in all plots is also recorded. Seedling vigor is also rated at V3-V4 stage before the average of corn plant height reaches 10 inches, with 1=excellent early growth, 5=Average growth and 9=poor growth. Days to 50% emergence, maximum percent emergence and seedling vigor are calculated using SAS software for the data within each location or across all locations.

A list of recombinant DNA constructs which enhanced cold vigor at germination and early seedling growth under early spring planting field conditions in table 17.

TABLE 17

| | | | | | Confirmed |
|---|---|---|---|---|---|
| | | | | Positive | events/Actual |
| NUC | PEP | | | events/Total | events with |
| SEQ | SEQ | | | events | confirmation |
| ID | ID | PHE | Construct | screened | attempted |
| 31 | 370 | PHE0000034 | PMON67805 | | 0/0 |
| 34 | 373 | PHE0000040 | PMON67801 | 1/5 | 0/0 |
| 92 | 431 | PHE0000104 | PMON68608 | 3/4 | 0/0 |
| 124 | 463 | PHE0000162 | PMON75488 | 1/4 | 0/0 |
| 129 | 468 | PHE0000168 | PMON68857 | 2/3 | 0/0 |
| 143 | 482 | PHE0000185 | PMON69468 | 2/3 | 0/0 |
| 165 | 504 | PHE0000231 | PMON72498 | 2/3 | 0/0 |
| 192 | 531 | PHE0000266 | PMON69470 | 2/2 | 0/0 |
| 242 | 581 | PHE0000323 | PMON68400 | 1/3 | 0/0 |
| 262 | 601 | PHE0000345 | PMON74411 | 4/4 | 0/0 |
| 269 | 608 | PHE0000353 | PMON73160 | 1/4 | 0/0 |
| 294 | 633 | PHE0000401 | PMON67837 | 1/3 | 0/0 |
| 310 | 649 | PHE0000426 | PMON74408 | 1/4 | 0/0 |
| 337 | 676 | PHE0000485 | PMON69498 | 2/3 | 0/0 |

E. Screens for Transgenic Plant Seeds with Increased Protein and/or Oil Levels

[0127] This example sets forth a high-throughput selection for identifying plant seeds with improvement in seed composition using the Infratec 1200 series Grain Analyzer, which is a near-infrared transmittance spectrometer used to determine the composition of a bulk seed sample. Near infrared analysis is a non-destructive, high-throughput method that can analyze multiple traits in a single sample scan. An NIR calibration for the analytes of interest is used to predict the values of an unknown sample. The NIR spectrum is obtained for the sample and compared to the calibration using a complex chemometric software package that provides a predicted values as well as information on how well the sample fits in the calibration.

[0128] Infratec Model 1221, 1225, or 1227 with transport module by Foss North America is used with cuvette, item # 1000-4033, Foss North America or for small samples with small cell cuvette, Foss standard cuvette modified by Leon Girard Co. Corn and soy check samples of varying composition maintained in check cell cuvettes are supplied by Leon Girard Co. NIT collection software is provided by Maximum Consulting Inc. Software. Calculations are performed automatically by the software. Seed samples are received in packets or containers with barcode labels from the customer. The seed is poured into the cuvettes and analyzed as received. The detail information has been provided in Table 18.

TABLE 18

| | |
|---|---|
| Typical sample(s): | Whole grain corn and soybean seeds |
| Analytical time to run method: | Less than 0.75 min per sample |
| Total elapsed time per run: | 1.5 minute per sample |
| Typical and minimum sample | Corn typical: 50 cc; minimum 30 cc |
| size: | Soybean typical: 50 cc; minimum 5 cc |
| Typical analytical range: | Determined in part by the specific |
| | calibration. |
| | Corn - moisture 5-15%, oil 5-20%, |
| | protein 5-30%, starch 50-75%, and |
| | density 1.0-1.3%. |
| | Soybean - moisture 5-15%, oil 15-25%, |
| | and protein 35-50%. |

A list of recombinant DNA constructs which improve seed compositions in terms of protein content in transgenic plants is illustrated in Table 19.

TABLE 19

| | | | | | Confirmed |
|---|---|---|---|---|---|
| | | | | Positive | events/Actual |
| NUC | PEP | | | events/Total | events with |
| SEQ | SEQ | | | events | confirmation |
| ID | ID | PHE | Construct | screened | attempted |
| 2 | 341 | PHE0000006 | PMON68861 | 1/1 | 0/0 |
| 6 | 345 | PHE0000278 | PMON68886 | 1/1 | 0/0 |
| 8 | 347 | PHE0000012 | PMON57626 | 1/8 | 0/1 |
| 8 | 347 | PHE0000012 | PMON67806 | 2/3 | 0/4 |
| 8 | 347 | PHE0000012 | PMON67808 | 1/6 | 2/2 |
| 12 | 351 | PHE0000016 | PMON67750 | 1/3 | 2/2 |
| 20 | 359 | PHE0000227 | PMON68376 | 1/5 | 0/0 |
| 22 | 361 | PHE0000259 | PMON74404 | 2/5 | 1/1 |
| 29 | 368 | PHE0000032 | PMON83627 | 8/8 | 3/3 |
| 31 | 370 | PHE0000034 | PMON67805 | 1/6 | 0/0 |
| 33 | 372 | PHE0000039 | PMON67807 | 1/2 | 0/3 |
| 34 | 373 | PHE0000040 | PMON67801 | 1/5 | 0/2 |
| 37 | 376 | PHE0000045 | PMON81293 | 1/2 | 0/0 |
| 41 | 380 | PHE0000245 | PMON68373 | 1/2 | 1/2 |
| 42 | 381 | PHE0000246 | PMON68374 | 2/2 | 1/4 |
| 43 | 382 | PHE0000247 | PMON68375 | 2/3 | 1/2 |
| 44 | 383 | PHE0000106 | PMON69457 | 1/1 | 0/0 |
| 47 | 386 | PHE0000052 | PMON67813 | 1/5 | 0/0 |
| 53 | 392 | PHE0000057 | PMON68350 | 1/3 | 0/0 |
| 54 | 393 | PHE0000058 | PMON68351 | 2/4 | 0/4 |
| 56 | 395 | PHE0000060 | PMON68356 | 3/4 | 6/6 |
| 59 | 398 | PHE0000064 | PMON67804 | 1/6 | 0/0 |
| 61 | 400 | PHE0000292 | PMON68888 | 1/3 | 0/1 |
| 62 | 401 | PHE0000067 | PMON67816 | 3/4 | 0/0 |
| 64 | 403 | PHE0000069 | PMON67821 | 3/5 | 0/1 |
| 67 | 406 | PHE0000072 | PMON67828 | 1/2 | 0/0 |
| 68 | 407 | PHE0000073 | PMON68357 | 3/6 | 2/6 |
| 71 | 410 | PHE0000076 | PMON68851 | 2/2 | 1/2 |
| 72 | 411 | PHE0000077 | PMON67827 | 1/5 | 2/2 |
| 72 | 411 | PHE0000077 | PMON77890 | 1/2 | 0/0 |
| 74 | 413 | PHE0000079 | PMON67752 | 1/5 | 0/0 |
| 79 | 418 | PHE0000086 | PMON67812 | 3/5 | 2/3 |
| 82 | 421 | PHE0000091 | PMON68358 | 1/1 | 0/0 |
| 83 | 422 | PHE0000092 | PMON68359 | 2/6 | 0/0 |
| 86 | 425 | PHE0000098 | PMON73168 | 1/4 | 0/0 |
| 90 | 429 | PHE0000102 | PMON67815 | 1/2 | 0/0 |
| 92 | 431 | PHE0000104 | PMON68608 | 2/6 | 0/1 |
| 99 | 438 | PHE0000114 | PMON68361 | 2/2 | 0/2 |
| 101 | 440 | PHE0000116 | PMON68367 | 3/7 | 0/4 |
| 102 | 441 | PHE0000117 | PMON68368 | 2/2 | 0/2 |
| 103 | 442 | PHE0000118 | PMON67811 | 6/6 | 6/16 |
| 104 | 443 | PHE0000119 | PMON68363 | 3/4 | 3/6 |
| 105 | 444 | PHE0000120 | PMON68853 | 1/2 | 2/2 |
| 108 | 447 | PHE0000123 | PMON68855 | 4/4 | 2/2 |
| 110 | 449 | PHE0000125 | PMON68369 | 2/7 | 2/2 |
| 111 | 450 | PHE0000126 | PMON69458 | 2/8 | 1/1 |
| 112 | 451 | PHE0000127 | PMON68887 | 2/4 | 1/4 |
| 114 | 453 | PHE0000133 | PMON68860 | 1/4 | 0/0 |
| 115 | 454 | PHE0000152 | PMON77899 | 2/7 | 2/2 |
| 116 | 455 | PHE0000153 | PMON67817 | 4/6 | 0/0 |
| 117 | 456 | PHE0000154 | PMON67818 | 1/3 | 0/0 |
| 122 | 461 | PHE0000160 | PMON75485 | 1/1 | 0/0 |
| 124 | 463 | PHE0000162 | PMON75488 | 2/5 | 0/0 |
| 125 | 464 | PHE0000164 | PMON73170 | 2/2 | 0/0 |
| 129 | 468 | PHE0000168 | PMON68857 | 1/5 | 1/1 |
| 133 | 472 | PHE0000173 | PMON73171 | 2/4 | 0/0 |
| 134 | 473 | PHE0000176 | PMON68388 | 1/3 | 0/0 |
| 136 | 475 | PHE0000178 | PMON73166 | 1/2 | 0/0 |
| 138 | 477 | PHE0000180 | PMON83753 | 5/8 | 1/5 |
| 140 | 479 | PHE0000182 | PMON74420 | 1/3 | 1/1 |
| 143 | 482 | PHE0000185 | PMON69468 | 2/3 | 0/2 |
| 144 | 483 | PHE0000186 | PMON69460 | 1/2 | 0/0 |
| 146 | 485 | PHE0000188 | PMON73167 | 1/4 | 0/1 |
| 148 | 487 | PHE0000192 | PMON68394 | 1/7 | 0/1 |
| 149 | 488 | PHE0000193 | PMON68889 | 2/3 | 0/0 |
| 151 | 490 | PHE0000219 | PMON68865 | 1/3 | 0/0 |
| 155 | 494 | PHE0000220 | PMON74434 | 4/8 | 2/3 |
| 158 | 497 | PHE0000223 | PMON69478 | 1/1 | 1/1 |
| 165 | 504 | PHE0000231 | PMON72498 | 1/5 | 0/0 |
| 168 | 507 | PHE0000234 | PMON73159 | 1/1 | 0/0 |
| 170 | 509 | PHE0000237 | PMON68891 | 1/2 | 0/0 |
| 171 | 510 | PHE0000238 | PMON69466 | 1/3 | 0/0 |
| 172 | 511 | PHE0000239 | PMON72466 | 3/5 | 0/0 |
| 175 | 514 | PHE0000242 | PMON72470 | 1/3 | 1/1 |
| 180 | 519 | PHE0000252 | PMON74407 | 2/4 | 0/1 |
| 182 | 521 | PHE0000254 | PMON73172 | 1/4 | 0/1 |
| 186 | 525 | PHE0000260 | PMON75487 | 2/6 | 0/0 |
| 192 | 531 | PHE0000266 | PMON69470 | 1/3 | 0/3 |
| 193 | 532 | PHE0000267 | PMON68867 | 3/5 | 2/2 |
| 202 | 541 | PHE0000276 | PMON68868 | 1/1 | 0/0 |
| 203 | 542 | PHE0000277 | PMON68890 | 1/2 | 0/0 |
| 204 | 543 | PHE0000279 | PMON68896 | 1/1 | 0/0 |
| 204 | 543 | PHE0000279 | PMON68896 | 1/1 | 0/0 |
| 205 | 544 | PHE0000280 | PMON72451 | 1/3 | 0/0 |
| 214 | 553 | PHE0000291 | PMON85037 | 2/15 | 1/2 |
| 216 | 555 | PHE0000294 | PMON68897 | 2/3 | 1/1 |
| 217 | 556 | PHE0000295 | PMON68894 | 3/4 | 0/4 |
| 219 | 558 | PHE0000297 | PMON68899 | 1/3 | 0/0 |
| 220 | 559 | PHE0000298 | PMON68874 | 2/4 | 0/1 |
| 222 | 561 | PHE0000300 | PMON68876 | 1/3 | 0/1 |
| 223 | 562 | PHE0000301 | PMON68877 | 3/6 | 0/0 |
| 228 | 567 | PHE0000306 | PMON68882 | 1/1 | 0/0 |
| 230 | 569 | PHE0000308 | PMON68884 | 1/2 | 0/2 |
| 232 | 571 | PHE0000310 | PMON68377 | 2/2 | 0/0 |
| 233 | 572 | PHE0000311 | PMON72458 | 1/1 | 0/0 |
| 234 | 573 | PHE0000312 | PMON72456 | 4/4 | 2/3 |
| 236 | 575 | PHE0000314 | PMON68379 | 2/4 | 0/0 |
| 237 | 576 | PHE0000315 | PMON68381 | 1/4 | 0/0 |
| 238 | 577 | PHE0000316 | PMON68382 | 2/3 | 1/1 |
| 239 | 578 | PHE0000317 | PMON68380 | 2/7 | 0/0 |
| 243 | 582 | PHE0000324 | PMON73162 | 2/5 | 0/0 |
| 245 | 584 | PHE0000326 | PMON72463 | 1/5 | 0/0 |
| 247 | 586 | PHE0000328 | PMON74416 | 3/4 | 0/0 |
| 249 | 588 | PHE0000330 | PMON73164 | 2/5 | 0/0 |
| 252 | 591 | PHE0000333 | PMON75470 | 1/4 | 0/0 |
| 253 | 592 | PHE0000334 | PMON68395 | 1/7 | 0/0 |
| 255 | 594 | PHE0000336 | PMON74414 | 2/4 | 0/1 |
| 258 | 597 | PHE0000339 | PMON68627 | 1/1 | 0/0 |
| 262 | 601 | PHE0000345 | PMON74411 | 3/8 | 0/0 |
| 264 | 603 | PHE0000347 | PMON68386 | 2/2 | 0/2 |
| 266 | 605 | PHE0000350 | PMON74410 | 3/6 | 1/3 |
| 268 | 607 | PHE0000352 | PMON74409 | 1/5 | 0/0 |
| 269 | 608 | PHE0000353 | PMON73160 | 1/4 | 2/2 |
| 272 | 611 | PHE0000356 | PMON72464 | 2/4 | 0/0 |
| 280 | 619 | PHE0000386 | PMON67834 | 1/3 | 0/1 |
| 291 | 630 | PHE0000398 | PMON72488 | 1/2 | 0/0 |
| 296 | 635 | PHE0000403 | PMON67831 | 1/3 | 0/3 |
| 298 | 637 | PHE0000412 | PMON67843 | 2/4 | 0/0 |
| 300 | 639 | PHE0000414 | PMON67845 | 1/1 | 0/0 |
| 301 | 640 | PHE0000415 | PMON67846 | 1/5 | 0/1 |
| 303 | 642 | PHE0000418 | PMON69497 | 2/4 | 2/2 |
| 306 | 645 | PHE0000421 | PMON83760 | 6/8 | 1/1 |
| 309 | 648 | PHE0000425 | PMON72495 | 1/1 | 0/0 |
| 310 | 649 | PHE0000426 | PMON74408 | 2/5 | 0/0 |
| 312 | 651 | PHE0000428 | PMON74417 | 1/1 | 0/0 |
| 317 | 656 | PHE0000433 | PMON74424 | 2/2 | 0/1 |
| 321 | 660 | PHE0000437 | PMON68630 | 3/4 | 2/3 |
| 324 | 663 | PHE0000440 | PMON72473 | 4/6 | 0/0 |
| 325 | 664 | PHE0000441 | PMON72474 | 3/5 | 0/0 |
| 326 | 665 | PHE0000451 | PMON72475 | 1/2 | 0/1 |
| 329 | 668 | PHE0000454 | PMON72477 | 1/3 | 0/0 |
| 331 | 670 | PHE0000469 | PMON68636 | 1/3 | 0/1 |
| 338 | 677 | PHE0000486 | PMON69496 | 1/5 | 0/0 |
| 339 | 678 | PHE0000017 | PMON68850 | 1/4 | 0/0 |

A list of recombinant DNA constructs which improve seed compositions in terms of oil content in transgenic plants is illustrated in Table 20.

TABLE 20

| | | | | | Confirmed |
|---|---|---|---|---|---|
| | | | | Positive | events/Actual |
| NUC | PEP | | | events/Total | events with |
| SEQ | SEQ | | | events | confirmation |
| ID | ID | PHE | Construct | screened | attempted |
| 2 | 341 | PHE0000006 | PMON68861 | 1/3 | 0/0 |
| 8 | 347 | PHE0000012 | PMON57626 | 1/2 | 0/0 |
| 8 | 347 | PHE0000012 | PMON67806 | 1/3 | 0/2 |
| 8 | 347 | PHE0000012 | PMON67808 | 1/6 | 2/4 |
| 12 | 351 | PHE0000016 | PMON67750 | 2/3 | 1/4 |
| 34 | 373 | PHE0000040 | PMON67801 | 1/5 | 0/2 |
| 34 | 373 | PHE0000040 | PMON77889 | 1/2 | 0/0 |
| 40 | 379 | PHE0000244 | PMON68372 | 1/1 | 1/2 |
| 41 | 380 | PHE0000245 | PMON68373 | 2/2 | 1/4 |
| 42 | 381 | PHE0000246 | PMON68374 | 1/2 | 0/2 |
| 43 | 382 | PHE0000247 | PMON68375 | 1/3 | 0/2 |
| 46 | 385 | PHE0000051 | PMON68859 | 1/3 | 0/0 |
| 47 | 386 | PHE0000052 | PMON67813 | 1/4 | 0/0 |
| 54 | 393 | PHE0000058 | PMON68351 | 1/3 | 0/3 |
| 56 | 395 | PHE0000060 | PMON68356 | 1/3 | 1/3 |
| 68 | 407 | PHE0000073 | PMON68357 | 2/6 | 0/4 |
| 71 | 410 | PHE0000076 | PMON68851 | 1/2 | 0/0 |
| 72 | 411 | PHE0000077 | PMON67827 | 1/5 | 1/2 |
| 101 | 440 | PHE0000116 | PMON68367 | 1/7 | 0/3 |
| 102 | 441 | PHE0000117 | PMON68368 | 1/2 | 0/2 |
| 103 | 442 | PHE0000118 | PMON67811 | 6/6 | 4/15 |
| 105 | 444 | PHE0000120 | PMON68853 | 1/2 | 1/2 |
| 108 | 447 | PHE0000123 | PMON68855 | 1/3 | 0/2 |
| 110 | 449 | PHE0000125 | PMON68369 | 1/3 | 0/0 |
| 111 | 450 | PHE0000126 | PMON69458 | 1/3 | 0/0 |
| 129 | 468 | PHE0000168 | PMON68857 | 1/4 | 0/0 |
| 169 | 508 | PHE0000235 | PMON73161 | 1/2 | 0/0 |
| 182 | 521 | PHE0000254 | PMON73172 | 1/2 | 0/0 |
| 193 | 532 | PHE0000267 | PMON68867 | 1/4 | 1/2 |
| 214 | 553 | PHE0000291 | PMON72455 | 1/3 | 0/0 |
| 216 | 555 | PHE0000294 | PMON68897 | 1/1 | 0/0 |
| 217 | 556 | PHE0000295 | PMON68894 | 1/2 | 0/2 |
| 219 | 558 | PHE0000297 | PMON68899 | 1/4 | 0/0 |
| 221 | 560 | PHE0000299 | PMON68875 | 1/1 | 0/0 |
| 222 | 561 | PHE0000300 | PMON68876 | 1/1 | 0/0 |
| 223 | 562 | PHE0000301 | PMON68877 | 1/6 | 0/0 |
| 238 | 577 | PHE0000316 | PMON68382 | 1/1 | 0/0 |
| 249 | 588 | PHE0000330 | PMON73164 | 2/5 | 0/0 |
| 269 | 608 | PHE0000353 | PMON73160 | 1/4 | 1/2 |
| 272 | 611 | PHE0000356 | PMON72464 | 1/4 | 0/0 |
| 296 | 635 | PHE0000403 | PMON67831 | 1/2 | 0/1 |
| 304 | 643 | PHE0000419 | PMON67848 | 1/2 | 0/0 |
| 321 | 660 | PHE0000437 | PMON68630 | 1/2 | 0/0 |
| 326 | 665 | PHE0000451 | PMON72475 | 1/1 | 0/0 |
| 327 | 666 | PHE0000452 | PMON72476 | 1/1 | 0/0 |

### Example 8

### Consensus Sequence

[0129] This example illustrates the identification of consensus amino acid sequence for the proteins and homologs encoded by DNA that is used to prepare the transgenic seed and plants of this invention having enhanced agronomic traits.

[0130] ClustalW program was selected for multiple sequence alignments of the amino acid sequence of SEQ ID NO: 357, 358, 369, 397, 468, 497, 508, 512, 514, 516, 518, 541, 551, 570, 578, 608, 645, 653, 658, 660, 668, 669 and their homologs. Three major factors affecting the sequence alignments dramatically are (1) protein weight matrices; (2) gap open penalty; (3) gap extension penalty. Protein weight matrices available for ClustalW program include Blosum, Pam and Gonnet series. Those parameters with gap open penalty and gap extension penalty were extensively tested. On the basis of the test results, Blosum weight matrix, gap open penalty of 10 and gap extension penalty of 1 were chosen for multiple sequence alignment. FIG. 1 shows the consensus sequence of SEQ ID NO: 358 and its homologs. The symbols for consensus sequence are (1) uppercase letters for 100% identity in all positions of multiple sequence alignment output; (2) lowercase letters for >=70% identity; symbol; (3) “X” indicated <70% identity; (4) dashes “-” meaning that gaps were in >=70% sequences.

[0131] The consensus amino acid sequence can be used to identify DNA corresponding to the full scope of this invention that is useful in providing transgenic plants, for example corn and soybean plants with enhanced agronomic traits, for example improved nitrogen use efficiency, improved yield, improved water use efficiency and/or improved growth under cold stress, due to the expression in the plants of DNA encoding a protein with amino acid sequence identical to the consensus amino acid sequence.

### Example 9

### Pfam Domain Module Annotation

[0132] This example illustrates the identification of domain and domain module by Pfam analysis.

[0133] The amino acid sequence of the expressed proteins that were shown to be associated with an enhanced trait were analyzed for Pfam protein family against the current Pfam collection of multiple sequence alignments and hidden Markov models using the HMMER software in the appended computer listing. The Pfam domain modules and individual protein domain for the proteins of SEQ ID NO: 340 through 678 are shown in Table 21 and Table 22 respectively. The Hidden Markov model databases for the identified protein families are also in the appended computer listing allowing identification of other homologous proteins and their cognate encoding DNA to enable the full breadth of the invention for a person of ordinary skill in the art. Certain proteins are identified by a single Pfam domain and others by multiple Pfam domains. For instance, the protein with amino acids of SEQ ID NO: 401 is characterized by two Pfam domains, i.e KOW and eIF-5a. See also the protein with amino acids of SEQ ID NO: 346 which is characterized by two copies of the Pfam domain “AP2”. In Table 22 “score” is the gathering score for the Hidden Markov Model of the domain which exceeds the gathering cutoff reported in Table 23.

TABLE 21

| PEP SEQ ID | | |
|---|---|---|
| NO | Pfam module annoation | pfam coordinates |
| 340 | Cellulose_synt | 167-977 |
| 341 | AP2::B3 | 67-129::192-300 |
| 342 | AP2::B3 | 66-128::181-294 |
| 343 | AP2::B3 | 64-126::177-286 |
| 344 | AP2 | 5-69 |
| 345 | AP2 | 13-77 |
| 346 | AP2::AP2 | 111-174::203-267 |
| 347 | MIP | 11-231 |
| 348 | Cyclin_N::Cyclin_C | 63-195::197-317 |
| 349 | Glyco_hydro_32N::Glyco_hydro_32C | 118-438::479-601 |
| 350 | Dicty_CAR | 12-328 |
| 351 | KNOX1::KNOX2::ELK::Homeobox | 102-146::153-204::242-263::273-324 |
| 352 | CDC48_N::AAA::AAA | 30-116::247-431::520-707 |
| 353 | AOX | 55-330 |
| 354 | AOX | 26-333 |
| 355 | Aa_trans | 32-471 |
| 356 | PI3_PI4_kinase | 169-432 |
| 359 | FA_desaturase | 156-400 |
| 360 | FA_desaturase | 147-391 |
| 361 | FA_desaturase | 140-384 |
| 362 | PAS_2::GAF::Phytochrome::PAS:: | 70-186::219-404::415-595::622-737::752-877::897-956 |
| | PAS::HisKA::HATPase_c | ::1011-1123 |
| 363 | PAS_2::GAF::Phytochrome::PAS:: | 70-186::219-404::415-595::622-737::752-877::897-956 |
| | PAS::HisKA::HATPase_c | ::1011-1123 |
| 364 | PAS_2::GAF::Phytochrome::PAS:: | 105-226::259-442::453-632::663-779::794-916::936-1000 |
| | PAS::HisKA::HATPase_c | ::1048-1160 |
| 365 | PAS_2::GAF::Phytochrome::PAS:: | 114-234::267-449::460-639::670-786::801-923::943-1007 |
| | PAS::HisKA::HATPase_c | ::1055-1167 |
| 366 | PAS_2::GAF::Phytochrome::PAS:: | 68-184::217-400::411-591::622-737::752-877::898-961 |
| | PAS::HisKA::HATPase_c | ::1009-1121 |
| 367 | PAS_2::GAF::Phytochrome::PAS:: | 67-183::216-399::410-590::620-735::750-875::896-959 |
| | PAS::HisKA::HATPase_c | ::1007-1121 |
| 368 | Linker_histone::AT_hook::AT_hook | 21-97::98-110::129-141::154-166::192-204 |
| | ::AT_hook::AT_hook | |
| 370 | GFO_IDH_MocA::GFO_IDH_MocA_C | 11-129::130-236 |
| 371 | Cyclin_N::Cyclin_C | 54-186::188-314 |
| 372 | PAS_3::PAS_3::Pkinase | 141-233::415-507::582-870 |
| 373 | Globin | 17-157 |
| 374 | Cyclin_N::Cyclin_C | 165-291::293-413 |
| 375 | Cyclin_N | 4-144 |
| 376 | Cyclin_N::Cyclin_C | 157-283::285-405 |
| 377 | Cyclin_N::Cyclin_C | 243-370::372-499 |
| 378 | Cyclin_N::Cyclin_C | 166-292::294-415 |
| 379 | SRF-TF::K-box | 9-59::69-172 |
| 380 | SRF-TF::K-box | 13-63::73-178 |
| 381 | SRF-TF::K-box | 9-59::72-171 |
| 382 | SRF-TF::K-box | 9-59::73-171 |
| 383 | Cyclin_N::Cyclin_C | 244-371::373-500 |
| 384 | Cyclin_N::Cyclin_C | 104-233::235-363 |
| 385 | Cyclin_N::Cyclin_C | 163-289::291-411 |
| 386 | Cyclin_N::Cyclin_C | 228-354::356-477 |
| 387 | Cyclin_N::Cyclin_C | 173-299::301-421 |
| 388 | Cyclin_N::Cyclin_C | 187-312::314-441 |
| 389 | Cyclin_N | 47-190 |
| 390 | Cyclin_N::Cyclin_C | 43-176::178-298 |
| 391 | Cyclin_N | 55-184 |
| 392 | NDK | 75-209 |
| 393 | NDK | 89-223 |
| 394 | NDK | 2-134 |
| 395 | NDK | 2-135 |
| 396 | SNF2_N::Helicase_C | 560-842::891-970 |
| 398 | NDK | 33-170 |
| 399 | HEAT::HEAT::HEAT::FAT::PI3_PI4_kinase | 248-284::746-782::787-824::1461-1847::2118-2368::2438-2470 |
| | ::FATC | |
| 400 | eIF-5a | 86-155 |
| 401 | KOW::eIF-5a | 26-60::84-151 |
| 402 | DS | 45-377 |
| 403 | Ribosomal_L18p | 26-173 |
| 404 | Orn_Arg_deC_N::Orn_DAP_Arg_deC | 91-326::329-460 |
| 405 | IBN_N | 29-93 |
| 406 | SAM_decarbox | 23-396 |
| 407 | SAM_decarbox | 12-319 |
| 408 | SAM_decarbox | 12-346 |
| 409 | RB_A::RB_B | 274-475::594-721 |
| 410 | Gemini_AL1::Gemini_AL1_M | 9-127::129-233 |
| 411 | Globin::FAD_binding_6::NAD_binding_1 | 6-133::151-263::276-373 |
| 412 | AP2 | 4-68 |
| 413 | FAE1_CUT1_RppA::ACP_syn_III_C | 79-367::381-465 |
| 414 | Cyclin_N::Cyclin_C | 189-315::317-441 |
| 415 | ABC_tran::ABC2_membrane::PDR_CDR | 186-386::503-715::724-887::898-1087::1186-1404 |
| | ::ABC_tran::ABC2_membrane | |
| 416 | Cyclin_N | 66-173 |
| 417 | Pkinase | 19-299 |
| 418 | Pkinase | 20-346 |
| 419 | PTR2 | 99-507 |
| 420 | PTR2 | 113-517 |
| 421 | RRM_1::RRM_1 | 98-165::216-286 |
| 422 | SET | 110-239 |
| 423 | HSF_DNA-bind | 173-416 |
| 424 | Clp_N::Clp_N::AAA::AAA_2 | 17-69::98-148::204-398::598-763 |
| 425 | Clp_N::Clp_N::AAA::AAA_2 | 17-69::94-145::201-395::596-760 |
| 426 | Clp_N::Clp_N::AAA::AAA_2 | 20-71::96-147::203-397::602-767 |
| 427 | Clp_N::Clp_N::AAA::AAA_2 | 17-69::94-145::201-395::596-763 |
| 428 | Cyclin_N | 47-183 |
| 429 | polyprenyl_synt | 37-308 |
| 430 | polyprenyl_synt | 45-316 |
| 431 | polyprenyl_synt | 47-318 |
| 432 | Cyclin_N | 56-202 |
| 433 | Cyclin_N::Cyclin_C | 79-193::195-327 |
| 434 | MtN3_slv::MtN3_slv | 6-95::128-214 |
| 435 | MtN3_slv::MtN3_slv | 7-96::129-215 |
| 436 | MtN3_slv::MtN3_slv | 8-77::125-211 |
| 437 | PAS::Pkinase | 111-222::480-732 |
| 438 | SET | 86-232 |
| 439 | Response_reg | 13-149 |
| 440 | Response_reg::Myb_DNA-binding | 15-128::203-253 |
| 441 | Response_reg::CCT | 26-142::660-698 |
| 442 | Response_reg::CCT | 44-160::588-626 |
| 443 | Response_reg::Myb_DNA-binding | 26-139::213-263 |
| 444 | Response_reg::Myb_DNA-binding | 13-126::197-247 |
| 445 | Response_reg | 10-139 |
| 446 | Response_reg | 12-135 |
| 447 | Response_reg | 42-177 |
| 448 | Response_reg | 37-157 |
| 449 | Response_reg::CCT | 28-153::457-495 |
| 450 | bZIP_1 | 64-128 |
| 451 | GRAS | 149-455 |
| 452 | GRAS | 162-497 |
| 453 | WD40::WD40::WD40::WD40::WD40 | 56-94::98-136::147-186::194-234::239-277::334-372 |
| | ::WD40 | |
| 454 | 14-3-3 | 7-242 |
| 455 | 14-3-3 | 7-242 |
| 456 | 14-3-3 | 9-246 |
| 457 | zf-NF-X1::zf-NF-X1::zf-NF-X1::zf- | 209-227::262-281::315-334::369-389::423-442 |
| | NF-X1::zf-NF-X1 | |
| 458 | TAP42 | 30-367 |
| 459 | 14-3-3 | 5-241 |
| 460 | FBPase | 71-406 |
| 461 | FBPase | 2-329 |
| 462 | FBPase_glpX | 2-334 |
| 463 | FBPase | 18-341 |
| 464 | AAA | 217-404 |
| 465 | S1::S1::S1 | 603-676::1173-1245::1261-1336 |
| 466 | DUF902::DUF906 | 407-464::533-800 |
| 469 | CS | 5-79 |
| 470 | FKBP_C::FKBP_C::FKBP_C::TPR_1 | 53-147::169-264::286-383::452-485::486-519 |
| | ::TPR_1 | |
| 471 | TPR_1::TPR_1::TPR_1::TPR_1:: | 5-38::40-73::74-107::262-295::336-369::396-429::430-463 |
| | TPR_1::TPR_1::TPR_1::TPR_1 | ::464-497 |
| 472 | TPR_1::TPR_1 | 83-116::121-154 |
| 473 | Ribonuclease_T2 | 28-217 |
| 474 | GDA1_CD39 | 91-547 |
| 475 | Acid_phosphat_A | 65-399 |
| 476 | Sugar_tr | 22-517 |
| 477 | Sugar_tr | 26-520 |
| 478 | Citrate_synt | 47-413 |
| 479 | Citrate_synt | 46-409 |
| 480 | Citrate_synt | 78-455 |
| 481 | Citrate_synt | 90-458 |
| 482 | Citrate_synt | 100-468 |
| 483 | Ferritin | 88-233 |
| 484 | Ferritin | 91-236 |
| 485 | Ferritin | 7-144 |
| 486 | LEA_4::LEA_4 | 10-79::90-163 |
| 487 | HSF_DNA-bind | 15-189 |
| 488 | HSF_DNA-bind | 22-224 |
| 489 | DS | 44-361 |
| 490 | Carb_anhydrase | 75-310 |
| 491 | Carb_anhydrase | 38-264 |
| 492 | Mito_carr::Mito_carr::Mito_carr | 24-123::129-236::247-338 |
| 493 | Wzy_C | 311-377 |
| 494 | RNase_PH | 15-135 |
| 495 | DEAD::Helicase_C::DSHCT | 331-484::686-767::1094-1286 |
| 496 | TPR_1::TPR_1::TPR_1::TPR_1 | 508-541::702-735::736-769::1226-1259 |
| 498 | RNase_PH::RNase_PH_C | 21-153::156-220 |
| 499 | GTP_EFTU | 265-516 |
| 500 | GTP_EFTU::GTP_EFTU_D2::GTP_EFTU_D3 | 391-619::641-708::713-821 |
| 501 | TP_methylase | 4-211 |
| 502 | TP_methylase | 221-432 |
| 503 | TP_methylase | 120-333 |
| 504 | Asp | 85-441 |
| 505 | Asp | 148-505 |
| 506 | Asp | 139-476 |
| 509 | Dehydrin | 14-167 |
| 510 | Dehydrin | 25-286 |
| 515 | HSP9_HSP12 | 1-59 |
| 519 | F-box::LRR_2 | 17-64::299-323 |
| 520 | LRR_2::LRR_1::LRR_1::LRR_1 | 389-414::415-437::465-489::568-591 |
| 521 | F-box::FBA_1 | 3-47::202-359 |
| 522 | F-box::LRR_2 | 62-108::414-438 |
| 523 | 2OG-Fell_Oxy | 158-258 |
| 524 | Aminotran_1_2 | 50-438 |
| 525 | FA_desaturase | 73-313 |
| 526 | Pyridoxal_deC | 63-412 |
| 527 | p450 | 40-480 |
| 528 | p450 | 44-477 |
| 529 | p450 | 60-515 |
| 530 | p450 | 42-496 |
| 531 | p450 | 73-511 |
| 532 | p450 | 41-466 |
| 533 | LRRNT_2::LRR_1::LRR_1::LRR_1 | 127-167::194-216::218-240::266-288::290-312::314-336 |
| | ::LRR_1::LRR_1::LRR_1::LRR_1 | ::338-360::362-384::458-480::551-573::575-597::598-620 |
| | ::LRR_1::LRR_1::LRR_1::LRR_1 | ::646-668::670-692::694-716::718-741::754-776::778-800 |
| | ::LRR_1::LRR_1::LRR_1::LRR_1 | ::826-848::851-870::875-894::927-949::951-973::1114-1396 |
| | ::LRR_1::LRR_1::LRR_1::LRR_1 | |
| | ::LRR_1::LRR_1::LRR_1::Pkinase | |
| 534 | E2F_TDP::E2F_TDP | 12-77::148-224 |
| 536 | E2F_TDP | 111-176 |
| 537 | Dicty_CAR | 14-321 |
| 538 | Mlo | 6-494 |
| 539 | Mlo | 32-520 |
| 540 | G-alpha | 12-376 |
| 542 | AP2 | 128-193 |
| 543 | Aa_trans | 32-427 |
| 544 | Aa_trans | 34-465 |
| 545 | AT_hook::AT_hook::AT_hook::AT_hook | 151-163::214-226::294-306::324-336::397-548::575-675 |
| | ::YDG_SRA::Pre-SET::SET | ::677-830 |
| 546 | GRAS | 146-452 |
| 547 | MAT1 | 14-193 |
| 548 | Cystatin | 48-135 |
| 549 | Cystatin::Cystatin | 49-137::156-247 |
| 550 | Cystatin | 14-104 |
| 552 | PI3_PI4_kinase | 172-437 |
| 553 | DS | 47-363 |
| 554 | GRAS | 217-521 |
| 555 | GRAS | 165-471 |
| 556 | UQ_con | 20-159 |
| 557 | UPF0016::UPF0016 | 9-84::145-220 |
| 558 | AAA | 212-399 |
| 559 | CS | 5-81 |
| 560 | CS | 19-95 |
| 561 | CS | 5-81 |
| 562 | CS | 5-80 |
| 563 | Metallophos | 44-255 |
| 564 | Metallophos | 50-259 |
| 565 | Ribonuclease_T2 | 23-245 |
| 566 | Ribonuclease_T2 | 39-247 |
| 567 | Ribonuclease_T2 | 30-215 |
| 568 | Ribonuclease_T2 | 28-217 |
| 569 | HLH | 19-68 |
| 571 | RNase_PH::RNase_PH_C | 29-169::199-265 |
| 572 | 14-3-3 | 3-240 |
| 573 | 14-3-3 | 8-245 |
| 574 | IF4E | 5-206 |
| 575 | IF4E | 6-227 |
| 576 | IF4E | 7-210 |
| 577 | IF4E | 1-220 |
| 579 | GRAS | 154-464 |
| 580 | Catalase | 18-401 |
| 581 | Catalase | 18-402 |
| 582 | peroxidase | 17-224 |
| 583 | GDI | 1-438 |
| 584 | GDI | 1-452 |
| 585 | Rho_GDI | 35-245 |
| 586 | Cu_bind_like | 47-125 |
| 587 | Cu_bind_like | 42-120 |
| 588 | Cu_bind_like | 42-120 |
| 589 | Cu_bind_like | 45-105 |
| 590 | Cu_bind_like | 39-121 |
| 591 | ADH_zinc_N | 160-307 |
| 592 | ADH_zinc_N | 152-299 |
| 593 | ADH_zinc_N | 165-314 |
| 594 | ADH_N::ADH_zinc_N | 33-115::146-290 |
| 595 | Abhydrolase_1 | 175-412 |
| 596 | Hexapep::Hexapep::Hexapep::Hexapep | 65-82::91-108::117-134::135-152 |
| 597 | AhpC-TSA | 7-185 |
| 598 | AhpC-TSA | 5-182 |
| 599 | AhpC-TSA | 51-233 |
| 600 | Redoxin | 4-176 |
| 601 | AhpC-TSA | 69-248 |
| 602 | Redoxin | 68-211 |
| 603 | HSP20 | 134-240 |
| 604 | HSP20 | 77-181 |
| 605 | HSP20 | 85-182 |
| 606 | HSP20 | 60-163 |
| 607 | HSP20 | 50-153 |
| 609 | OPT | 104-758 |
| 610 | Xan_ur_permease | 35-432 |
| 611 | Xan_ur_permease | 38-445 |
| 612 | F-box::Tub | 57-112::123-480 |
| 613 | Tub | 1-251 |
| 614 | HMG_CoA_synt_N::HMG_CoA_synt_C | 5-178::179-453 |
| 615 | HMG_CoA_synt_N::HMG_CoA_synt_C | 45-216::217-490 |
| 616 | GRAS | 176-480 |
| 617 | Pkinase | 23-304 |
| 618 | E1-E2_ATPase::Hydrolase | 34-255::259-545 |
| 619 | E1-E2_ATPase | 225-473 |
| 621 | Hydrolase | 512-930 |
| 622 | Hydrolase | 457-898 |
| 623 | FBPase | 66-379 |
| 624 | FBPase | 13-337 |
| 625 | FBPase | 68-380 |
| 626 | FBPase | 63-374 |
| 627 | Myb_DNA-binding::Myb_DNA- | 4-53::59-104 |
| | binding | |
| 628 | Myb_DNA-binding::Myb_DNA- | 4-53::59-104 |
| | binding | |
| 629 | KNOX1::KNOX2::ELK::Homeobox | 88-132::135-186::232-253::255-314 |
| 630 | KNOX1::KNOX2::ELK::Homeobox | 65-109::117-168::205-226::228-287 |
| 631 | KNOX1::KNOX2::ELK::Homeobox | 57-101::104-155::202-223::225-284 |
| 632 | bZIP_1 | 227-289 |
| 633 | Myb_DNA-binding | 59-104 |
| 634 | Aa_trans | 27-433 |
| 635 | Aa_trans | 31-433 |
| 636 | Aa_trans | 59-459 |
| 637 | Sugar_tr | 26-487 |
| 638 | Sugar_tr | 26-489 |
| 639 | Sugar_tr | 29-489 |
| 640 | Sugar_tr | 29-552 |
| 641 | Sugar_tr | 101-535 |
| 642 | Sugar_tr | 53-503 |
| 643 | Sugar_tr | 47-479 |
| 644 | MFS_1 | 40-463 |
| 646 | Sugar_tr | 27-490 |
| 647 | Sugar_tr | 26-488 |
| 648 | p450 | 35-499 |
| 649 | WD40::WD40 | 160-197::249-288 |
| 650 | WD40::WD40 | 740-779::826-863 |
| 651 | HLH | 14-63 |
| 652 | HO-ZIP_N::Homeobox::HALZ | 1-96::123-177::178-222 |
| 654 | GH3 | 15-570 |
| 655 | Oxidored_FMN | 10-345 |
| 656 | Oxidored_FMN | 1-330 |
| 657 | Oxidored_FMN | 11-342 |
| 659 | TPR_1::TPR_2 | 78-111::112-145 |
| 661 | TPR_2::TPR_1::TPR_1::TPR_2:: | 2-35::36-69::70-103::253-286::287-320::328-365::392-425 |
| | TPR_1::TPR_1::TPR_1::TPR_1:: | ::426-459::460-493 |
| | TPR_1 | |
| 662 | TPR_1::TPR_1::TPR_2 | 124-157::158-191::192-225 |
| 663 | TPR_1::TPR_1::TPR_2::U-box | 14-47::48-81::82-115::195-269 |
| 664 | TPR_1::TPR_1::TPR_1::U-box | 16-49::50-83::84-117::197-271 |
| 665 | SRF-TF | 9-59 |
| 666 | SRF-TF::K-box | 9-59::69-173 |
| 667 | SRF-TF::K-box | 9-59::75-174 |
| 670 | CRAL_TRIO_N::CRAL_TRIO | 20-87::110-296 |
| 671 | CRAL_TRIO_N::CRAL_TRIO | 1-71::90-275 |
| 672 | CRAL_TRIO | 87-251 |
| 673 | CRAL_TRIO | 91-264 |
| 674 | CRAL_TRIO_N::CRAL_TRIO | 19-86::101-255 |
| 675 | Methyltransf_7 | 36-369 |
| 676 | Methyltransf_7 | 36-382 |
| 677 | Methyltransf_7 | 38-378 |
| 678 | FtsH_ext::AAA::Peptidase_M41 | 77-223::249-436::443-653 |

TABLE 22

| PEP SEQ | | | | | |
|---|---|---|---|---|---|
| ID NO | Pfam domain name | begin | stop | score | E-value |
| 340 | Cellulose_synt | 167 | 977 | 2072.7 | 0 |
| 341 | AP2 | 67 | 129 | 130.5 | 4.20E−36 |
| 341 | B3 | 192 | 300 | 134 | 3.80E−37 |
| 342 | AP2 | 66 | 128 | 113 | 8.10E−31 |
| 342 | B3 | 181 | 294 | 124.3 | 3.30E−34 |
| 343 | AP2 | 64 | 126 | 104.4 | 3.00E−28 |
| 343 | B3 | 177 | 286 | 116.1 | 9.30E−32 |
| 344 | AP2 | 5 | 69 | 130.5 | 4.30E−36 |
| 345 | AP2 | 13 | 77 | 131 | 3.10E−36 |
| 346 | AP2 | 111 | 174 | 102.2 | 1.40E−27 |
| 346 | AP2 | 203 | 267 | 87.7 | 3.30E−23 |
| 347 | MIP | 11 | 231 | 379.7 | 4.00E−111 |
| 348 | Cyclin_N | 63 | 195 | 120.1 | 5.80E−33 |
| 348 | Cyclin_C | 197 | 317 | 19.9 | 0.00099 |
| 349 | Glyco_hydro_32N | 118 | 438 | 651.3 | 7.20E−193 |
| 349 | Glyco_hydro_32C | 479 | 601 | 147.9 | 2.40E−41 |
| 350 | Dicty_CAR | 12 | 328 | −10.2 | 5.20E−06 |
| 351 | KNOX1 | 102 | 146 | 90.4 | 5.10E−24 |
| 351 | KNOX2 | 153 | 204 | 101.2 | 2.90E−27 |
| 351 | ELK | 242 | 263 | 37 | 6.00E−08 |
| 351 | Homeobox | 273 | 324 | −1.9 | 0.0072 |
| 352 | CDC48_N | 30 | 116 | 134.7 | 2.30E−37 |
| 352 | AAA | 247 | 431 | 328 | 1.50E−95 |
| 352 | AAA_5 | 247 | 379 | 8.9 | 0.00035 |
| 352 | AAA | 520 | 707 | 344.1 | 2.10E−100 |
| 353 | AOX | 55 | 330 | 700.5 | 1.10E−207 |
| 354 | AOX | 26 | 333 | 421.3 | 1.30E−123 |
| 355 | Aa_trans | 32 | 471 | 375.7 | 6.60E−110 |
| 356 | PI3_PI4_kinase | 169 | 432 | 249.7 | 5.80E−72 |
| 359 | FA_desaturase | 156 | 400 | 352.8 | 5.40E−103 |
| 360 | FA_desaturase | 147 | 391 | 347.8 | 1.70E−101 |
| 361 | FA_desaturase | 140 | 384 | 347.7 | 1.80E−101 |
| 362 | PAS_2 | 70 | 186 | 222 | 1.20E−63 |
| 362 | GAF | 219 | 404 | 108.4 | 1.90E−29 |
| 362 | Phytochrome | 415 | 595 | 409.1 | 5.90E−120 |
| 362 | PAS | 622 | 737 | 96.6 | 6.70E−26 |
| 362 | PAS | 752 | 877 | 107.4 | 4.00E−29 |
| 362 | HisKA | 897 | 956 | 26.9 | 6.50E−05 |
| 362 | HATPase_c | 1011 | 1123 | 64.4 | 3.40E−16 |
| 363 | PAS_2 | 70 | 186 | 231.6 | 1.60E−66 |
| 363 | GAF | 219 | 404 | 108.7 | 1.60E−29 |
| 363 | Phytochrome | 415 | 595 | 406.5 | 3.50E−119 |
| 363 | PAS | 622 | 737 | 90.4 | 5.10E−24 |
| 363 | PAS_4 | 628 | 742 | 18.4 | 0.0029 |
| 363 | PAS | 752 | 877 | 97.5 | 3.60E−26 |
| 363 | HisKA | 897 | 956 | 31.6 | 2.50E−06 |
| 363 | HATPase_c | 1011 | 1123 | 61.2 | 3.10E−15 |
| 364 | PAS_2 | 105 | 226 | 209.2 | 8.50E−60 |
| 364 | GAF | 259 | 442 | 111.8 | 1.90E−30 |
| 364 | Phytochrome | 453 | 632 | 405.1 | 9.30E−119 |
| 364 | PAS | 663 | 779 | 117.2 | 4.40E−32 |
| 364 | PAS_4 | 669 | 784 | 19 | 0.0025 |
| 364 | PAS | 794 | 916 | 106.7 | 6.40E−29 |
| 364 | HisKA | 936 | 1000 | 45.6 | 1.50E−10 |
| 364 | HATPase_c | 1048 | 1160 | 60.9 | 3.90E−15 |
| 365 | PAS_2 | 114 | 234 | 214.8 | 1.80E−61 |
| 365 | GAF | 267 | 449 | 114.3 | 3.20E−31 |
| 365 | Phytochrome | 460 | 639 | 417 | 2.50E−122 |
| 365 | PAS | 670 | 786 | 118.1 | 2.40E−32 |
| 365 | PAS_4 | 676 | 791 | 22.5 | 0.0011 |
| 365 | PAS | 801 | 923 | 87.6 | 3.60E−23 |
| 365 | HisKA | 943 | 1007 | 54.8 | 2.60E−13 |
| 365 | HATPase_c | 1055 | 1167 | 56.9 | 6.20E−14 |
| 366 | PAS_2 | 68 | 184 | 237.8 | 2.10E−68 |
| 366 | GAF | 217 | 400 | 119.9 | 6.80E−33 |
| 366 | Phytochrome | 411 | 591 | 408.6 | 8.00E−120 |
| 366 | PAS | 622 | 737 | 88.5 | 1.90E−23 |
| 366 | PAS_4 | 628 | 742 | 18.5 | 0.0028 |
| 366 | PAS | 752 | 877 | 71.9 | 1.90E−18 |
| 366 | HisKA | 898 | 961 | 37.4 | 4.70E−08 |
| 366 | HATPase_c | 1009 | 1121 | 52.1 | 1.70E−12 |
| 367 | PAS_2 | 67 | 183 | 229.3 | 7.60E−66 |
| 367 | GAF | 216 | 399 | 119.3 | 1.00E−32 |
| 367 | Phytochrome | 410 | 590 | 383.7 | 2.50E−112 |
| 367 | PAS | 620 | 735 | 82.8 | 9.70E−22 |
| 367 | PAS | 750 | 875 | 78.3 | 2.20E−20 |
| 367 | HisKA | 896 | 959 | 38.9 | 1.60E−08 |
| 367 | HATPase_c | 1007 | 1121 | 61.9 | 1.90E−15 |
| 368 | Linker_histone | 21 | 97 | 27.1 | 1.80E−05 |
| 368 | AT_hook | 98 | 110 | 11.4 | 0.22 |
| 368 | AT_hook | 129 | 141 | 7.4 | 1.1 |
| 368 | AT_hook | 154 | 166 | 8.8 | 0.65 |
| 368 | AT_hook | 192 | 204 | 13.6 | 0.096 |
| 370 | GFO_IDH_MocA | 11 | 129 | 167.6 | 2.90E−47 |
| 370 | NAD_binding_3 | 17 | 128 | 7.5 | 0.00084 |
| 370 | GFO_IDH_MocA_C | 130 | 236 | 44.9 | 2.50E−10 |
| 371 | Cyclin_N | 54 | 186 | 115.8 | 1.20E−31 |
| 371 | Cyclin_C | 188 | 314 | 23.7 | 0.00051 |
| 372 | PAS | 116 | 230 | 22.8 | 0.0011 |
| 372 | PAS_3 | 141 | 233 | 22.8 | 0.00057 |
| 372 | PAS | 390 | 504 | 10.5 | 0.038 |
| 372 | PAS_3 | 415 | 507 | 20.3 | 0.00099 |
| 372 | Pkinase | 582 | 870 | 291.4 | 1.60E−84 |
| 373 | Globin | 17 | 157 | 113.2 | 6.90E−31 |
| 374 | Cyclin_N | 165 | 291 | 230.4 | 3.80E−66 |
| 374 | Cyclin_C | 293 | 413 | 191.2 | 2.30E−54 |
| 375 | Cyclin_N | 4 | 144 | 52.4 | 1.40E−12 |
| 376 | Cyclin_N | 157 | 283 | 241.8 | 1.40E−69 |
| 376 | Cyclin_C | 285 | 405 | 178.3 | 1.80E−50 |
| 377 | Cyclin_N | 243 | 370 | 235 | 1.50E−67 |
| 377 | Cyclin_C | 372 | 499 | 182.3 | 1.10E−51 |
| 378 | Cyclin_N | 166 | 292 | 221.3 | 2.00E−63 |
| 378 | Cyclin_C | 294 | 415 | 160.2 | 5.00E−45 |
| 379 | SRF-TF | 9 | 59 | 103 | 8.00E−28 |
| 379 | K-box | 69 | 172 | 38.7 | 1.80E−08 |
| 380 | SRF-TF | 13 | 63 | 94.5 | 3.00E−25 |
| 380 | K-box | 73 | 178 | 30.7 | 1.10E−06 |
| 381 | SRF-TF | 9 | 59 | 99.2 | 1.10E−26 |
| 381 | K-box | 72 | 171 | 30.3 | 1.10E−06 |
| 382 | SRF-TF | 9 | 59 | 99.2 | 1.10E−26 |
| 382 | K-box | 73 | 171 | 38.5 | 2.20E−08 |
| 383 | Cyclin_N | 244 | 371 | 237.7 | 2.20E−68 |
| 383 | Cyclin_C | 373 | 500 | 188.6 | 1.40E−53 |
| 384 | Cyclin_N | 104 | 233 | 228.8 | 1.10E−65 |
| 384 | Cyclin_C | 235 | 363 | 142 | 1.50E−39 |
| 385 | Cyclin_N | 163 | 289 | 221.7 | 1.50E−63 |
| 385 | Cyclin_C | 291 | 411 | 165.9 | 9.20E−47 |
| 386 | Cyclin_N | 228 | 354 | 221.6 | 1.70E−63 |
| 386 | Cyclin_C | 356 | 477 | 173.9 | 3.70E−49 |
| 387 | Cyclin_N | 173 | 299 | 229.1 | 8.80E−66 |
| 387 | Cyclin_C | 301 | 421 | 173.6 | 4.50E−49 |
| 388 | Cyclin_N | 187 | 312 | 228.5 | 1.30E−65 |
| 388 | Cyclin_C | 314 | 441 | 164.7 | 2.10E−46 |
| 389 | Cyclin_N | 47 | 190 | 39.2 | 1.30E−08 |
| 390 | Cyclin_N | 43 | 176 | 131.2 | 2.60E−36 |
| 390 | Cyclin_C | 178 | 298 | 18.6 | 0.0013 |
| 391 | Cyclin_N | 55 | 184 | 74.6 | 2.90E−19 |
| 392 | NDK | 75 | 209 | 338.6 | 9.90E−99 |
| 393 | NDK | 89 | 223 | 317.2 | 2.70E−92 |
| 394 | NDK | 2 | 134 | 312.4 | 7.30E−91 |
| 395 | NDK | 2 | 135 | 357.4 | 2.10E−104 |
| 396 | SNF2_N | 560 | 842 | 279.9 | 4.50E−81 |
| 396 | Helicase_C | 891 | 970 | 88.9 | 1.40E−23 |
| 398 | NDK | 33 | 170 | 137.8 | 2.80E−38 |
| 399 | HEAT | 248 | 284 | 14.6 | 0.33 |
| 399 | HEAT | 746 | 782 | 18.8 | 0.019 |
| 399 | HEAT | 787 | 824 | 27.7 | 3.90E−05 |
| 399 | FAT | 1461 | 1847 | 532.7 | 3.70E−157 |
| 399 | PI3_PI4_kinase | 2118 | 2368 | 376.4 | 4.00E−110 |
| 399 | FATC | 2438 | 2470 | 72.4 | 1.30E−18 |
| 400 | eIF-5a | 86 | 155 | 133.7 | 4.80E−37 |
| 401 | KOW | 26 | 60 | 30.5 | 5.40E−06 |
| 401 | eIF-5a | 84 | 151 | 151.5 | 2.10E−42 |
| 402 | DS | 45 | 377 | 776.6 | 1.40E−230 |
| 403 | Ribosomal_L18p | 26 | 173 | 282.5 | 7.40E−82 |
| 404 | Orn_Arg_deC_N | 91 | 326 | 431.3 | 1.30E−126 |
| 404 | Orn_DAP_Arg_deC | 329 | 460 | 140.4 | 4.60E−39 |
| 405 | IBN_N | 29 | 93 | 27.9 | 3.30E−05 |
| 406 | SAM_decarbox | 23 | 396 | 657.2 | 1.20E−194 |
| 407 | SAM_decarbox | 12 | 319 | 557.6 | 1.10E−164 |
| 408 | SAM_decarbox | 12 | 346 | 668.3 | 5.40E−198 |
| 409 | RB_A | 274 | 475 | 423.5 | 2.80E−124 |
| 409 | RB_B | 594 | 721 | 245.3 | 1.20E−70 |
| 410 | Gemini_AL1 | 9 | 127 | 269.6 | 5.70E−78 |
| 410 | Gemini_AL1_M | 129 | 233 | 190.4 | 3.90E−54 |
| 411 | Globin | 6 | 133 | 69.8 | 8.00E−18 |
| 411 | FAD_binding_6 | 151 | 263 | 30.4 | 3.50E−07 |
| 411 | NAD_binding_1 | 276 | 373 | 19.6 | 2.50E−05 |
| 412 | AP2 | 4 | 68 | 133.3 | 6.30E−37 |
| 413 | FAE1_CUT1_RppA | 79 | 367 | 749.5 | 2.00E−222 |
| 413 | Chal_sti_synt_C | 324 | 467 | 8.3 | 0.00033 |
| 413 | ACP_syn_III_C | 381 | 465 | 21.3 | 8.20E−08 |
| 414 | Cyclin_N | 189 | 315 | 212.9 | 6.80E−61 |
| 414 | Cyclin_C | 317 | 441 | 138.9 | 1.30E−38 |
| 415 | ABC_tran | 186 | 386 | 140.7 | 3.60E−39 |
| 415 | ABC2_membrane | 503 | 715 | 206.4 | 6.00E−59 |
| 415 | PDR_CDR | 724 | 887 | 213.4 | 4.70E−61 |
| 415 | ABC_tran | 898 | 1087 | 78 | 2.70E−20 |
| 415 | ABC2_membrane | 1186 | 1404 | 179.2 | 9.60E−51 |
| 416 | Cyclin_N | 66 | 173 | −1.1 | 0.00017 |
| 417 | Pkinase | 19 | 299 | 324 | 2.40E−94 |
| 418 | Pkinase | 20 | 346 | 243.6 | 3.90E−70 |
| 419 | PTR2 | 99 | 507 | 587.7 | 9.90E−174 |
| 420 | PTR2 | 113 | 517 | 353.1 | 4.20E−103 |
| 421 | RRM_1 | 98 | 165 | 22.9 | 0.001 |
| 421 | RRM_1 | 216 | 286 | 33 | 9.90E−07 |
| 422 | SET | 110 | 239 | 181.9 | 1.40E−51 |
| 423 | HSF_DNA-bind | 173 | 416 | 227.7 | 2.30E−65 |
| 424 | Clp_N | 17 | 69 | 33 | 9.70E−07 |
| 424 | Clp_N | 98 | 148 | 54.7 | 2.80E−13 |
| 424 | AAA | 204 | 398 | 53.6 | 6.00E−13 |
| 424 | AAA_2 | 598 | 763 | 366.2 | 4.70E−107 |
| 424 | AAA_5 | 602 | 768 | 21.2 | 3.90E−05 |
| 425 | Clp_N | 17 | 69 | 63.3 | 7.10E−16 |
| 425 | Clp_N | 94 | 145 | 55.2 | 2.00E−13 |
| 425 | AAA | 201 | 395 | 47.8 | 3.30E−11 |
| 425 | AAA_2 | 596 | 760 | 383.5 | 2.90E−112 |
| 425 | AAA_5 | 600 | 765 | 32.9 | 1.00E−06 |
| 426 | Clp_N | 20 | 71 | 60.3 | 5.90E−15 |
| 426 | Clp_N | 96 | 147 | 45.3 | 1.90E−10 |
| 426 | AAA | 203 | 397 | 50.6 | 4.80E−12 |
| 426 | AAA_2 | 602 | 767 | 377.8 | 1.50E−110 |
| 426 | AAA_5 | 606 | 768 | 26.5 | 1.60E−05 |
| 427 | Clp_N | 17 | 69 | 57 | 5.80E−14 |
| 427 | Clp_N | 94 | 145 | 52 | 1.80E−12 |
| 427 | AAA | 201 | 395 | 54.3 | 3.70E−13 |
| 427 | AAA_2 | 596 | 763 | 373.5 | 3.10E−109 |
| 427 | AAA_5 | 600 | 748 | 31.4 | 2.90E−06 |
| 428 | Cyclin_N | 47 | 183 | 48.7 | 1.80E−11 |
| 429 | polyprenyl_synt | 37 | 308 | 318.9 | 8.30E−93 |
| 430 | polyprenyl_synt | 45 | 316 | 353.8 | 2.60E−103 |
| 431 | polyprenyl_synt | 47 | 318 | 365 | 1.10E−106 |
| 432 | Cyclin_N | 56 | 202 | 70.9 | 3.70E−18 |
| 433 | Cyclin_N | 79 | 193 | 57 | 5.60E−14 |
| 433 | Cyclin_C | 195 | 327 | −2.1 | 0.052 |
| 434 | MtN3_slv | 6 | 95 | 79.7 | 8.40E−21 |
| 434 | MtN3_slv | 128 | 214 | 120.6 | 4.00E−33 |
| 435 | MtN3_slv | 7 | 96 | 94.5 | 2.90E−25 |
| 435 | MtN3_slv | 129 | 215 | 127.4 | 3.70E−35 |
| 436 | MtN3_slv | 8 | 77 | 20.5 | 9.60E−05 |
| 436 | MtN3_slv | 125 | 211 | 108.7 | 1.50E−29 |
| 437 | PAS | 111 | 222 | 63.2 | 7.80E−16 |
| 437 | PAS_4 | 117 | 227 | 34 | 4.70E−07 |
| 437 | PAS_3 | 133 | 225 | 18.8 | 0.0014 |
| 437 | Pkinase | 480 | 732 | 264.7 | 1.70E−76 |
| 437 | Pkinase_Tyr | 480 | 732 | 257.2 | 3.20E−74 |
| 438 | SET | 86 | 232 | 142.5 | 1.00E−39 |
| 439 | Response_reg | 13 | 149 | 77.9 | 2.90E−20 |
| 440 | Response_reg | 15 | 128 | 95.3 | 1.70E−25 |
| 440 | Myb_DNA-binding | 203 | 253 | 48.6 | 1.90E−11 |
| 441 | Response_reg | 26 | 142 | 86.1 | 9.80E−23 |
| 441 | CCT | 660 | 698 | 74.9 | 2.40E−19 |
| 442 | Response_reg | 44 | 160 | 101.5 | 2.40E−27 |
| 442 | CCT | 588 | 626 | 79.5 | 9.70E−21 |
| 443 | Response_reg | 26 | 139 | 106.4 | 7.70E−29 |
| 443 | Myb_DNA-binding | 213 | 263 | 51.1 | 3.50E−12 |
| 444 | Response_reg | 13 | 126 | 104.9 | 2.20E−28 |
| 444 | Myb_DNA-binding | 197 | 247 | 46.3 | 9.50E−11 |
| 445 | Response_reg | 10 | 139 | 77.2 | 4.80E−20 |
| 446 | Response_reg | 12 | 135 | 82 | 1.70E−21 |
| 447 | Response_reg | 42 | 177 | 69.4 | 1.10E−17 |
| 448 | Response_reg | 37 | 157 | 88.2 | 2.30E−23 |
| 449 | Response_reg | 28 | 153 | 25.4 | 3.50E−05 |
| 449 | CCT | 457 | 495 | 70.6 | 4.80E−18 |
| 450 | bZIP_1 | 64 | 128 | 36.2 | 1.10E−07 |
| 450 | bZIP_2 | 64 | 118 | 35.5 | 1.80E−07 |
| 451 | GRAS | 149 | 455 | 424.5 | 1.30E−124 |
| 452 | GRAS | 162 | 497 | 270.9 | 2.30E−78 |
| 453 | WD40 | 56 | 94 | 42 | 1.90E−09 |
| 453 | WD40 | 98 | 136 | 23.6 | 0.00065 |
| 453 | WD40 | 147 | 186 | 35.3 | 1.90E−07 |
| 453 | WD40 | 194 | 234 | 34 | 4.90E−07 |
| 453 | WD40 | 239 | 277 | 45.9 | 1.20E−10 |
| 453 | WD40 | 334 | 372 | 24.1 | 0.00046 |
| 454 | 14-3-3 | 7 | 242 | 490.2 | 2.30E−144 |
| 455 | 14-3-3 | 7 | 242 | 509.9 | 2.70E−150 |
| 456 | 14-3-3 | 9 | 246 | 514.9 | 8.30E−152 |
| 457 | zf-NF-X1 | 209 | 227 | 19.9 | 0.0087 |
| 457 | zf-NF-X1 | 262 | 281 | 27.5 | 4.30E−05 |
| 457 | zf-NF-X1 | 315 | 334 | 20.6 | 0.005 |
| 457 | zf-NF-X1 | 369 | 389 | 25.2 | 0.00022 |
| 457 | zf-NF-X1 | 423 | 442 | 23.4 | 0.00076 |
| 458 | TAP42 | 30 | 367 | 617.5 | 1.10E−182 |
| 459 | 14-3-3 | 5 | 241 | 509.3 | 4.10E−150 |
| 460 | FBPase | 71 | 406 | 486.1 | 3.90E−143 |
| 461 | FBPase | 2 | 329 | 748.8 | 3.30E−222 |
| 462 | FBPase_glpX | 2 | 334 | 864.1 | 6.50E−257 |
| 463 | FBPase | 18 | 341 | 448.6 | 7.30E−132 |
| 464 | AAA | 217 | 404 | 296.6 | 4.40E−86 |
| 465 | S1 | 603 | 676 | 56.9 | 6.20E−14 |
| 465 | S1 | 1173 | 1245 | 45.3 | 1.90E−10 |
| 465 | S1 | 1261 | 1336 | 74.5 | 3.00E−19 |
| 466 | DUF902 | 407 | 464 | 117.4 | 3.70E−32 |
| 466 | DUF906 | 533 | 800 | 650.4 | 1.40E−192 |
| 469 | CS | 5 | 79 | 62.3 | 1.50E−15 |
| 470 | FKBP_C | 53 | 147 | 201.7 | 1.60E−57 |
| 470 | FKBP_C | 169 | 264 | 87.7 | 3.30E−23 |
| 470 | FKBP_C | 286 | 383 | 119.2 | 1.10E−32 |
| 470 | TPR_1 | 452 | 485 | 21.5 | 0.0027 |
| 470 | TPR_1 | 486 | 519 | 29.8 | 9.10E−06 |
| 470 | TPR_2 | 486 | 519 | 23.8 | 0.00057 |
| 471 | TPR_2 | 5 | 38 | 28.2 | 2.70E−05 |
| 471 | TPR_1 | 5 | 38 | 33.1 | 8.80E−07 |
| 471 | TPR_1 | 40 | 73 | 14.1 | 0.1 |
| 471 | TPR_2 | 74 | 107 | 33.7 | 6.00E−07 |
| 471 | TPR_1 | 74 | 107 | 39.8 | 8.50E−09 |
| 471 | TPR_1 | 262 | 295 | 16.5 | 0.053 |
| 471 | TPR_1 | 336 | 369 | 27.8 | 3.60E−05 |
| 471 | TPR_1 | 396 | 429 | 12.1 | 0.18 |
| 471 | TPR_1 | 430 | 463 | 39.8 | 8.70E−09 |
| 471 | TPR_2 | 430 | 463 | 24.4 | 0.00037 |
| 471 | TPR_1 | 464 | 497 | 9.4 | 0.37 |
| 472 | TPR_1 | 83 | 116 | 10.1 | 0.31 |
| 472 | TPR_1 | 121 | 154 | 34.2 | 4.10E−07 |
| 472 | TPR_2 | 121 | 154 | 23.3 | 0.00081 |
| 473 | Ribonuclease_T2 | 28 | 217 | 341.9 | 1.00E−99 |
| 474 | GDA1_CD39 | 91 | 547 | 87.7 | 3.30E−23 |
| 475 | Acid_phosphat_A | 65 | 399 | 324.4 | 1.80E−94 |
| 476 | Sugar_tr | 22 | 517 | 87.8 | 3.20E−23 |
| 476 | MFS_1 | 27 | 464 | 78.2 | 2.40E−20 |
| 477 | Sugar_tr | 26 | 520 | 84.3 | 3.40E−22 |
| 477 | MFS_1 | 30 | 467 | 75.2 | 1.80E−19 |
| 478 | Citrate_synt | 47 | 413 | 675 | 5.40E−200 |
| 479 | Citrate_synt | 46 | 409 | 799.2 | 2.10E−237 |
| 480 | Citrate_synt | 78 | 455 | 704.7 | 6.00E−209 |
| 481 | Citrate_synt | 90 | 458 | 508.2 | 8.60E−150 |
| 482 | Citrate_synt | 100 | 468 | 512.6 | 4.00E−151 |
| 483 | Ferritin | 88 | 233 | 224.9 | 1.60E−64 |
| 484 | Ferritin | 91 | 236 | 230.8 | 2.70E−66 |
| 485 | Ferritin | 7 | 144 | 163.6 | 4.60E−46 |
| 486 | LEA_4 | 10 | 79 | 33.1 | 9.00E−07 |
| 486 | LEA_4 | 90 | 163 | 76.1 | 1.00E−19 |
| 487 | HSF_DNA_bind | 15 | 189 | 226.5 | 5.40E−65 |
| 488 | HSF_DNA_bind | 22 | 224 | 161.9 | 1.50E−45 |
| 489 | DS | 44 | 361 | 611.1 | 9.30E−181 |
| 490 | Carb_anhydrase | 75 | 310 | 108.7 | 1.50E−29 |
| 491 | Carb_anhydrase | 38 | 264 | 150.2 | 5.20E−42 |
| 492 | Mito_carr | 24 | 123 | 82.9 | 9.50E−22 |
| 492 | Mito_carr | 129 | 236 | 101.7 | 2.00E−27 |
| 492 | Mito_carr | 247 | 338 | 96.1 | 9.70E−26 |
| 493 | Wzy_C | 311 | 377 | 72.1 | 1.60E−18 |
| 494 | RNase_PH | 15 | 135 | 60.2 | 6.40E−15 |
| 495 | DEAD | 331 | 484 | 123.9 | 4.20E−34 |
| 495 | Helicase_C | 686 | 767 | 25.2 | 8.20E−05 |
| 495 | DSHCT | 1094 | 1286 | 378.3 | 1.10E−110 |
| 496 | TPR_1 | 508 | 541 | 12.2 | 0.17 |
| 496 | TPR_1 | 702 | 735 | 8.4 | 0.49 |
| 496 | TPR_1 | 736 | 769 | 34.4 | 3.60E−07 |
| 496 | TPR_2 | 736 | 769 | 29.5 | 1.10E−05 |
| 496 | TPR_1 | 1226 | 1259 | 7.9 | 0.56 |
| 498 | RNase_PH | 21 | 153 | 152.2 | 1.30E−42 |
| 498 | RNase_PH_C | 156 | 220 | 53.7 | 5.50E−13 |
| 499 | GTP_EFTU | 265 | 516 | 52.8 | 1.10E−12 |
| 500 | GTP_EFTU | 391 | 619 | 253.2 | 5.10E−73 |
| 500 | GTP_EFTU_D2 | 641 | 708 | 43.2 | 8.10E−10 |
| 500 | GTP_EFTU_D3 | 713 | 821 | 45.5 | 1.70E−10 |
| 501 | TP_methylase | 4 | 211 | 321.1 | 1.80E−93 |
| 502 | TP_methylase | 221 | 432 | 292.6 | 6.90E−85 |
| 503 | TP_methylase | 120 | 333 | 257.4 | 2.70E−74 |
| 504 | Asp | 85 | 441 | −78.8 | 5.40E−09 |
| 505 | Asp | 148 | 505 | −71.2 | 1.90E−09 |
| 506 | Asp | 139 | 476 | −126.6 | 3.60E−06 |
| 509 | Dehydrin | 14 | 167 | 241.4 | 1.70E−69 |
| 510 | Dehydrin | 25 | 286 | 88.7 | 1.70E−23 |
| 515 | HSP9_HSP12 | 1 | 59 | 150.8 | 3.40E−42 |
| 519 | F-box | 17 | 64 | 16.7 | 0.079 |
| 519 | LRR_2 | 299 | 323 | 12.3 | 0.31 |
| 520 | LRR_2 | 389 | 414 | 6.4 | 2 |
| 520 | LRR_1 | 415 | 437 | 7.9 | 8.9 |
| 520 | LRR_1 | 465 | 489 | 8.1 | 8 |
| 520 | LRR_1 | 568 | 591 | 7.8 | 9.4 |
| 521 | F-box | 3 | 47 | 40.7 | 4.70E−09 |
| 521 | FBA_1 | 202 | 359 | −34.4 | 0.0019 |
| 522 | F-box | 62 | 108 | 40.1 | 7.00E−09 |
| 522 | LRR_2 | 414 | 438 | 9.9 | 0.66 |
| 523 | 2OG-FeII_Oxy | 158 | 258 | 150.3 | 4.70E−42 |
| 524 | Aminotran_1_2 | 50 | 438 | 510.1 | 2.30E−150 |
| 525 | FA_desaturase | 73 | 313 | 316.4 | 4.60E−92 |
| 526 | Pyridoxal_deC | 63 | 412 | 151.7 | 1.70E−42 |
| 527 | p450 | 40 | 480 | 110.7 | 4.10E−30 |
| 528 | p450 | 44 | 477 | 184.2 | 2.90E−52 |
| 529 | p450 | 60 | 515 | 80.9 | 3.70E−21 |
| 530 | p450 | 42 | 496 | 111.6 | 2.20E−30 |
| 531 | p450 | 73 | 511 | 131.3 | 2.50E−36 |
| 532 | p450 | 41 | 466 | 200.1 | 4.70E−57 |
| 533 | LRRNT_2 | 127 | 167 | 27.1 | 5.70E−05 |
| 533 | LRR_1 | 194 | 216 | 11.3 | 2 |
| 533 | LRR_1 | 218 | 240 | 17.2 | 0.055 |
| 533 | LRR_1 | 266 | 288 | 13.4 | 0.78 |
| 533 | LRR_1 | 290 | 312 | 17.2 | 0.055 |
| 533 | LRR_1 | 314 | 336 | 11.9 | 1.6 |
| 533 | LRR_1 | 338 | 360 | 16.4 | 0.098 |
| 533 | LRR_1 | 362 | 384 | 19.9 | 0.0087 |
| 533 | LRR_1 | 458 | 480 | 18.8 | 0.018 |
| 533 | LRR_1 | 551 | 573 | 14.4 | 0.39 |
| 533 | LRR_1 | 575 | 597 | 10.4 | 3 |
| 533 | LRR_1 | 598 | 620 | 12.4 | 1.3 |
| 533 | LRR_1 | 646 | 668 | 13.6 | 0.65 |
| 533 | LRR_1 | 670 | 692 | 13.8 | 0.6 |
| 533 | LRR_1 | 694 | 716 | 20.3 | 0.0065 |
| 533 | LRR_1 | 718 | 741 | 12.6 | 1.1 |
| 533 | LRR_1 | 754 | 776 | 9 | 5.5 |
| 533 | LRR_1 | 778 | 800 | 8.2 | 7.6 |
| 533 | LRR_1 | 826 | 848 | 14.1 | 0.46 |
| 533 | LRR_1 | 851 | 870 | 12.1 | 1.5 |
| 533 | LRR_1 | 875 | 894 | 12.6 | 1.1 |
| 533 | LRR_1 | 927 | 949 | 15.1 | 0.24 |
| 533 | LRR_1 | 951 | 973 | 13.7 | 0.61 |
| 533 | Pkinase_Tyr | 1114 | 1396 | 115.4 | 1.50E−31 |
| 533 | Pkinase | 1114 | 1396 | 136.4 | 7.20E−38 |
| 534 | E2F_TDP | 12 | 77 | 115.1 | 1.90E−31 |
| 534 | E2F_TDP | 148 | 224 | 119 | 1.20E−32 |
| 536 | E2F_TDP | 111 | 176 | 137.7 | 2.80E−38 |
| 537 | Dicty_CAR | 14 | 321 | −22.2 | 3.10E−05 |
| 538 | Mlo | 6 | 494 | 1012 | 1.90E−301 |
| 539 | Mlo | 32 | 520 | 1031.3 | 0 |
| 540 | G-alpha | 12 | 376 | 553.4 | 2.20E−163 |
| 542 | AP2 | 128 | 193 | 140 | 5.90E−39 |
| 543 | Aa_trans | 32 | 427 | 170.2 | 5.00E−48 |
| 544 | Aa_trans | 34 | 465 | 480.5 | 1.90E−141 |
| 545 | AT_hook | 151 | 163 | 11.6 | 0.21 |
| 545 | AT_hook | 214 | 226 | 9.7 | 0.45 |
| 545 | AT_hook | 294 | 306 | 10.8 | 0.29 |
| 545 | AT_hook | 324 | 336 | 11.9 | 0.19 |
| 545 | YDG_SRA | 397 | 548 | 198.3 | 1.70E−56 |
| 545 | Pre-SET | 575 | 675 | 146 | 9.00E−41 |
| 545 | SET | 677 | 830 | 196.5 | 6.00E−56 |
| 546 | GRAS | 146 | 452 | 451.5 | 9.80E−133 |
| 547 | MAT1 | 14 | 193 | 1.1 | 1.10E−07 |
| 548 | Cystatin | 48 | 135 | 100.3 | 5.50E−27 |
| 549 | Cystatin | 49 | 137 | 68 | 2.80E−17 |
| 549 | Cystatin | 156 | 247 | 18.9 | 0.0033 |
| 550 | Cystatin | 14 | 104 | 62.1 | 1.60E−15 |
| 552 | PI3_PI4_kinase | 172 | 437 | 231.7 | 1.50E−66 |
| 553 | DS | 47 | 363 | 592.4 | 4.00E−175 |
| 554 | GRAS | 217 | 521 | 491 | 1.30E−144 |
| 555 | GRAS | 165 | 471 | 427.7 | 1.50E−125 |
| 556 | UQ_con | 20 | 159 | 187.8 | 2.50E−53 |
| 557 | UPF0016 | 9 | 84 | 102.1 | 1.60E−27 |
| 557 | UPF0016 | 145 | 220 | 111.7 | 2.00E−30 |
| 558 | AAA | 212 | 399 | 308.6 | 1.10E−89 |
| 558 | AAA_5 | 212 | 347 | 8 | 0.0004 |
| 559 | CS | 5 | 81 | 59.8 | 8.00E−15 |
| 560 | CS | 19 | 95 | 38.2 | 2.60E−08 |
| 561 | CS | 5 | 81 | 67.3 | 4.60E−17 |
| 562 | CS | 5 | 80 | 63.8 | 5.00E−16 |
| 563 | Metallophos | 44 | 255 | 74.5 | 3.20E−19 |
| 564 | Metallophos | 50 | 259 | 81.1 | 3.20E−21 |
| 565 | Ribonuclease_T2 | 23 | 245 | 252.4 | 8.60E−73 |
| 566 | Ribonuclease_T2 | 39 | 247 | 210 | 5.20E−60 |
| 567 | Ribonuclease_T2 | 30 | 215 | 93.2 | 7.00E−25 |
| 568 | Ribonuclease_T2 | 28 | 217 | 341.9 | 1.00E−99 |
| 569 | HLH | 19 | 68 | 62.5 | 1.30E−15 |
| 571 | RNase_PH | 29 | 169 | 100.2 | 5.60E−27 |
| 571 | RNase_PH_C | 199 | 265 | 20.7 | 0.0049 |
| 572 | 14-3-3 | 3 | 240 | 509.7 | 3.00E−150 |
| 573 | 14-3-3 | 8 | 245 | 508.7 | 6.20E−150 |
| 574 | IF4E | 5 | 206 | 413.1 | 3.70E−121 |
| 575 | IF4E | 6 | 227 | 480.9 | 1.40E−141 |
| 576 | IF4E | 7 | 210 | 385 | 1.10E−112 |
| 577 | IF4E | 1 | 220 | 424.8 | 1.10E−124 |
| 579 | GRAS | 154 | 464 | 462.7 | 4.30E−136 |
| 580 | Catalase | 18 | 401 | 955.4 | 2.00E−284 |
| 581 | Catalase | 18 | 402 | 954.1 | 5.00E−284 |
| 582 | peroxidase | 17 | 224 | 241.8 | 1.40E−69 |
| 583 | GDI | 1 | 438 | 1048.3 | 0 |
| 584 | GDI | 1 | 452 | 1080.8 | 0 |
| 585 | Rho_GDI | 35 | 245 | 92.5 | 1.20E−24 |
| 586 | Copper-bind | 36 | 132 | 4.5 | 0.00038 |
| 586 | Cu_bind_like | 47 | 125 | 137.2 | 4.10E−38 |
| 587 | Cu_bind_like | 42 | 120 | 113.6 | 5.20E−31 |
| 588 | Cu_bind_like | 42 | 120 | 149.2 | 9.80E−42 |
| 589 | Cu_bind_like | 45 | 105 | 58.1 | 2.60E−14 |
| 590 | Cu_bind_like | 39 | 121 | 55.8 | 1.30E−13 |
| 591 | ADH_zinc_N | 160 | 307 | 113.7 | 4.80E−31 |
| 592 | ADH_zinc_N | 152 | 299 | 101.7 | 2.00E−27 |
| 593 | ADH_zinc_N | 165 | 314 | 109.8 | 7.10E−30 |
| 594 | ADH_N | 33 | 115 | 74.6 | 3.00E−19 |
| 594 | ADH_zinc_N | 146 | 290 | 124.1 | 3.70E−34 |
| 595 | Abhydrolase_1 | 175 | 412 | 61.4 | 2.60E−15 |
| 596 | Hexapep | 65 | 82 | 13.8 | 0.57 |
| 596 | Hexapep | 91 | 108 | 14.1 | 0.48 |
| 596 | Hexapep | 117 | 134 | 8.9 | 11 |
| 596 | Hexapep | 135 | 152 | 14 | 0.49 |
| 597 | Redoxin | 6 | 161 | 57.9 | 3.00E−14 |
| 597 | AhpC-TSA | 7 | 185 | 368.3 | 1.10E−107 |
| 598 | Redoxin | 4 | 160 | 43.7 | 5.90E−10 |
| 598 | AhpC-TSA | 5 | 182 | 347.8 | 1.60E−101 |
| 599 | Redoxin | 50 | 210 | 29.4 | 1.20E−05 |
| 599 | AhpC-TSA | 51 | 233 | 380.8 | 1.90E−111 |
| 600 | Redoxin | 4 | 176 | 172.4 | 1.10E−48 |
| 601 | Redoxin | 68 | 224 | 56.6 | 7.50E−14 |
| 601 | AhpC-TSA | 69 | 248 | 400.8 | 1.90E−117 |
| 602 | Redoxin | 68 | 211 | 97.3 | 4.40E−26 |
| 602 | AhpC-TSA | 70 | 211 | −5.3 | 5.70E−11 |
| 603 | HSP20 | 134 | 240 | 137.9 | 2.50E−38 |
| 604 | HSP20 | 77 | 181 | 153.2 | 6.40E−43 |
| 605 | HSP20 | 85 | 182 | 30.7 | 5.10E−07 |
| 606 | HSP20 | 60 | 163 | 175.8 | 9.70E−50 |
| 607 | HSP20 | 50 | 153 | 185 | 1.70E−52 |
| 609 | OPT | 104 | 758 | 686.8 | 1.50E−203 |
| 610 | Xan_ur_permease | 35 | 432 | 176.9 | 4.60E−50 |
| 611 | Xan_ur_permease | 38 | 445 | 188.8 | 1.20E−53 |
| 612 | F-box | 57 | 112 | 32.1 | 1.90E−06 |
| 612 | Tub | 123 | 480 | 632.1 | 4.50E−187 |
| 613 | Tub | 1 | 251 | 393.2 | 3.50E−115 |
| 614 | HMG_CoA_synt_N | 5 | 178 | 338.3 | 1.20E−98 |
| 614 | HMG_CoA_synt_C | 179 | 453 | 549.9 | 2.40E−162 |
| 615 | HMG_CoA_synt_N | 45 | 216 | 426 | 4.80E−125 |
| 615 | HMG_CoA_synt_C | 217 | 490 | 622.4 | 3.50E−184 |
| 616 | GRAS | 176 | 480 | 418.1 | 1.10E−122 |
| 617 | Pkinase | 23 | 304 | 338 | 1.50E−98 |
| 618 | E1-E2_ATPase | 34 | 255 | 306.8 | 3.50E−89 |
| 618 | Hydrolase | 259 | 545 | 68 | 2.80E−17 |
| 619 | E1-E2_ATPase | 225 | 473 | −52.8 | 1.50E−06 |
| 621 | Hydrolase | 512 | 930 | 19.1 | 0.0013 |
| 622 | Hydrolase | 457 | 898 | 26.9 | 6.40E−05 |
| 623 | FBPase | 66 | 379 | 554.7 | 8.80E−164 |
| 624 | FBPase | 13 | 337 | 691.4 | 6.10E−205 |
| 625 | FBPase | 68 | 380 | 555.9 | 3.70E−164 |
| 626 | FBPase | 63 | 374 | 513.6 | 2.10E−151 |
| 627 | Myb_DNA-binding | 4 | 53 | 39.7 | 9.50E−09 |
| 627 | Myb_DNA-binding | 59 | 104 | 39.3 | 1.30E−08 |
| 628 | Myb_DNA-binding | 4 | 53 | 45 | 2.30E−10 |
| 628 | Myb_DNA-binding | 59 | 104 | 39.6 | 1.00E−08 |
| 629 | KNOX1 | 88 | 132 | 90.3 | 5.40E−24 |
| 629 | KNOX2 | 135 | 186 | 102.8 | 9.20E−28 |
| 629 | ELK | 232 | 253 | 37 | 6.10E−08 |
| 629 | Homeobox | 255 | 314 | −0.2 | 0.0048 |
| 630 | KNOX1 | 65 | 109 | 97 | 5.30E−26 |
| 630 | KNOX2 | 117 | 168 | 118.4 | 1.90E−32 |
| 630 | ELK | 205 | 226 | 29.8 | 8.60E−06 |
| 630 | Homeobox | 228 | 287 | 5.7 | 0.0012 |
| 631 | KNOX1 | 57 | 101 | 81.6 | 2.30E−21 |
| 631 | KNOX2 | 104 | 155 | 94.7 | 2.60E−25 |
| 631 | ELK | 202 | 223 | 30 | 7.60E−06 |
| 631 | Homeobox | 225 | 284 | 1.8 | 0.003 |
| 632 | bZIP_2 | 225 | 279 | 26.5 | 8.50E−05 |
| 632 | bZIP_1 | 227 | 289 | 29.2 | 1.40E−05 |
| 633 | Myb_DNA-binding | 59 | 104 | 58.3 | 2.30E−14 |
| 634 | Aa_trans | 27 | 433 | 475.6 | 5.50E−140 |
| 635 | Aa_trans | 31 | 433 | 508.5 | 6.80E−150 |
| 636 | Aa_trans | 59 | 459 | 295.7 | 7.90E−86 |
| 637 | Sugar_tr | 26 | 487 | 565 | 6.80E−167 |
| 637 | MFS_1 | 30 | 448 | 79.4 | 1.00E−20 |
| 638 | MFS_1 | 21 | 450 | 89.5 | 9.40E−24 |
| 638 | Sugar_tr | 26 | 489 | 611.3 | 7.90E−181 |
| 639 | Sugar_tr | 29 | 489 | 392.1 | 7.60E−115 |
| 639 | MFS_1 | 33 | 449 | 75.6 | 1.40E−19 |
| 640 | Sugar_tr | 29 | 552 | 421.5 | 1.10E−123 |
| 640 | MFS_1 | 33 | 511 | 90.8 | 3.90E−24 |
| 641 | Sugar_tr | 101 | 535 | 347.7 | 1.80E−101 |
| 641 | MFS_1 | 105 | 494 | 80.9 | 3.60E−21 |
| 642 | Sugar_tr | 53 | 503 | 427.7 | 1.50E−125 |
| 642 | MFS_1 | 57 | 462 | 125.4 | 1.50E−34 |
| 643 | Sugar_tr | 47 | 479 | 287.4 | 2.60E−83 |
| 643 | MFS_1 | 52 | 439 | 77 | 5.60E−20 |
| 644 | Sugar_tr | 37 | 468 | −46.3 | 1.90E−05 |
| 644 | MFS_1 | 40 | 463 | 26.4 | 1.80E−05 |
| 646 | Sugar_tr | 27 | 490 | 468.6 | 7.10E−138 |
| 646 | MFS_1 | 33 | 447 | 86.5 | 7.80E−23 |
| 647 | Sugar_tr | 26 | 488 | 522.3 | 4.70E−154 |
| 647 | MFS_1 | 41 | 445 | 61.1 | 3.30E−15 |
| 648 | p450 | 35 | 499 | 310 | 4.00E−90 |
| 649 | WD40 | 160 | 197 | 27.3 | 5.10E−05 |
| 649 | WD40 | 249 | 288 | 33.1 | 8.90E−07 |
| 650 | WD40 | 740 | 779 | 35.7 | 1.50E−07 |
| 650 | WD40 | 826 | 863 | 30.7 | 4.80E−06 |
| 651 | HLH | 14 | 63 | 60.2 | 6.30E−15 |
| 652 | HD-ZIP_N | 1 | 96 | 151.2 | 2.60E−42 |
| 652 | Homeobox | 123 | 177 | 65.2 | 1.90E−16 |
| 652 | HALZ | 178 | 222 | 86.1 | 1.00E−22 |
| 654 | GH3 | 15 | 570 | 1262.5 | 0 |
| 655 | Oxidored_FMN | 10 | 345 | 295.2 | 1.10E−85 |
| 656 | Oxidored_FMN | 1 | 330 | 262.8 | 6.30E−76 |
| 657 | Oxidored_FMN | 11 | 342 | 332 | 9.60E−97 |
| 659 | TPR_1 | 78 | 111 | 22.5 | 0.0014 |
| 659 | TPR_1 | 112 | 145 | 22.3 | 0.0016 |
| 659 | TPR_2 | 112 | 145 | 22.5 | 0.0014 |
| 661 | TPR_2 | 2 | 35 | 30.9 | 4.20E−06 |
| 661 | TPR_1 | 2 | 35 | 29.1 | 1.40E−05 |
| 661 | TPR_1 | 36 | 69 | 9.3 | 0.39 |
| 661 | TPR_2 | 70 | 103 | 34 | 4.70E−07 |
| 661 | TPR_1 | 70 | 103 | 37.3 | 4.80E−08 |
| 661 | TPR_2 | 253 | 286 | 27.8 | 3.50E−05 |
| 661 | TPR_1 | 253 | 286 | 27.1 | 5.70E−05 |
| 661 | TPR_2 | 287 | 320 | 21 | 0.0038 |
| 661 | TPR_1 | 287 | 320 | 28.8 | 1.80E−05 |
| 661 | TPR_1 | 328 | 365 | 11.3 | 0.22 |
| 661 | TPR_2 | 392 | 425 | 27.2 | 5.30E−05 |
| 661 | TPR_1 | 392 | 425 | 33.7 | 5.90E−07 |
| 661 | TPR_2 | 426 | 459 | 23.4 | 0.00074 |
| 661 | TPR_1 | 426 | 459 | 34.2 | 4.20E−07 |
| 661 | TPR_2 | 460 | 493 | 24.8 | 0.00029 |
| 661 | TPR_1 | 460 | 493 | 35.6 | 1.60E−07 |
| 662 | TPR_1 | 124 | 157 | 14.2 | 0.099 |
| 662 | TPR_1 | 158 | 191 | 26.4 | 9.40E−05 |
| 662 | TPR_1 | 192 | 225 | 16.2 | 0.058 |
| 662 | TPR_2 | 192 | 225 | 21.3 | 0.0033 |
| 663 | TPR_1 | 14 | 47 | 22.2 | 0.0017 |
| 663 | TPR_2 | 14 | 47 | 20.6 | 0.0053 |
| 663 | TPR_2 | 48 | 81 | 23.3 | 0.00078 |
| 663 | TPR_1 | 48 | 81 | 33.1 | 8.90E−07 |
| 663 | TPR_1 | 82 | 115 | 12.8 | 0.15 |
| 663 | TPR_2 | 82 | 115 | 21.1 | 0.0036 |
| 663 | U-box | 195 | 269 | 132.5 | 1.10E−36 |
| 664 | TPR_1 | 16 | 49 | 23.2 | 0.00086 |
| 664 | TPR_2 | 16 | 49 | 20.7 | 0.005 |
| 664 | TPR_1 | 50 | 83 | 29.3 | 1.30E−05 |
| 664 | TPR_1 | 84 | 117 | 11.9 | 0.19 |
| 664 | U-box | 197 | 271 | 125.9 | 1.00E−34 |
| 665 | SRF-TF | 9 | 59 | 80.2 | 6.00E−21 |
| 666 | SRF-TF | 9 | 59 | 92.5 | 1.20E−24 |
| 666 | K-box | 69 | 173 | 31.2 | 9.50E−07 |
| 667 | SRF-TF | 9 | 59 | 120.8 | 3.60E−33 |
| 667 | K-box | 75 | 174 | 154.8 | 2.00E−43 |
| 670 | CRAL_TRIO_N | 20 | 87 | 119 | 1.30E−32 |
| 670 | CRAL_TRIO | 110 | 296 | 350.5 | 2.60E−102 |
| 671 | CRAL_TRIO_N | 1 | 71 | 30.9 | 4.20E−06 |
| 671 | CRAL_TRIO | 90 | 275 | 25.8 | 7.70E−08 |
| 672 | CRAL_TRIO | 87 | 251 | 65 | 2.20E−16 |
| 673 | CRAL_TRIO | 91 | 264 | 88.5 | 1.90E−23 |
| 674 | CRAL_TRIO_N | 19 | 86 | 28 | 2.30E−05 |
| 674 | CRAL_TRIO | 101 | 255 | 68.7 | 1.70E−17 |
| 675 | Methyltransf_7 | 36 | 369 | 629.7 | 2.40E−186 |
| 676 | Methyltransf_7 | 36 | 382 | 371.9 | 9.00E−109 |
| 677 | Methyltransf_7 | 38 | 378 | 384 | 2.10E−112 |
| 678 | FtsH_ext | 77 | 223 | 137 | 4.70E−38 |
| 678 | AAA | 249 | 436 | 336.6 | 3.90E−98 |
| 678 | AAA_5 | 249 | 384 | 5.9 | 0.00059 |
| 678 | Peptidase_M41 | 443 | 653 | 399 | 6.30E−117 |

TABLE 23

| Pfam domain | Accession | Gathering | |
|---|---|---|---|
| name | number | cutoff | Domain description |
| 14-3-3 | PF00244.9 | 25 | 14-3-3 protein |
| 2OG-FeII_Oxy | PF03171.10 | 11.5 | 2OG-Fe(II) oxygenase superfamily |
| AAA | PF00004.19 | 12.3 | ATPase family associated with various cellular activities (AAA) |
| AAA_2 | PF07724.3 | −5 | ATPase family associated with various cellular activities (AAA) |
| AAA_5 | PF07728.4 | 4 | ATPase family associated with various cellular activities (AAA) |
| ABC2_membrane | PF01061.13 | −17.9 | ABC-2 type transporter |
| ABC_tran | PF00005.16 | 9.5 | ABC transporter |
| ACP_syn_III_C | PF08541.1 | −24.4 | 3-Oxoacyl-[acyl-carrier-protein (ACP)] synthase III C terminal |
| ADH_N | PF08240.2 | −14.5 | Alcohol dehydrogenase GroES-like domain |
| ADH_zinc_N | PF00107.16 | 23.8 | Zinc-binding dehydrogenase |
| AOX | PF01786.8 | 25 | Alternative oxidase |
| AP2 | PF00847.10 | 0 | AP2 domain |
| AT_hook | PF02178.8 | 3.6 | AT hook motif |
| Aa_trans | PF01490.7 | −128.4 | Transmembrane amino acid transporter protein |
| Abhydrolase_1 | PF00561.10 | 10.3 | alpha/beta hydrolase fold |
| Acid_phosphat_A | PF00328.12 | −64.5 | Histidine acid phosphatase |
| AhpC-TSA | PF00578.10 | −92.2 | AhpC/TSA family |
| Aminotran_1_2 | PF00155.11 | −57.5 | Aminotransferase class I and II |
| Asp | PF00026.13 | −153.8 | Eukaryotic aspartyl protease |
| B3 | PF02362.12 | 26.5 | B3 DNA binding domain |
| CCT | PF06203.4 | 25 | CCT motif |
| CDC48_N | PF02359.8 | −2 | Cell division protein 48 (CDC48), N-terminal domain |
| CRAL_TRIO | PF00650.9 | −26 | CRAL/TRIO domain |
| CRAL_TRIO_N | PF03765.4 | 16 | CRAL/TRIO, N-terminus |
| CS | PF04969.6 | 8.6 | CS domain |
| Carb_anhydrase | PF00194.10 | −105 | Eukaryotic-type carbonic anhydrase |
| Catalase | PF00199.9 | −229 | Catalase |
| Cellulose_synt | PF03552.4 | −257.9 | Cellulose synthase |
| Chal_sti_synt_C | PF02797.5 | −6.1 | Chalcone and stilbene synthases, C-terminal domain |
| Citrate_synt | PF00285.11 | −101.5 | Citrate synthase |
| Clp_N | PF02861.10 | 0 | Clp amino terminal domain |
| Copper-bind | PF00127.10 | −7.7 | Copper binding proteins, plastocyanin/azurin family |
| Cu_bind_like | PF02298.7 | −16.4 | Plastocyanin-like domain |
| Cyclin_C | PF02984.9 | −13 | Cyclin, C-terminal domain |
| Cyclin_N | PF00134.13 | −14.7 | Cyclin, N-terminal domain |
| Cystatin | PF00031.11 | 17.5 | Cystatin domain |
| DEAD | PF00270.18 | 7.2 | DEAD/DEAH box helicase |
| DS | PF01916.7 | −95.2 | Deoxyhypusine synthase |
| DSHCT | PF08148.1 | −86.9 | DSHCT (NUC185) domain |
| DUF902 | PF06001.2 | 25 | Domain of Unknown Function (DUF902) |
| DUF906 | PF06010.1 | 25 | Domain of Unknown Function (DUF906) |
| Dehydrin | PF00257.10 | −4.4 | Dehydrin |
| Dicty_CAR | PF05462.2 | −39.7 | Slime mold cyclic AMP receptor |
| E1-E2_ATPase | PF00122.9 | −84 | E1-E2 ATPase |
| E2F_TDP | PF02319.11 | 17 | E2F/DP family winged-helix DNA-binding domain |
| ELK | PF03789.3 | 25 | ELK domain |
| F-box | PF00646.22 | 13.8 | F-box domain |
| FAD_binding_6 | PF00970.13 | −11.4 | Oxidoreductase FAD-binding domain |
| FAE1_CUT1_RppA | PF08392.2 | −192.7 | FAE1/Type III polyketide synthase-like protein |
| FAT | PF02259.12 | 275 | FAT domain |
| FATC | PF02260.9 | 20 | FATC domain |
| FA_desaturase | PF00487.14 | −46 | Fatty acid desaturase |
| FBA_1 | PF07734.2 | −39.4 | F-box associated |
| FBPase | PF00316.10 | −170.3 | Fructose-1-6-bisphosphatase |
| FBPase_glpX | PF03320.4 | −198.1 | Bacterial fructose-1,6-bisphosphatase, glpX-encoded |
| FKBP_C | PF00254.17 | −7.6 | FKBP-type peptidyl-prolyl cis-trans isomerase |
| Ferritin | PF00210.14 | −10 | Ferritin-like domain |
| FtsH_ext | PF06480.4 | 25 | FtsH Extracellular |
| G-alpha | PF00503.9 | −230 | G-protein alpha subunit |
| GAF | PF01590.15 | 23 | GAF domain |
| GDA1_CD39 | PF01150.7 | −183 | GDA1/CD39 (nucleoside phosphatase) family |
| GDI | PF00996.8 | −285.8 | GDP dissociation inhibitor |
| GFO_IDH_MocA | PF01408.12 | −4.4 | Oxidoreductase family, NAD-binding Rossmann fold |
| GFO_IDH_MocA_C | PF02894.7 | 6 | Oxidoreductase family, C-terminal alpha/beta domain |
| GH3 | PF03321.3 | −336 | GH3 auxin-responsive promoter |
| GRAS | PF03514.5 | −78 | GRAS family transcription factor |
| GTP_EFTU | PF00009.16 | 8 | Elongation factor Tu GTP binding domain |
| GTP_EFTU_D2 | PF03144.15 | 25 | Elongation factor Tu domain 2 |
| GTP_EFTU_D3 | PF03143.6 | 14.3 | Elongation factor Tu C-terminal domain |
| Gemini_AL1 | PF00799.10 | −38.7 | Geminivirus Rep catalytic domain |
| Gemini_AL1_M | PF08283.1 | −3 | Geminivirus rep protein central domain |
| Globin | PF00042.11 | −8.8 | Globin |
| Glyco_hydro_32C | PF08244.2 | 8.8 | Glycosyl hydrolases family 32 C terminal |
| Glyco_hydro_32N | PF00251.10 | −197 | Glycosyl hydrolases family 32 N terminal |
| HALZ | PF02183.7 | 17 | Homeobox associated leucine zipper |
| HATPase_c | PF02518.15 | 22.4 | Histidine kinase-, DNA gyrase B-, and HSP90-like ATPase |
| HD-ZIP_N | PF04618.2 | 25 | HD-ZIP protein N terminus |
| HEAT | PF02985.11 | 11.5 | HEAT repeat |
| HLH | PF00010.15 | 8.2 | Helix-loop-helix DNA-binding domain |
| HMG_CoA_synt_C | PF08540.1 | −158.1 | Hydroxymethylglutaryl-coenzyme A synthase C terminal |
| HMG_CoA_synt_N | PF01154.8 | −6.2 | Hydroxymethylglutaryl-coenzyme A synthase N terminal |
| HSF_DNA-bind | PF00447.7 | −70 | HSF-type DNA-binding |
| HSP20 | PF00011.10 | 13 | Hsp20/alpha crystallin family |
| HSP9_HSP12 | PF04119.2 | 25 | Heat shock protein 9/12 |
| Helicase_C | PF00271.20 | 2.1 | Helicase conserved C-terminal domain |
| Hexapep | PF00132.13 | 0.3 | Bacterial transferase hexapeptide (three repeats) |
| HisKA | PF00512.14 | 10.3 | His Kinase A (phosphoacceptor) domain |
| Homeobox | PF00046.18 | −4.1 | Homeobox domain |
| Hydrolase | PF00702.15 | 13.6 | haloacid dehalogenase-like hydrolase |
| IBN_N | PF03810.9 | 21.9 | Importin-beta N-terminal domain |
| IF4E | PF01652.8 | −35 | Eukaryotic initiation factor 4E |
| K-box | PF01486.7 | 0 | K-box region |
| KNOX1 | PF03790.3 | 25 | KNOX1 domain |
| KNOX2 | PF03791.3 | 25 | KNOX2 domain |
| KOW | PF00467.18 | 29.1 | KOW motif |
| LEA_4 | PF02987.6 | 0 | Late embryogenesis abundant protein |
| LRRNT_2 | PF08263.3 | 18.6 | Leucine rich repeat N-terminal domain |
| LRR_1 | PF00560.22 | 7.7 | Leucine Rich Repeat |
| LRR_2 | PF07723.2 | 6 | Leucine Rich Repeat |
| Linker_histone | PF00538.8 | −8 | linker histone H1 and H5 family |
| MAT1 | PF06391.2 | −55.1 | CDK-activating kinase assembly factor MAT1 |
| MFS_1 | PF07690.6 | 23.5 | Major Facilitator Superfamily |
| MIP | PF00230.10 | −62 | Major intrinsic protein |
| Metallophos | PF00149.18 | 22 | Calcineurin-like phosphoesterase |
| Methyltransf_7 | PF03492.5 | 25 | SAM dependent carboxyl methyltransferase |
| Mito_carr | PF00153.16 | 0 | Mitochondrial carrier protein |
| Mlo | PF03094.5 | −263 | Mlo family |
| MtN3_slv | PF03083.5 | 9.7 | MtN3/saliva family |
| Myb_DNA-binding | PF00249.20 | 14 | Myb-like DNA-binding domain |
| NAD_binding_1 | PF00175.11 | −3.9 | Oxidoreductase NAD-binding domain |
| NAD_binding_3 | PF03447.6 | −1.7 | Homoserine dehydrogenase, NAD binding domain |
| NDK | PF00334.9 | −59.9 | Nucleoside diphosphate kinase |
| OPT | PF03169.6 | −238.6 | OPT oligopeptide transporter protein |
| Orn_Arg_deC_N | PF02784.7 | −76 | Pyridoxal-dependent decarboxylase, pyridoxal binding domain |
| Orn_DAP_Arg_deC | PF00278.12 | 6.7 | Pyridoxal-dependent decarboxylase, C-terminal sheet domain |
| Oxidored_FMN | PF00724.9 | −147.7 | NADH: flavin oxidoreductase/NADH oxidase family |
| PAS | PF00989.13 | 0 | PAS fold |
| PAS_2 | PF08446.1 | −2.1 | PAS fold |
| PAS_3 | PF08447.1 | 13.4 | PAS fold |
| PAS_4 | PF08448.1 | 16.4 | PAS fold |
| PDR_CDR | PF06422.2 | −51.8 | CDR ABC transporter |
| PI3_PI4_kinase | PF00454.16 | 14.8 | Phosphatidylinositol 3- and 4-kinase |
| PTR2 | PF00854.12 | −50 | POT family |
| Peptidase_M41 | PF01434.8 | −139.8 | Peptidase family M41 |
| Phytochrome | PF00360.9 | 13 | Phytochrome region |
| Pkinase | PF00069.15 | −70.3 | Protein kinase domain |
| Pkinase_Tyr | PF07714.6 | 65 | Protein tyrosine kinase |
| Pre-SET | PF05033.5 | 3.9 | Pre-SET motif |
| Pyridoxal_deC | PF00282.9 | −158.6 | Pyridoxal-dependent decarboxylase conserved domain |
| RB_A | PF01858.7 | −65.3 | Retinoblastoma-associated protein A domain |
| RB_B | PF01857.9 | −48.7 | Retinoblastoma-associated protein B domain |
| RNase_PH | PF01138.10 | 4 | 3′ exoribonuclease family, domain 1 |
| RNase_PH_C | PF03725.4 | 20 | 3′ exoribonuclease family, domain 2 |
| RRM_1 | PF00076.12 | 17.7 | RNA recognition motif. (a.k.a. RRM, RBD, or RNP domain) |
| Redoxin | PF08534.1 | −1 | Redoxin |
| Response_reg | PF00072.13 | 4 | Response regulator receiver domain |
| Rho_GDI | PF02115.6 | −55 | RHO protein GDP dissociation inhibitor |
| Ribonuclease_T2 | PF00445.8 | −53 | Ribonuclease T2 family |
| Ribosomal_L18p | PF00861.12 | 25 | Ribosomal L18p/L5e family |
| S1 | PF00575.13 | 16.8 | S1 RNA binding domain |
| SAM_decarbox | PF01536.6 | −154 | Adenosylmethionine decarboxylase |
| SET | PF00856.17 | 23.5 | SET domain |
| SNF2_N | PF00176.13 | −72 | SNF2 family N-terminal domain |
| SRF-TF | PF00319.8 | 11 | SRF-type transcription factor (DNA-binding and dimerisation domain) |
| Sugar_tr | PF00083.14 | −85 | Sugar (and other) transporter |
| TAP42 | PF04177.3 | 25 | TAP42-like family |
| TPR_1 | PF00515.17 | 7.7 | Tetratricopeptide repeat |
| TPR_2 | PF07719.6 | 20.1 | Tetratricopeptide repeat |
| TP_methylase | PF00590.10 | −38 | Tetrapyrrole (Corrin/Porphyrin) Methylases |
| Tub | PF01167.7 | −98 | Tub family |
| U-box | PF04564.6 | −7.6 | U-box domain |
| UPF0016 | PF01169.8 | 25 | Uncharacterized protein family UPF0016 |
| UQ_con | PF00179.16 | −30 | Ubiquitin-conjugating enzyme |
| WD40 | PF00400.21 | 21.5 | WD domain, G-beta repeat |
| Wzy_C | PF04932.4 | 25 | O-Antigen Polymerase |
| Xan_ur_permease | PF00860.11 | −151.2 | Permease family |
| YDG_SRA | PF02182.7 | 25 | YDG/SRA domain |
| bZIP_1 | PF00170.11 | 24.5 | bZIP transcription factor |
| bZIP_2 | PF07716.5 | 15 | Basic region leucine zipper |
| eIF-5a | PF01287.9 | 9.6 | Eukaryotic initiation factor 5A hypusine, DNA-binding OB fold |
| p450 | PF00067.11 | −105 | Cytochrome P450 |
| peroxidase | PF00141.12 | −10 | Peroxidase |
| polyprenyl_synt | PF00348.8 | −43 | Polyprenyl synthetase |
| zf-NF-X1 | PF01422.7 | 3 | NF-X1 type zinc finger |

### Example 9

### Selection of Transgenic Plants with Enhanced Agronomic Trait(s)

[0134] This example illustrates the preparation and identification by selection of transgenic seeds and plants derived from transgenic plant cells of this invention where the plants and seed are identified by screening for a transgenic plant having an enhanced agronomic trait imparted by expression of a protein selected from the group including the homologous proteins identified in Example 6. Transgenic plant cells of corn, soybean, cotton, canola, alfalfa, wheat and rice are transformed with recombinant DNA for expressing each of the homologs identified in Example 6. Plants are regenerated from the transformed plant cells and used to produce progeny plants and seed that are screened for enhanced water use efficiency, enhanced cold tolerance, increased yield, enhanced nitrogen use efficiency, enhanced seed protein and enhanced seed oil. Plants are identified exhibiting enhanced traits imparted by expression of the homologous proteins.

What is claimed is:

1. A plant cell nucleus with stably integrated, recombinant DNA, wherein
a. said recombinant DNA comprises a promoter that is functional in said plant cell and that is operably linked to a protein coding DNA encoding a protein having an amino acid sequence comprising a Pfam domain module selected from the group consisting of bZIP_{—}1, AOX, DUF902::DUF906, LRRNT_{—}2::LRR_{—}1::LRR_{—}1::LRR_{—}1::LRR_{—}1::LRR_{—}1::LRR_{—}1::LRR_{—}1::LRR_{—}1::LRR_{—}1::LRR_{—}1::LRR_{—}1::LRR_{—}1::LRR_{—}1::LRR_{—}1::LRR_{—}1::LRR_{—}1::LRR_{—}1::LRR_{—}1::LRR_{—}1::LRR_{—}1::LRR_{—}1::LRR_{—}1::Pkinase, ABC_tran::ABC2_membrane::PDR_CDR::ABC_tran::ABC2_membrane, Redoxin, RNase_PH::RNase_PH_C, AAA, GFO_IDH_MocA::GFO_IDH_MocA_C, GRAS, Metallophos, Ribosomal_L18p, Sugar_tr, CDC48_N::AAA::AAA, Pkinase, PAS_{—}3::PAS_{—}3::Pkinase, CRAL_TRIO_N::CRAL_TR₁₀, p450, RRM_{—}1::RRM_{—}1, SRF-TF, G-alpha, TPR_{—}1::TPR_{—}1, FAE1_CUT1_RppA::ACP_syn_III_C, Globin::FAD_binding_{—}6::NAD_binding_{—}1, TPR_{—}1::TPR_{—}2, IF4E, F-box::LRR_{—}2, FBPase, LRR_{—}2::LRR_{—}1::LRR_{—}1::LRR_{—}1, HSF_DNA-bind, Dehydrin, TP-methylase, Response_reg::Myb_DNA-binding, KNOX1::KNOX2::ELK::Homeobox, Catalase, GTP_EFTU::GTP_EFTU_D2::GTP_EFTU_D3, TPR_{—}1::TPR_{—}1::TPR_{—}1::TPR_{—}1, ADH_zinc_N, Globin, CS, GH3, HLH, Ribonuclease_T2, TPR_{—}1::TPR_{—}1::TPR_{—}1::U-box, Dicty_CAR, Cyclin_N::Cyclin_C, MFS_{—}1, Acid_phosphat_A, Methyltransf_{—}7, TPR_{—}1::TPR_{—}1::TPR_{—}2, IBN_N, polyprenyl_synt, AhpC-TSA, Oxidored_FMN, Hydrolase, DS, Response_reg::CCT, Aa_trans, peroxidase, E1-E2_ATPase, F-box::Tub, Response_reg, Rho_GD1, E2F_TDP, 14-3-3, AT_hook::AT_hook::AT_hook::AT_hook::YDG_SRA::Pre-SET::SET, Tub, KOW::eIF-5a, MtN3_slv::MtN3_slv, GTP_EFTU, UQ_con, MAT1, E2F_TDP::E2F_TDP, HEAT::HEAT::HEAT::FAT::PI3_PI4_kinase::FATC, HMG_CoA_synt_N::HMG_CoA_synt_C, TAP42, DEAD::Helicase_C::DSHCT, NDK, Clp_N::Clp_N::AAA::AAA_{—}2, Cyclin_N, OPT, Orn_Arg_deC_N::Orn_DAP_Arg_deC, PAS::Pkinase, FtsH_ext::AAA::Peptidase_M41, Wzy_C, Mlo, AP2::B3, SET, FKBP_C::FKBP_C::FKBP_C::TPR_{—}1::TPR_{—}1, TPR_{—}2::TPR_{—}1::TPR_{—}1::TPR_{—}2::TPR_{—}1::TPR_{—}1::TPR_{—}1::TPR_{—}1::TPR_{—}1, Pyridoxal_deC, RNase_PH, RB_A::RB_B, WD40::WD40::WD40::WD40::WD40:::WD40, SNF2_N::Helicase_C, Aminotran_{—}1_{—}2, Gemini_AL1::Gemini_AL1_M, Hexapep::Hexapep::Hexapep::Hexapep, AP2::AP2, Abhydrolase_{—}1, PAS_{—}2::GAF::Phytochrome::PAS::PAS::H isKA::HATPase_c, Cystatin::Cystatin, Pfam module annoation, Cystatin, F-box::FBA_{—}1, 2OG-FeII_Oxy, FA_desaturase, HSP20, FBPase_glpX, E1-E2_ATPase::Hydrolase, Mito_carr::Mito_carr::Mito_carr, Cellulose_synt, Linker_histone::AT_hook::AT_hook::AT_hook::AT_hook, UPF0016::UPF0016, GDI, Glyco_hydro_{—}32N::Glyco_hydro_{—}32C, TPR_{—}1::TPR_{—}1::TPR_{—}2::U-box, ADH_N::ADH_zinc_N, GDA1_CD39, MIP, CRAL_TR₁₀, TPR_{—}1::TPR_{—}1::TPR_{—}1::TPR_{—}1::TPR_{—}1::TPR_{—}1::TPR_{—}1::TPR_{—}1, LEA_{—}4::LEA_{—}4, Carb_anhydrase, PTR₂, Cu_bind_like, HD-ZIP_N::Homeobox::HALZ, eIF-5a, Asp, S1::S1::S1, SAM_decarbox, WD40::WD40, Citrate_synt, SRF-TF::K-box, HSP9_HSP12, PI3_PI4_kinase, Ferritin, Xan_ur_permease, Myb_DNA-binding::Myb_DNA-binding, zf-NF-X1::zf-NF-X1::zf-NF-X1::zf-NF-X1::zf-NF-X1, AP2, and Myb_DNA-binding;
b. said recombinant DNA comprises a promoter that is functional in said plant cell and that is operably linked to a protein coding DNA encoding a protein comprising an amino acid sequence with at least 90% identity to a consensus amino acid sequence selected from the group consisting of SEQ ID NO: 24153 through SEQ ID NO: 24174;
c. said recombinant DNA comprises a promoter that is functional in plant cells and that is operably linked to a protein coding DNA encoding a protein comprising an amino acid sequence selected from the group consisting of 467, 507, 517, 535, 620, and homologs thereof listed in table 7; or
d. said recombinant DNA comprises a promoter that is functional in said plant cell and that is operably linked to a protein coding recombinant DNA encoding a protein having an amino acid sequence having at least 70% identity to an amino acid sequence selected from the group consisting of 511 and 513;
and wherein said plant cell nucleus is selected by screening a population of transgenic plants that have said recombinant DNA and an enhanced trait as compared to control plants that do not have said recombinant DNA in their nuclei; and wherein said enhanced trait is selected from group of enhanced traits consisting of enhanced water use efficiency, enhanced cold tolerance, enhanced heat tolerance, enhanced resistance to salt exposure, enhanced shade tolerance, increased yield, enhanced nitrogen use efficiency, enhanced seed protein and enhanced seed oil.

2. The plant cell nucleus of claim 1 wherein said protein coding DNA encodes a protein having an amino acid sequence selected from the group consisting of SEQ ID NO: 340 through SEQ ID NO: 24149.

3. The plant cell nucleus of claim 1 further comprising DNA expressing a protein that provides tolerance from exposure to an herbicide applied at levels that are lethal to a wild type of said plant cell.

4. The plant cell nucleus of claim 3 wherein the agent of said herbicide is a glyphosate, dicamba, or glufosinate compound.

5. A transgenic plant cell or plant comprising a plurality of plant cells with the plant cell nucleus of claim 1.

6. The transgenic plant cell or plant of claim 5 which is homozygous for said recombinant DNA.

7. A transgenic seed comprising a plurality of plant cells with the plant cell nucleus of claim 1.

8. The transgenic seed of claim 7 from a corn, soybean, cotton, canola, alfalfa, wheat or rice plant.

9. A transgenic pollen grain comprising a haploid derivative of the plant cell nucleus of claim 1.

10. A method for manufacturing non-natural, transgenic seed of claim 7 that can be used to produce a crop of transgenic plants with an enhanced trait resulting from expression of stably-integrated recombinant DNA wherein said method for manufacturing said transgenic seed comprising:
(a) screening a population of plants for said enhanced trait and said recombinant DNA wherein individual plants in said population can exhibit said trait at a level less than, essentially the same as or greater than the level that said trait is exhibited in control plants which do not express the recombinant DNA, wherein said enhanced trait is selected from the group of enhanced traits consisting of enhanced water use efficiency, enhanced cold tolerance, enhanced heat tolerance, enhanced resistance to salt exposure, enhanced shade tolerance, increased yield, enhanced nitrogen use efficiency, enhanced seed protein and enhanced seed oil,
(b) selecting from said population one or more plants that exhibit said trait at a level greater than the level that said trait is exhibited in control plants, and
(c) collecting seed from selected plants selected from step b.

11. The method of claim 10 further comprising
(d) verifying that said recombinant DNA is stably integrated in said selected plants, and
(e) analyzing tissue of said selected plant to determine the expression or suppression of a gene that encodes an protein having the function of a protein having an amino acid sequence selected from the group consisting of one of SEQ ID NO:340-678.

12. A method of producing hybrid corn seed comprising:
(a) acquiring hybrid corn seed from a herbicide tolerant corn plant which also has stably-integrated, recombinant DNA in a nucleus of claim 1;
(b) producing corn plants from said hybrid corn seed, wherein a fraction of the plants produced from said hybrid corn seed is homozygous for said recombinant DNA, a fraction of the plants produced from said hybrid corn seed is hemizygous for said recombinant DNA, and a fraction of the plants produced from said hybrid corn seed has none of said recombinant DNA;
(c) selecting corn plants which are homozygous and hemizygous for said recombinant DNA by treating with an herbicide;
(d) collecting seed from herbicide-treated-surviving corn plants and planting said seed to produce further progeny corn plants;
(e) repeating steps (c) and (d) at least once to produce an inbred corn line; and
(f) crossing said inbred corn line with a second corn line to produce hybrid seed.

The application's sequence listing, which the Patent Office published only in electronic form, follows.

SEQUENCE LISTING (24174 sequences)

SEQ ID NO: 1 - DNA, 3317 bp, Zea mays
ccacgcgtccgcccacgcgtccgcccacgcgtccgcccattctctcacacccaacacccagctatcacaccctgatccccgaggccgcgcgtcggggtgaggaggaggggccatgatggagtcggcggcggcccagtcctgcgcggcgtgcggggacgacgcgcgcgctgcctgccgcgcgtgcagctacgcgctctgcagggcgtgcctcgacgaggacgccgccgagggccgcaccacatgcgcgcgctgcggaggggactacgccgctatcaacccagcgcgcgccagcgagggaaccgaggcggaggaggaggtggtggagaaccaccacaccgccggtggcctgcgtgagagggtcaccatgggcagccacctcaatgatcgccaggatgaagtaagccacgccaggaccatgagcagcttgtcgggaattggtagtgaattgaatgatgaatctggtaagcccatctggaagaacagggtggagagttggaaggaaaagaagaatgagaagaaagcctcggccaaaaagactgcagctaaagcacagcctccgcctgtcgaagaacagatcatggatgaaaaagacttgacagatgcatatgagccactctcccgggtcatcccaatatcaaagaacaagctcacaccttacagagcagtgatcattatgcggttaattgttcttgggctcttctttcactaccgtatcaccaatcctgttaacagtgcctttggtctctggatgacatcagttatatgtgagatctggtttggtttctcctggatattggatcaattcccgaagtggtatcctatcaatcgtgagacttatgttgataggctgattgcacgatatggagatggtgaagaatctgggttagcacctgtagatttctttgtcagtacagtggatccattgaaagagcctccactaatcactgcaaacactgtgctgtctattcttgctgtggactatcccgttgagaagatctcatgctatgtatctgatgatggttctgctatgctcacatttgaatcgctcgcagagactgcagaatatgctagaaagtgggtgccgttttgcaagaagtacgccattgagccacgagctcctgagttctacttctcacagaaaattgactacttgaaggacaagatacacccatcttttgtcaaggagcgtagggctatgaagagagactatgaagagtacaaggtgaggataaatgctttggttgccaaggctcaaaagacacctgatgaaggctggatcatgcaagacggtacaccatggcctgggaacaatcctcgtgaccaccctggcatgatccaggttttcctgggtgagactggtgcacgggactttgatggaaatgaacttcctcggttagtgtatgtgtcaagagagaaaagaccaggctaccaacaccacaagaaggcaggggctatgaatgctctggtccgagtgtctgctgttctgacaaatgccccttacattcttaatcttgattgtgatcactatgttaacaacagcaaagctgttcgtgaagcaatgtgcttcatgatggaccctactgttggcagagatgtctgctatgtacaattcccccagaggttcgatggcattgatcgcagtgatcgatatgccaataggaacgttgtgttctttgatgttaatatgaaaggacttgatggcctccaaggcccagtttatgtgggaactggttgttgtttcaataggcaagcactttatggttatgggcctccatctctgcccgcacttccaaagtcttcgatttgttcctggtgttgctgctgctgtcccaagaaaaaggttgaaagaagtgagagggaaatcaacagagactctcggcgagaagacctcgagtctgccatttttaaccttcgcgaaattgacaactacgatgagtacgagaggtccatgctcatctctcagatgagcttcgagaagtcttttgggctgtcctcggtctttattgaatcgacccttatggagaatgggggcgtccctgaatctgcaaacccatctaccctaattaaagaagccattcatgtcattagctgtggatatgaagagaaaactgaatggggaaaagagattggctggatctatggttcagttacagaggatattctgactgggtttaagatgcactgccgtggctggagatccatctactgcatgccggtgagacctgcattcaagggatcagccccaatcaatctttccgatcgtcttcaccaagttctccggtgggctcttggttctgtcgagatcttcttcagtcggcactgcccgctgtggtacggttacggtggcggccgtctgaaatggctccagaggctctcctacatcaacaccatcgtgtacccgttcacttctcttcctctcgttgcctactgttgcctgcctgccatttgcctgctcacaggaaagttcattatacctacgctgtccaacgctgcaacgatatggtttcttggcctcttcatgtccatcatcgtgacgagcgtgttggagctgcggtggagtggcatcgggatcgaggactggtggcgcaacgagcagttctgggtcatcggaggcgtgtccgcgcacctgttcgccgtgttccagggtatcctcaagatgattgccgggctggacaccaacttcacggtcacggcaaaggccacggacgacactgagttcggggagctgtacctgttcaagtggacgacggtgctgatcccgcccacaagcatcctggtgctgaacctggtgggcgtggtggctgggttctcggccgcgctcaacagcggctacgagtcctggggcccgctcttcggtaaggtgttcttcgccatgtgggtgatcatgcacctgtacccgttcctcaagggtctcatgggccgccagaaccgcacgccgaccatcgtggtgctctggtccgtcctcctcgcctccgtcttctccctcctgtgggtcaagatcgacccattcgttggaggaaccgagaccgtcaacaccaacaactgcaacacgatcatctgctgattcaccatcggtcagctgctgtcgtgccgcggcggacgtgtttctggtgttgcaaacgtgggttgcctgcctgatgcgggtctcctctgtctatctcgcatctgggcttttgccccaggatctgaagcgggtggtgtaggttagctttattttgcgtccaagtgttgattgatgttgtctgtgttatgaaaagttttggtggtgaaacctgaaatgttaaaattcggctcaaaaaaaaaaaaaaaaaaaaaag

SEQ ID NO: 2 - DNA, 1246 bp, Arabidopsis thaliana
gtgtttcttctttctgctaaaaggttataatttttgtttcttggtttggtgagaatcttcaagaaactgaaacaaagaaaatggattctagttgcatagacgagataagttcctccacttcagaatctttctccgccaccaccgccaagaagctctctcctcctcccgcggcggcgttacgcctctaccggatgggaagcggcgggagcagcgtcgtgttggatcccgagaacggcctagagacggagtcacgaaagctaccatcttcaaaatacaaaggtgttgttcctcagcctaacggaagatggggagctcagatctacgagaagcaccaacgagtatggctcgggactttcaacgagcaagaagaagctgctcgttcctacgacatcgcagcttgtagattccgtggccgcgacgccgtcgtcaacttcaagaacgttctggaagacggcgatttagcttttcttgaagctcactcaaaggccgagatcgtcgacatgttgagaaaacacacttacgccgacgagcttgaacagaacaataaacggcagttgtttctctccgtcgacgctaacggaaaacgtaacggatcgagtactactcaaaacgacaaagttttaaagacgtgtgaagttcttttcgagaaggctgttacacctagcgacgttgggaagctaaaccgtctcgtgatacctaaacaacacgccgagaaacactttccgttaccgtcaccgtcaccggcagtgactaaaggagttttgatcaacttcgaagacgttaacggtaaagtgtggaggttccgttactcatactggaacagtagtcaaagttacgtgttgaccaagggatggagtcgattcgtcaaggagaagaatcttcgagccggtgatgttgttactttcgagagatcgaccggactagagcggcagttatatattgattggaaagttcggtctggtccgagagaaaacccggttcaggtggtggttcggcttttcggagttgatatctttaatgtgaccaccgtgaagccaaacgacgtcgtggccgtttgcggtggaaagagatctcgagatgttgatgatatgtttgcgttacggtgttccaagaagcaggcgataatcaatgctttgtgacatatttccttttccgattttatgctttcgttttttaatttttttttttgtcaagttgtgtaggttgtgattcatgctaggttgtatttaggaaaagagataagacc

SEQ ID NO: 3 - DNA, 1644 bp, Oryza sativa
gtaattaactaggctcaagatagatagacgtcgtctctactactcctactagaaaacatatctttgtccaagcaaattaacaaaatcaaatatagcaagaacacgtttaattttgtacacatgctgcgtttgggttggtccaaataaaatacaaagaccagtgtctatatatacagagcacacgcccacagcaactatcactcttcatcatcatcttctttggcttctccctcttcactgccctaattacaacccatttgcttatctctctcctctctctctctctctcgctgcagccatagcttagctagagctagagctttcttggtgccgagatgggggtggtcagcttctcctcgacttcctccggcgcgtccacggccaccaccgagtccggcggcgccgtgcggatgtcgccggagccggtggtggcggtggcggcggcggctcaacagctaccggtggtgaagggagttgactcggcggatgaggtggtgacgtcgaggccggcggcggcggcggcgcagcagtcgtcgcggtacaagggggtggtgccgcagccgaacgggaggtggggggcgcagatctacgagcggcacgcgcgggtgtggctcgggacgttccccgacgaggaggcggcggcgcgggcctacgacgtggcggcgctccggtaccgggggcgcgacgcggccaccaacttccccggggccgcggcgtcggccgccgagctcgcgttcctcgccgcgcactccaaggccgagatcgtcgacatgctccggaagcacacctacgccgacgagctccgccaggggctccgccgcggccgcggcatgggcgcccgcgcccagcccacgccgtcgtgggcgcgcgagccgctgttcgagaaggccgtgacgcccagcgacgtcggcaagctcaaccgcctcgtggtgcccaagcagcacgccgagaagcacttcccgctccgccgcgcggcgagctccgactccgcctccgccgccgccaccggcaagggcgtgctcctcaacttcgaggacggcgaggggaaggtgtggcgattccggtactcgtactggaacagcagccagagctacgtgctgaccaaggggtggagccgattcgtgagggagaagggcctccgcgccggcgacaccatagtcttctcccgctcggcgtacggccccgacaagctgctcttcatcgactgcaagaagaacaacgcggcggcggcgaccaccacctgcgccggcgacgagaggccaaccacaagcggcgccgaaccacgcgtcgtgaggctcttcggcgtcgacatcgccggcggcgattgccggaagcgggagagggcggtggagatggggcaagaggtcttcctactgaagaggcaatgcgtggttcatcagcgtactcctgccctaggtgccctgctgttatagcatcaaatcaaattcatatatagatcaaatcaaatcttcttctcttccatcttttttgttgttcatcgtctgttgtttcatcttcgatttagagctgttctatcttcgactttctttttttgttttttgtctttattttgcatagaagtttgtcaggtcagagattgcaaatgatcgatcaagatcgagctgtatatgtacagccttatta

SEQ ID NO: 4 - DNA, 2001 bp, Oryza sativa
aaagcgacaattaaattgtttcaccaaaaaaaaccaattaaaattatcagtaaaaatactaaaatagctaagaatatatgtatgctcatggaccatttctgtggaaaaagcatgctggcttgcacgaatcaaatttaattaaatatggtacacatcaaaactaaataatagcatcgaccaaaatagtcgattactaacagagattctcgtagccacacatgcctaaacagtaggcacaaacgaacacttgcctgaaaagatcacgcaaaaaatatagcataaaatgacagtctcaacagtgtaaagtttgcaagaatgtgcaattagaagctaacataaacacaaaactagctatcatacatacgagtgaagggctggaagcagctaagctgaaagctcaacacaacatatactaccaatctagctacaaggccactccaagtcgcatatatactagtatctataagctaggctgttctctctttccattcgtcaagaactaccacgacgtcgacatcataatcgtcagagagctcgagaaattttttagtatctttgatccagatcgatcatggagcaagaagctgccatggtcgtcttctcctgcaactccggctccggtgggtcgtcgtcgacgaccgattcaaagcaagaggaggaggaggaggaggagttggccgcaatggaggaagacgagttgatccacgtcgtccaggcggcggagctgcggctgccgtcgtcgacgacggcgacgcggccgtcgtcgcggtacaagggggtggtgccgcagccgaacgggcggtggggggcgcagatctacgagcggcacgcgcgggtgtggctcgggacgttccccgacgaggaggcggcggcgcgcgcctacgacgtggcggcgctccgcttccgggggcgcgacgccgtcaccaaccgcgccccggcggcggagggcgcgtccgccggcgagctcgcgttcctggccgcgcactccaaggcggaggtcgtggacatgctgcggaagcacacctacgacgacgagctccagcagggcctccgccgcggctcgcgcgcgcagccgacgccgcggtgggcgcgcgagccgctgttcgagaaggccgtgacgccgagcgacgtcggcaagctcaaccgcctcgtggtgcccaagcagcaggccgagaggcatttcccgttcccgctccgccgccacagctccgacgccgccggcaagggcgtgctcctcaacttcgaggacggcgacggcaaggtgtggcgattccggtactcgtactggaacagcagccagagttacgtgctcaccaaggggtggagccgattcgtgagggagaagggcctccgaccaggcgacaccgtggccttctcccggtcggcggcggcgtgggggacggagaagcacctcctcatcgactgcaagaagatggagaggaacaacctggcaaccgtcgacgacgatgcccgtgtcgtcgtcaagctgttcggcgttgacatcgtcggagacaagacgaggtaacacgcaagcgcagctagctgcatcgtatcgatcatatatatcaccccggcgccttcttcttcttcttcttcttcttcttcttcttcttcttcttcttcttcttcttcttcttcttcttcttcttcacttgttcttcgttttcttcctcttcgatcttctcattcatcttctgttgctgccctagctacaatgatcgatcgatggatgatccatatcatcgttgatccttcgcttcacatcaggttcatcattcctagctacatcgatatatgtacctataatttgatgatgagatgaacttcttcaaaattcaaattaatctctgaagaaaccaacggagaattaggatcagagtgtgctagctacatgtgagctagagattagagaaatttaagagtgtgtgttatatgtaaatatatcgatcattgccagatcgatcgaggcgaaactatagaattttgccttggggtttaatt

SEQ ID NO: 5 - DNA, 1201 bp, Oryza sativa
gtataggggtggcaggtagtttatattcactggaaaccgagaacttcactcctcccagcactccacactaggaggatgctcactgtctgactgactgactggctgctgctgctgctcattccttctcctactctgcctgcctcctctgctgtgtccttgggagaattcttcagggacagtatccctgcagaggtgagatcatgggacagtcgaagaagaagttccgcggagtcaggcagcgccactggggctcctgggtctccgagatcaggcaccctctcctgtaagtctctatctcactagtgatgatcactagctagctatgttgctctgatgtgttatgccactgtcgtgatagatacattttgatggatagctagtggttctggtttgttgttgctttctttctttttttctttctctttcatggtatgttagtagctaactcaaggtgcttgggtgcgtgcatgcatgaatgatggatgatgttttttttgctacgtgcgttgtggcagtaagaggagggtgtggctgggtacctttgagacggcggaggaggcggcgcgggcgtacgacgaggccgccatcctgatgagcggccgcaacgccaagaccaacttcccagtcgcgaggaacgccacgggggagctcacaccggcggctgcggtggcagggcgggatggccgtgtcggcggcggcagcggcagctcgtcctcaatgacggccaacggcggcgggaacagcctgtctcagatcctcagcgccaagctccgcaagtgctgcaagacgccgtcgccgtcgctcacctgcctccgccttgacccggagaagtcccacattggcgtctggcagaagcgcgccggcgcacgcgctgactccagctgggtcatgaccgtcgagctcaacaaggacacggccgtgtcgtcggctgcgacggtggcagcagcaacagcagtgtcgtccagcgaccagccgactccgagtgacagcacagtcacaacgacgtccacgtccaccacgggctcgccgtcgccaccacctccggcaatggacgacgaggagaggatcgcgctgcagatgatcgaggagctgctgggcaggagcggcccgggctcgccgtcacatgggctgctgcacggtggtgaaggtagcctcgtcatctgaattccggaagaacaggaaagaaattgaaaatgcaagg

SEQ ID NO: 6 - DNA, 961 bp, Zea mays
gccccagcagagctcatctctgcctcctgtgtccttctccatgacagagaatctccactccaggaaaatggtacagccaaagaagtttcgtggagtccggcagcgccactggggctcctgggtctctgagatcaggcatcccctccttaagaggagggtctggctgggtacctttgagacggctgaggaggcagcgagagcatatgatgaggctgctgtgctgatgagcggacgcaacgccaagaccaacttcccaatccaaagaagcagcacaggggagcctaccccagctgcgggaagggacgcccgcagcaacttcagcagcggctcctctaccaccaacctgtcccagattctcagtgcgaagctccgcaaatgctgcaaggcgccatcaccgtccctgacctgtctccgccttgaccctgagaagtcccacattggtgtttggcagaagcgtgcaggagcccgtgctgactccaactgggtcatgacagtggagctcaacaaagatgcagcatccactgatgctgcatcacagtccacatcagcaacaactgctccaccagccacgccgatggatgaggaggagaggatcgcactgcaaatgatcgaagagttgctgagcagcagcagcccagcttcaccctcaaacggagatgaccaaggtcgcttcatcatctgaaaagcatggatcaaacagcacaagtcaccatcccagatcagagtttcgctaggtcggttggtacacaagcagttcaggttgcttcagtaatatagatatatgtctattactaaatccaacttacaagaactataaagtttgcaattgtgtgcagttctatgtacgtgaaaagctctacatacacatgttcctatcaagatactttgttacacatcaatgtcagtgatataattgcttataaaagaaataaatagattatgattgtgttactgctaaaaa

SEQ ID NO: 7 - DNA, 2284 bp, Zea mays
ggatctttcgctttccttaccccgttagcgttcctgcttgatacactacgactgcagattctttggcagaccgctaccaagtgcaagtgtgcaacgcacacacatcactcacagtctcacggtgtctctgtgcgcgcgcgtgggacacaggagggagagagacacagagaagggggcgggacgatcagctctagctcagctggtatcgtctaaactgcataaaaggggagggaaaaaaagttgcaatgatgcatcccggcgcatagatagagagagagagagaagagagagccccgactcgagagccaagaacgccgtgtgttgtgtttgtgtgcatctatctccgtacacgcacgctcgtacgcaccagctagcacgaccgccatggccgccaccaggagagccttcttccacagcgccgtcgacggcattgcgcgcgccgggccgggggaggccgagcggctgccggcgccgccgcaggtcgggcgaccggtggaaggcgccagcagcatggtcttgggcttccccgtgccgcggcccacgatgccggaccgccggccggccgccgtcacccagcagttctttccgcccactactacggccgcgcagcaggcgacgatggaggagcaatgccacgtgcccgccggtagcgcggcggagcagtgggtccggtcgtcggcgtccaggaagagccggcgcggcccgcggtcacggagctcgcagtaccgcggcgtcaccttctaccgccgcaccggccgctgggagtcccacatctgggactgtgggaaacaggtgtacttgggtggattcgacacggcgcaggccgctgcgagggcctacgaccaagccgcgatcaagttccgcggcctgaacgcggacatcaacttcaccctggacgactacaaggacgagatgaagaagatgaaggacttgagcaaggaggagttcgtgttggtgctccggcggcagggcgccggcttcgtcaggggcagctccaggttccggggagtcacccagcacaagtgcggcaagtgggaggccaggatcggccagctcatgggcaagaagtatgtgtacctgggcctgtatgacacagagacggaggctgcccaggcatatgacaaggctgccatcaagtgctacggcaaggaggcggtgaccaacttcgatgcccagagctacgacaaggagctccagtcgcagccctgggacggcgagctggatctcgagctcagtctgggctgcgccagcagcgatccgtccacggtcgccgtcgaggcgttcagccccgcgacgagcagcagtagccgcaagcagaggacgatgacgctgacgctcggtctgccggaggaggaggagacgggcgccggctaccctcaccctgctgccggcatgttcgggcgcccggctgatggccacgtccacgtagcaccgccgccacaccggcaatggcagcagcagcagcagggacagcacgcagctccagatgcggcgcctgagcgacgagcggcagagccagcagatcggcagcggtggggccggggcgcgcgctggcccatcgccagcgccagcggcattaactgggcctgggcgccgccgtacgccaccgcccgcgccggcaccgacgacgacgacgccagcagcgccgccgctgcagcatcatcaggattcccactgtggcagctgggtgcggcgtcgtccaggtccagctggcccagctgctgagcctttcctgtcgtcccgcgccaccaacagtgacgctgctgggccacgtactgacggcgactggtgacctgctggaaccgccgccggcctgtttcccttttctaggtaaaagcagtggcagaggggcgagctagcgacagcgtgcctcgtcatccatcgtccctgcgccgtggctggcggggtgggaaaaagtctgagcagttttgagcgtccggaggagctcgagatttcctccctcgaatagtcacttggggtggccactagttattatttctttccttccccctcgttgattctgctacccattatagcctctgtatctagctacatgcatgatgctgctctagcgctgttggacgttgatggcacggtgtacggatatggacagggttcgtgtgaccccatgtccactgctaggcctgtttccaaatggagtatttctgcagtaccatggcttatagaaatgccgagtattttaaaccattaggtgcttggttactttcccaaaaactaggttttcaaagctatggtataatgaataccacggtatatatttttc

SEQ ID NO: 8 - DNA, 1008 bp, Zea mays
atggtgaagctcgcattcggaagcgtcggcgactccttcagcgtcacctccatcaaggcctacgtggccgagttcatcgccaccctcctcttcgtcttcgccggcgtcggttccgccatcgcctacgggcaactgacgaatggcggcgcgctggacccggcgggcctggtggcgatcgcgatcgcgcacgcgctggcgctgttcgtgggcgtgtccgtcgcggcgaacatctcgggcggccacctgaacccggccgtgacgttcgggctggccgtgggcggccacatcaccatcctgacgggcgtcttctactgggtggcccagctgctgggcgccaccgtggcgtgcctgctcctcgggttcgtcacccacggcaaggccatcccgacgcacgccgtcgcgggcatcagcgagctggaaggcgtcgtgttcgaggtcgtcatcaccttcgcgctcgtctacaccgtgtacgccaccgccgccgaccccaagaagggctcgctcggcaccatcgcgcccatcgccatcggcttcatcgtcggcgccaacatcctcgccgcggggcccttcagcggcggctccatgaaccccgcccgctccttcggccccgccgtcgccgcgggcgacttcgccggaaactgggtctactgggtcggcccgctcgtcggcggcggcctcgctggcctcgtctacggcgacgtcttcattggcggctcctaccagcaggtcgcggaccaggactacgcctaatttattcaccactccatctccgctctggatgaatggattcaaaaccgtcgtcgtttgcttttgctcctcgccacgttcaattaatggttgtgtatgcatgtatgtgccaatatgatgtgcctttgccctggtccattcatttccctttcttttttcggggtgaaatagatgtaaagatctcgtcttgcctgccgtactcgcgctgtgttgggaaaaattggttttcgttccaaaaaaaaaaaaaaaaaactcgagggg

SEQ ID NO: 9 - DNA, 1807 bp, Oryza sativa
gggttgattgatatgggtgttctttgcttcggcgcttccaacatcctcctctgcgcggaggacagcagcagcgtgcttggcctgggcggctttggcggcggcggcggcgaggtggcggcggagctggggtgcggcggcggtggcggctttgatttctttggcttcggtggtggtgctgtgttccccatcgactccgatgagttcgtggcgttgttggtggagaaggagatggatcatcagcctcagcgggggtatctggagaagctggagctcggtggattggagtgttcttggaggaaagatgccattgattggatttgcaaggtgaatatgaatcaaaagtgtaggaaaaataaataaagctctaggatttttttttgctttatttgttactattgatggattaattgggtcttctaggtaggttgttgcatgcttgcgttacatctttgactctagcgtcgatcttgctttggctctgtgcatttgcctttgctgctaaacttgacaaagcaccagattgcagataacaatggggctttgccttttatatggacaaatttgtttttaagtagaaactgacgaaggtgctaatcttgtcttctctcatgtgcgcttgcaggtccattcctactacaactttggaccactcagcctttacctcgcagtgaactacctggataggttcctctcctcgtttaatctccctgtaagaatctgggacgtgtatgtacattgccactacttaattactgtatagtgaatcccggtagtgatcattgcgatgcttttgtttgttcttgttgttgtagcatgacgaatcttggatgcaacagttgctgtcagttagttgtctatctcttgctacgaagatggaggagaccgtggtccctcttcccatggaccttcaggtgaatgaatgaagagttacagttgaaatcgataattgttcagtgatcgcgcgatgatcttgtgctaaaatgggcttttgttgcatgataggtttttgatgcggaatatgtgtttgaagcaaggcatattaagaggatggagcttattgtgatgaaaaccctgaaatggaggctgcaagctgtgaccccattctctttcatcggctacttcctggacaagttcaatgaagggaagccgccgagctacacgctggcatcatggtgctctgatctcacagtgggcactctgaaaggtttgatcatattgcccgatgatttaatcgagaagatctacctgcattgccaatggcaacatctgatgaagttgtacttactagaaatttatgtgcaatgtttttacagactctaggttcttgtcattcagaccttctgagattgcggccgcagtggtgttagctgtgcttgctgagaatcagtttcttgtcttcaacagtgcccttggagaatctgaaatccctgtaaataaggtgagccttttcttgcattttaggaatggcatactgatctgccattgtattttcaatgtttctgaatgtgtcatgtttgtgcatccgcaggagatggttatgagatgctatgagctgatggtagagaaggcattggtgaagaagataaggaacagcaatgcaagctcttcagttccacacagcccgatcaccgtgttggacgcggcgtgcttcagttttaggagtgatgacacaacactaggatcatcacagtcaaacagcaacaacaaagattacaacagccaggactctgctcctgcttccaagaggaggagattaaacacaacaccaatctgataactgtacatacataacttggcattgctttgc

SEQ ID NO: 10 - DNA, 7858 bp, Oryza sativa
atattgttttaaaaaacctttccttttttattgtaaaacaataaaagtttaacattattggatccaagggatgtatcgacatatcgttatagagtttaaagtccacgcattttgacggaatagatttaagagacagttctcgatcgagtaactcctcaatttatatcatgtcagagtggatagatatggtttcaaagctttccttttcttattgtaaaccaataaaagtttacctttatatattttttccaactagctgctgcattttatcaataaatgtaaatttatttgtataatcagctgccagtacatactgggaagtggacaacgaacttaagcacccattcgttcgttttaggcggagcaagaatttaaattatggctttagtgccacgctgtactgtagtaggacactaggacagaactactgacagaatcgctctagaaccaaaatgcatggtttggtggcctactgttaattctagctgtagctagccttgcataattcaaccttattgatcgtccatgttttccggtgaattaaacccacatgcaaacgtagtaggttttttatctctctcggttcacaaatttggacccctgaattccgatcctctgtaataagctgagtagtttgtgcaaattacgtgaaagcctgtcgtttccgtggcccacatgaactggcccccatgcttgctgactcagactccgatcacttcgcccggccaatgctccgctataaaaccctccctttttttggcaaggagttcccaccgtgagatcgagatcgcctcctctctccgtttccttttatttcccgattcgctcggcgtctcggcggcgaccttgcgcgagcgcgcgatgcggtgaaaaaaaaatcatcgcccgcgacagagtacatctgtcccttccgcataaggcaacgtcgcttataaatactgccagcctcttcgttcgtttccatttttcctcgtccgctcgctctcgttcatgtacaaataggagggcgcatgcaccttgtttgccattagctctcgacgtagcctagagcgcaagcagcagcagcagctagattggttggttgccaatgacccggccatctccccgatgatggacggcgccgcgcctctgcttcccgagacgagccccgagagccgccagcaacgtgatccggagagggggaagaggcggacgccggtcctcccggccgtcgtcgcgtccgccgtggtccttctcggcctcgcggcgctcttcctggtgtatggatttcacgacggtggagacgggagggcggccgtactcgcgcccggcaccgtggaggtcgcggcctcgtcgtcccgcggcgtcgtggagggcgtctcggagaagtccaccaccccggcgctgcgcctcggcggcggcgcggtccgggactacgcctggaccaactcgatgctgtcctggcagcgcacggcgttccacttccagccccccaacaattggatgaacggtatgtatacacgttgccatcgttcccgtggtttcatctaggccgttggatctgtaatcgcacggctccgattcaccggttatacaatgttttctcgtttctaatcttgttccctttccgtttcttttccacggacgtctcgtgcgcatggccgtgctgctcgtctttttctcggcatctacagatccgaacggtaagttgctggcgctgattgtcaatgcacggcgcaatcttgtacttgtcacgcattgacatcgatgtcgcgagacgtgacactttttttttgcacgcactgaccgggccgtcgatggatcgatctgcaggtccactgtactacaagggatggtaccatctgttctaccaatggaacccggactcggccgtgtgggggaacatcacctggggccatgccgtgtcgcgcgatctcatccactggctgcacctgccgctcgccatggtgcccgaccactggtacgacatcaacggcgtctggaccggctcggcgacgcagctgcccgacggccggatcgtcatgctctacaccggcgccacggaggagtcggtgcaggtgcagaacctggccgagccggccgacccgaacgacccgctgctgcgggaatggagcaaggcggaggcgaacccggtgctggtgccgccgccgggcatcgggctgacggacttccgcgacccgacgacggcgtggcgcaacccggccgactcggcgtggcggatcaccatcgggtccaaggaccgcgaccacgcggggctggcgctcgtgtacaagacggaggacttcctgcactacgacctgctgcccacgctgctgcacgtcgtcaagggcaccggcatgtgggagtgcgtggacttgtacccggtgtccacctcgccggccgtcgaggacgggctcgagacgtccaccccgccggggcccggcgtgaagcacgtactcaaggccagcctcgacgacgacagaaacgactactacgccatcggcacctacgacggcgagaccgatacctggacgccggacaacgccgacatcgacgtcgggatcgggctccggtacgactacggcaagttctacgcgtccaagacgttctacgaccccgtcgggcggcgtcgcgtgctatgggggtggatcggcgagaccgacagcgagcgggctgacatactcaagggctgggcctcccttcaggtaacgtacattgatcgacaacccccataaccttggtttcatatttctgataggctatagaattagtagtagttacgtataaacaaactttttttatttaattttgacaatggattgaacgagacacggatagagatacgaacccgtcaaatttctttgtgaagcatcataactgaacataattacaaaaatataaaaataacaagttatattaatctcaaatgacgtaggaaaactattataaagctgtctgaaaagccatattgatctgtgatataattcattgcaaaactaattagtcttttttttttgcgatgacatgaacaagatacttaattaagatttttaggtaactgggtatgtactatctcaattggcacagaacgagttactattaaaatctgaaaagccgtactgatttggtataattcatatatattgtaattaatttaacttgccgtatacatccctttttcccaatcatgtactgtactccattaattactgtgtcaaaaacatttagctcatactatttgaatcgctagagcaaaaaagtaaagtgactaggacgatataaactcatggaaatccattaaaaccttatgaaaataacgcccctagctaagccagctagctgctagccagctggatatgatgatcatgctgatctggctagttaaccatggatggctagctaggacccggtcattatgtagttatacacttgcatataccatttctagaccacaattccgcccactaagatataatgcaaaacgtctttacctgtgcaccacgagaggcatgcaggcgtgcggctttcttgttgcgccggccggtcgatccagaagaaaacgtgcatgaacatagttggaccagtagtatatgcagtagtccaggtctgggcgggccccacggggatcacgtccttttttttattattttttgaaaaccggatcacgtccttctaccggtctacccaaacgagttgcacgatgccgacttgattaatcggtccgagtcacgcccgcccaaccaccagaggtagccgggcccggcgagatttgcaggctgccaatagactcgcggggatttgcatgcagcagcggcgccatgacatcggactggatcggccggcgttttctggtgcccgaccgtgacttgtctccggttggccgcgagagcacgagagccgtacgtctaagcaaactagttgtcaccacgtcttagtgtggagaagtattagtactctattaattagctaaggctagagttagattaatcctcaaattgcgaagggttttttttatgcgtccataacgtgtcttgcattggcgcatagctagagattagctaggacatttacttgacgaaagggggatttgagtaaatttctgatttgctagagtttggaattccaaacaggactattcaaaggggttgttccaacgaagcagcacgtggataatgacttgcttagcatcaggaaatttaataccctgacctgtcgctgcaatcgtgttgtttttttaataatccgtaatcatttgaataacttagtaatttcgcggtatatgtacatgtcattcttgtggcaagcgtgaaagtgagttcttgagtggccggttcgactcctaggggaattaacttcgtttttgagaaatttgttttacgttatttttggaactaaaatgtttggcaatttattttaatcgatgatgaaatcaatggtttttgtgaaatgaaaaaaaaaatccactcatagttattctaaagatgaaattgaggagttttcgatatttgtactatactataatataaaaaaggaaatcaacaaacgtctcctttctcagttggttaggcaagttgttgtgatgctaataggctacacaagtctaaccgtgttatctaagttgtaaagatacttgagatgtattttaaaaaatatatggaaatggtaattgagtgagtgtgttcaaacttgaacgcggtccactaggtttctaattctaaactttaccaactgcgcaaggtggagttatcgaaattaggtgatagattaataagtaaatgcactttcttggtggtaaagatacttgagatgtattttaaaaaatatatggaaagggtaattgagtgagtgtgttcaaactcgaacgcggtccactaggtttctaattctaaactttaccaactgcgctaggtggagttatcgaaattaggtgatagattaataagtaaatgcactttcttggtggccagttaagttgtaaaaatacttgagatgcatttgaaaaaaaaagcaccatggtggaaagggtggctgttggcgagtgttttaaaactcgaacgcggcccgctaggttcctaattctaacctttgccaactgcgctaggtggagttatcaaaattaggtgatacacaaatttataaatgcactttcttggtgaccagttatgcaaatacactagacttctattaaaaaattatggtggaaaaaggtgagcatgataatttttatattaaacgcaaacgaaaacaagggtgaaaaggtgagtgtgctaaaactcaaacacaataaacaagggtgaaaaggtgagctgctaaaactcgaacacggtccgctagtctgtctaactatagactttgccaactacactaggcagggcttcttaaaaaagcagtggactttgagtaaatatacttccttggttagatggccgggtatgaaaatatcctagaattgtatcaaaaagaatttgggtgggaagtgagcgtgttaagactcgaacccgggctgttatattttacaactctactatttgccattggcgctaggcgagtttatcagaattaggtgataggttaaccaataaatgcattggccttttgttaaattgcgaactatacaaacttactaaaattgcatctttttttaatcatgctaaaattatgtatttttatctgaatgactgtaaaaacttgctaaaattgtatatttttaaaatcatgctacaattttgtattttgtctgaatgactataaaaaaaactaaactgctactaccatctctaaataaatgtaattttaggtgatccactagaccattttaatactagtttatcttttttttttcgttttctccaccacaaggacatcgtagttttttaatctcttgcttaataatatatctttaactagttaaaactatacatttttagagtcggagggagtagatccttaactgtctctccttcaatcattcatgtcattgtccctttttctttaaatcttatttttttcctgttttaaattgttgttgaattcaatgtgcccttgatgggccttgaccgaggcccatccaaacaaggcatttccctttatttaaattaaccttttattattattattatttgcagtcaattccgaggacagttatgctggacacgaagactggcagcaacctgctccagtggccggtggtggaggtggagaacctccgtatgcgcggcaagagcttcgacggcctcgacgtctctcccggctccgtcgtgccgttggacgtcggcaaagcaacacaggtacgtacgcgtgattttgacacatgaacacaaaatgtgtcatacatttataaaaaaaaagtgtgccatacacatacacaacaactgctatatatccgacccgagaaactgacgtgcaagtgtggttctggtgtgcgtgcggttgtacagctggacatcgaggccgtgttcgaggtggacacttcggcagccgacggtgtcgtcacggaggctggagcagcagcatacagctgcggcacgggcggcggtgcggttggccgtggcttgatgggcccgttcgggcttctcgtgctggccgatgatcagttgtcggagcggacggctgtcttcttctacctggtcaagggagtcgacggcaaccttacaaccttcttctgccaagacgagctcaggtgtgtgtggtacacattttccagtatatgcgtgcatgtcttcctctgtgtgcacatatttttgcaaccaaatattcacacttgatcttgttattagaggatgtattttttttcgatacttcaatttgtggacagaggatgtgtgctgtcgtgtgtagaactccttgtgtatatataaaggaggcttaaattttgctttaatcgagtcaagatgtaaattttaatgcattttaaatcttgtttttttttcaggtcatcaaaagcaaacgatctagttaagagagtctatggcagcttggtacctgtgctagatggcgaaaacctgtcaataaggattttggtaagtctttctagcaatgttgagtacatgcatattcatatgccacaacgcatatattttgatacgtcgtaacctaactctttgtgtgcaatttctttcaataggttgatcactccatagttgagggcttcgctcaaggagggaggacatgcattacctcgcgtgtgtatcccaccaaagccatctacgagtcggccaaaatctttcttttcaacaatgccacaaatgttagagtcactgccaaatcgctaaagatttgggagctgaactctgcttacatccgtccatatgtagactagatcatttttaatgtaatgggaatgaatgatttgtctacatttgttagttatgtttttataggctaatttatcttttttgcttccttctttatgtcaaactacaactatgacatattactagcaactgaaataaaacataatcaatcatattgttttgccacaattttgttattgtgtgtgcgcatgcgcacacgtacgtgcacatgtgcgtatgctatcactctacccctgatgttattattagccatcaccgtaatgttgtcgtaagccaattgtgtcatgtttatcctacataaacaatatacgactttgcgaacattcctcttcaacaatgccacaaatttagggccactagaaaatcactcaagattttggagctaaactctacttaagttcatcaatatataaactacatccttttaaatgcaatggtagtgtggtatgtttagattcattagttgtatctctatagtcaaatttgtttgtcttcatctttctacctatcaaaccacaactgaaaatttttagtcaaatatgtttgtttgctttcttcttcttatc

SEQ ID NO: 11 - DNA, 5000 bp, Oryza sativa
cattttggtgttaaggaaaagttctcaactggagctaccaaaggcagacttataccgagttcatccatggatgggcccatacacacagaaggcccaaaaagcaatacgtctgtacgctggctcggcccattagactaaccaccagacagaccaagtaaaccacagccttcgctacgaaggcaggcaaatccggtccaaaacccaaacccaacccaacgaccaaaccaccgaccggccgttccactgcgccattccttccttccccccacctcctcgtcgacgcggagatcgctcgctcgccggcgacggcgatggcggcatcggcggcggctgcggcggcggtgagccaggcgctgagggaccgcgacgtcctcgacgccgtcggcacctccgccgccgcgctttcgctcgcgggctcttccttcatcgtgctctgctacctcctcttccgcgagctccgcaagttctccttcaagctcgtctacttcctcgcggtctcggtgagcggctcagatctggaactacttggttttggggggttctgggttcgggaggctagcctcgtgatctgcgtaactgcgttgggttgcgatttggaattggggagcgcaaagtggggatctgagggcagtgcggtgttcatttcgcctccgattgagaaatattgggggttcacgccgtcagtttaaccaacggatgctctgtttttgctgcttatgcgtgcgagctgaagcagttctcgacaattttttttttgtaagatgtttgctatctgatcggcacttgaagtagcatagggcatgctccattttttttttagtgaaccgtgtgaggatgtttatgtcatagacccttacttcaatgtggcaagtgatgtccctataagtatccatgtaggcaattgctgggagatcacatttcgtgctactgtcttcttggattggaagtacagttggtttgttatctaattatcatgttggtttgttaatattattaattgctgcaagacaagctgatgtctctaatctcaatttcttcaagacatttggaaatttgtttgagagaaatgatatcacatttctattcaaggtgtttttctgacagcttctgtctaaattgcaggatatgttttgcagcttattcactattatggggtatgcttctgactgtgttattcaaattgtatttgataatgcacgtagttacttcctgacttaaataactgcaactaatgtaggagaaagtgtattactgtgaaggaaaaaacatattgttctttattttgttatttttggaactgttactcatgattacccctttttttgctgactttctattatgcgctagtgaaatattcttacacacatgcttttcatattgcaggggcccatcaaatgcattctactgttttgctcatgactacagtgcacacttcttctgtgtggcttcttttctatggacaaccactatagcgttcactcttcatcgcaccgttgtcaaacataaaacggatgttgaggagtttggatcaattttccacctgtatgtgtggggtatgcaattcttttgaccacttctctgcctttcttggagcttgtgcgtgccaaattagctggtgcaatattattaagaagttagaaatgcttgttgatttggtatagtgcttctttttcatttgaagtattgacaattttatagctgtttcatctatttgaagtgtatgtgattgataagagggaacaagcgggagcattttgatttcttatatctaagcattatgtagatttgatgcacatacttttgtttctccttttctgttattgttgtctgcattgtttgtcatctaagaaccaagtatgcaagttccagtttctcatgcatttttcattcctgtctgctaatgtatatactgaatggtagacaacttaagacatttgttgacttgacataattgcgaacatgtgttgtaactcatcctattaatcttgttgccctgcttgaatttacagttcttgtgacaataattttccttttatatgtttctcaggaacttcactagctacaactgtattacgttcaattggaagtgattatggaaggccaggcacctggtgttggatccaacaaggaagcatgggaaaggcatgtgaccttttgtgttttgtcatgaatcagttaacttggttctaacactgctaacacctatctacagcttacatttgaaccttatccatggtagtcagagtggcccaaattggtgctaatgacgttcctatatgtttttgctttcatttagtatttgagctgttatcaaatgatccaaaacaaactccactcaacagaataagtactacctttgtctcaaaaagacttcatttctagctatgaacctaggcaagtattgtctatattcatagtcagaaatgaagtctttgtgggatggaggtagtaacatttatttatttggaattgcttacgtaccttgcacaagacagatggtatcataaagtttagtgagtctctgagagtatacgcatgctttctcttagtttgtatgtttgactttttgtgcattggcttctttcttttccatatctttactgcaatctatgtcttctgttaatttgccatcttgatcctagctagaccactcattcaaaataaaaatattgtcactttgtcagaattttagcaattgttcattatatgtcttttatatgcaggtcttgcacttggtaaccttttatcttccattgtggggtgccattctctacaatgggtatacatactttcaggttaatcgcatgataaacaacgcgacaagggtatgcatacagttttctattttatattgatgataaataaggcttgtattgaatccttgtaaattctgctctttttgcttatatgttctgattttcataagataatggatgaatttgtagatggctgttggcataagtgatcgatcaattcaatctgacgtgagggcagacaagaaggtataaatttcctacacatctcttctcattatgtgtactgaaatattttcccctaatgtgctactgtattcttcctactatcatgaattcagagagtaactcatttgatcctattattttttttatacctccagtcttgagatgaactggagtataataccttatgttatcatgtttggagcaaaaatgatgtgtaaattctaggagtacttatattatcatgttacctggatgtctggatcagcctcgcaccactgtctactgtctggtagcagataggaatgtttatttgagcagatacagcttattgacttgttttcttttgcaggcgtttaatcggtggggttattaccctctcattctaataggttcatgggctttcgcaacaatcaatcgtgtgcatgactttgctaatccaggccacaagatattttggctctctattcttgatgttgggtttgccggacttatggtgagtattttcatcctagatgctagttacccagttctgaagagttttcataacatattgaaactactttgataatgtgggttgagccaaccttttaagtttagggctagagaaagaggcttagaggactccacgtatcttgttgtcagtcctgttgataattttttataaatgggagcgctggagttccaaccctactctttcttgaaacaggcctatgaaattggttgtatttcatacttagccttcagtatccaaagaattggctctatataatgcatagatgagtcatggtctcgtggagtcctcttgaagttctgtttgtagaagtgtattgttgttttgtttccttgtgaggcttacctcagcttgagcttatctcacaaaacttctctggcgttacatcatctgtgaacacattttccatggattctaatgcttcatggtatctttaggggctttttaattccatcgcttatgggctcaactcgtcagtgcgcagagcgattgctgaaagacttgacatgtgagttattttctagactttacaatcatctgttcctcctgtatcacctcatttccgtttatcatttactatattggtttatgcactatataacattttgtttcctgaattgtccaggtatctacctgagagatttaaaaggagcctccctactctgacacgatttaaaagtcagcaagaaaatgaacttacttctcttattgtcgatgcgagtaacacataggaatttttctagcacactaagtttgttcatatcttgtgggttcttcaatccagaaagggtgtatgacattactgtagagccagatgtttagcattaaccatttgttagcatgtggaatagttcccctgcggtcctttgttgattgccttgaacacgagcagtgtaatatattgaagttgcattgtccggagtacataagagattaggagatagccagagttgtagatactactatgacgttgatctgtatccctttttttgtggatgtatcagtgtaccaccctctccatgttttgctttcatatgtttgtctcaaaatactggccacaggccacatacggtacgacttactaatgtttcggttctcctgagtcctaacagttgacagtgtcaaaacagtttttcccattgatgattattttcaccttagtgaaagcgtagttcttgtaaactgcctcgtggccttgtccatgggaaaggaaaagcactaggctattgctttgagatggtgttggctcgagctctcgtccatagtggaaaaggagaagcggcaaaaggtgaatacatggggaaaggaaggaggctggcaattgctttgagatggtgttggggataggattcaacatgtttgaaggaagaattgaatagggcttgccttgcttaggagttacggtgttggggataggattcaacatattcgaaggaagaattgaatagggcttggcttgttcaggagttactcgaatatttctcggtcttgcacactctcgtcaacag

SEQ ID NO: 12 - DNA, 1627 bp, Zea mays
ccgaggcatccttctcctttccctctccttccccaaacccttttcctctttccctcgccccaagaacttcatctcatctccaggcgccccttttgcgcttgcgcaggaggagctcacggggacagtgggcggagagctcgatcgctgcaccactacttcactggaggtccgcccactcccatggaggagatcacccaacactttggagttggcgcaagcagccacggccatggccacggccagcaccaccatcatcaccaccaccaccacccgtgggcatcctccctcagcgccgtcgtagcgccgctgccgccgcaaccgccaagcgcaggcctgccgctgaccctgaacacggtggcggccactgggaacagcggcggtagcggcaacccggtgctgcagcttgccaacggtggcggcctcctcgacgcatgcgtcaaggcgaaggagccctcgtcgtcgtctccctacgcaggcgacgtcgaggccatcaaggccaagatcatctcgcacccacactactactcgctcctcactgcctacctcgagtgcaacaaggtgggggcaccaccggaggtgtcggcgaggctgacggagatagcgcaggaggtggaggcgcggcagcgcacggcgctcggcggcctggccgctgcgacggagccggagctggaccagttcatggaggcgtaccacgagatgctggtgaagttcagggaggagctgacgaggccgctgcaggaggcgatggagttcatgcgaagggtggagtcgcagctgaactcgctttccatctccggaaggtcgctgcgcaacatcctttcatctggctcttctgaggaggatcaagaaggtagcggaggagagaccgagctccctgaagttgatgcacatggtgtggaccaagagctgaagcaccatctcctgaagaaatacagtggctatctaagctcgctcaagcaagaactgtcaaagaagaagaagaaagggaagctccccaaggaggctcgccagcagctccttagctggtgggatcagcactacaaatggccttacccctcagagactcagaaggtggcactggctgagtctaccgggcttgacctgaagcagatcaacaactggttcatcaaccagcggaagcggcactggaagccatccgaggagatgcaccacctgatgatggatgggtaccacaccaccaatgccttctacatggacggccacttcatcaacgacggcgggctgtaccggctcggctagccaccggtatctcgcttccatttcacaccccacggcctagctataaagactaatggttccaggtgtctgaagtactgaagacaggggggctagctatctaatgtttgtgccgcacgcatgagctgtaaggaggccatgcttaattattctgttgccgttgctactctatctatatgcgcctatgcctccgtgcatgaactatgctttaggtggttgctgctccacactgtggtggtgtgcttttgcttttgtgtggtcgtattgtatgcgtaacctgacagatggatccctgattgctacatgtttgaataatttgcatgatctagctagtttctgcctaatctaatggtacggctcatgtcttgtc

SEQ ID NO: 13 - DNA, 2712 bp, Zea mays
acgcgggccgcatctcgcattctcgccggtgctgctgcaattaacgccgcctccggccaaccacccgaaacctacctccgccgccgtcgtcgccaccgtcaacatggcgagccaaggggagccctcggcctctgcttccgatccgaaggagaagaaggactactcgacggcgatactagagaggaaaaagtcaccgaaccgccttgtcgtcgacgaggccaccaacgacgataactccgtcgtcgcactgcaccctgacaccatggagaggctgcagctcttccgcggcgatactgtgctcctcaagggtaagaagaggaaagacactgtttgcattgtccttgcggatgaaacctgtgaggagccaaaggttcggatgaacaaggttgtccgccagaacctgagggtgaggcttggtgatgtggtttctgtccaccagtgccaggatgtgaaatatgggaagcgtgtgcacattcttccaattgatgatacagttgaaggcattacagggaacctgtttgatgccttcttgaaaccatacttcctagaagcatacaggcccgtgaggaaaggagacctcttccttgtcaggggtggaatgagaagcgtggaattcaaagtgatagagactgacccttctgaatattgtatcgttgccccagatactgaaatattttgtgatggggagcctattaagagagaggatgaggagcgtcttgatgaagttggttatgatgatgttggtggagttagaaagcaaatggcccaaatcagagagcttgttgagcttccactacgccatcctcagcttttcaaatctattggtgtgaagccaccaaagggcatattgctgtatgggccacctggttctggaaagactcttattgctcgtgctgttgctaatgagactggagcctttttctttctgatcaatggcccagagattatgtcgaagttagcaggagagagtgagagcaatctcagaaaggcatttgaagaagcagagaagaatgctccatctatcattttcattgatgaaattgattccattgcacccaagagagaaaagaccaatggagaagtagaacgtcgtattgtttcacagctactgactcttatggatggactcaaatctcgttcccatgttattgttatgggtgctacaaaccggccaaacagcatcgatcctgctcttagaagatttggaaggtttgaccgggaaattgacattggagttcctgatgaagttggccggcttgaggttctccgtattcacactaagaacatgaagctagctgaagatgttaatttggaactcatttcaaaggatacccatggatacgttggtgctgatcttgctgctctttgtactgaggctgctcttcagtgcattcgtgagaagatggacatcatagatcttgaggatgagacaatagatgcagagatattgaactcgatggctgttacaaatgaccatttcaagactgcgcttggaacaagcaacccatctgctctccgtgaaactgttgttgaagtcccaaatgtctcttgggaggatattggtgggctggagaatgtcaagagggagctccaggagactgttcaatatcctgtggaacatccagagaagttcgagaagtttggcatgtctccatccaaaggagttctgttttatggtcctcctggttgtggtaaaaccttgttggcgaaggcaattgccaacgagtgccaggctaacttcatcagtgtcaagggtcctgaattgcttaccatgtggtttggtgagagtgaagccaacgtccgcgaaatttttgataaggctcgccaatctgctccttgtgtcctcttctttgatgagcttgactcaattgcgacgcagagaggaagtagtgtgggtgatgctggaggcgcggctgatagagtgcttaatcagctactgaccgagatggatggcatgaacgccaagaaaactgtgtttattattggtgctacaaacaggcctgacatcattgatcctgctcttctgaggccagggcgtcttgaccagctgatctacattccactgcctgatgagcagtctaggctccagatcttcaaggcctgcctaaggaagtcccctgtggcaaaggatgtggacctgaatgctcttgctaagtacacacaagggttcagtggagcagatatcacagaaatttgccagcgtgcgtgcaaatatgcaatcagagagaacattgagaaggacattgagagggaaaggcggatgaaggacaaccctgaggcgatggaggaagatgaagtggacgagattgccgagatcaaagcagctcacttcgaggagtctatgaagtatgctcggcgcagtgtcagtgatgctgatatccgcaagtaccaggcgttcgcccagacgttgcagcagtcccgtgggttcggcagcgagttccgcttctcagagcagtcggcgacagctggtgctgctgcagccgatccgtttgcttcggctggtgctgcggctgacgatgacgatctatacagctaggtgtcctgttgggttggttctgggttgtgcaatatcagtctcatcagtcatctgtttaaaactctgattatacttagacacgggatgtcatgcaatgatatttgttttccgtacatttggacgttgagataatgcctgtttattttaaaaaaaaaaaaaaaaaaaaaaaaaaaaaa

SEQ ID NO: 14 - DNA, 7421 bp, Oryza sativa
gtcgaccgaaaaaatatggaagaatacaatttttagctaaaatttatcatagtttaatacgccgaattgacggcctagtaaatctatatccctttaaaagaaaagaaattagaaataaagtagtgatggtaatagtgaatttgctacttcacctactgcattgaaatttttgcaagttaactcctgaactttttaatattaaaaagatcgaatctaaatgggtagctcctaaaaaaaataaaagtaggatgaatattctctatagcaaaaagtgaaagtacattaatacattattttatctgtagcgagcatggacatttagatggtttctaaaaattatatagtattttgtgtttatcatgattttttcttaggaaaacaacgcttactacacgtactattttcagaatgggctttctttatagaagaaaaataatccatcctttcggaggatcggttgtggtcgttagcaggcattgcttcctttagggatttgttgaaagtgtagcgtggctttgccctctcccgctgattggagtagcgttacctgtcgtacgagttatatttttcttccttggttgttttttttctctccttggtataagttggtctagctaattacattgagtaatatattgacgtataatctttttcgcgttcatgaaaaaattatagaaaaataattttggagcggaaactagtctccgcaggaactctttgatttctgacggactcaacgcctgcgggctgcagcttctccctgctatcctccttcccttttgatatcgggtcgaactttccaggaccggtgctgcgcatgcaagtgatcttctggtttactagatgttcacattttctcctttccagccacggcgaaatgtcagtccatcttcgccggttgactagcaccggtcgccaaacttcaaggaaaccgacgtgcaggattctttcgttgccatgttgtcactcacccgtgccaccatcgcgcagcagaatccttcagcggcaaaccaagaaacgacatcccgttgaaaggtcaggtcaaccgtaatcctcatcacggcatcagtgcatcacctgaggccgacctgctctcccgatccctcgcgaactccccgggaagacgacgaagaccagttacttctacaacgcaaatcgaactatagccgccctgctctgtccaggaagcaacgcgccggcgcgggatgctccactataaaacgcacccgctaatcacatcgacccgccacaccacctatcacagcaacacaagccaaccacaaagaattctcatttccggtaacttttctcaagcctttttggcgctctgagaatcatcacacggaagtcaagcctttgttgttgtcgtgattagtttagtttagtcaccgagatgagctcccgaatggccggagcgacgctgctgcgccacctgggcccccgcctgttcgccgccgagcctgtgtactccgggctcgccgcgagcgccaggggcgtcatgcccgccgccgcgaggattttccccgcgcggatggccagcaccagcagcgccggcgcggacgtcaaagaaggcgcagccgagaagctgccggagccggcggcaacggcggcggcggcggcgaccgacccgcagaacaagaaggccgtcgtgagctactggggcatccagccgccgaagctcgtgaaggaggacggcacggaatggaagtggctcagttttagggtaagcgctcatcaaccattgatgtgtgcgcttctttttttgtttttttgcacggtgaattctcgatttgatcgtgttcatgatgtgtgtttcttttgcattgtgacacagccatgggacacgtacacgtcggacacgtcgatcgacgtgacgaagcaccacgagccgaagggcctcccggacaagctggcgtactggacggtgaggtcgctggcggtgcccagggacctcttcttccagcggcggcacgcgagccacgcgctgctgctggagacggtggccggggtgcccgggatggtgggcggcatgctgctccacctgcgctccctccgccgcttcgagcagagcggcggctggatccgcgcgctgctggaggaggccgagaacgagcggatgcacctgatgaccttcctggaggtgatgcagccacggtggtgggagcgcgccctcgtgctcgccgcgcagggcgtcttcttcaacgcctacttcgtcggctacctcgtctcccccaagttcgcgcaccgcttcgtcggctacctcgaggaggaggccgtgagctcgtacaccgagtacctcaaggacctcgaggccggcaagatcgagaacacgccggcgccggccatcgccatcgactactggcgcctccccgccgacgccacgctcaaggacgtcgtcaccgtcatccgcgccgacgaggcgcaccaccgcgacctcaaccatttcgcatcggtacgcatatgccagcctgaaaacaaccaatctcgcctgcttaatttttgtgtgaacgggtttgagctaaccgatcgcgtttctcgtgttggtacatcacttgtgcaggacatccagcaacaggggatgaagctgaaggatacgcctgcgcctatcgggtatcactgatcatcattcatcaacgggcgatgcctgctcagttcatcaccatcactgctactacatgcgtattttacatcctatttgggataaactttgttctgtgtatatatgtaaataagctattgtcactccgttttatgcctgtacctatatgcatgctgagattatgcaaattgtgaataacaatatagtaagattttttttggagtagaagtatccacgtgttcagaattgcagcaggtaacacttgtcaagatgctctgctgctaacaaaggaagcatggccgttggctgacccgtgcacacaaccaagaccaaacatccagtccaaatgtgtaaaggcaaatggaatctcttttagacaagttcaaataccattcacactaaacttttttctttttctggactcttgatttcaatatgccctcagaaaaaaatcaccaaagaagcacaaacacaatggctcacctgcaattcaccatctgtcttagaaaaatcaactcctaacttgaaaaatcagtcaggattttttttatggaagtaagtgtagaaaaataatttctttaagccattttacattttttaattaaggaggtgccataagttgatataattttaaatgtcgattattttttattcatcccaatattccctctccacttcagtaataaaaagttggtgtgttacatttaatcccttttcttttagtattcattattattggcagacgaagactggaccggtatataccatatagataccatataggcacctcgctgtgaaatgttatcacctatcactgaaaaataaatttgagctcccgtgttaaacttagaacttaaaccgacgaggggatgtccccttagaatccacgcccacgctacgcttgatatttccttttgtgtccattatgcgcatacaagcactggattgttatttcccttgtgtgcgttatatattacgggcgtataaacacttactgagttgtcatgagcgataacaccattgacacgtttgcttattcagattgtggttcatgtggcaagcacgtacgtacaccgccatggaggcactttccaaaagcaacatcccagatgtttctagctgcgtatactagtcgcaattagcaatagagctgtttagtcacgttctggaattgtcagtggttagattaaggatctaataatagaagttgcctaatttgactgccatcctggatggttggagtctttcttggtccacaagacaagcaacagaatcaggattcgtttccagtttggctttggctttgttgtacgttccgttttccttgtactaccgggcacttgcaaattgcttgcgcattactatccttggtgtgaaatggttctaaacggaatattctacttgtagtacgtacacttgtactccacctgtacaagtgacgcatttttttacattgactttgtgcactttgttatattagcctcttttgatattaggcagtagtaccatcctaagaaaaaaaaaactcaatcaacatgtgatgcgtgtaccaacgacacatcacatactttaatttggcgataaaacacatgtgaaccttttattattagtcacaggcagtttgaaaaaaaaaatcacaagaattagtagtactgctacagtactactaaccgatcaacttggagaagaagaaaagatttcctcagagtcgggaaagcccgaggaaagcccatctcccccgtcactgacggtgtggccccaccaccggttcctctcctttcgctcttcctccctatataaaaccctcccaaaaaaaccctctccatttgcaaatcgcaaccatctcgtcaacaaaaaggcgcctctaagaattcctcccaaactttttggtgttgtcaagccgtgcgtttcggggtacatcaacggcggcgatgagctcccggatggccggatcggcgatcctccgtcacgtcggcggcgtccgcctcttcaccgcgtcggcgacctctccggcggcggcggcggcggcggcggcgaggccgttccttgcaggcggagaagccgtccccggggtgtgggggttgcggctgatgtccacgtcgtccgtggcgtcgacggaggcggcggccaaggcggaggccaagaaggcggacgcggagaaggaggtggtggtcaacagctactggggcatcgagcagtcgaagaagctggtgcgggaggacggcacggagtggaagtggtcttgctttagggtacttgcgcttcgctttgctcctgatcggtttcctgtttcgattctgtttgtcccgtagattgatcgccagatcgatgtatccatactccgagatagtaggctcggtccttaacttgtcgcgccgccgtgtgtaattttggtttgattttctccgcagccatgggagacctacaccgcggacacttcgatcgatctgacgaagcaccacgtgcccaagacgctgctcgacaagatcgcctactggaccgtcaagtcgctgcgcttccccactgatatcttcttccaggtataattgtgcttactcgatcaccatgcaccgcccgacggccgtttgattctccgggtgattagcgctgtgtgtttagttcaacgtttttttcgaagggaaaaactgagaggccgcgtgactcttggcgtgtcataagaggcaaagtagcattgcaaccagggcacttgagaattttggtttccttgcttccgggaagatgccatttgtatttaggacgcctgggttctacctgatccacctgtgtgattgattttattttcggaaagtattttctacacctaggtaacatggcacctatgtgtatgcatgcaatttaaaccgttataaaaaaatttacaaacattatacaaacatgtaagtctaaattcgatcaacatatgaagaaacaaaaataataaattttatatgcgctcttcgggtactattcactgtctgattttattatttttgtttctctagttatagatcaaatttagtcatgcatgtttgtgtatagacttatatcatcacaatcgatgttactaatttttttttcaattttttctataactatttgagtcgcatgcaaatgatgggtgtcatagcacttaggtgtagaaaatccctgtccttttattttccgctatactatctgataacaacggctaagaaaaggacacgcattgtgagaaggactcaactttgatttgttaatctcttgcccattaaatcaatcataggcttattactgtttgcactacaatgactggtgatccaattgtttcctagtgcaaattaatctatatatgattctaatgtcttatgactaatttggaagaacaattatattacatgatatccatttctagtagtatgtggaaatgatctctagtcggtcgctaattgctgtaactgtcaatggttaacactgcaaattgggttgggtgcagaggaggtatggctgccgcgcgatgatgctggagacggtggcggcggtgccggggatggtgggcggcatgctgctccacctccggtccctccggcgcttcgagcagagcggcggctggatccgcacgctgctggaagaggccgagaacgagcgcatgcacctgatgaccttcatggaggtggcgaacccaaagtggtacgagcgcgccctcgtcatcaccgtccagggcgtcttcttcaacgcctacttcctgggttacctcctctcccccaagttcgcgcaccgcgtcgtcggctacctcgaggaggaggccatccactcgtacaccgagttcctcaaggacctcgaggccggcaagatcgacaacgtccctgccccggccatcgccatcgactactggcgcctccccgccaacgccacgctcaaggacgtcgtcaccgtcgtgcgcgccgacgaggctcaccaccgcgacgtcaatcacttcgcatcggtacgcatgcatgatcagcgatcttgctctttgatctcgccttttggggatgtatgttgaattggttctgacgtgtgatctggtctggcttgtgatgtgcaggacatccattaccagggcatggagctgaagcagacccctgcgccgatcggatatcactgaggatgtttgtctactgccgaggatttgcatcactaataatcaaatcaaatgagtatacttcgtttttcagggaaagcaaatgagagctctttagctgtatcggatttggtaattgctactagtaactactaagtactgaaaaataaggagtctccttgtttgaagtacaaatctaggagattttttgaaccaactctatctgaattgggcctgtttttcgtacgccgcactgcttcatgtacatatattccatcccctatcttatgtgtggcaagtgtctttctaaattcttggatgtaatgacacctgaatttctttcgttgaactattggcagctgagttatatatactacataccattcttttgttaaagcaggtcagagcatagttttgtccatttgatgtctgtcacaattctggtggtaatgttccaacttcgagaaaattgcatatctaccatcccataagaatggcttcgctagaataccattatgaaaacgggcttcgctggaataccttcctcaaccagagtgtcttcgccaaaatgccatcccggacagaaatgcccctggctcttcttcttcctccatctcgcgcgtgaagagctcgccggcggccatggctagctccctccctgccatggctagctcgccacgggctccggcggagggctgcgcggtggcggcaggcgcggtcgac

SEQ ID NO: 15 - DNA, 6154 bp, Emericella nidulans
gaattcctggagcgaagtggcggatctggcgagtctcgaaaggctccttcagcacgctaaacccgccgccagcatcgtcatctcctcgctgtactagttatggaggtagtgcagttgttttgaatcttgacacagttgtatctctggaataatatagtagataagcggaatctttggaattgcgtcggaaaggccgggtgctttaagggtaacacctcttacggtctagcggggagatgccaggttcgagtcccaggtaatttttttgccatttttctccataattcatgaccggattagatcccacacctagttagaaatatttgtttttcagaagtcagctgctaaaactcgattgataattttgtgtttctgagcccattcaagtcagcaaatttgccgcccaaaaccttgcaattctcggtggaagtctctgcaatgtgatttagatcacatgtggcgaatgaagtatccaactgtcgaaagcaagagaatattaggaacgagatgttaatcccaaattcaaggttgaggcgggttatatgcagctcgcttgaagccccgcagtgggccctggtcaacctcagcttcaaccgctctagactccttcggatcctacacctaccgaccaggatgacatgttaacactcctctgcttgatcgtcggcgagaatatcacaaaataaacatggcaactcaaagggcatgtttggctgtcagatttattgctacaagcttatacttacgactgttgtcgctgacttttctcagattgcgttcaaagtccatggcaccgttcagggtacgtcttcagttctaactagtttcattcttagccagctatgtttaacaagtacctctacaggtgtgggtttccggtaggcacagtttctacaggtcaacattagacatttctgatcatgtcgttacaccagtgatttcaccatgaagcgtgctgcggaatacggtctcagcggctgggtgaagaacactgattgcggaagggtacgtttgtagtccctattaatgctaacaatcttgcaatgtcttgcatcgctcgtcagagtcactaaatgcatatgaaggtcgaaggcgaagcacaaggctcagaagagggtatccaaaaatttctcaaggatatcaataatggccctcgacttgcacatgtagtcaagctggagaagaagacactcgatccgaaagacggagagagtcattttgggcttaggaagacatcggcgactgtttttgattcactttgatggtcgactatacagtgtatactctggttcaagcagaataaagtccatccgctcggcctcccagtttccatgaaaagtagtctcagcgtagcctcttcatccggtcctctgcttacgtggtagccaatttctgaggggcaagcaggaacgcattgccccagaatctttcagcttcgggaatatttccagtgacgtcgatagggctacgcaaacgtcgttattgaatcccgatttattctcggcgtttgtctgagtcatggcccagttagtggtcccgtcccggcttcgtccgtgatcaagtgacagagagctggatccataataccgtaatctgataacacaggtcaatcttgcatctcagcaagtaggactcccaacagactgaaaaatcaatgggaagtaagtataatctgatttcgcttctgctaaagctaaatatttcaaacacacctgtatatgattgaactatatttgttttatgcccctactcaatgctaaatggagtatccagatttgtaacgctccgtaaggtagggcgccctaaatacatggcgttttgccaggtacgacaagtcaggctcataattagaaatactcaggcactcttcctttacagccaccatctagaatgggcgtcagatctgggtccttctttcggtgaatgaaaagttctgttcggcggcgagcgtgtgactcctgtgtgcgggtactcagccctgagagttccgattcctgcctcagattgcctctggttgaattttttttataggtctttgtatttagttggcatatataaatacaaaaaaagttgcagtcccagtcaactccttatgtatgtcaaagcaacatcttatcttgactaagtacagttcgtcagaattgacagcaccttttcaacaataaacaatatcagcattatgaattcgatgtcaacaacggggcctattagggtggccgctataccgaaacattacctgcaattcacagtgcggacctatacgaggagtatggcgagcgctgggttacgatacagcaatccgcccctcgtcaaaaaatgctacgaccaaccgacagggaaaaggttcatttcctccacgccacaatcacagatcaaagactatttccctcctcctgatgcaccgaaaatagtcgaggtgaaaacagcgtgggctcatcctgtgtaagttatccaatcttcaagagaggcgacagatgctgatcaagaacagctacagtgaagaagaaatgcgtgcagtcactgttggccatcgcgaggcaaagaattggtctgactgggtagcgcttgggagtgtccgcctgctccgatggggtatggacctggtcactggctataaacaccctgcgccgggccaagaagacatcaagaagtttcagatgacggaaaaggaatggttaagaagatttgtcttcttggagagcgtcgcgggtgtacctggaatggttggtggtatgctaaggcatttgaggagtctcagacgtatgaagcgagataacggatgggtatgtcgagatttctttcatctttacttttcgtggctcaactaataatcaatgcgcagatcgagacgctccttgaggaggcatacaatgagcggatgcacttgctcacattcctcaagatggccgaacctgggtggttcatgcgcttaatggtccttggagcgcaaggagtgtttttcaacggcttcttcctctcttatctcatctcgccacgtacctgtcatcgtttcgtcggctatctcgaggaggaagccgtgctcacttacactcgggccatcaaagacctcgaaagcggcaggctgccgcactgggaaaagctggaggctccagagatcgctgtcaagtactggaaaatgcctgagggtaaccggaccatgaaggatctgttgctgtatgtccgagcggacgaggccaaacatcgcgaggtcaaccacacgctagggaacctgaagcaagcggtcgacgtcaaccctttcgccgttgaatggaaggatccgtctaaaccgcatcctggcaaagggatcaaacacttaaagaccaccggctgggaacgagaggaggttgtttgagcatttatgcatttatacattgtggttttgtcattcgcgggagcaaatgggagaacatgcatatatgattaaagcggcgcaaattggttggacttgagcatagcatcgcggatatctcctctccttagtctttattggtaatagaatgttcttgaacctgttcagattaattgatatggaccggccatgcaattatgagcgcagatgaaacatacactaaactatattgggatagcaatatccgtgtggaaaatgggtctttgctgttactgagcgtagccaggggcttgccatcatgtctcagagccagatggctccatccaaagctccgtttatgttcgctaatgcatgtcaagatgtcatcaggtttggtgcagcctgcagacgcgatgcagtgttcatctgcctcttgtgggatgagggaccgacagattgcacggcatatcctgttctgggcgtcaggggcgccgggacgaaacagatcgaaaaagcaaacaatagtcgaatgccgaagaccaggttttctttttcttaaagcatcactctatccatactcagagtaagctatgatcacctggtaggcatggtcgttaggctggcgacgttaaaggtataggcgctactatcgaatagttgacccgcttcccctttagtgccacgaaagaagcccaagaacccccctttcgaacgtctcaagtttgttctcgcctgcagatcggtcacgatcgccattttccgctgttattctaccgaggcgtcccttttctatttacgttaaccgttatttctcctctggtgaccacctgtcctttcatcttttgtgaccgacccgtttatacattatcaagcgtttgctacattccacgcatgaaccgaaacacacagtgtcgcaatggacgatcccgccgcgtttgatgctacagcccctcctgtccgagactcctcaccctccccttccatctctccaacacccgcgatttcgtcctgtccatcaccagaccgtacattttctacagtttcttcgttgtcgacatcgtctggcacatccggtgatgccaggtcttcagtgtcagtttctacgcggagacgggggtatatccggcctcagggggcggaattcgccgcctccgcaaaaaaccgggaaagtgtaatgagcctggggagcatcgcacatttgcaatactatttcgctcgaacaggtctgctggatgggaagggtggtaatgcgcgagaatataagaagaaaaagaggaatacggaggacacaccacaattgctgctcacaccaaatgcccgcttcacggacgaaattacaatgagcccaacggaggatatgaatacggattcaggagaagatgcgtttgacgttgtcgaggacggagacgaagtgatgctgcccccgactgtcagtacctatagcattaagacgcaccatatcccgccgcctccggatctgctgcagctacggagggaccttttgaacgcgatatataaagcacagagagagattgatgcggtgtctcagcagcagcattcaccggagacgcttccaccacgaatcgatgtctcgccagatggcgatacggaaccaaatggagattcgcaacaccaggcgaatctggctgcagctcttcagagctgggatgaaatcaacggtatgcgcttattagatgttgtcacgcttgcgattcgcgcagcaaagatatactataccacccatgaatacccggaacgactggcttctataaaaagcgagcgtgagattaggcaagatctatttaatgtccttgaagtgttgaagcgatgggcaggacgcaattttgcaggtgggtttcgagaagaggaaaagaaggccgttctaggctggatgtccgatgtgcgcgatatgttgtcgcaagaggcgcagcttgaagacgcagaagtgaaagagcgggcatcgtgggtctggattgaaggcgattggactggtcgggaacggcagcgggaagaggaatttctggccagccttgacaggtccagactcacgcttgccagtatggacagagcctgaagatggttcactcccatctgcgatgcttgagagactacgtgacggccgcgatctgatccggatccacaacatagccgtccggaagtccaagcgaccttttggtgagatcaaaaccttccatgaagacgttgccaagccatatcgacaagcagataatcttcggtattggataaaggcggccgaactgcgctgggagacgaagctcgaactggacgtcatgggcgtcgtctatggcaccagcgacgaggcgtggcaccagtttgatcgagccattgcagcctggtgcaagtccgtccgagaagagctctcgcaagaccttcgagtattgagaagacgagcgactgcagccagtgttgacgggctgcttgtcaagatctcatgacggcttccgtcgataatccacctctttgagagcgcatgtcttggatgtctgggcttttgggaaagtggccattgggtccacgtagtttgattcaggatgacgtttgtttgcagtccgcgctgcctgtatttgataccccttacttgtcgatgacagttttggcgagggagtttggtgtttgtcctgcaccttgtacattgtgctgcattgcattagtcaatgattagccagattaaatatttaaagtatatccatgatttcctagtcgtatcccgaaccacaaattcggttagaaattcggcagtattacaacgagcagcgcgttcagggaggagttccttggaaatggaatgcctaggcctacggtacc

SEQ ID NO: 16 - DNA, 1652 bp, Zea mays
ccacgcgtccgcccacgcgtccgcccacgcgtccgcccacgcgtccgcccacgcgtccgctcctctctttccccggcacctgtcacgggaggaggatggacaagagcggcggcgaggcggcggcggcggcagcagcagcagacgacgtcgagcggcgggggggcgactacgagcaagacgagcacgagcggagagggacggtgtggacggcgacggcgcacattgtgacggcggtgatcggctccggcgtgctggcgctggcctggagcgtggcgcagctgggctgggtcgcggggcccctcgcgctcgccggcttcgcgtgcgtcacctactacacctccacgctgctcgccggcgcctaccgcgcgccgcaccccgtcaccggccacaggaaccgcacctacatggacgccgtcagatcgtacctcagtcccagggaggtgttcatgtgcggggtcgcgcagtacgtgaacctgtggggcaccatggtcgggtacaccatcacggcgaccataagcatggccgcgatcaggcaggccgactgcctccgccgggacggcgccggcgccggcgcgcgctgcgacgcgccagggaccgtgctgatgctggcgttcagcgtggtccaggtggtgctgtcccagttcccgggcctggagcacatcacctggctgtccgtcgtcgcggcggccatgtcgttcgcctactccttcgccggcctcggcctctccgtagggcactgggtgtctcgtggcggcggcggcctcgggggcagggttgcaggtgccgccgcggcatcctccaccaggaagctctggaacgtgcttctcgccctggggaacattgccttcgcctacactttcgctgaagtattgatcgagatccaggatacactcaagtcaccaccaccggagaacaggacgatgaagaaggcagcaatgtacgggatcggagccaccaccatcttctacatctccgtcggctgcgctgggtacgccgcgttcggttcgaatgctccgggcaacatcttggcggcaggcgggctgggtcccttgtggctcgtcgacattgccaacatgtgcctcatcctccacctgatcggtgcataccaggtatacgctcagcctgtcttcgcttcggttgagaggtgggccgcctcacggtggccagaagccaagttcatgagcagcgcatacaccgtgtccgtcagcatccccctcttgcagagaggatcggtcaccgtcgcgccgcacaagctcgtcctgaggaccgccatagtcggcgcgacgactgcggtggcgctggcgatacccttcttcaacgccgtgctggggctcctcggcgcgttcagcttctggccgctcacggtctacttccccatcagcatgcacatcgcccagggcaagatcgccagggggaccaagtggtggtgccttctgcaggctctgagcatggtttgcttggtgatctcggtggccgtgggtgtaggctctgtcactgacattgtcgatagcctcaaggcctcttctagccctttcaaaattgtaggctaacaggttactgtagtcatgtacaatgctctgagccgatcgtgcgttgaggtttaaaagaactgtggtgcgcgaaaaaaaaaaaaaaaaaaaaaaaaaaaaaag

SEQ ID NO: 17 - DNA, 2864 bp, Zea mays
ccacgcgtccgcccacgcgtccgcccacgcgtccggtctttggtcccggagggaaaaggacaaatcactcacacagagggaacaaaagggcacaggaatcgcgacagcgtgggaggcgtacggcgcaccgcccggccgccggatctgcgccggcgacgcgcccggacgtcggatctacgccgccgcaggaggagggaggcggcgctctggccgttccttgcccgcgagcgcccagatccgtcccgccgccggatatatatatcaatcaatgcccctgtgatatcgagcttcagttgatgcagtggtgaaaacatcttctcgaaaaactgctggctgcaagttgcaaaagtttgtctttcccttgttgtgttgttgcttccttctctggtggagtacacgggagaagtttgcagatacaggcagctcctttcaaatctcctatgtccagggatttggactgtcctgttcagacacagatggctgtggcagtcctggaccggagctttagcagcgaatatcctggaggtagcagaattgaggggaggcaactgagctggaagagagtatttgtccaaactgacaatggttctgtccttggcatcgagctggagagaggagaaaacgtacaaactgtgaaaaagaagctccagatagccctcaatgtgcccactgatgagagctcattgacctttggtgacctagttctgaataatgatcttagcagcattcgcaatgactcacccttgtttctcaaaaggaatcagattcaccggagcaattccacaccttgcctctcacctacaggtaagaatgttttgcaaagagaccggagtggacccattgaaatccttggctgttcaagtccttcatctcggatgaagcagcttgctaaggatgtcattaaagccataatgaatgatgttgacccagtcgctgttaacagtgggatgggtggtgcctactacttcaagaacatttggggagagcgtgtggcaattgtcaagccaactgatgaggaaccatttgctccaaataatccaaaaggttttgtggggaaagctctgggacagccgggcctgaaaaggtctgtacgggttggggagacaggcttcagagaggttgctgcttacctcctcgactatggtcactttgcaaatgttcctcccaccatgctggtcaagataacacacacaatcttcaatgtgaacgactgtgttggctgcaaaagtaaagtgttctgcaacaaatcagaggctgtgagcaagattgcatcgctgcaggagttcattcctcatgatttcgatgccagtgaccatgggacctcaagcttccctgtatctgcagtgcataggattggcatccttgacattagaatcttcaacactgacaggcatgctggaaatcttctggtcaagaagcttggtcctggcgccgacaattttggagagcagacagaactcattcctattgaccatggtctctgtcttccagaatgcctagaagacccatacttcgagtggatccactggccgcaggcatctgttcctttctccgaggaggagcttgagtacattgcaagacttgatcctgtaaaagatgcagaaatgctacgcatggagctacccatgatacgagacgcatgtctcagggtgctggtgctatcaacagtatttctcaaggaagctgcagcgtctggcctctgcctctcggagattggagacatgatgagcaggcagttcactgcgaaggaggaggaaccgagtcagcttgagctgctctgcatggaggcaaggaagtgggttgaggaaagagagtcctttcttcccaacgaagccggagttgaagatgacgatgatgacttcacccagttccttatcgacggcgaggatgattatccggatgccttggaaccatcagctttctgcaagtttggtagcatgaaggcaagttctaggaatccactgtccaagctagatgagcgtgacgaggaagacggagacgggaccgaggaggacgacgacgacgacatcttgaccggtgcattgcctcagaggatctcgtctatctccaagctgtcgtcatccatgaaggggcttggcttcattgggaaacccaagccctaccgcacgtgccttcggaagggtaaagcgacaggcagaactaagtacaccggcaaagccagcgagcatcagtccggcagcaggagcgccaacgagctgctcccgcccagcgccagtttcgtgaagctgtcggacatgagccctaaacagtggagcgcattcctcgacaagttccaggagctgctcccaggtgccctgagcgcccggaagcacgctgccggtgtcgtcggccagcgctcgatgccgaggctgggcacgtcttgccagttttgagagtagcagaagagaagccaccgaacccaaggtatgacgaacgcgcttctgttcgagctctggtgtgcagcagccaagcaggtacggagtattatatatgcttgtagtaggtgtctggagccggtggtggtagagagggtccgagaataagatcatccatggcatgtgagatgaggttgcgggagaaggaagggggttgtgtgtgtttgtgcatagtgtttcgcataagaggtccgttgttctttttttcttcttctctgtatatagttaagtactcctactgctactgcatcgcagcaccgggcacgggctgggatctcggccgttgttatctgaacgatggtggtgagtgtgctggcgtcgcctgctctctgctctgtctttgccgctgtaccattttggaggcgcttaccatattatgaactttgaactatgatatgatgttcgctaaaaaaaaaaaaaaaaaaaaag

SEQ ID NO: 18 - DNA, 1602 bp, Zea mays
ccacgcgtccgctcctcctaactacgcctgcctgtttcctcccccgcaggattgatgagctcggcgagggtgagaggccccttcacgccgccgcagtggatcgagctggagcaccaggccctgatctacaagtacctgtccgcgaacagccccgtacctcacagcctcctcgtccccatcaggaggagcgggagcctcgcatcgtctccctacccgcctccctacttcggcacgagcacattcgggtggggctccttccagctgggctactccggcaatgcggatctggagcctgggcggtgccgccggacggacggcaagaagtggcggtgctccagggacgcggtcgccgaccagaagtactgcgagcgacacatgaaccggggacgccatcgttcaagaaagcatgtggaagaccagcctggccatgccgcgaaagccatgtccgcggtggccgtggcggctgctgctgctgctgctacccagcatgctgctgctctggccggcgccggagctactgctgctgctggcctcgctgtcaatcggcaccggcagccggggaagagctatgccacgggtgcgactgatccatgctctctgcaatatagcagggaactggcgaacaaactgtcgaacgagagcgaaaacatgcaggactctgacaatgtctcgatgctgacttccatgaacacaggaaacactgcaggcagcgtgtttccgttctcgaaacagaacactgctcttttcgaagtgagcagctcaaggccagagtttggtcttgttccatcggattcactgacgagttcacctcatagttccttgaagagtgtcaaaaatctgctcagctcacggagtctgagtgagcaccagagctccgcctccctgcaacactttgtggactggcccaggacgccacctgcccagggaggtctttcatggcccgaggcagaggacatgcccagagctcagaggtcccagctctcagtatccgctccaatggcatcctccgagctatcatcggcctccacatctcccatccacgaccacgagaagctgattctgtcacctctcaagctgggccgcgagtataccccatctggcgtcgtcagcgctgcagcgaacagatacgaggttagccagctagaagcgacctgggcgacgatgttccgcgactcttcgacgggcggcccgttgggggaggttctggccaagaacaacagcaacgcggaagcaagaggttgcccgtcggcggcgccacctctaaccgactactactgctgggattcaggccacggcatgcagtcgtcccccgtgggagttctgcagaggacgaccgccttcggatcggtctccagcagcacgggcagcagccctagggtcgagaaccacggcgcctgctgcgatggtaccagcaacctgatggatgatctcggttcagttgtagtgagacatcccagcatccgcctcttgtgagcccgctgggttctggccatggaaaaagcgtgagggggagcatttaccacgtagtttgtcatttgagactgatctcctgtttctgtcacctgagttcttcttttgttgcccttaaaaaaaaaaaaaaag

SEQ ID NO: 19 - DNA, 1891 bp, Oryza sativa
ttacaaaaccccagccaccgagagctctcccgctccactcgccgcacaccaccaccctcacccctccccccatccgcgtgatctcccgagcagctagagcgcgcgcccgcggcgcctgtactgcgagaccgcttcgctcgcttccggtcggtgaagaggcggtcggtcgcagctgaagtagttgttgcagagatgatgatgatgagcggtcgcccgagcggcggcgccggcggaggtcggtacccgttcacggcgtcgcagtggcaggagctggagcaccaggcgctcatctacaagtacatggcgtccgggactcccatcccctccgacctcatcctccccctccgccgcagcttcctcctcgactccgccctcgccacctccccttccctcgccttccctccccaaccttcactggggtggggttgctttggcatggggtttgggcggaaggcggaggacccggagccagggcgatgccggcgtacggacggcaagaagtggcggtgctccaaggaggcgtacccggactccaagtactgcgagaagcacatgcaccgtggcaagaaccgttcaagaaagcctgtggaaatgtccttggccacgccgccgccgccgtcctcctccgccacctccgccgcgtcgaactcctccgccggcgtcgcccccaccaccaccaccacctcctccccggcgccctcctacagccgcccggcgccgcacgacgcggcgccgtaccaggcgctctacggcgggccctacgccgcggccaccgcgcgcacccccgccgccgcggcgtaccacgcgcaggtgagcccgttccacctccacatcgacaccacccacccgcacccgccgccgtcctactactccatggaccacaaggagtacgcgtacgggcacgccaccaaggaggtgcacggcgagcacgccttcttctccgatggcaccgagagggagcaccaccacgccgccgccgggcacggccagtggcagttcaagcagctcggcatggagcccaagcagagcaccacgcctctcttcccgggcgccggctacggccacaccgcggcgtcgccgtacgccattgatctttcaaaagaggacgacgatgagaaagagaggcggcaacagcagcagcagcagcagcagcactgcttcctcctgggcgccgacctccgtctggagaagccggcgggccacgaccacgcggcggcggcgcagaaacctctccgccacttcttcgacgagtggccgcatgagaagaacagcaagggctcctggatggggctcgaaggcgagacgcagctgtccatgtccatccccatggccgccaacgacctcccgatcaccaccacctcccgctaccacaatgatgaataatctcttgaagaagccaagaagtgatcaacacgcggaagaaatcaacagcttctttcacggcgtgcgagctgcatgctcatgctccaggatcgatcgatcgatcattgcatctccaaactaatcacgcttcgatctttcaggacttcatcaatgacaggccgaaacctcctacgagttctctgatgatattcttattttttttcccacttcttttcgttgagctttttgtaatgttgcttcgagtgttactcctacattttctccgaaatggcctcagaatgatgcggtcgggctgattaattaggttagactcttcctgaaccaactaggaatagattttctgcctggttcctgtcagtccttgtaatatctgcagcagcttgtgagccaagcgtgttcgcttttgtgaacgccctttttcttctttccgattcctctgcctgtgatagtactcgctccgcgaaaaaaaaaaagagcaaaccgtggattcttgtgtcaaaaaaaaaaa

SEQ ID NO: 20 - DNA, 1900 bp, Glycine max
attcggctcgagcttctttgtctctcatctgtctgaggatttttccatcttagttcctggaggcaccaggaacctgacccaataaacaaacccttttttttctttctaatttttctaaagtttcattttttaatccaatggcaacttgggtattatcagaatgtagcttgaagcctcttgctccagtaatccctagacctagaactggggcagttttgtccagcacctcaaaggttggatttttggagacaaacaaggtattggaaggttctaagtttcaacctttgaggtgtaaccttagggagaggaattgggggttaaaagtgagtgtccctttgaggattgcttccattgaagaggaggagcaaaagagtgtcgatgtaatcaatgggagtaatggggttgagcatgagaagcttccagaatttgaccctggtgctccaccaccattcaacttagctgatattagagcagcaattccaaagcattgctgggtgaaggaccctttgaagtccatgagctatgtggtgagggatgtcattgctgtctttggtttggcttctgctgctgcttatctcaataattggttggtttggcctctctattgggctgctcaaggcactatgttctgggctctgtttgttcttggtcatgattgtggtcatgggagcttttcaaacaaccccaaattgaacagtgttgttgggcatctgctgcattcttcaattctagtgccatatcatggatggagaatcagtcataggactcatcaccaacatcatggtcatgttgaaaatgatgaatcatggcatccgttgcctgaaaaattgttcagaagcttggacactgtaacacgtatgttaagattcacagcaccttttccacttcttgcatatcccgtgtacctttggggtaggagtcctggcaagactggttctcactttgaccctagcagtgacttgttcgttcccaatgaaagaaaagatgttattacttccacagcttgttgggctgctatgttgggattgcttgttggattggggtttgtaatgggtccaattcaacttcttaagctttatggtgttccctatgttatattcgtcatgtggttggatttggtgacttatttgcaccatcatggccatgaagacaaattgccttggtatcgtggaaaggaatggagctaccttaggggtggtctaactactcttgatcgtgattatggattgatcaataacattcaccatgacattggaactcatgtcattcatcacctatttcctcaaattccacactatcacttagttgaggctactgaggcagctaagccagtgtttggaaaatattatagagaaccaaagaaatcatctcctcttccttttcaccttattggggaattaataaagagcttcaagactgaccattttgttagtgacaagggggatgttgtgtactatcaaactgactctgagattaatggctcgtccaaatcagagtgaagattaaaattcttttttatatagacaagagagacttatacacaattcttattgctctaaagattgtcttgagtttcttacttagagttgaatccgtcattaataaagggatagatggacggatcatataatttcaattgtaactacatgatataatgtttaggttatatgtagtttatcattcttgaacagtgaatcctctgtataaattgattatattgaagtggtaccttgagtcatgatcaaattgttaatgtatttgatcagaactgaaagacctcgattaaatagtaatttaaaataaattgttttatagaatgttgcggtgttttcttaccagttaccatcccctatttaatttatatactccctattttattcttcaaaaaaaaaaaaaaagg

SEQ ID NO: 21 - DNA, 1662 bp, Arabidopsis thaliana
gcaaagtagaaaacacaagtttctctcacacacattatctctttctctattaccaccactcattcataacagaaacccaccaaaaaataaaaagagagacttttcactctggggagagagctcaagttctaatggcgaacttggtcttatcagaatgtggtatacgacctctccccagaatctacacaacacccagatccaatttcctctccaacaacaacaaattcagaccatcactttcttcttcttcttacaaaacatcatcatctcctctgtcttttggtctgaattcacgagatgggttcacgaggaattgggcgttgaatgtgagcacaccattaacgacaccaatatttgaggagtctccattggaggaagataataaacagagattcgatccaggtgcgcctcctccgttcaatttagctgatattagagcagctatacctaagcattgttgggttaagaatccatggaagtctttgagttatgtcgtcagagacgtcgctatcgtctttgcattggctgctggagctgcttacctcaacaattggattgtttggcctctctattggctcgctcaaggaaccatgttttgggctctctttgttcttggtcatgactgtggacatggtagtttctcaaatgatccgaagttgaacagtgtggtcggtcatcttcttcattcctcaattctggtcccataccatggctggagaattagtcacagaactcaccaccagaaccatggacatgttgagaatgacgaatcttggcatcctatgtctgagaaaatctacaatactttggacaagccgactagattctttagatttacactgcctctcgtgatgcttgcataccctttctacttgtgggctcgaagtccggggaaaaagggttctcattaccatccagacagtgacttgttcctccctaaagagagaaaggatgtcctcacttctactgcttgttggactgcaatggctgctctgcttgtttgtctcaacttcacaatcggtccaattcaaatgctcaaactttatggaattccttactggataaatgtaatgtggttggactttgtgacttacctgcatcaccatggtcatgaagataagcttccttggtaccgtggcaaggagtggagttacctgagaggaggacttacaacattggatcgtgactacggattgatcaataacatccatcatgatattggaactcatgtgatacatcatcttttcccgcagatcccacattatcatctagtagaagcaacagaagcagctaaaccagtattagggaagtattacagggagcctgataagtctggaccgttgccattacatttactggaaattctagcgaaaagtataaaagaagatcattacgtgagcgacgaaggagaagttgtatactataaagcagatccaaatctctatggagaggtcaaagtaagagcagattgaaatgaagcaggcttgagattgaagttttttctatttcagaccagctgattttttgcttactgtatcaatttattgtgtcacccaccagagagttagtatctctgaatacgatcgatcagatggaaacaacaaatttgtttgcgatactgaagctatatataccatacattgcattatcttagataaaaaa

SEQ ID NO: 22 - DNA, 1525 bp, Arabidopsis thaliana
agagagtgcaaatagaacgacagagactttttcctcttttcttcttgggaagaggctccaatggcgagctcggttttatcagaatgtggttttagacctctccccagattctaccctaaacacacaacctcttttgcctctaaccctaaacccactttcaaattcaatccaccacttaaacctccttcttctcttctcaattcccgatatggattctactctaaaaccaggaactgggcattgaatgtggcaacacctttaacaactcttcagtctccatccgaggaagacacggagagattcgacccaggtgcgcctcctcccttcaatttggcggatataagagcagccatacctaagcattgttgggttaagaatccatggatgtctatgagttatgttgtcagagatgttgctatcgtctttggattggctgctgttgctgcttacttcaacaattggcttctctggcctctctactggttcgctcaaggaaccatgttctgggctctctttgtccttggccatgactgcggacatggtagcttctcgaatgatccgaggctgaacagtgtggctggtcatcttcttcattcctcaattctggtcccttaccatggctggaggattagccacagaactcaccaccagaaccatggtcatgtcgagaatgacgaatcatggcatcctttgcctgaaagcatctacaagaatttggaaaagacgactcaaatgtttaggtttacactgccttttccaatgctcgcataccctttctacttgtggaacagaagtccagggaaacaaggttctcattatcatccggacagtgacttgtttcttccaaaagagaagaaagatgttctgacatcaactgcctgttggactgcaatggctgctttgcttgtttgtctcaactttgtcatgggtccaatccagatgctcaaactatatggcatcccttattggatatttgtaatgtggttggacttcgtcacttacttgcaccaccatggacatgaagacaagctcccttggtatcgtggaaaggaatggagttacctgagaggagggctcacaacattagatcgtgactacggatggatcaataacatccaccacgatattggaactcatgtgatacatcatcttttcccgcagatcccacattatcatctagtagaagcaacagaagcagctaaaccagtactaggaaagtactacagagaaccgaaaaactctggacctctgccacttcacttactgggaagcctcataaagagtatgaaacaagaccatttcgtaagcgatacaggagatgtcgtgtactatgaggcagatccaaaactcaatggacaaagaacatgaggacatactgcagtgaaccaggcagacaagttacataaattcatcttggcccattcattatgttctttttgttttggtgtaaagccttttcgagattaaaaaagcattaatttgtagaaacctgtggtaaaactctcgatcaaatgaaataagatat

SEQ ID NO: 23 - DNA, 3487 bp, Oryza sativa
atgtcttcttcaagacctactcaatgttccagttcatccagcaggacccgccaaagctcccgggcaaggatattagcacaaacaactcttgatgctgaactcaatgctgaatatgaagaatatggcgactcctttgattactccaaattggttgaagcacagagaactactggacctgagcagcaagctcgttctgagaaggtcatagcttacttgcatcacattcagagagcaaagctaatccaaccatttggttgcttgttggcccttgatgagaagaccttcaatgttatagcgctcagcgagaatgcaccagagatgcttacaactgtcagccatgcagtgccaagtgttgatgatcccccaaagctacgcattggcaccaatgtatggtctcttttcactgacccaggtgccacagcactgcagaaggcactgggatttgctgatgtttccttgctgaaccctatcctagttcaatgcaagacctcaggcaagcctttctatgccattgttcatcgggcaactggttgtttggtggtagactttgagcctgtgaaacctacagaatttccagcaactgccgctggggctttgcaatcttacaaacttgctgccaaggcaatctctaagatccagtcactgccaggtggaagcatggaggtgctatgcaatacggtggtcaaggaactctttgacctcacaggatatgatagagttatggcttataagttccatgaagatgaccatggtgaagtctttgctgagatcacaaagcctggtcttgaaccttatcttggcctgcattatccagctactgatatccctcaggcagccaggtttcttttcatgaagaacaaagtccggatgatttgtgattgccgtgcaagatctatcaagattatcgaagatgagtcgctccacttggatattagcttatgtggttcaacactgagggcaccacacagttgtcatcttcagtatatggagaacatgaactcgattgcatcccttgtcatggctgttgtggttaatgagaatgaggatgatgatgaagttggggctgatcaacctgcacaacagcagaagaggaagaaactatggggactccttgtttgccaccatgagagccccagatatgttcctttcccattgcggtatgcctgtgagttcttagcacaagtgtttgctgtccatgttaacaaggagtttgaattagagaggcaagtacgcgagaaaagcatattgaggatgcaaacaatgctctctgacatgcttctcagggaatcctctcctctgagtatagtatcagggactcccaacatcatggaccttgtgaaatgtgatggtgctgctcttttgtatgggggaaaagtgtggcggctacagaatgctccaactgagtctcagatacgtgatattgccttctggctgtcagatgtccacagggattccactggcctgagtactgatagcctacatgatgctggatatccaggagctgctgctcttggtgatatgatttgtggaatggcagtagctaaaataaattccaaggatatcctgttctggttcaggtcacatacagctgctgaaatcagatggggaggtgcaaaacatgatccatcagacaaggatgacagcagaagaatgcaccctaggctgtccttcaaggcattccttgaggttgtcaagatgaagagcttgccttggaatgactatgagatggatgctattcactcattacaacttatacttagagggacactgaatgatgacatcaagccaacaagggccgctagtttagataatcaggttggtgatctcaagcttgatgggcttgctgaattgcaggcagttacaagtgaaatggttcgtctcatggaaacagcaactgtcccaatcttggctgtagatagcaatggattggtcaatggatggaatcagaaggttgctgagttgacagggttgagagtagatgaggctattggaagacacatacttaccgttgtagaggaatcttctgtaccagttgtccagaggatgctgtatttagctttgcaaggtttgtcactttgctttcagtcgatttttttgtggtccccagcttagtctgtgaatgtctcctttttttctatgacaacctagtgcctccttgttttcaggcaaagaagagaaggaagtgaaatttgaggtgaaaactcatggctccaagagagatgatggccctgttatcttggttgtgaatgcctgtgccagccgggaccttcacgaccatgttgttggtgtgtgctttgttgcacaagatatgactgttcataagttggtcatggacaaatttactcgggttgagggagactacaaagcaattattcacaatccaagcccgcttattcctcccatatttggtgctgacgaatttggatggtgctctgagtggaatgctgccatgacgaaattgaccgggtggcatagagatgaggtgatcaataagatgcttcttggtgaggtgtttgatagcaccaacgcctcctgtcttgtgaagaataaagatgcatttgtaagtctctgcattcttatcaacagtgcattagctggtgatgaaacagaaaaggctccattcagcttcttcgaccggaacgggaagtatatcgagtgccttctttctgttaacagaaaagtaaatgcagatggtgtcatcactggagtattttgtttcattcaagttcctagtcatgagctgcaacatgcactacatgtgcagcaagcctcacagcagaatgcactaacaaagttgaaagcttactcctacatgagacatgcaatcaacaaccctctctcaggtatgctttactctaggaaagcactgaagaacacaggtctgaatgaagagcagatgaaggaggtcaatgttgcagatagttgtcaccgccagctgaataaaatactttctgacttggatcaagatagcgtcatgaacaagtctagttgcttggatttggagatggttgagtttgtattgcaagatgtgtttgtggctgctgtaagtcaagtactcataacttgccagggaaaagggattagagtctcttgcaacctaccggagagatatatgaagcaaacagtctacggggatggtgttcgactacagcagattctctctgacttcctattcgtctcagtgaagttctctcctgttgggggttctgttgagatctcttgtagcctgaccaagaacagcattggggaaaaccttcatctcatagacctagaacttaggatcaagcaccagggcaaaggagtcccagcagatctgctgtcacaaatgtacgaggatgacaataaggagcagtcggatgaaggcatgagtcttgcggtttctagaaacctgctgaggctcatgaatggcgatgtccgacatatgagggaagctggcatgtcaaccttcatcctcagcgtcgaacttgcttctgctccagcaaaataa

SEQ ID NO: 24 - DNA, 3905 bp, Sorghum bicolor
cgcatccttccgcgccgggcatgggcaccgcgtcggcgcgcgcccctacccagtcgtcgacttgatgctgctcactcgcactcgtcgcagcgccccacgccccgctatttatgcgtacttgcttgccgggagagtcgctggaggtgggcgtcctcctcccgctccagagctcgctgcttcgctccacccacccttaagcaggagtgatatctggtggtttttcaaaagaagacaaaaatgtcttcctcgaggcctgcccactcttccagttcatccagtaggactcgccagagctcccaggcaaggatattagcacaaacaacccttgatgctgaactcaatgcagagtatgaagaatctggtgattcctttgattactccaagttggttgaagcacagcggagcactccatctgagcagcaagggcgatcaggaaaggtcatagcctacttgcagcatattcaaagaggaaagctaatccaaccatttggttgcttgttggcccttgacgagaagagcttcagggtcattgcattcagtgagaatgcacctgaaatgctcacaacggtcagccatgctgtgccaaacgttgatgatcccccaaagctaggaattggtaccaatgtgcgctcccttttcactgaccctggtgctacagcactgcagaaggcactaggatttgctgatgtttctttgctgaatcctatcctagttcaatgcaagacctcaggcaagccattctatgccattgttcatagggcaactggttgtctggtggttgattttgagcctgtgaagcctacagaatttcctgccactgctgctggggctttgcagtcttacaagcttgctgccaaggcaatctccaagatccagtcactgccaggtggaagcatggaggccttatgcaataccgtggttaaggaagtctttgagcttacaggttatgacagggttatggcttacaagttccatgaagatgagcatggggaggtctttgctgagatcaccaaacctggtattgaaccttatctaggcctgcactatccagccactgatatccctcaagctgccaggtttctcttcatgaagaacaaagtcagaatgatctgtgattgccgtgcaaaatctgtgaagattattgaagatgaggcactctccattgatattagcttgtgtggttcaactcttagagcaccacatagctgtcaccttcagtatatggagaacatgaactcgattgcatcccttgtcatggctgttgtggttaatgaaaatgaagaggatgatgaacctgggcccgaacaaccaccacaacagcagaagaagaagagactgtggggtctcattgtttgccaccatgaaagccccagatatgtcccgtttccactgcggtatgcctgtgaattcttggcccaagtgtttgctgtccatgtaaacaaggagtttgaattggagaagcagatacgagagaaaagcattctgcgaatgcaaacaatgctctctgacatgctgttcaaggaagcatctcccttgagtatcgtatctgggagtccaaatatcatggacctagttaagtgtgatggtgctgctcttttgtatggggacaaagtctggcggcttcaaacggctccaaccgagtctcagatacgtgatattgccttctggctttcagaagttcatggggattccactggcttgagtactgatagcctccaggatgctggatatccaggagctgcttcccttggtgacatgatttgtggaatggcagtggctaagatcacgtccaaggacattcttttctggttcaggtcacatacagctgctgaaatcaaatggggaggtgcaaagcatgatccatctgataaggatgacaacagaaggatgcaccctaggttgtcctttaaggctttccttgaggttgtcaagatgaagagtttgccatggagcgactacgagatggatgctattcactcattgcaacttattcttagaggtacactgaatgatgccttgaagccggtccaggcatctggtttagataaccagattggtgatctcaaacttgatgggcttgctgaattgcaagcagtgacaagtgaaatggttcgcctcatggaaacagcaactgttccgatcttggcagtagatggcaatggattggtcaatggatggaatcaaaaggtagcagaattgtcagggttgagagttgatgaagctataggtagacacatacttacacttgtggaggattcttctgtatcaattgttcagaggatgctatatttagctctgcagggtttgtcactttgctttcagtcgatttttttgtggtccccagcttagtctgtgaatgtctcctttttttctatgacaacctagtgcctccttgttttcaggcaaagaagagaaggaagttcgatttgagttgaaaacacatggctccaagagggatgatggccctgttatcttggttgtaaatgcttgtgccagtcgtgaccttcatgaccatgttgttggggtgtgctttgtagcccaggatatgactgttcataagttggtcatggacaaatttactcgggttgagggggactacaaggcaatcattcacaacccaaacccgctcattcctcctatatttggtgctgaccaatttggatggtgctctgagtggaatgtagccatgaccaagcttactgggtggcacagagatgaagtgatagataagatgctccttggtgaggtttttgacagtagcaatgcttcctgccttttgaagagcaaagatgattttgtacgtctttgcattatcatcaacagtgcattagccggtgaagaggcagaaaatgctccattcggtttgtttgaccgcaatgggaaatatattgaatgccttctgtcagtgaacagaaaagtaaatgcagatggtgttgtcactggagtgttctgtttcattcatgttcctagtgatgacctgcagcatgcgctacatgtgcagcaagcctctgagcagacagcacaaagaaggttgaaggctttctcgtacatgcgacatgccatcaacaaacctctctcaggtatgctttattctagggaaacactcaagagcacaggtctgaatgaagagcagatgaggcaggtccatgttgcagatagttgtcatcgccagctaaacaagatacttgccgacttagatcaagataacattactgacaagtcaagttgcttggatttggatatggctgaatttgtgttggaagatgtggtggtgtctgctgtaagtcaagtactgataggttgccagggtaaaggtatcagagttgcttgcaacctgccagagagattcatgaagcaaaaagtttacggggatggtatccgactccaacagatcctctccgacttcttatttgtttcggtgaagttctctcctgttggtggctctgttgatatctcttccaaactgactaagaacagcattggggaaaaccttcatctcatagacttcgaacttaggatcaagcaccaaggagcaggagtcccagcagaaatattgtcacaaatgtatgaggaggacaataaagagccgtcagaggagggtttgagccttcttgtttctagaaaccttctgaggctcatgaatggtaacattcgccacatcagggaagctggcatgtcaaccttcatcctcactgctgaacttgctgctgctccttcagcagttggacaatgaagccatcacatgctctctcagagttcattctgaaagccacggtggtttgcggagaatgggaaatgctgcagcgcgttgcatcaccgaatgcataagaaataagattgacttgtatggttatttgttagggggggaaagttgtactggcatagacgcatagtaagggcggccg

SEQ ID NO: 25 - DNA, 4195 bp, Oryza sativa
gtgaggtgaggcgaggaaaaaatcggacgcacccgcctaatccggaccaatccacgcatcggcgccatggcctcgggtagccgcgccacgcccacgcgctccccctcctccgcgcggcccgcggcgccgcggcaccagcaccaccactcgcagtcctcgggcgggagcacgtcccgcgcgggagggggtggcgggggcgggggagggggagggggcggcgcggccgccgcggagtcggtgtccaaggccgtggcgcagtacaccctggacgcgcgcctccacgccgtgttcgagcagtcgggcgcgtcgggccgcagcttcgactacacgcagtcgctgcgtgcgtcccccaccccgtcctccgagcagcagatcgccgcctacctctcccgcatccagcgcggcgggcacatacagcccttcggctgcacgctcgccgtcgccgacgactcctccttccgcctcctcgcctactccgagaacaccgccgacctgctcgacctgtcgccccaccactccgtcccctcgctcgactcctccgcggtgcctccccccgtctcgctcggcgcagacgcgcgcctccttttcgctccctcgtccgccgtcctcctcgagcgcgccttcgccgcgcgcgagatctcgctgctcaacccgctctggatccactccagggtctcctctaaccctttctacgccatcctccaccgcatcgatgtcggcgtcgtcatcgacctcgagcccgcccgcaccgaggatcctgcactctccatcgctggcgcagtccagtctcagaagctcgtggtccgtgccatctcccgcctccaggcccttcccggcggtgacgtcaagctcctttgcgacaccgttgttgagcatgttagagagctcacaggttatgaccgcgttatggtgtacaggttccatgaggatgagcatggagaagtcgttgccgagagccggcgcagtaaccttgagccctacatcgggttgcattatcctgctacagatatcccacaggcatcacgcttcctgttccggcagaaccgtgtgcggatgattgctgattgccatgctgcgccggtgagggtcatccaggatcctgcactaacacagccgctgtgcttggttgggtccacgctgcgttcgccgcatggttgccatggccagtatatggcgaacatgggttccattgcatctcttgttatggcagtgatcattagtagtggtggggatgatgatcataacattgcacggggcagcatcccgtcggcgatgaagttgtgggggttggtagtatgccaccacacatctccacggtgcatccctttcccactacggtatgcatgcgagttcctcatgcaagcctttgggttgcagctcaacatggagttgcagcttgcacaccaactgtcagagaaacacattctgcggaccggaacactgctgtgtgatatgctactccgggattcaccaactggcattgtcacacaaagccccagcatcatggaccttgtgaagtgtgatggtgctgctctgtattaccatgggaagtactaccctcttggtgtcactcccacagaagttcagattaaggacatcatcgagtggttgactatgtgccatggagactccacagggctcagcacagatagccttgctgatgcaggctactctggtgctgctgacctaggagatgcagtgagcggaatggcggtagcatatatcacgccaagtgattatttgttttggttccggtcacacacagctaaggagataaagtggggtggtgcaaagcatcatccagaggataaggatgatggacaacgaatgcatccacgatcatcgttcaaggcatttcttgaagttgtgaagagtaggagcttaccatgggagaatgcagagatggatgcaatacattccttgcagctcatattgcgggactctttcagagattctgcagagggcacaagtaactcaaaagccatagtgaatggccaggttcagcttggggagctagaattacggggaatagatgagcttagctcggtagcgagggagatggttcggttgatcgagacagcaacagtacccatctttgcagtagatactgatggatgtataaatggttggaatgcaaaggttgctgagctgacaggcctctctgttgaggaagcaatgggcaaatcattggtaaatgatctcatcttcaaggaatctgaggaaacagtaaacaagctactctcacgagctttaagaggtttgtcactttgctttcagtcgatttttttgtggtccccagcttagtctgtgaatgtctcctttttttctatgacaacctagtgcctccttgttttcaggtgatgaagacaaaaatgtagagataaagttgaagacattcgggccagaacaatctaaaggaccaatattcgttattgtgaatgcttgttctacgagggattacactaaaaatattgttggtgtttgttttgttggccaagatgtcacaggacaaaaggtggtcatggataaatttatcaacatacaaggggattacaaggctatcgtacacaaccctaatcctctcatacccccaatatttgcttcagatgagaatacttgttgttcggagtggaacacagcaatggaaaaactcacaggatggtcaagaggggaagttgttggtaagcttctggtcggtgaggtctttggtaattgttgtcgactcaagggcccagatgcattaacgaaattcatgattgtcctacacaacgctataggaggacaggattgtgaaaagttccccttttcattttttgacaagaatgggaaatacgtgcaggccttattgactgcaaacacgaggagcagaatggatggtgaggccataggagccttctgtttcttgcagattgcaagtcctgaattacagcaagcctttgagattcagagacaccatgaaaagaagtgttatgcaaggatgaaggaattggcttacatttaccaggaaataaagaatcctctcaacggtatccgatttacaaactcgttattggagatgactgatctaaaggatgaccagaggcagtttcttgaaaccagcactgcttgtgagaaacagatgtccaaaattgttaaggatgctagcctccaaagtattgaggatggctctttggtgcttgagaaaggtgaattttcactaggtagtgttatgaatgctgttgtcagccaagtgatgatacagttgagagaaagagatttacaacttattcgagatatccctgatgaaattaaagaagcctcagcatatggtgaccaatatagaattcaacaagttttatgtgactttttgctaagcatggtgaggtttgctccagctgaaaatggctgggtggagatacaggtcagaccaaatataaaacaaaattctgatggaacagacacaatgcttttccccttcaggtttgcctgtcctggcgaaggccttcccccagagattgttcaagacatgtttagtaactcccgctggacaacccaagagggtattggcctaagcatatgcaggaagatcctaaaattgatgggtggcgaggtccaatatataagggagtcggagcggagtttcttccatatcgtacttgagctgccccagcctcagcaagcagcaagtagggggacaagctgatatggtgtatgctcgtcgctaacctcgcataactattcggtcaaccaggtgacctgggatcttctgatggagaacccagtttagtttatgagagttccagaaaccaacatttcgtccactctgatgaagcacatctgaactttggaacggcatcggtgattctcggtgtcgaggtggtccctccagtctcctgattcctggcatggcgactgtaagctcagctttggacgatgttgttctattagagttctatggcggcaagcaatgcacactgacggtcatgtaactcgtagcataggcccactatcacttggttgaagtacatatatgttctaaaagctgccatgtatataacatcggttatatatgtactacgtgcataaaggagagctgtgcagctcccagggtggtattttgtagggcttcccaagcctatgacatcttattatatcatcttaacataaaagcatttggtctccttggatgttggcaaaaaaaaaaaaaaaaatatat

SEQ ID NO: 26 - DNA, 3637 bp, Sorghum bicolor
atggcgtcgggcagccgcgccacgcccacgcgctccccctcctccgcgcgacccgaggcgccgcgtcacgcgcaccaccaccaccaccaccactcgcagtcgtcgggcgggagcacgtcccgcgcgggcgggggaggtggaggaggaggaggtggcgggggcaccgcggccacggctacggccacggccacggagtcggtctccaaggccgtggcgcagtacaccctagacgcgcggctccacgcggtgttcgagcaatcgggcgcgtcgggccgcagcttcgactactcccagtcgctgcgcgcgccgcccacgccgtcctccgagcagcagatcgccgcctacctctcccgcatccagcgcggcggccacatccagcccttcggctgcacgctcgccgtcgccgacgactcctccttccgcctcctcgccttctccgagaacgccgccgacctgctcgacctgtcgccgcaccactccgttccctcgctcgattccgcggcgccgccccccgtttccctgggtgccgacgcgcgcctcctcttctccccctcgtccgcggtcctcctggagcgcgccttcgccgcgcgcgagatctcgctgctcaacccgctatggatccactccagggtctcttccaagccgttctacgccatcctccaccgcatcgacgtcggcgtcgtcatcgacctcgagcccgcccgcaccgaggaccccgctctctccatcgccggcgcagtccagtcccagaaactcgcggtccgtgccatctcccgcctccaggcgctacctggcggggacatcaagctcctttgcgacacagtcgtggagcatgttcgcgagctcacgggttacgaccgtgtcatggtgtacaggttccatgaagacgagcatggggaagttgtcgccgagagccggcgcgataaccttgagccttacctcggattgcattatcccgccacagatatcccccaggcatcgcgcttcctgttccggcagaaccgcgtgcggatgattgctgattgccatgccaccccggtgagagtcatacaagatcctgggatgtcgcagccactgtgtttggtaggctccacgcttcgtgctccacacgggtgccatgcgcagtacatggcgaacatggggtcaattgcatcacttgttatggcagtcatcattagcagtggtggtgatgacgagcaaacaggtcggggaggcatctcctcggcaatgaagttgtgggggttagtggtgtgtcaccatacgtcaccacggtgtatcccttttccattgaggtatgcttgcgagtttctcatgcaggcatttgggctgcagctcaacatggaattgcagcttgcgcatcagctgtcagagaagcacattttgcgaactcagacgctattgtgtgacatgctattgcgagattcaccaactggcatcgtcacgcagagccccagcatcatggaccttgtgaagtgtgatggggctgcactgtattatcatgggaagtactatccattgggtgtcactcccactgagtctcagattaaggatatcattgagtggttgacggtgtgtcatggggactcaacagggctcagcacagacagccttgctgatgcaggctaccttggtgctgctgcattaggggatgctgtgtgtggaatggcggtggcttatattacaccgagtgattacttgttttggtttcggtcacacacagctaaagagatcaaatggggtggcgcaaagcatcaccctgaggataaggatgatggtcagaggatgcacccacggtcatcattcaaggcatttcttgaagtggttaaaagcagaagcctaccatgggagaatgcagaaatggacgcgatacattccttgcaactcatattgcgtgactccttcagagatgctgcagagggcactagcaactcaaaagccattgtcaatggacaagttcagcttggggagctagaattgcgggggataaatgagcttagctctgtagcaagagagatggttcggttgatagagacagcaacagtacccatatttgcagtagatactgatggatgtataaatggttggaatgcgaaaattgctgagttgacaggcctttcagttgaggaggcaatgggcaaatctctggtaaacgatcttatcttcaaggaatctgaggagatagtcgaaaagctactctcacgagctttaagaggtttgtcactttgctttcagtcgatttttttgtggtccccagcttagtctgtgaatgtctcctttttttctatgacaacctagtgcctccttgttttcaggtgaggaagacaaaaatgtggagataaagttgaagacatttgggtcagagcaatctaacggagcaatatttgttattgtcaatgcttgttccagtagagattacacacaaaatattgttggtgtctgttttgttggacaagatgtcacaggacaaaaggtggtcatggataaatttatcaacatacaaggggactataaagctattgtacacaatcctaatcctctgatacccccaatttttgcatcagatgagaacacttcttgttcagaatggaacacagccatggaaaaacttacaggatggtcgagaggtgaagttgttggtaaatttcttattggagaggtgtttggaagtttttgtcgactcaagggcccagatgcattgacaaagttcatggttgtcattcacaatgctataggagggcaggattatgagaagttccctttttcatttttcgacaagaatggaaagtatgtgcaggccttattgaccgccaacacaaggagcaaaatggatggtaaatccattggcgccttttgttttttgcagattgcaagcgctgaaatacagcaagcctttgagattcagagacaacaagaaaagaagtgttatgcaaggatgaaagaattggcctatatttgccaggagataaagaatcctcttagtggcatccgatttaccaactctctattgcaaatgactgatttaaatgatgatcagaggcagttccttgaaacttgctctgcttgtgaggaacagatgtccaagattgttaaggacgccactctccaaagtattgaggacggctctttggtacttgagaaaagtgagttttcttttggagacgttatgaatgctgttgtcagccaagcaatgttattgttgagggagagggatttacaacttattcgggatatccctgatgaaatcaaggatgcatcagcatatggtgatcaatttagaattcaacaagttttggctgacttcttgctaagcatggtgcgatctgctccgtccgagaatggctgggtagaaatacaagtcagaccaaatgtaaaacagaattctgacggaacagatacagagcttttcatcttcaggtttacctaccctggtgagggccttcccgctgacattgtccaggatatgttcagcaattcccagtggtcaacccaagaaggcgtaggactaagcacatgcaggaagatcctcaaattgatgggcggtgaggtccaatacatcagggagtcagagcggagtttcttcctcatcgtcctcgagctgccccagcctcgtccagcagctgatagagaaatcagttga

SEQ ID NO: 27 - DNA, 4080 bp, Oryza sativa
ggagatattatcttgggctgccttgccgtgcagtgtggctcgctgtcccactcaggtgcggcgctattccaatccgtgcttatccccggcagaatccaatccccctcgcggcttttctccaaaagcgctccgccttctcgcctatttcgctcgctgccgcggccatgattccccgctgatacctccgcgcgcccatttggttcctcctcgccgaatcccccttcgcagccggtggttctagttgaggaggaggaggaggggatttggttgggggcgagggggaggagggggttgtggagatgtcgtcgtcgcggtcgaacaaccgggcgacgtgctcgcggagcagctcggcgcggtccaagcacagcgcgcgggtggtggcgcagacgccgatggacgcgcagctgcacgcggagttcgaggggtcgcagcgccacttcgactactcgtcgtcggtgggcgcggccaatcggtcgggcgccaccaccagcaacgtctccgcctacctccagaacatgcagcgcggccgcttcgtccagcccttcgggtgcctgctcgccgtccacccggagacgttcgcgctgctcgcctacagcgagaacgccgccgagatgctcgacctcacgccgcacgccgtgcccaccattgaccagcgcgaggcgctcgccgtcggcaccgacgtgcgcacgctcttccgctcgcacagcttcgtcgcgctgcagaaggccgccaccttcggggacgtcaacctgctcaaccccatcctcgtccacgccaggacctccgggaagcccttctacgccatcatgcaccgcatcgacgtcggcctcgtcatcgacctcgagccggtcaaccccgtcgacctgcccgtcaccgccacaggcgcgatcaagtcgtacaagctcgctgccagggccatcgccaggctgcagtccctgcccagtgggaacctctccctgctgtgcgacgtgctggtccgcgaggtgagcgagctcactggctatgacagggtgatggcgtacaagttccatgaggatgagcatggtgaggtgattgctgagtgcaagagatctgatttggagccgtatcttggcctgcactacccagccactgacattcctcaggcatccaggtttttgttcatgaagaacaaagtgcggatgatatgcgattgctccgcaacgcctgtgaagatcatccaagatgacagcctaacacaacctataagcatatgcggatctactctcagggcaccccatggttgccatgcacagtacatggcaagcatgggctccgttgcatcacttgtgatgtcggtcactataaatgaggatgaggatgatgatggagacactgggagtgaccagcagccgaaagggaggaagctgtgggggttgatggtctgccatcacacaagcccgaggtttgtccctttcccgcttaggtatgcttgcgagtttctcttgcaagtatttgggatacagatcaacaaggaggtggaactggctgctcaggcaaaggagaggcacatcctccgcacgcagactcttctctgtgatatgctccttcgagatgctcctgttgggatatttacccaatcacctaacgtaatggatctagtgaaatgtgatggtgcagcattgtattaccaaaaccagctttgggtgctaggatcaacgccctctgaagcagagataaaaaacattgttgcttggttgcaggagtaccatgacggttctactggattgagtaccgacagcttagttgaagcaggttatcctggcgctgctgcacttggtgatgttgtgtgtggcatggcagctataaagatctcttcaaaagatttcatcttctggttccgatcccacacggcaaaggagattaaatggggaggagctaagcatgaaccaattgatgcagatgacaatggtaggaagatgcatccacgatcttcattcaaagccttcttggaggtagttaaatggaggagtgttccttgggaggatgttgaaatggatgctatccattctctgcagctaatattacgtggctccttgcaagatgaagatgccaacaagaacaacaatgcaaagtccattgttacagctccatctgatgatatgaagaagattcaggggctccttgaactgagaaccgttacaaacgagatggtgcgcctaattgagacagcaactgcgcctatcttggctgttgacatcactgggagcataaacggatggaataataaggctgcagaactcactggattacctgtcatggaagccatagggaagcctctggtcgatctcgtcatcgatgattctgttgaagtggttaagcaaattttaaattcagctttacaaggtttgtcactttgctttcagtcgatttttttgtggtccccagcttagtctgtgaatgtctcctttttttctatgacaacctagtgcctccttgttttcaggaatagaagagcaaaatctgcaaattaagcttaaaacatttaatcaccaggaaaataatggacctgtaattttgatggttaacgcctgctgcagtcgtgacctttcagagaaagttgtgggggtttgctttgtagcacaagatatgacagggcagaacattatcatggataagtacactcggatacaaggggactatgttgctatagtaaagaacccttcggagctcatcccccctatatttatgatcaatgatcttggttcctgcttagagtggaatgaagctatgcaaaaaattactggtataaagagggaagatgcagtagataaattgctaatcggggaagttttcacccaccatgagtatggctgtagggtgaaagaccatggtactctgaccaaacttagcatattaatgaacacagtgatatctggtcaagatcctgagaagcttctttttggtttcttcaacaccgatggcaagtacatagagtcactgatgacagcaaccaagaggacagatgctgagggtaagatcactggcgccctttgctttcttcatgtggccagcccagagcttcaacatgctctgcaggtgcagaagatgtctgaacaagctgctatgaacagctttaaggaactgacatacatacgtcaagaattaaggaacccactcaatggcatgcaatttactcgaaatttgttggaaccttctgacttgactgaggagcagaggaaacttctagcatcaaatgtcctctgtcaagaacagctgaaaaagattttacatgacactgatctagaaagcattgaacagtgctacacggagatgagcaccgtagatttcaacctggaggaagccctgaatacagtcctaatgcaagccatgccccagagcaaggagaaacaaatttccattgaccgtgattggcctgcagaagtatcatgtatgcacctctgcggggacaatttaaggcttcaacaagtcctagcagacttcctggcatgcatgcttcaatttacacagccagctgaagggcctattgtgctccaagtcatccccaggatggaaaatattggatctggaatgcagattgctcatctagagttcaggcttgtccatccagctccgggcgttccagaggctctgatacaagagatgttccgccacagcccaggtgcatctcgagagggccttggcctttacataagccagaagctcgtgaagacgatgagcggcacggttcagtacctccgggaatcagagagctcgtcgttcatcgtcctggtagagttcccggtcgcccagctcagcaccaagaggtgcaaggcttccacgagtaaattctgaacttagggctatggccaaaattcttgtgggtgctgtattgttgttgttgctgctgctgctattagcagatcaggcagtctgaggagtacgttagctgaagatgtatcagatgtgtgtagcttgtgaaagtgaaggtagtggttggatagatgtatttgtcacgttgatgtctggagagctagtgagcgagctactaggtgttagtgtaatttaaccggcaaatgtatgaacgaattatgaataaaatcttcacttgtgttgtcatga

SEQ ID NO: 28 - DNA, 3855 bp, Sorghum bicolor
ctgccccgcgcaagccggctcgctgtcccactcgcgcgccacgcctgacgcctcggacccggaggtgtattccctcttcttcccccgtgcttatccgcggcggaatccaatcccctccctcatcacgtccttctcccaggcaaagcccctctttttgggcgtatgcccccgctggcgcgcctatgattcccgccgattcatccgcccgctcggtccagcaacccttgctgctgcagtgctgcggctagttcggtggcggggaaggaggaggaggagggatcttgcagtggggcgaagcggagatgtcgtcgccgttgaacaaccgggggacgtgctcccggagcagctctgcgcggtccaggcacagcgcgcgggtggtggcgcagacgcccgtggacgcgcagctgcacgccgagttcgagagctcccagcgcaacttcgactactcctcgtcggtgagcgccgccatccgaccgtcggtcagcaccagcaccgtctccacctaccaccagaccatgcagcggggcctctacatccagcccttcggctgcctgctcgccgtccacccggacaccttcacgttgctcgcctacagcgagaacgcgccggagatgctcgacctcacgccacacgcggtccccaccatcgaccagcgggacgcgctcgccgtcggcgccgacgtgcgcacgctcttccgctcgcagagctccgtcgcgctgcacaaggccgccaccttcggggaggtcaacctgctcaaccccatcctcgtgcatgccaggacgtcggggaagcccttctacgccatattgcaccggatcgacgtcggccttgtcatcgaccttgagccggtcaacccagttgacgtgccagtcactgctgcgggtgcgcttaagtcgtacaagctcgccgccaaggccatctccaggctgcagtcgctgcccagcgggaacctgtcgctgctgtgcgatgtgcttgtccgtgaggtgagcgagctcacgggctatgaccgggtcatggcgtacaagttccatgaggatgagcatggtgaggtcatttccgagtgcaggaggtctgatctggagccgtatcttggcctgcactacccagccaccgacatcccgcaggcgtccaggttcttgtttatgaagaacaaagtgaggatgatatgtgattgctctgccactctggtgaagatcattcaggatgatagcctagcacagcctctcagcctctgtggttccaccctcagggcttcccatggttgccatgcacagtacatggcaaacatgggttctgttgcatcgcttgtgatgtcagtgactataagcaatgatgaggaggaagatgttgataccgggagtgaccaacaaccgaaaggcaggaaactgtgggggctggtcgtctgccatcatacaagcccgaggttcgtccctttcccactaaggtacgcttgcgagtttctcttgcaagtatttggcatacagctaaacaaggaggtggaattggctgctcaggcaaaggagaggcacatcctcagaacgcaaacccttctttgggatatgctcctgcgggatgctcctgttgggatatttacccagtcacctaatgtgatggatctagtaaagtgcgatggagttgcattgtattaccagaaccagcttttgttgctcggatcaacaccctccgagtcagagataaagagcattgccacatggctgcaggagaaccatgatggttcaactgggctgagtactgacagcttagtggaagcaggttatcctggtgctgctgcacttcgtgaagttgtgtgtggcatggcggctataaagatctcttccaaagattttatcttctggttccgatcgcacacaacaaaggagatcaagtggggtggggctaagcatgaaccggttgacgcagatgacaatggcaggaagatgcatccacgatcttcattcaaggccttcttggaggtggttaaatggagaagtgttccctgggaggatgttgaaatggatgctattcattctttgcagttaatattacgtggctccctgcaagatgaagatgccaacagaaacaatgtaaggtccattgtaaaagctccacctgatgatacgaagaagatacaggggctacttgaactaagaacagttacaaacgagatggtccgcttaattgagacagcaaccgcccctgtcttggctgtcgacattgccggtaacataaatggatggaacaataaagctgcagaactaacagggttacctgtaatggaagccatagggaggcctctgatagatcttgttgttgttgattctattgaagtggttaagcggattttggactcagctttacaaggtttgtcactttgctttcagtcgatttttttgtggtccccagcttagtctgtgaatgtctcctttttttctatgacaacctagtgcctccttgttttcaggaattgaagagcaaaatctggaaatcaagcttaaagcattccatgaacaggaatgcaatggtccaataatcttgatggttaactcctgctgtagtcgggacctttcagagaaagtcattggagtttgctttgtaggacaagatttgaccacgcagaagatgattatggataagtatactaggatacaaggagactatgttgccatagtaaagaaccccagtgagctcatccctcccatatttatgatcaatgatcttggttcctgcttagagtggaataaagctatgcagaagattaccggtatacagagggaagatgtgatagataagttgttaattggggaggtcttcacccttcatgattatggctgtagggtgaaagatcatgctactctaacgaaacttagcatactgatgaatgcagtgatttctggtcaggatcctgagaagctcctttttggtttcttcgacacagatgggaagtatattgaatccttgctgacagtgaacaagagaataaatgctgagggtaagatcactggcgctatttgctttctgcatgtggccagtccagagcttcagcatgctctccaggtgcagaaaatgtctgaacaagctgccacaaacagttttaaggaattaacttacattcatcaagaattaaggaacccactcaatggcatgcaatttacttgcaacttattggagccttccgaattgacagaggagcagaggaaacttctttcatctaatattctctgtcaggaccagctgaaaaagattttacatgacactgatcttgaaagcattgaacagtgctatatggagatgaacacagtagagttcaaccttgaggaagctcttaatacggtcctaatgcaaggcattcctttgggcaaggaaaagcgaatttctattgaacgtgattggccggtggaaatatcacgcatgtacctttacggggacaatttaaggcttcagcaggtcctagcagactatctggcatgcgcccttcaattcacacaaccagctgaaggacctatcgtgctccaggtcattcccaagaaggaaaacattgggtctggcatgcagattgctcatttggagttcaggattgtccatccagctccaggcgtccccgaggccctgatacaggagatgttccggcacaacccagaggtgtccagggagggcctcggcctgtacatatgccagaagctggtgaaaacgatgagtggcacggtacagtacctacgagaagccgatacctcatcgttcatcatcctgatagagttcccagtcgcccagctcagcagcaagcggtccaagccttcgacgagtaaattctgacactcatgctcctggaactgcagtgagagttcgggcggccgcgaa

SEQ ID NO: 29 - DNA, 953 bp, Oryza sativa
ttctctccccctgttcacaccacgcctcactcccatggcgaccgaggaggacgcgtcgaccatggcggcggccgaggcggaccccaagcccgccgccaccccgtcttacccggagatgatactggcggcgatcgaggcgctggacgacaggaacgggtcgaacaagacggcgatctcgcagcacatcgaggggaagtacgaggggctcctcccccccgcgcacccgtcgctcctcacagcgcacctcgcccgcatgaagcagaccggcgagctcgccttctccaagaacaactacttccgcggcgacgacccgtccctcccgcccaagcgcggccgcggcaggccgcccaagcccaaggacgccgccgccgccgccgctgcaccggcgcccgcgcccgcggcgccggcggcctcctcgccgcgcccccgtggccgcccgcctaagcccaaggaccccctcgccgaggcggtcgcgaaggccaccagtggcatgccccgcgcgcgcggccgcccgcccaagaaggccaaggtcgaacaggaagaccccattggcgctcccgccgcagcttcggctcccgccgcggcggctgaggccgcgccgcctgtcaagcgcggccgtgggcgcccgcccaaggtgagacccgccgcgccggtcggggagccagccgctgcttgattagctccgattctccgcatcgccgcgatggcgacgatggtaagctcctttaggttgtaacgtagtcttcagattatgtctcgtactgattggaggcgcggctcgggttgctgcttattgtaagttaatcggatggtgggaggtttaggtgtgctggatggatcatccgttgctgagagttgtgattgaattcgtgttatcgcgtgctgattattatggtaatgttggtgactttcgtgtcgtttgtgttaattctagattggtggctgcatttagt

SEQ ID NO: 30 - DNA, 2957 bp, Oryza sativa
agctggtgggcgttcagggcggagaagtagaggcggcggtgccgtggggcggcgcccatgcagcagcaccagggtggcgggtcccagtacggggccgtgccgccggacatggggccgttctcgccgacgcatcatgcttcggcgccggcccccctgccgctgagcacggccaccgccgcggcgttgtctcagccaccgccgccgcagcagcagcagcagcaaccgaggacgagctacgacgagctggccgccgcgaccagcgccggcgcgggcggcttccccgacgacgacatgctgggcgacgccggcggcagcggcggcggcggtgggtcgggagcggccggcaaccggtggccgcgggaggagactctagccctcatcaggatccggtcggagatggacgccaccttccgcgacgccaccctcaagggtcccctctgggaggaggtctccaggaagctcgcggagttgggctacaagagaagcgccaagaagtgcaaggagaagtttgagaacgtccacaagtactacaagcgcaccaaggaagggcgcgccgggaggcaggacggcaagagctaccgcttcttcactgagctggaggcgttgcatgccgctgcgccgcagacgccccagccgcagcagcagcagcagcagcagttgccgccggttacaagcagcgcacccgcgatgcacgccttcgcgccgccggttcccgcgccaccgccgatgagcgcaatgccaccgccgccggggccgatccagccggccccgatatcttctgcggctcccgcggtgcccctggagctgccgccgcagccgcccatcaacctgcaaggcttaagcttctcgtccatgtcggggtccgagtcggacgatgagtctgaagacgacgagatgacggcggagaccggcggcagccaggaccgcctcggcaagcgcaagcaggccccggcggcaaaaggctggcgactttcttcgaggggctcatcaagcaagtcgtcgacaggcaggaggagatgcagcggcggtttctggagactatggagaagcgagaggcggacgcacggccgggaggaggcgtggcgcaggcaggaggtggcccgcctcaaccgcgagcaggagcagctcgcccaggagcgcgccgcggcggcctcccgcgacgccgccatcatctccttcctccaacgcatcggcggtcagtccgtacaggtcccacccgccgccaccgtcatccagatgcccacaccggtgcagctccagacccctccgccggtcaagcaacctgccaggcagcaccagccacagccaacgccgccgccgccgcaggcggcgccaatcccggccgcgcccctccagcagcaaccgccgcagccgcagcacaaggagacgattcaccacgaggcagtgacgccgcgcagggcgccaccgacgtccggctcatcactcgagctggtgcccgcggcggagcagcacgtcgagagcgggctaggaggaggggagggcgggtcggcgtcgtcgtcgcggtggcccaagacggaggtgcaggcactcatacagctgcgcatggagctcgatatgcgctaccaggagaccgggccgaagggcccgctctgggaggagatctcgtcggggatgcggcggctggggtacaaccggagctcgaagcggtgcaaggagaagtgggagaacatcaacaagtacttcaagaaggtgaaggagagcaacaagaagcggcccgaggactccaagacatgcccgtacttccaccagctcgacgtcatctaccgcaggaagcacctcaccggcggtggcggcggcggcgcttccgcggccaatgtcgccgccacggcaatcgagcaccagaacccgaaccggcacgagatagaggggaagaacataaacgacaacgacaagaggaagaacggcggaggcggcggcgcgcaggtgcccaccagcaatggcgacacggcaccgaccacggccacgttcgacgtcgatagcggcatgaagaagccagaagacattgtgagggagctgagcgagcagccgccccgggagttcacaacggacgagaccgacagtgacgacatgggcgatgactacaccgacgacggcgaggaaggcgaggacgacggcaaaatgcagtacaggatacagttccagaggccgaacccgggcggcgccaacaccgcacctccgccggcgacaaccccggcgtccgcggtgccaacctcgactccgacgagcaccttcctcgccatggttcaataggcgcgcgaacgatgcatcaccaagtacgtacttgttcaaagaaaaaaaatcaaagcatcgccatcaccatcgcatcctctcactacaccaccaccaacacaaacaccatgcatgcatcagcaatcagcaaccactctccttcgagttgggatctctcctgtaatgcatgtgcggtaagtgccaatgacatgtgggcccggaataggtgggacccacatgccagtgacaccagtacagcagtggatttgcatccctctccttcaccttgtaattctcccgtgccattccattatttattgatttctctgtgtaataagagccctccctgatctcaccttaacccgaggaagcagagggggtggtagagaaaatgagtccgggtaactttatctctataggtcacctcgtcgtggtaaaggaagaattgtacatcgatgtaacagtccctgatgtctctgttttttttttctctctctctttttctccttcctccggcgacggcggtatacaagttgtatacgggtatacaacaattacatacatttccagcaatttggagcagaggtcagaaggtgtcttgtttttgtttcttttctttctttgccgtggggaattttgtctccttttaacccgttttttttgcagtggtataaaacgttgttactgtgcaaaaaaaaaaaaaaaaa

SEQ ID NO: 31 - DNA, 995 bp, Synechocystis PCC6803
aaggtactatgtctgaaaattttgcagttgctacgccggtgcgggtcggaattgtcggtactggttatgcggcccaacgtcgggcggaagttttccggggcgatcgccgtagtcaattggttagtttttggggcaatagtgaagccaatacagctaaatttgccgatacttttggagttagaccccagcaatcttggcaggcattaattaatgatccagagatagatttagtgctcattgccaccattaaccaactccatggggcgatcgccgaggcggcattgcaagccggtaaacatgtggtgttggaatatcctttagcgttaacctatgccatgggcaaaaaactacaacagttagcccgggaaaaaggtaaattactgcatgtggaacatattgaactattggggggagtacaccaagccattcgccagaacctaggcaaaattggtgaggttttttacgcccgctatagcaccatcatgggacaaaatcccgctccccaacgttggacctatcaccatcagcaatttggctttcctttagtggcggccttgtcccgcatcagtcggtttacggatttattcggtacagtacagcaggtggatgcccaatgtcgtttttgggatcagcctaatccggaatattttcgggcttgtttagccaccgcctatctccagtttaataatggtcttaaagcggaggttatctatggcaaaggggaagtttttcaccagaatgaacggatttttaccctccatggcgatcgaggcaccttaatttttgtcggggaaacaggtaggttaattcagggacaaacggaaactgaaattaccgttggtagtcgtcgaggactgttcagacaagacacggaagcagtgttggattatctaaccactggtaagcccctttatgtggatttagaagctagtttatatgctttagaagtggcggatctctgtgcccaagcttgtggatataaggttgaaaattag

SEQ ID NO: 32 - DNA, 1623 bp, Zea mays
gtcgacccacgcgtccggagatcggctgcctcgatttctcttcgagtgccaagcagtactgctagttctacttctgtacttcagcagtagtaggccgctgttgctacaattttgactgactgagatgggaatcctctgcctcggtgcttcctccacactgctctgcggggaggacaggaacaacgtactcggcctcggctgcggcaacgagctggtggaggtggggagcggccatgacggcttggactccgtcgtcggcgccgtgttccccgtggacacagatgaggccgtgcgggcgttgttggagaaggagacggaccacaagcctcaagacggctatgcggagaggctggagcgcggcggattggagtactcctggaggagagacgccatggattggatttgcaaggtccattcgtactacaggtttggaccactcagtctttaccttgctgtgaattacctggatagattcctctcctcatatgatctcccacacgataagccttggatgcgacagttgttgtcagttgcttgcctagctctcgctgtcaagatggaggagaccgtgctccctcttcctgtggaccttcaggtctgcgatgtgaaatttgagtttgaagcaaggactattgggaggatggagcttcttgtgctggccaccctgaaatggagaatgcaggctgtgacccccttcactttcatcagctacttcctcgacaagttcaatggtgggaagccgccgagtatggcactagcgtcacggtgcaccgagatcataattggcacactcaaaggctctacattcttgtcattcagaccatctgagattgccgcggcctcagctctagcagcagtttctgagaatcaggttgttggctcctcgagtgctctttcagcatctgaagtccctataaataaggagatgattgctagatgctatgagctgttgcaagagcaagcgctggtgaggaagacagggcacatcaatggaagcccttcagtgccgcaaagcccgattggcgtgctggatgcaacatgcttcagctttaggagtgaagatgtaagactaggatcatcgcaatcaaacaacatcagtagtagtagtaacgacaatcaagtttctaagaggagaaggctaagcatatcaccaatctgagtagatcaaaactctgttggcagtgtcgcattgtgcgcttggttatgcattgatcatcttaacctcagagcttgtcagagcaacaagtagtggtacaaaaggacccagtgaagcattgtaacaagcagaggatggtgacagtaataagttagaagcagcttcttgatctctgcgacgaaataggtgacgaggaacgtttcttcctctagtaactttgaatccccttcctccccggtccctttgttttattccttttcctttttatcggtatctcaaggcatttgtggggactggggagatatatgtggatatgagattggagacgtgaggattaaagagagagagagggagggagggagataaaaaaaaaacaggtttgttcctttgttctctgccaatatacaaaaaaactgtcgtgcgaaaaaaaaaaaaaaaaaaaaaaaaaaaaaaaaaagggcggccgc

SEQ ID NO: 33 - DNA, 3330 bp, Zea mays
ttcggcacgaggatcgatctcacttagctgctgctgctgctgcttgctggtggcctgggcctggctgctgtgtctgtatcgatgtgtccgtattttctccatctcgtctgcatacgctgcaattggtaaggagctagctggcctttcatgtcttccatgctgccatagccatacgcccggccggaaggcaggataccccatcgctcgctgcacatgcatgtatgccgcatggggatacatgttcatcatcagcagcacagtggctctgtatcccccatcccaatccgatcctatataggaggaggagaaggaggagcagcagcagcagccaggcgcggccggcggccggagtagtatccgaatccgctcaacacccacaccggtgcgggtggtctctagctttcccatcgatcaatggctttcaaaggactcccgcgtgattcccgagggtccctcgaagtcttcaatccagacgcccctgtttcagatcgtgcaaccacctccccgttcctcctccctcctgcggtcgcgtcccatcccagcctcctcgccgccggagatggcggcgatgctgacgtgggtcgggcgacacagagggccgccgagtggggcctcgtcctccagaccgacgagcacaccggccgcccccagggtgtcgtcgcccgtccctccggttccaaccgcaccagcgagagtggcaactccatcgacgagagggccgccgccgccggtgctggtagagctctcccccgggtgtcggaggagcttcgcgccgcgctctcagcgttccagcagaccttcgtcgtgtccgatgccacccgccctgaccaccccatcctctacgccagcgctggattcttcaacatgacgggctactcctccaatgaggtcgtcggaaggaactgccgcttccttcaaggttctgggaccgaccccgtagagatttccaagatcagacaggctctcgcagctgggtcaaattactgtggccgtatcctcaactacaagaaggatggcacaccattctggaacctcctaaccgttgcccccataaaggatgaggatggcagggtcctcaagttcattgggatgcaagtggaagtaagtaagtacacggaaggtaacaaagatactgctcttcgtccaaatggattgccagagtcactcatcaaatatgatgcaaggcagaaggatcatgctcgtagctcagtctcggagctcctacttgccctgaaggatccacggtcattgtcagaatcaagaaacaataccttaaaaaggaaatcacaggaatcagcaggttcagctctagttcccggcaagagaagctccgaaactggatcccgtcgtaactcacatagtggaatgagaaactctctacaaaaaatcagtgaggtgcctgaaggagggaataagaccaggaaatctggtttgcgttcttttatgggccttattggtatgggacatgggaatgtagagaagaacattctaaaaccaagggaagatcccctacttgatagcgatgatgagagaccagatagcttcgatgacgatttcaggaagaaagaaatgagaaagggcatagatttggctaccacacttgaacgtattgaaaagaattttgtcatcaccgacccgaggttaccagataatccaattatatttgcatcggatagctttttgcgtttgacagagtattgccgcgaagaaatattgggaagaaactgcaggtttcttcaaggacctgaaactgaccgtgggacagtaaagaagataagagatgccatagataaccaaacagaagttactgttcagctgataaattatacaaagagcggtaagaaattctggaacctctttcacttgcagcctatgcgtgatcagaagggtgatgttcaatacttcattggggttcaattggatggaactgagcgtgttcgagaggctgctgcaaaagatggtgccatactggttaagaaaactgcagacaatattgatgaggctgcaaaggagcttccggatgctaatttgagacctgaggatctatgggctaatcactcaaaaccagtcttgccaaagccacatatgaaggatactgcatcgtggagagccatccaaaaggttcttgagaacggtgaaagcattgatttgaaacatttcagaccagtaaggcctttaggatctggtgatactggcagtgtccacttggtggagttgcttggcacaggtgaatactttgccatgaaagctatggataaaagtgtcatgcttaaccgaaacaaggtccatagagctaccgctgaacgacaaatccttgatatgttggaccacccattccttccgacattgtatgcatcatttcagacaaagacacatatatgtcttattgttgactattgtgctggtggggaactctttatgctccttgataggcaacctatgaaggttctgaaggaggatgcggtcaggttctatgctgcagaagtggtcacagcacttgaatacctacattgccaaggtataatctacagagacttaaagccagagaacattttacttcatagagatgggcacatttcattgacagactttgatttgtcttgcttgacatcctgccgaccacaagtgtttcttccacacgatattgataagaagaaaaagaggaggaagagcaggagtaatcccatattttttgctgaaccaatgcgagcatcaaattcttttgttggtacagaggagtacattgcaccggagattattaccggagctggccatacgagtgctgtagattggtgggcgctaggaattcttctatatgagatgttatatggttatacacccttcagagggaaaacaagacaaaggacatttgctaatattctgcacaaggatatcagatttcctgcgagcatacaggtgagcctggcggcaaggcagctgatataccggttgctacaccgagaccctgcaaataggctaggttcctatgagggcgctatggagatcaaacaacaccccttctttcgtggcataaactgggctctagttcgtgccgccacgcccccagagctggaggctcccctccaggatacattggaggccacactgcctcctcctgcagctgatgcggctcacaccgatatgttctgatcatacattgatccatgatgctgcatgttaatttgcttaaaggaagaaaaaaatattagatgatgaagatgcgtgactttggcatagatgagaacaataatgtatgttaaggactaattatcttgatccatctatgcatgctcacaattagaataaaaaaaaaaaaaaaaaaaaaaaaaa

SEQ ID NO: 34 - DNA, 885 bp, Zea mays
ggtcacacccaacctcccactgtaaaaaagagcagcggaacgtgcgtgcatccatccatccatccatttccaatcccaatcccaatcccaccagtgtccagtgctcggggaaccgacacagctcctcagcagagtagccagcacgacaagcccgatcagcagacagcaggcatggcactcgcggaggccgacgacggcgcggtggtcttcggcgaggagcaggaggcgctggtgctcaagtcgtgggccgtcatgaagaaggacgccgccaacctgggcctccgcttctttctcaaggtcttcgagatcgcgccgtcggcgaagcagatgttctcgttcctgcgcgactccgacgtgccgctggagaagaaccccaagctcaagacgcacgccatgtccgtcttcgtcatgacctgcgaggcggcggcgcagcttcgcaaggccgggaaggtcaccgtgagggagaccacgctcaagaggctgggcgccacgcacttgaggtacggcgtcgcagatggacacttcgaggtgacggggttcgcgctgcttgagacgatcaaggaggcgctccccgctgacatgtggagcctcgagatgaagaaagcctgggccgaggcctacagccagctggtggcggccatcaagcgggagatgaagcccgatgcctagtagtggcgattgcgaccagtgtttaacccatgacgcagcgccgtcacagatgtcccgtgtggtcttgcgctttagcaatttctctctggagggagcgtgtattgttatcttgtgatcgagagcctgtgtgctgcctttgcttcttgtgattatatagctactgaataaagatgtagcgttcttcaaaaaaaaaaaaaaaaaaaaaaaaaaaaaaaa

SEQ ID NO: 35 - DNA, 1793 bp, Oryza sativa
  unsure (1)..(1793): unsure at all n locations
aaataataatgtcttgccttttgtagatccgcgtggctcgtactgctacatgttcatatcgctgcctgtttcttcgatttctgacaaaaaaagcgttcgtgttctgacaaaatttcggtttggtttttctacagtagaacgtcagcaatggagaacatgagatctgagaactttaaccaaggtgtttcaatggagggcgtcaagcatgcgcccgagatggcaaacaccaacaggagggctctgcgggacatcaagaacatcatcggagcacctcaccagcacatggctgtgagcaagaggggtttgctagataaacctgccgctaagaaccaatctggacaccgtcctatgacgaggaaatttgctgcaacactggcaaaccaaccctccattgctcccctggcacccattggaagtgagaggcaaaaaaggacagcagattctgcatttcatggtccagcagatatggagtgcaccaagatcacatctgatgatttgccattgccaatgatgtctgagatggacgaagtgatgggttctgaactgaaagaaattgagatggaagacattgaggaggcagcacctgatattgacagctgtgatgcaaataactcccttgcagtagttgaatatgttgatgaaatttacagcttctacaggaggagtgagggtttgagctgtgtctctcctaattacatgttgagccaaaatgacataaatgagaagatgcgcggcattctcatcgattggctgatagaggtgcattacaagttagagctattggatgagaccctcttccttactgtgaatatcatagaccgattcttggctcgcgaaaatgtggtgcgaaagaagcttcagttggttggcgtgactgccatgctgctcgcctgcaagtatgaagaagtgagcgttcctgtagtggaggatcttatcctaatctgcgaccgcgcctacacaagaacagatattctcgaaatggagaggatgattgtaaacactcttcagtttgatatgtcagttccaactccatactgtttcatgagaaggttcctcaaggctgcacaatctgacaagaagcttgagctcatgtctttcttcataattgagctgagccttgtcgagtatgagatgctcaaattccagccgtcaatgctggcggctgctgccatctacactgctcagtgcaccattaatgggttcaagtcctggaacaaatgctgtgagctgcatacaaaatactctgaagaacagctgatggagtgctccaagatgatggttgagctccaccaaaaagcaggacatgggaagcttactggagttcatagaaagtacagcacatttaggtatggttgccccgcaaaatcggagcccgccgtcttcttgctcaagagcgtggcactgtaactgattggctcactatacacactctaactacttccatggaaagagggaatgaggggtgtatatatagaggccggctgctttgatgaaattacagagaagagatctgcatatatgcaacagctgttgcaaaggattatttgatgggtgggttgggttggtgcaatgtgtgcctttacttccaataacttaacatcgtcgagacattgatctgcgtttggatgttttaggttgcttccaattaaatctgttggaacttgatttcatgttgtatttaagagaattattcttcatttgttctgtggcacatgcaatttgccaataaacattaattgaattgcctgttnaaaaaaaaaaaaaaaaaaaaaaaaaaaacaaaaaaaaaaaaa

SEQ ID NO: 36 - DNA, 1223 bp, Oryza sativa
ttcccccctcccctccggcgaactccgagctcttcccggtgagcgccgccgattcggccggagaggctcgccggagtcgcctccgccctgcccacgatggccgccaacttctggacgtcgtcgcactgcaagcagctgctggaccaggaggacgtggacaaggtcccccaggcggacagcgaccggggcatcacgctggaggagttccgcctcgtcaagatccacatgtccttccatatctggcgattggcacaacaggtgaaagttagacaaagggtgatagctactgctgttacttatttcaggcgtgtatacacaagaaagagcatgactgaatatgatcctcgtctggtagcaccaacctgtttgtatttggcatcaaaggtggaagagagcacagtgcaagcaagacttcttgtcttttacataaaaaagatgtgtgcttctgatgagaagtaccggtttgaaatcaaggatatccttgaaatggaaatgaagctcctggaggcacttgactattatttagttgtttaccacccatatcgtcctcttttacagttattgcaggatgctggcataacagatctgacacaatttgcctggggaattgtcaatgatacttacaagatggatcttattctcatacacccaccatatatgatagcattagcctgcatctacattgcaagcgttcttaaagacaaggacataactctgtggtttgaagagctccgtgttgacatgaacattgtcaagaatatctcgatggaaattttggacttctatgacacctacaagattgatcctcaaagagggctcccagaggacaaaatagcccctgtgatgaacaaactgccttcaaaggcctaaagcagactgagccctagttcagttgttatcagtctgagcgtcaaatcaccttatgctcgtacaacaggaaatatgtgtcaccttccttggagaactttatatttcaaagccatatatatatatagtatcagaattcagaattgcccctaacgaacgatttaattcagaattccgaactatatacagctgttcctgttgcagcagcttgcgaggcaaatcatttacaatgaagatcccaacgggttgggaatggtctgtatctgtatgtgtttttgatgtgtaaaaaaaaacatggctttggtactatttagtttctatagcaaatgaaatcctgaaaaattcttgcggtgaaa

SEQ ID NO: 37 - DNA, 1611 bp, Oryza sativa
cccacgcaggccatcgccatgggcgtctcggctctcctccgcctgtagatcgtgtggatcgtgcttacctgcgatggatagggcgagcgagaaccggaggctggcggcggtggggaagcccgtgccggggatcggagagatggggaaccggaggccgctcagggacatcaacaacctcgtcggggcgccgtcgcacccgtccgcgatcgccaagaagccgatgctagagaagagtgggaaggaagagcagaagcctgcattggtggtgagccaccggcctatgttgaggaatttcgcggcctccttgacgcgaaaagaacagcttgaccatcaggtttccgtggctgatgcagcggtcgtctgcactgatccacagaagaaccccatccccgatggcacagttgacgacgatgtggaatcgtgcgaatcgaacgactatattgccgtggatgaatgcaatgatactgatgaggatgagtccatgatggacattgacagtgccgactcagggaatccgcttgcagcaaccgagtacgtcgaagagttgtacaagttctatagagaaaatgaggaaatgagttgtgtgcagcctgattacatgtccagtcaaggagacataaatgaaaagatgagagcaattctgattgattggctcattgaggtccatcacaagtttgagctgatggatgagactctctttcttactgttaacatagtagacagattcttggaaaaacaagttgtgccaaggaagaagttgcagctagttggagtgacagctatgctccttgcttgcaaatatgaggaagtcgcagtccctgtcgtcgaggatctagtgctaatttctgaccgggcttatacaaaaggacaaattctggaaatggaaaagttgatcctaaacacactccagttcaacatgtctgtaccaacaccttacgtttttatgagacggtttctgaaggcagctcagtctgacaagcagctacagctactttcctttttcattctggagctctccctggtggaataccaaatgctcaagtaccgaccttcgcttctttctgctgctgcagtttacacagcacaatgtgctctcactcgttgccagcagtggacaaagacctgcgaactacatagtagatataccggagagcagcttcttgagtgttctaggatgatggtagatttccaccagaaggcgggagcaggcaagctcaccggcgtgcaccggaaatacagtacgttcaagtttgggtgtgcagccaaaacggagcctgctctcttcttgcttgagtcaggagcaggaggttacaaccttcagaagcagccttgttgaatgaatctattcccctggatagatttttttaacttagcttcagaacaactacagcaagcatgttgatgcttcacaaaagtgcagcagatttaccttactacagctcttttgtggtaatgtaaacttggtgtgaatgatggataatctgggtggtggtcagtccttcagttatactggggggctaataaatgattcaggcattcagcctatgtaagctgaatctcttgtaaatctacatgtgttcaagtagcatgaagaaaataacttgcatgttg

SEQ ID NO: 38 - DNA, 2004 bp, Oryza sativa
gtcgggaagagcacccaaaccctcgcttccgccctcgcaaaccctagcgcccggaggaggaggaggtgggttgcggtggtagtttgccgtccgccgatgtcgagcaacctagcagcctcccgccgctcgtcgtcgtcgtcctcggtggcggcggcggcggcggcgaagcgacccgcggtgggggagggaggaggaggaggaggagggaaggcggcagcgggcgccgccgcggcaaagaagcgcgtggcgcttagcaacatcagcaacgtcgccgctggtggtggcgccccagggaaggccggcaatgcgaagttgaatttagctgcctcagctgcaccagtgaagaagggatctttggccagtggccgcaatgtgggcacgaatcgggcctcggcggtgaaatcggcttccgccaagccggctccggccatatcccgccatgagagcgccacacagaaggagtctgttcttcctcctaaagtgcctagcattgtgccgactgctgcactggcacctgtcactgtaccctgcagcagcttcgtctcccctatgcattcaggagattcagtttcggttgacgagacgatgtcgacgtgtgactcaatgaaaagcccagaatttgagtacattgataatggggattcctcctcagttctaggttccttgcagcgaagagcaaacgaaaacctgcgtatctcagaggatagagatgtcgaagaaactaagtggaagaaggatgctccttccccaatggaaatcgaccaaatttgtgatgttgacaataactacgaggatccgcagttgtgtgctactcttgcttctgatatctacatgcacttgcgcgaggctgagaccaggaaacgtccatcaactgattttatggaaacaatccaaaaggatgtaaacccaagcatgagagcgatcctgatagactggcttgtggaagtcgctgaagaatatcgtcttgttcctgatacattatacctgacagttaactacattgatcgttatctttctggcaatgagatcaatcgtcaaagactgcaattacttggagttgcttgtatgcttattgctgcaaaatacgaggagatatgtgcacctcaagtagaagaattctgctatataactgacaacacatacttcagagatgaggttttggaaatggaagcttctgtcctgaattacctgaagtttgaagtgactgcacctacagcaaaatgctttttgaggagatttgtccgtgttgcacaagtatcggatgaggatccagcattgcatcttgagttcctagccaattatgttgctgagctatcactgctggagtacaatctactttcttaccctccttcactagtagcggcatcggctattttcttggccaaattcatactgcagccaacaaagcacccttggaattccacccttgctcactacacacaatacaagtcgtcagagttaagcgactgtgtaaaggcattgcaccgcctttttagcgttggtcccgggagtaaccttcctgcaatcagggagaagtatacccaacataagtacaaatttgtggcgaagaagccctgcccaccctcaataccgaccgaattctttcgcgacgcaacatgctgaactagaaaaataaaccaaggattagttacagttgctgactgaattcttcctccagaggcacctatgccaggttgtgccgtagaccgttcagataaccttgatgcaaggcatgctgcttgccccccccccccccccccctggttctttcaggcggtttggctgagtgtagatagatcgatgcttctgctgtgtgtggtaacttttatggtactgatgtgctttcttctatcttcttttccctgtacctagatgatccatggttttcagtactttgtacatcggagtcctgcagcaaagctttaaacatcttgtttgatattagctgccaacctgggcgtctcctaggttgatgtatgatagagtctctgttcgtgttgcttt

SEQ ID NO: 39 - DNA, 5100 bp, Oryza sativa
gaccgttggaaagatagacgccacggcaaaattcctcaattccccaccaaaaaaaaccaacccatcgcctacaaagccatagccctccctcttcttctccttcgaaaccaatccatctcgagttctcgccgtcaagaatcggaggagcagaggagagggaggagaattcgagagagaggagaggaggaggaggaggaggaggaggcggagtgaggtgtaagggggtggtggtgacgcgtcgctgattcgtgcggtttgctctgtggacgccgatcccggccgtttcgggcgatggcgtcgaggaggcagtggggagccggtgccggcgccgtcgatgttcctgctcaggaacgcaagggaggtaaggcggccaccgatcatctcctgcgcgcgttctttgccgtgttctttgttctggaggggctctcatggcggcggcggcggcggcgcgatggggagggggttttcttgctgcgatacgtcgcgtgcctgctttgccttcgtaggtttctcccgtccccggagattaggatttttaggatcgatggtgtgttcttgcggggttcttttacggtttcttgtccgatcgacgcttgattgcgaaattgtatgggttctttgatacgggttcttgttctgattcggcgtaaagagagcaccttttgaaaatcatgttcatgtgtggattattttttggtcccaaaatatgatcggaacgcatgtgcccgtggtggaagcagatgtttgtcgcgttggttgatttattgaatcgataggaatttcgcatgggttcttttggcatagaaatgatcttttgctggcgctgtgatggtttctgcgttgttctttgggtttgcttcgataaatctggcatcttcccagaattgcgtttcacctattgaatcgcgtttcttgttctgaatcatgcgtgcgctttcacctatttccgtgcaaaatttctcccttagcgattctgtgctttctcttgttactgatctgaaatttcgactttgtgcagaggctgccaagattgcgaggaggccaaagaccacgacggttgttgctcagcaaccgccaagaatccgtcgagccctcgccgacgtcagtaatctcgtcaatggccgggctgctctgcctgtcgtaaatcgccagaaggcagcagcagcagcagctgacaagtgcaggaaaccaatcaagcagcgcaacgagaacaacaaggcggccaagccagaagtcatcgtgatcagttcagactccgagaaacataagaaaaatccagcccagagagcagcctcccggagggcgccaatccaaacgctcacctcgattctgaccaagtgcagcagggtatgtgttctttggtgttgtttgattctgtaatgttgggaaatttttgtctgaagaatccgttttgttcttcttttgctgaacttgttctgaacacaggcttctgacggtgtgatcagcccgaaaaaggagctgatatacgacatcgatgcatctgattctcacaacgagctggcagtggttgattacgtcgaagatatctacagattctacaggaacaccgaggtgagcttagcttcctcttcttttatgccaaatcaattggtgatggaacggtgattgattactcttgctgcttgatttgtccagaacacctaccggcctctctgcacctacatggtgtcacagaccgagatcaacgagagaatgagagcaatcctgactgattggctcatcgaagtgcactacaggcttatgctgatgccagagacactgtacctcactgtctacataattgatcagtacctgtccctggagaatgtgcccaggaaggagctgcagcttgtcggtgtaagcgccatgttgatagcctgcaagtatgaggagacttgggctccattggtaaggattccacttctgcacaccactgatgccgttcaattttgcatatgatatgctcaacttgctattgtgttcaatgctgttcaatttgcatatgactttcagcttgcacttgcttcttgtcttacagttgagctgccatttttgcaggttaaggacttccttgtcatatcagacaactccttcagcaggcagcaggtcctgagcacagagaagtccatacttaacaagctccagtggaacctgactgttccgacaatgtacatgttcatccttcgatacctgaaagctgcattgggtgacgaggaggtaactaacaagcacagtccattttcagttgttcttctgctggtgctatacatcttcaatgtgttgtaatgtgccattcttttttctgtcaatgcagctggagcacatgactttcttctacgcagagctcgcactggttcagtactccatgctcttttttgcgccatcggtgatagcagccgctgccgtctacgctgctcggtgtacccttggcctgagcccactatggagcgatcttctggagtaccacaccggcttagctgagccgcaattgctgtatgtcttcttcttcatgacttgatctttgcccatgaaatttgattacatattgaatctgaagaatatgacctgtgaattgaattgtgttgactgcgttcccagaaagggatttcagttatataaatttggaatgctaaataatccatcttttcacaatcgttgataacctgttgtccttaagtttcatattcagagatggtcttttttctcatttgctttagttacttaaatcttgcctatgaaattttgattacacgttgaatctgaagaatatgacttgtgaatgaattgtgttgactgcttgcctagaaaaggatttcagttatatataaatttggcatgcttagttacattgttgtgtctccaccagactgactgaattttgtactactgaaagtttcagttgaatattgtcctggactagttggtgatgtccaaactttctttgtatgcaatggcatgttatgctctctctagtctaatccaagaacttaatctgttcatgtggcttgatacagatagttgtaacctgaagaatgctgaacagatagtcctaacatatgctttgaacatagaacaaaatatgaatctactacatgcgtatgctgctaaaattgctagtgcctaaccaattactttgatctgcaccattcaattaaaacgcctgtatgcataaatatgctgatcaagattttgattacatgactcttatcaaagatctgcaccatccaaattattaaaacttaatctgttcatgtggcttgttttttgagctgcagggagtgtgcgaggcggctggtgagcctgcacgcggcggcgccggagagcaggcagaaggtggtgtacaagaagtacgcgagccccaagctcggagccgtctccctccactcgccggccaagaagcttctcccgccgccgtcgccggtggcggcttgagctctcgctgttggaattttggcctcgattggaagaacatgtgcatagataggatcggatcgtcgccgcgtcgtcgtatcatcgctttgatgttaccccccgtttctgatttgattcttccaaattttgggttcctgatttgattggattgctactgattcgaatttggtgcgaatgaaattatgaaaaatcatcttgatgtttattctttttccccctttcctttttgagaggtggtaataatatttacatctttatattacctgaaaaaaatgttgccacggatgggtgggacccacgtggacacgtggccaaacggcagccaagattttgatagcctctggccagattcgctttccagccacacgatttcttctgtgacgtgtggcgtgagataactcacgcagctcagctggggccgacttcgtgggtcccacgagtcccatcccgatgatatgtggggccactggtatccgcgggcccacttgtcagtgtcaatggtgggagcatttaagtagaagaaaccagcactcaatcttcgactcctcctgctctgtttgttcgagtaattaattaagctccgaccacgaagcttctggcgattgtcggcgtcaagaacagcttgacgagcaggcagcaagaggattcgttcttcttctgtggtggatcttgattgggctccctgttttagtgttctgttcttcgcaagaaaggggccattctcttttggtttctacatgcaggtttgtgttcttcagttcttggtttgttgttgttgttatgggcatatacagtaagttctttcatggttagctggatgagaaatgaaagaaaaaaaatattgagaggatcggtgatgtccttgacgggagttaattgtgtgcaattgagtgatctgcttcagcttactcctctgttcttcttctttaatatgatcggttgtttgttcttctcaagaaaggccattctttttggtttctgcatgcaggtttgtgttcttcagttcttggtttgttgttgttatggcatgtacagtaagttctttcatgcttagcaggatgagaaccgaaaggcacaaattattagtgaaaagccaccgtgtgcgattgagtgatctcttccagcttactcttctactaccaattactctgttttcatcgaattcttcttctttgatatgatcttccacggttctgatctctgtcatgttatgatcctgtctgctaactagaattcttttttttttttggcttttcttttctgaatattgctgaacttttctaactcaactagagataactacaccactaattttcgaaatgacaccatgctcttgcataattaatcctgttgcctgcctttcggtgcacaagtatttgcaaagtaatcctgaattaaaatattctgccctgtttttgttttctttcagatgagtagcatggcatgccattcccttccagagagtggaagcaacttgtcagctgctgatgaactctttcagaaccaaaggtcagagcagggaatttactggacactctgggactccaggctatctgatgatctgaacacaacgaccgtatattcagacaatcatggcagcaacggtggcggcacgcaatctttcgacacctctgaacattgcagtacagtgccttcagattcagatga

SEQ ID NO: 40 - DNA, 1135 bp, Zea mays
cacgacttcctcccgccgccggttggcttcgctgctcgtccacctccgcccggcccgtgggacgagtggggactggagagggtcgcctctgggcttcgcctctcggcggccgagtgtctgcgtcgtccacggagctgagagcctgagactgagactgagagcgaccggcggcggggatggcgagggagaggcgggagataaagaggatagagagcgcggcagcgaggcaggtcacgttctccaagcgccgccgcggcctcttcaagaaggcccaggagctctccgtgctgtgcgatgccgacgtcgcgctcatagtcttctcctccacggggaagctctcccagttcgccagctccagtatgaatgagataattgacaagtacaacacgcattctaaaaacctggggaaaacagaacagccttcgctggacttgaacttagagcatagcaaatatgcaaatttgaatgagcaacttgcggaagcaagccttcgactcaggcagatgagaggtgaagagcttgagggattgaatgttgaagaactccagcaattggagaagaacctggaatctggtctgcatagggtgcttcaaacaaaggatcaacaattcttggaacagatcaatgacctcgaacgtaagagtacgcagctggcagaggagaacatgcaactgaggaatcaagtatcccagatacccccagctggcaagcaagcagttgctgatactgaaaatgttattgctgaagaagggcaatcctctgaatcagtgatgactgcgttgcactctgggagttcacaggataatgatgatggttcggatgtatctctaaagttagggctgccttgcgttgcatggaagtaaacaggaaatgaggctccttgtcgattctgggtgtggatgtgggtggagctgcggcctcagcggataggcacttgtgtatggttttatggacgaccggcccccgactacgtactgcaataatcttgcattggaagcgagatcggttaacctgatttgtcatcccttgtggcttcatgatgcgatgttccgcttgtaccgtttgctagcatgttaactgaatttttagaatcgcatatacttttgttcctatatatcactgtcgtactgctcgt

SEQ ID NO: 41 - DNA, 1021 bp, Zea mays
cctccggactgctccggacgcgcgcctcagatctactccaacacctccgcagcggcggcgcccgcgggtggaggagcaggagaggcggcgccatggtcgggaccgggaagagggagcggatagcgatacggaggatcgacaacctggcggccaggcaggtgaccttctccaagaggcggcggggcctgttcaagaaggccgaggagctctccatcctctgcgacgccgaggtcggccttgtcgtcttctccgccaccggcaaactcttccacttcgccagctccagcatgaagcaggtaatcgatcggtacgactctcattccaagactctccagaggtccgaaccgcagtcgtctcaactgcagtcacatatggatgacggcacttgtgcaaggctaaaggaggaacttgctgaaacaagccttaagctcaggcagatgagaggagaggagctccagaggctgagcgtcgaacagctgcaggagctcgagaagaccctcgaatccggcctcggctctgtactcaaaaccaagagccaaaaaatccttgacgagatcagcggtctggaaagaaagagaacgcagctgatcgaggagaactcaaggctgaaggagcaagtgacacggatgtcgaggatggagacgcagcttggcgccgatccagagttcgtgtacgaggaagggcagtcgtctgaatccgtgacgaacacgtcctatccgcgcccgtccaccgacaccgacgactgctccgacacatcgctcaggctcgggctaccactcttcagctccaagtgacggagatttgacatgtccggtagcggagcggtgccgattgcttgcccttctccactctagataggtctggattgggggagagcaagcactgctggatcgggaagacccaagtgaccaacgcgtcgcatcagaataaggcattttgagtgctgtatgatgtgtgtattctggctctgaaagtgagacctgcttttgttataatacatacatacaggcagcatggcaat

SEQ ID NO: 42 - DNA, 876 bp, Glycine max
attcggctcgagctaactggcaactaattaacgtgtttgggactcgcgagttgtgcattcctaacacccatttcaggaagcccaagcattgggagatgactagaaagaggatacagatcaagaaaatcgacaacatcagttcgaggcaagtgactttctccaagagaaggaaagggcttttcaagaaggctcaggagttgtcaaccctttgtgatgcagacatagctctcatagtcttttctgcaactagcaagctctttgagtatgccagttcaagcatgcatcaagtaattgaaaggcacgatcgctattcagcaatccatagattggatcgcccctctattgagctgcagattgagagtgactccaacaacattctgcgcaagaaagtagaagataagactcgtgaactgaggcagatgaatggggaagatctgcaaggattgacattacaagaactgcagaaactagaggaacatcttaaaagaagtttgaccaatgtttcaaaagtaaaggatgcaaaatttatgcaagagatcagcacctttaagagaaagggagtggaactaatggaggaaaaccaaagactgaaacaggtgccgagccttatccatgcacatagctataggcaatcatcggaatccattcttagcaattcatctaaccttcctgaagatggtggtagcaacacatctctcaagttggggttaccttaaataatgaacaaaatgtagattatttagaagtgatcggtttcgcttcctttatatgtcagtcaaaaccaattgaatatcctgtgttgtttgctgtttaaaaacaactcgtgtaaagtaagtaaatccaaaggatgaggtcctgcatgtagaattgtgcttg

SEQ ID NO: 43 - DNA, 999 bp, Glycine max
cggacgcgtgggcccaggcattggtgggttcttaccctttattattattattattggagatgactagaaagaggatacagatcaagaaaatcgacaacatcagttccaggcaagtgactttctccaagagaaggaaagggcttttcaagaaggctcaggaattgtcaaccctttgtgatgcagacatagctctcattgttttttctgcaactagcaagctctttgagtatgccagttcaagtatgcatcaagtaattgaaaggcgcgatagccattcagcaatgaatagactggatcgcccctcaattgagctgcagattgagaatgactccaatgaaatcctgcgcaagaaagtagaagataagaaccgtgagctgaggcagatgaatggggaagatctgcaaggattgacattacaagaactgcataaactagaggaacaccttaaaagaggtttgatcaatgtttcaaaagtaaaggatgaaaaacttatgcaagagatcagcacgcttaagagaaagggagtggaactaatggaggaaaaccaaagactgaaacaggtggtaccgagccttatccatgtacataggcaatcatcggaatccattcttagcaattcatctaaccttcctgaagatggtggtagcgacacatctctcaagttggggttaccttaagtattcaacaaaatgtagattattagaagtgaccgggttcgcttcctttatatatgttttaagtgtttcactcaaaaccagttgagtccagtgatgtttgctgtttaaaaacaactcctgcaaagtaagtaaatcctagggatgaggttctgcaggcagaattgcatgtacttgaattcgtattctattttcttttcgtagattgattcataggaagtgttatatatgcccgagttaatggtcaatgctttggccgtttcttactttctatactttgtcatcataaaaaaattattcttacctaaaaaaaaaaaaaaaaaaa

SEQ ID NO: 44 - DNA, 2003 bp, Zea mays
gaattcggctcgagctcgccgctgccgcatcctcaccctcgtccgctcctccgctgccccaaaccctagcctgaggaggggtcctcctccgctaccgagacccacgatgtcgaccatcgctgcctcccgccgctcgtcctcctcgtcctcttccgcgaccgccaagcgccccgcgattgcggacggccccgggggacccaaggcgaccgccgcacaggccaagaagcgcgtggcgctcggcaacatcaccaacgttgccgcgcggggagggagggcttccgttggcggcagccttgggaacgtcatggcgcccaccagcagcgcgaagttgaatccaacggtacccttgaagaagccgtctttggcaacaagtgctcggagtgtgagttcttccatccggggttctgctgacaaaccggcttccatcaagccagctccaccagtagcacgccatggcagcgcaacacaaaggcataacaatgttcctcctcctaaagtgcctaccattgccgatgtgccaagtcgtgctcctgccttggtgtcctgcaccggcttggtgtctcctggacgctcaggagattctgtttcatccgatgagacgatgtcgacttgcgactccatgaaaagcccagactttgagtacgtagacaatcaggacacctcgatgctggcttcgttgcagcgacggacaagtgaacatctgcgaatatcagaggatagagatgttgaagaaaataagcggaagaaaaatgccgtggccccaatggaaattgaccgcatctgtgatgttgacagtgaatatgaggatccacagctgtgcgctactctggcttctgacatttacatgcacttgcgagaggctgagacgaagaaaagaccgtcaactgatttcatggaaacgattcaaaaagatgtcaacccaagcatgagagcaattttgatagactggctcgtggaagttgctgaagaatatcgtcttgttcctgatactttgtacctgacagtcaactacattgaccgttatctttctggcaacgaaatcagccgccaacggctgcaattacttggtgttgcatgcatgcttatagctgcaaaatacgaggagatatgtgcaccacaagtagaagaattctgctacataacagacaatacatatttcagagatgaggttctagatatggaagcttctgtactgaattacttgaagtttgaaatgacagcacctacagcaaagtgctttttgaggagatttgctcgtgctgcacaagcgtgtgatgaggatcctgctttgcatctggagttccttgccaattacatcgctgagctatcactactggagtacagtctactctcttaccctccatcactaatagctgcatcggctattttcttggcgagatttatactacagccaacaaagtatccttggaattccacactcgctcattacacacagtacaaaccgtccaaactgagcgaatgtgtaaaggcattgcatcgcctttgcagcgttggttctggtagcaaccttccagcaatcagagaaaagtacagtcaacataagtacaaatttgttgcaaagaagcagtgtccaccgcagatccctactgaattctttcgggacacgacatgctagactagaaacccagaagtgattccagttgcttactggattcttcttgatgtgtcttgaatgcccagtgtagcacagcacaactatgcaagtgctgataacccccaggttgtttcaggtgattacaggggtgtaatcaatgtttgtggtcatgttaggtcattggtgtggtttttcttttcctgcttccagtctttctgtatgtagatcagtgttttcaggcgcttgtaaatccgagttctgtagtagagcacaatatcttgtaagttaactgaagaaatttggtgatcaaccaagttacctacaacttatgttgagctggtgatcaggtttttgcgctagttgaaaaaaaaaaaaaaagggcggccgc

SEQ ID NO: 45 - DNA, 1506 bp, Zea mays
gaattcccgggtcgacccacgcgtccggcgacctgctcctgcccccgccgccgccgtgcacgcacagccggagcaggagcagcgctgcccgcctttaccgttgcccatggagaactctgccgccgccgccgccgcccggccgcgcctcacccgcgcagccgccaagcgctcagccgtcgtcacggctgtggccgtcgccgccaagcgcaagcgcgtcgcgctcagccagctgcccacgctccccaacgccgtgctcggcgcgcacgacgacgacgacgacaagcccgtcaggaagcagcgcctcctccccgccgccaagcccaagcccaagcccaaggcagcgcccgcgcctgccgcgcccgccgccgcggatgacacggatgacgacattcagctctgcaagccctacgcttccgacatctactcctacctccgctccatggagtcgcaggccaagcgccgcctcgctgttgactacatcgcggcggtgcagatcgacgtcacgcccaacatgcgtggcatcctcatcgactggctcgtcgaggtcgccgaggagtacaagctcgtctccgacacgctctacctcaccgtctcctacatcgaccgcttcctctctgccaaagttctcaacaggcagaagctgcagctcctcggcgtctccgccatgctcatcgcatccaagtatgaggagatcagcccgcccaacgtggaggatttctgctacatcaccgataacacctacaccaagcaggaggtagttaagatggagagtgatatactgaatgtcctcaagtttgaggtgggcagtcctaccgccaagacgttcctgaggatgttcatcagatctgcccaagaagacaacaagaagtatcctagcctccagttggagttcctggggagctacctttctgagctgagcttgctggattatggcttgattcgctccttgccgtcacttgttgcagcctcagccgtctttgttgcaaggctgaccctggatccacacacccatccctggagcaagaagatgcaaacgctaacaggctataagccatctgagttgaaggactgtgttgctgccatacataatttgcagctcaaccggacatgtcaatccatggtggcgatccgggagaaatacaggcaacaccgattcaagggtgtatcagctttgctacctcctgttgagatccctgcatcatacttcaatacactgaaggagtaggtgttccttgataatctaagagagccaagcacacagctttcctcaagcaagatgtgcaatgctaaggttgttagggtactgaggttcttggatgctgcatctaggcttggcttggagcattcagagttgatttgtttgaagttcaaactcaatagaaagttcggtgtatcaaatcttgtacttgtgtatcataattatacattacaaccaggtgcctttatttattgggggcacaattccaaaaaaaaaaaaaaaaaaaaaaaaaaaaaaagggcggccgc

SEQ ID NO: 46 - DNA, 1699 bp, Zea mays
gaattcccgggtcgacccacgcgtccggtcacggggctcctccgtccgtaaggcaccgccgcagcgtctcggctggatcaacaggccggccgatccgtcttcttcccctcctcctgcgggtcggcgtttggggatcatggcggcgcgggcggctgacgagaacaggagaccggcggcagggaagcccgcgccaggcgtccgagacatggcgagccggcgcgcgctcacggacatcaagaacctcgtcggggctgccccgtacccctacgccgtcgccaagaagcccatgctgcagaagagcaaaagggacgaaaagcagccagcgttggcaagcagccggcccatgacaaggaaattcgccgcctccttggcgagcaagggccaacctgaatgtcagccgatcgtagctgatccagaacccgaagtttgtcaacagaaggaatcagtaggcgatggcaccgttgatattgacgtggaactctacgagctggtcgacggtagtgatagtgacatcgacatgggtgcgacagagaacaaggacattatgaacgaagatgaattgctcatggatattgacagtgcagactcggggaacccgtttgctgcaacagaatatgttaaagagctttacaccttttacagagaaaatgaggctaagagttgtgtaaggccagattacatgtccagccaacaagacataaactcaaagatgagagcaattctgattgactggctgattgaggttcactacaagtttgaactgatggatgagacgctctttcttatggtaaacataatagatatattcttggaaaaggaagtggttccaaggaagaagctacaactggttggagtcacagctatgctgctcgcttgtaaatatgaggaggtatctgttccagttgttgaggaccttgtgctgatatcttaccgtgcctacacaaaagggcaaattttagaaatggaaaagttgattctgaacacgctgcagttcaacatgtctgttccaacaccttatgtcttcatgaagaggtttctgaaagctgcagatgcagataaacagcttgagctagcgtcatttttcatgctggagctctgcttggtagaataccaaatgctgaattatcggccttcgcatctggctgctgctgcggtttatactgcacagtgtgctatcaatcgttgccagcactggacaaaggtctgcgagtctcatagcagatacactagcgaccaactcctggagtgctcgaggatgatggtagattttcaccagaaggctggaaccagtaagctcactggcgtgcacaggaagtacagtacctacaagttcggttgcgtggccaagattttgcctgcgcagttcctgctggagtcgggagggacaccgcctccttcaggtgcaaactagttgaatcgacctattcaactgggtggattttttaaagtttttagaatactccatgaacaagatgcagaaaacatcgtgttgatgttgcccaaaagtgcatcgaatttctttggagagttatgattaacaactttttttttatctatgttgaatgacgagtgacggtcggtcacgttgtgcttgtgcagttatactgcggctaataacaaactgtccagttattctaaaaaacaacgaacgatgttcaggaaaaaaaaaaaaaaaaaaaaaaaaaaaaagggcggccgc

SEQ ID NO: 47 - DNA, 1751 bp, Zea mays
gaattcccgggtcgacccacgcgtccggtccgacgagccctagggaacgcgagaccggccgtcggcgagagaaggactcgaatggagtgcgcaagggagttgcgggttcgctccacgtttacggcggcggccatggcgtccaagaagcaggtggggcctggaggcgcggttcccgctcaggaacagatgaacggcggcgatgccgccagactggtcaggaagccaatggatacatttccacagccagcggcggcaagaggccgtagggcacttgtcgacgttggcaatcttatgaatggccggccttctcttgtgaaccatcagaagcaagcggttgcggcagcggcaaccagtcataaaccactcaacgtcggcaacaagaagccacttgttcctcaggcagcagcaagaggcctgcgaccccttgccgacgttacgaatcttatgatcaaagaccgtgctgctcctgcaaatcgtcagaagcctgtggatgctgtgtttaacaggaacgggaaggcagtaaagctgaaggaatgcaaggtgaagcctgaagtcattgtgatcattccagattccgagaaggagaagaaaggcaaattccctggaggtcagagagtctgtaggagggtgccaacactttttgacaatttgacaaaatgcagcagggcctctgatgggattaccaccccgaagaagaaggatccatatgacattgatgcacctgattcttgcaatgagctggcagtcgttgaatatgttgaggacatttacagattctacaagagcactgagggcacctgccttcctctcagcagctacatgagctcacaggctgaaatcagtgagagaatgagagctatccttattgactggattatcgaggtacagtacaggcttactctaatgccagagacactttacttgaccgtctacatcatcgaccagtacttatctatggagagtgtaccaagaaaggagctacagctcgtcggcataagtgccatgctgatagcaagcaagtacgaagagatatgggctccactggttaaggacttgatgtgcctatgtgacaacgcatttaccagagaccagattctgaccaaggaaaaggccatcctggacatgctccattggaacctgacggttccaacaatgtacatgttcattgttaggtacctgaaagccgcaatgtgtgacgcagagcttgagaacatgacattcttctactccgagctggcattggtccagtacgcgatgctggtttaccctccatcggtgaccgcagccgctgccgtctatgctgccaggtctacacttgggatgaatccacagtggactgatattctggaacatcacactggcctagctgagccacagttactggactgcgctaggcggctgatcagcttccatgccctggctccggaaagcaagcaaaaggcggtgtacaggaagtactccaagcccaagctcggctccgtcgcgcttcaatcccctgacaagaagctgttgtcaggttgaggctcgctgctgctcattgtattgtatatcatcgcttcgatggtaccatttgtttgggtcgtgtgctcttatgcttttctactgaagcagagcatgtgttggttagtcagtttgcttaaacgactactgaagcagagccttgtatgtgtgttgggagaatgtgatatgtgatgtcaagctcaaaaaaaaaaaaaaaaaaaaaaaaaaaaaaaaaaaaaaagggcggccgc

SEQ ID NO: 48 - DNA, 1750 bp, Zea mays
gaattcccgggtcgacccacgcgtccgtagctcctggctcgcggctcagcttgccactaccagcaagcgctcgtcacccgtcggttctccccgagtagctcgtcgcgtcggcaatggagaatctgagatctcaaaactgccaccaaggtgttgccatggagggagtcaagtttgcgccggagaaggccaacaccaaccggagagccctcagcgacatcaagaacataataggaggcccacaccagcacttggcggtcagcaagagggctctgtcagaaaaaccagctgctgctgctgctgcaaatgctaaagatcaagctggctttgttggacaccgtccagtcaccaggaaattcgctgcaacattggcaacccaacctacagttgcccttctggacccaattggaagtgaaagactgaaaagaaacgctgatacggcatttcacacacctgcagatatggaaagcacaaaaatgacagatgacagtcccttgcctatggtgtcggagatggatgaaatgatgagtcctgaactgaaagagatcgagatggaagatattgaggaggcagcacctgatattgacagtggtgatgcaggaaattctctggctgtggctgactatgtagatgaaatttacagattttacaggaaaactgagggtgcaagctgcgtccctacaaattatatgtcaagccaaactgatataaatgagaagatgcgtggcattctaattgactggctcatagaggtacactacaaactagagctgttggaggagacccttttcctaaccgtgaacatcatagacagattcttggcacgtgaaaatgtggtgcggaagaagcttcagttagctggtgtaactgctatgttgctcgcgtgcaagtatgaagaagtgagcgtacctgtggtcgaggatctgatcttgatcggtgatcgtgcatacacaagggctgacattcttgagatggagaggaggatagtgaacacacttaatttcaatatgtcggtgccgactccatactgtttcatgagaaggtttctaaaggcagcacaatcagagaagaagctcgaactcctgtctttcttcatgatcgagttgagtcttgtcgaatatgagatgctccagttctgcccgtctatgctagcagccgctgccatctacaccgctcaatgcaccataaatgggttcaagtcctggaacaaatgctgtgaactgcacacaagatattcagaagaacatctaatggtttgctctaggatgatggttgaactgcaccaaagagcagctcatgggaaacttacaggggtccatagaaagtacaacacttctagatatagctatgctgcgaaatcggaacccgcaactttcttgctggatgcctgaacctaagcttgaactatacacactcttaactacttccatggaaagagtggaagggaggctgcttcgactaaactacagaagtgggatctatctgaatatatgcaacggctgttgcagcaaatatttggtggggctgggttggtgtgttgtttgttagttcaataacttaacattaatgaaacagtgtttgtgttgtttaggttttttttccaattatatcgattggaatttcatttgttgtatcctggccatcattctttactcatgtcatgtgacacctctgcgttttgaaaaataaacattgattatgtggatctgctgaaaaaaaaaaaaaaaaaaaaaaaaaaaaaaagggcggccgc

SEQ ID NO: 49 - DNA, 1850 bp, Zea mays
gaattcccgggtcgacccacgcgtccgcgtcccccctcaagaactgtacccatcacgcgccgccatcgattgaccttgaccgacccgaccacccatcacgcttcttgttgccgccgctgttgcttgccgatacgcggtggctgcgctcgccggcggggaagaggggtcgcgggctgcgcgcctccagtctttcttcgcctccgtgctctcgggcctcttcttcggccaggccgatcaggacgaggaccaagagatggcctcgcgcaaccacaacgccgccgctccgcagcttcaccatcacaaccgagccggtgttcccgctcttggaaaggccaaggccgtgcccgcccgagctgacgctctgaaccggcgaccccctctcggcgatataggcaacctcgtcagcgtccgcccagccacagggaacccgcaggagcaggtcaatcgccccatcactagaagcttcggcgctcaactcgtcaagaaagcgcaggcgaaggccgcaatcaagaatgccgcaatcctgcctgcgaggcatgcgccgaggcaggagaggaaggctcctgtcaagcagcaaccgccgccggaggatatcatagtactcagctccgattctgaacagagcagggcgcagtccgagagcagcgctagctccgtccgctccaggaggaaggccatcaacaccctttcttccgtgctctcggctcgctcaaaggctgcctgtggaatcgctggtaagcctagacaagtggtcgatgacatcgacaagctggacgtcaacaatgagctcgcggtggtggaatacattgaggacatctacacgttctacaagattgctcagcacgagagacggccatgtgactacatcgacgcccaactcgagatcaactctaagatgagggctatcctggctgattggataattgaagtacaccacaagtttgaactgatgcccgaaactctctacctgaccatgtacatcatcgatcagtacctctcgctgcaaccagtcctgcgtaaggagctgcagcttgtcggcgtttcatctatgctgatcgcctgcaagtacgaggagatttgggccccagaggtgaacgacttcatcctcatatcagacagtgcatacagtagagaacagattctttcgatggagaagggaattctgaataggctggagtggaacctgactgtccctacagtgtatatgttccttgtccgttttctgaaggccgcaacattgggcggcaaagttgagaaagagatggagaatatggtgttcttcttcgctgaattggcgctgatgcaatacgatttggtgacacgcctgccatcgctggtcgctgcttctgctgtctacgcagccagactcactctcaagagggctcccctttggaccgacaccctcaagcaccacacgggcttcagggagtcagaggcagagctcattgaatgcacgaagatgctggtgatcgcgcactcgactgcccctgagagcaagctgagggttgtatacaagaagtattccagcgagcagttcggaggggtcgcgctgcgtccacccgcagaggagatctgcaagtgaacgaaggctactttatccgtgtttgcctattgcttgctttaggggaagtggcgatggaaggcgagtctgacattcgctaggcttttttatgtttgcttgtttcagacagccgtttgtttgctaggctgttctcagagtcggttgttatctgacttgtgatggcaactataattctatctagtacaacatttttattcataaatgtgaatggtgttttacaaggtaaaaaaaaaaaaaaaaaaaaaaaaaaaaaaaaaagggcggccgc

SEQ ID NO: 50 - DNA, 1628 bp, Zea mays
gaattcccgggtcgacccacgcgtccgcgtcactacccacgccactgcatagaccgagaaaaaggacgaattttttcctcgccgcaacctcacaccatggaagaggcgatgccgccgccgccgccgccgctctcatcttcctcctccgccgccgtggcctgagctctcccatcgctcgctctctccatcgggcctacctatcctagcagtgaataagtcatggcagctttcgccgcgttgttcgaccccctctactgcccggaggagcacctcgatctgtaccacgaaggacccgtcgaggttgtggacgagcagtggcaggaccagcgcggacagcagcaaccggcggctcttgacgacgagctgccggcgctgttcgaggcgctccgggacaaggagggggtggtgctggcgggtgatggggaggaggatgggtacggcggctcggcaggccgggaggccgcagtcggctgggcgtcacgcgccgcggcacggctgggcttctctgcgctcacttccgcgctgtccgccgcctacctggaccgctgcttcctccccgggggcgcgctccgtctcggcgaccagccctggatgtcgcgcctcgccgccgtcgcctgtgtcgcgctcgccgccaaggtcgaggaaacgcgcgtgccgctgctcctcgacctccagctctgcgccgccgccagctccgacgctgacgcagcggacgcggacgtgttcgaggccaagacggtgcgccggatggagctgctcgttctctccgcgctagggtggcggatgcaccctgtcacgcccttctcctacctccagcctgtcctcgccgacgctgcgatgcgcctacgcaactgcgaggccgtcctgctcgcggtcatggccgattggaggtggcctcggcaccggccctcggcgtgggccgccgccgcattgctcaccacagccggcggcggcgacgacgactcggagctgctcgcgctcatcaatgcccccgaggacgagaccgcggagtgcgccaagatcatctccgaggtgacaggcatgagcttccttgtctgcgacgtcggcggcatgatcgccgggaataagcgtaagcacgcggcggcgcggatgtactcgccgccgctgagcccgagcggcgtgatcggcgcgctgtcctgcttcagctgcgagagctcgttgtccgccacagcggactcgcgcaccctcgctactacggctgcgggggtcggcccgtgggcaccgtcagcgcccgtgtccgtgtcgtcttcccctgagcccccaggtcgggcccccaagcgcgctgcggcggcgggggtcccgcatccgcttccccccgacgaggagagccgcgacgcctggccgtccacctgcgccgcgtgacgcaccgtgccggaacggtgcctatggcgagatcccccgctcaggtagtcaggtggcggtggggatataaaggagcatcagaatctcgcgccggtgacgagaacgaaccattttgcccattgccgcgagagatggggggctagattgcaagaagaaaaggatgtaatgtctgcatgctcatgtatggcagcacattttgcaatgatggttctcgatcgtaaaaaaaaaaaaaaaagggcggccgc

SEQ ID NO: 51 - DNA, 2067 bp, Zea mays
gaattcccgggtcgacccacgcgtccgctaccctccctcatcacttgttccactacgaccggccacctagctcgccgcgcgcgcaagcctgcgccaccacccactctactagcttagtctcccctcgtgcagcgcgacgacagccagcaatggccgccgcccagtgaggcagggtcgcagtgacggcacgagacgcacacccacgggcgctggcggcatgccgggcgacgcctacgacctcctgtgcgccgaggacgacgccgccggcagcgccctgctgtgcaccaccgacgacgacgacgggtgctgctccgctgtcgaggaggactcggcggcggcggcggcctccatcgccgagctcatcggcggcgaggcccagtactcgcccaggccggactaccccgacaggctccgctccaggtccatcgacccggccgcccgcgccgagtcggtcgcatggattctcaaggtgcaagaatactatgggtttcttccattgacagcctacctcgccgtcaactacatggaccggttcctctctctccaccgtttgccggaggacgggtgggcgatgcagctgctggccgtgacctgcctctccctcgctgccaagatggaggagaccctcgtgccctccctcctggacctgcaggttgagggcaccagcagatacgactgcttcgagcctgggacggtcggccggatggagctcctcgtcctgatggcgctcaactggcggctccgctcggttactcccttcaccttcgtcgacttcttcgcgtgcaaggtcgacccaggagggaggcacaccaggtgcctcattgcccgggccacgcaagtcattctggctgcgatgcatgacgtcgagttcttggaccactgcccgtcatcaatggcggcagcggccgtgctctgcgccatcggtgagacgccgtcactggagtcggtcagccctggggctgccgtcagctggtgcatcggccttgcagaggaagggatcagcagctgctacagactgatgcagcggctggtgataggcaacgtccggacaagggtcgccagcacgacgaccatggcagcagtgaacctgtgctgctcggatgaggcgctgtcctcgcattcctccgccacctcctcgccacccccggccaagaggaggaagaggtcgccgacggccacgtgaaaactgaagaacgcaagtagataggattatttatacgcttttggggggcagattaacagggtttgatcgatttctttgcagtttgtttgtcgttttttcttctttgtgattctttctcctttttcccccttttgccatttatttgttctgttcttttgggttggatctctactcctcggtggggggattctgcctgcctgctcgaccggcccagtcatcatggcggcctctggcctctgcaccgccagccagtatgtgaaggcgacgagactcgagagagagaaagaaagacagctactacgtataacagacacatctgtgtttctctgtgcaacactctgtggggcttcttcaaccccgacgcagagctgcagagagggaccattgattggtgagcgagggcagccatggcggcagatggagatggagagggaggggggaagaggcaatgagttgcggtggatggatgatgattggtagggttaaatgaggtggtcaaagggccgggcggtcagtgctcctgccaagatgcagccctgcctgcaaagtttctgttcatattcatgagggcaaaaattgtttgtttccgagtggtttgtttgtattttgttgatgccgctgaggcgagggcgtcagagagagagaaagaggggcatgctttgctttgctgtgatgggagtcacatggatatgccctactgtggtggtgctctggagggaaatatttgtccatctccagagctaacagtgtccaagcatggggcttttgggggcccttgctgattgtttgtatctcttttttcttgcttgtgtatcaatgaagattttgccatttgaattggcctgagaagagagtaaaaaaaaaaaaaaaaaaagggcggccgc

SEQ ID NO: 52 - DNA, 1823 bp, Zea mays
ggtaccggtccggaattcccgggtcgacccacgcgtccgcatgaccccatttcatttctctacctctccagctgcccacttctctgtgagcgcgcgcgagtgtggagagaagggagggaattcccccctttctgttcggcgcacgcacccgcacgccccacgctgcacagtgcacgccgccttttcctccgccttgctgctgcgagtccgcaaccactggaggaaaaatcttttccttcacttttcttccctttccccccgcgcatgcacgggctctgattgacgccatgggggacgccgcggcctccacgtccgctcccaccacgcccacctccatcctcatctgcctggaagacggcagcgaccttctcgccgatgccgacgatggcgccggcactgacctcgttgtcgcccgcgacgaacgtctgcttgtcgtggaccaggacgaggagtatgtagcgctgctcctgtccaaggagagcgcgtcaggcggcggcggcccggtggaggaaatggaggactggatgaaggccgcgcgctccggatgcgtccgctggatcatcaagaccacggcgatgttccggttcggcgggaagaccgcttacgtcgcggtgaattacctcgatcgcttcctggcgcaacggcgagtcaatagggagcatgcgtggggtctgcagctgctcatggtggcgtgcatgtcgctggcgaccaagctggaggagcaccacgctccgcggctgtcggagttcccgctggacgcgtgcgagttcgcgttcgaccgcgcgtccgtgctgcggatggagctcctcgtcctgggcaccctcgagtggcggatggtcgccgtcacccccttcccctacatcagctgcttcgcggcgcggttccggcaggacgagcgccgggctgtcctcgtgcgcgccgtggagtgcgtcttcgcggcgatcagagcgatgagctcggtggagtaccagccgtcgaccatcgccgtagcatccatcctcgtcgctcgcggcagggagacgcccgccggcaatctggacgcgctcaaggcgatcctgggctcatcatttccgcagctagacaccgggcatgtgtactcctgctacagcgcaatgattcgggaggacgacaagtcgccgacgcagtcgacgtcgacgtcgacgggggtggcgtcctcgggcgtctctgtcgccgcgcacgccggggggagcgggagtcccagccccccgggcgcttccgtgtccgtgggcgccaataatgccgctggcaccgccccgccggcaaccacggacaaccgcaacaagaggagacggttgcgctcacctcagcgacagtaggagcagctcagctgctggcagtgcattgcagtgcagtgcagtccagctgcgttttcttttttcagctcaccatttccttttgctgccgattgtttcttcaggggtggccgtagagtgatttggtaatttagtgccggaaagattagtgcggtgtcgcagagtgatttggtaatttagtgccggaaagatttctttgttttgaggagatctttcgcgggaccaaagggaggggggcagtgtaaagacgacagaacaagcgtgaaggcctcgagagtcgagacctcacagggtaccgcctagcgcctactggggtgaaagtgaagtcaaggagtcgggagggtgtgtgtgaataccgtttgtagcagctagtgcgtccgtctgtcttttttttttctttctgtttattaattattaatagcctgctcaaaaaaaaaaaaaaaaaaaaaaaaaaaaaaaaaagggcggccgctctagaggatccaagct

SEQ ID NO: 53 - DNA, 1012 bp, Zea mays
ccacgcgtccggtgctgtgctctgctctgctctcgcctcgcacggactcgtggtaaaggatggagaccatgtcggctctcgcgaggacggcgccgccccttgctgggaccattcgccggccctcatgcgcgctgaggccgacggcgtccctctccttcgccgccgcttcaacgacgccccgcggccggctcgggctggggctgagcacggcgccggcggggagcgggagggcggccagggctcgcgccgtcccgcggcgcatcgtcgcctcctcggaggttgagcaaagctacattatgatcaaaccagatggtgttcagcgtggtctggttggagagattatttctcgctttgagaagaaagggtttttgttgaaaggcttaaaacttttccagtgccccaaggacttggcgcaggagcattacaaggatttgaaggataaacctttctttcctaagctgatcgattacataacttctggccctgttgtctgcatggcctgggagggtgatggtgttgttgcatcagctcggaaattaataggagctactaacccccttcaagctgaaccagggactataaggggtgatcttgcagttcaaactggaaggaacgttgtccatggaagtgatagtcctgataatggcaagcgtgaaattgaactgtggttcaaagaaggcgaggtctgccaatgggaatcagttcaagcaccgtggcttatagaataactattgctaatcatttccagagttgtattcaatgtttttttttgtgttcgtcttgattcaaggagccatgcaagagtgtatgagtttagttcggctaagtaattagctcatgagggcttgaattatcggttctttttgaggattgaggatttgtgcaactgaaacctttgatcagttgctcatgttgagaagctaatttcttgtcatatttacatgtaataaagtccctctactacagtaataaattagtatttcctctggtccaattaaaaaaaaaaaaaaag

SEQ ID NO: 54 - DNA, 1137 bp, Zea mays
attcggctcgagctcgagccgaatcggctcgaggcgaccgcaccggcacggcgcccatccatccatcgccatcctctagcccagtccaaaggaaccctagccatgagcgccgcctccaagaagctcttccaggccgccaggtccctcgtcctctccgcttctaaccgctccgtcctcgccgccgagggccgcaccgccgcgctcgccacgctcaccaactttggcaggaagaccctccccaccgcctacttatcctaccacaagcagggatcccaccatgccgcgtcggggtggggagccatcgccgccgcagtcccagctgcagtttacatgctccaggaccaggaggctcatgctgcagagatggagcgcaccttcattgccatcaagcctgatggtgtccaaagaggcctgatttctgagattatgagccgatttgagagaaaaggctataagcttgttgccatcaagctgattgttccatccaaagaatttgctgagaagcactaccatgatctcaaggaaaggcctttcttcagtgggttgtgtgattttctcagctctggccctgtgcttgcaatggtttgggaaggagagggtgtcatcaagtatgggagaaaactaattggtgccacagacccacagaaatctgaaccaggaaccatcaggggtgatcttgccattgttgttggaagaaacatcattcatggaagtgatggcccagagacagcgaaggatgagatcgctttatggtttgaacccaaggagctggtctcttacaccagcaatgcggagaagtggatctatggggtgaattaacgagagagtcaatctgttttttttccttcttttgatctcggttttcacataattgccgacagacctaggcacaaggatgtaataaagtcgctaccgtcacttctgagttggattgtgaccttcaggtgtagtaaggcacaaggaaggatggaaaggaaaggaatataccgtgaaatatagagcgtgcactgagtagtcgcgatgttcaaatcaaactatatatcaccgtcactggagtcatgtaatccaagatggtgatgcagatgtttctttggatctatttctctagatatccctaccaaaaaaaaaaaaaaaagg

SEQ ID NO: 55 - DNA, 658 bp, Zea mays
aaaaccagaccatcaaacaagtgccagcgccctctcgcagtcgccgcaatggagagcaccttcatcatgatcaagcctgacggcgtccagaggggcctcattggtgagatcatcagccgttttgagaagaagggcttctacctcaaggccttgaagcttgtgaacgtggagaggtcgtttgctgagaagcactacgccggatctcgcctccaagcccttcttccagggctcgtggactacatcatctctggccctgtggtggccatggtctgggagggcaagagcgtcgtcacaactggccgcaagatcattggcgccaccaaccccctggcttctgagcccggcaccatccgtggcgactttgctgtcgacattggcaggaatgtcattcatggaagtgacagcattgagagtgctaataaggagattgccctgtggttccccgagggccctgctgattggcagagcagccagcacccctggatctacgagaagtaaacatggaaagtttcacatcaaaccttgagagccagaggaagcatgtcaccatttgtgctttagcaatgttttcgaaaagattatgatctgtatcttggaaccttatttcaatggaccaaatttctttctttgccaaaaaaaaaaaaaaaaaaaaaaaaag

SEQ ID NO: 56 - DNA, 910 bp, Zea mays
ccacgcgtccgcccacgcgtccgcccacgcgtccgcccacgcgtccgcgcctctcctcctctcctcccccacccgtccatcgcccctccctccggtctgcgctcccacagcctcacccctgcgcccccgccgattcgcgtcgccctttgttggaaggaacgatggagcagaccttcatcatgatcaagcccgacggcgtccagcggggcctgatcggggacatcatcagtcgcttcgagaagaaagggttctacctcaaggggatgaagttcatgaacgtggagaggtccttcgcgcagcagcactacgctgacctttccgacaagcctttcttccccgggttggtggagtacatcatttccggccccgtggtggcgatggtgtgggaggggaaggacgtcgtgttgactggccgcaggatcattggggccaccaggccttgggaggcagcccccggtaccattcgtggggactacgccgtggaagtcggcaggaatgtcatccatggaagcgactccgtggagaacgggaagaaggagatcgctctctggttccctgaaggtgtggcacagtggaagagcaaccttcatccctggatctacgaggcttgagcagttgagcttggatgccttgcctgcttccatggaaaccagagttttgtttgagtattatctgttggctctggctgaagagtcataatttagcgctctgtgtgttacaccagagttaagtctgcctgaacttatgtggcatttgtttgagtttctaccttcgtgccctgttttctaatgtaccgtggttgtgaaccggtcaatgtgatctgaaataaaacattgcgtgccaagtttgtgttacaagtttgatgcactgggaatgccaggcaactaatgtggtaaaaaaaaaaaaaaag

SEQ ID NO: 57 - DNA, 4001 bp, Synechocystis PCC6803
atcaaccagactcccaggccgcccaccaccatggtgataatggtcacaatccaaaaatcactcacttcctggagcatcaccaaccaggcaagaacaacgaacgggacgctgttggcaattaaatgaccaaaatcggcatggagaaagggtgcaaagacaattcccctcagaccttccaaggagcgggggtaaatgccaaattgatccaaactaccccgaaaaacaaacgcatctaagatttccagaagccaaaaaatggctaaaaaactgacaataatcgagaactgactttgcagggtggcccgcagggcagttttggaattttggctcatggtggtgacaaagagcgacggctgaggttaggagggccagggacccatccataatcaaggataaccaatcgccctagaatgggacagaccagaaactagatcctatggcgactatccacggtaattggcaaccctcccacggggaaaacggcggcaaactgtttctttgggcggatacctggggtcatcctttgccagaaaccattggcgatcgccatccctttgcgttggatctgccggatttgctacaggcctggtcgaatttgcccctggccttccccaaggcggatggggtgacagaggcagcccttactctgcatttacccagccatcgccagcaaaaaattcccctaccctttgtcacagggcaagatccggtggccatggatgcgaaatatctccactggcgatcgtggcaggtaaccggggtaaatctgaccccaagccaaacgttaacgttgctccaatctattcccctggggggccaagccttagctaacttaggatcagagttttacttttacggtcaactgcaccgctggtgtttagatttggtgctacggggtaaatttgtgccgggactggagcaaaggggggaagacggtaattactatgcccaatggattcctatcctcgatagcatccaagaccaaacccatttagcccaatttagccagagagtacctgcctgcgccctggccaacctgactgactcccaggagccccaaatgttggtggtggatttactacaaaaattattgcaagcccaaattggtgccgtcagtcccagcctagccaacgttaaagaagtctggttgaatgattggctccggggattaacccatggggggcaaacctccctcggcacaggcaaagctctacaacgattagccacatccttagaccattggtatttaccagtccagaattatttgggccaaaaaaataaccaagctttagcccaacggcaatggcggggggctctgcggttacaacctccagcggacgatggggggggaacctggcaactggattatggtttacaagccctggatgacggggaattttggctcccggcggcttccctctgggccatggccggcgatcgcctggtgtggcagggaaggagggttgaccagggggcggaaagtttactgcggggcttaggggtagctgcccaaatttacgaacccattgctgcaagtttgacggaaaggtgtcccacgggctgtgggctagatgccatccaagcctacgaatttatcctggcaatcgcccatcaattgcgggatcgggggttaggggtaatcctcccgccggggttagaacggggcggcaccgccaaacggttaggggtaaaagtggtgggggaagtgcaacggcaaaggggccagcggctaactctgcaaagtttaattaattacgacttgcaactaatgatggggagcggggacaatgcccggttattgacggccaaggactttgaagcgttactagcccaaaaatctcccctggtggtgctggacggagaatggattaccctgcaaccggcggacgtgcgggcggccaaggtcattttacagcagcaacaatctgccccgcccctcacagtggaggatgctctgcgcctcagcattggtgatttacaaaccgtctctaaactgccggtgacccagtttgctgctcggggcatattacaggaattgatcgacaccctccgtaacccggaaggagtgaaagccattgctgacccaccgggctttcagggtactttacggccctaccaagctcggggagtgggctggttagcttttctggaacggtgggggctgggggcctgtttggcagacgatatgggtttgggaaaaacaccccagttgctggcttttctgctccatttagccgcggaggatatgttagttaagccggtgttgattgtttgtcctacgtcggtgctgagcaattggggtcatgaaattaataagtttgcgccccaacttaaaaccctattgcaccatggcgatcgccggaaaaaagggcaaccgttggttaaacaggtcaaagaccagcaaattgtcctcaccagttacgctttactgcaacgggattttagtagtttgaaattggtggactggcaggggatcgtgctggacgaagcccaaaatatcaaaaatccccaagctaaacagtcccaggcggcccggcaattgccagcgggttttcgcattgccctcacggggactccggtggaaaatcgcctgacggaattgtggtcaattttagaatttttaaatcccggtttcctgggtaatcagagctttttccaacggcgctttgccaatcccatcgaaaaatttggcgatcgccagtcgttgttaattttgcggaatttagtgcggccgtttattttgcggcggttaaaaaccgaccaaaccattattcaagatttaccagaaaaacaagaaatgaccgtcttctgtgacctttcccaagagcaagctggtttatatcaacaattggtggaggaatccctccaggcgatcgccgacagcgaaggcattcaaaggcacggtttagttttaaccctattaaccaaactcaaacaggtttgtaaccatcccgatctattgctgaaaaagcccgccatcacccacgggcaccagtccggcaagctaattcgtctggcggaaatgctggaagaaatcatcagcgaaggcgatcgggtgttaattttcacccaatttgccagttggggtcatttactcaaaccctatctggaaaaatactttaaccaagaggtgctctatctccacgggggcactccagcagagcaacggcaagctctggtggaacgattccaacaggaccccaacagtccctatttatttatcctttctctcaaggctggcggcacagggttgaacctcacgagggctaaccatgtgttccatgtggaccggtggtggaatccggcggtggaaaatcaggctaccgatcgtgcttttcgcattggccaaactcgcaacgtccaggtgcacaaatttgtctgtacaggcaccttggaagaaaaaattaacgccatgatggcggataaacaacaattggcagaacaaaccgtggatgccggggaaaattggctcacccgcctagacaccgataaactccgtcagttgcttaccctctccgccaccccggtggattaccaagccgaagcgtccgattgatgaaagcacaaaaaaatacagtagggaaaattcatctcctactgtgggcctcgatttaacttgaggtcgagttatttattttgctaaagcaatttccctgcttagagcatgtttggaaagttgagttttggctgtttaatcgcccctagccccccttgggaagaggggaactgtcgcaaaagtccccttttttaagccggagctttagtgaggagatttagggggataaatacctagccttgcacttttcaaacactttcttagaaaatttgctagacagaaagttcgctcagttccctggtcatatggtcaaagggggaagcaataaaatctgtgctgttcaggctggaatcctctgccatggcttcaatcatttccttcatgatctgaatgccccgcaccgtgggcccaatgggtacgcccagggaattgtaggtttcccgta

SEQ ID NO: 58 - DNA, 1190 bp, coliphage T4
gtacattgaatggcttgaaactcaaatttctttttctgaccgaatgattcagcaatataagcgattgcatcaaatgttttacaatacttgaaaataataaatacccttatctatttaaggtaagggtttattatgttattgactggcaaattatacaaagaagaaaaacagaaattttatgatgcacaaaacggtaaatgcttaatttgccaacgagaactaaatcctgatgttcaagctaatcacctcgaccatgaccatgaattaaatggaccaaaagcaggaaaggtgcgtggattgctttgtaatctatgcaatgctgcagaaggtcaaatgaagcataaatttaatcgttctggcttaaagggacaaggtgttgattatcttgaatggttagaaaatttacttacttatttaaaatccgattacacccaaaataatattcaccctaactttgttggagataaatcaaaggaattttctcgtttaggaaaagaggaaatgatggccgagatgcttcaaagaggatttgaatataatgaatctgacaccaaaacacaattaatagcttcattcaagaagcagcttagaaagagtttaaaatgacaattgaaaaagaaattgaaggattaattcataaaactaataaagaccttttaaacgagaatgctaataaagattctcgtgtttttccaactcaacgggaccttatggctggtattgtgtctaaacacattgccaaaaatatggtcccgtcttttattatgaaagcgcatgaaagcggaattattcacgtgcatgatattgattattcccctgctcttccatttactaattgctgtttagtagatttaaaaggaatgcttgaaaacggatttaagcttggtaatgcgcagattgaaactcctaaatcaattggagttgctactgcaattatggcacaaattactgcgcaagttgcttctcaccaatacggcggaacgacttttgcgaatgtagataaagtactttctccttatgttaaacgcacctatgcaaaacatattgaggatgcagaaaaatggcaaatcgctgatgcgttgaattatgctcaatctaaaacagaaaaagacgtatacgatgcattccaagcttatgagttaacgtaagtcaagctcatgtaaaatctgcctaaaacgggaaactctcac

SEQ ID NO: 59 - DNA, 828 bp, Zea mays
ccacgcgtccgcccacgcgtccgacttgagcagactagcaaggccttcagaccgggagggctccctgtcctgtcccccgcgccgccgcggatggccggagccaccacgccggcatcaggcgccctcgtcaggctctgcctgccttcgctcctcctctttctgtaccgatgtgaggctgttgagatggagagaacccttgcgatgatcaagcccgatggtttgtcaggtaagtacacagaagcaatcaaggaggtcatcttggattctggatttcatatcgtcaaagaaaccgaggtccagcttgatgctgagagggcatctgtcttctatgcggagcattcccagagaagcttctttgacagcctagtcaagtacataacaagtggtccagttcttgctatggttctggaaagacctgacgccgttgcgcaatggcgcactttgattggaccaactgatgcaaaaaaggccaaaacctctcatccaaacagcattagagcaatgtgtgggctggactctgagaaaaattgcgtgcatggttcggattcaccagaatctgcagacagagagatctcatttttcttcggagaagctgaatccgtaactgtggaacatgatgagctatagacgccacactggtatcaggcaagtcagcaaactgaattttgatgtgtctttgaactcttaggctatctcctgtagcttcttactcgtacccgtttcttattattttaaaagttattatgtaaacagtataatttatagtgcaaaacagtgtcttgcatggccatatgcttgtggcttcaaaaaaaaaaaaaaaaaaaaaag

SEQ ID NO: 60 - DNA, 7974 bp, Saccharomyces cerevisiae
ggtaccattgtccatgacaacagcgggattgtttaagtatgacattgaatcctaatttcttgctcaatcgtgaggccttacggtagggccaattcttgattaaactactctcatatatttttgtttgaaacttttgaaaaggggttctcgccattttgaagccgcggacaccgggtgactactgaaagtccttatcgaagggtcttcttgagcttacgttaaaaaagagccatagtagcttcacgagagagtcattggtaaagtgaaacatacatcaaccggctagcaggtttgcattgatatggaaccgcatgaggagcagatttggaagagtaaacttttgaaagcggctaacaacgatatggacatggatagaaatgtgccgttggcaccgaatctgaatgtgaatatgaacatgaaaatgaatgcgagcaggaacggggatgaattcggtctgacttctagtaggtttgatggagtggtgattggcagtaatggggatgtaaattttaagcccattttggagaaaattttccgcgaattaaccagtgattacaaggaggaacgaaaattggccagtatttcattatttgatctactagtatccttggaacatgaattgtcgatagaagagttccaagcagtttcaaatgacataaacaataagattttggagctggtccatacaaaaaaaacgagcactagggtaggggctgttctatccatagacactttgatttcattctacgcatatactgaaaggttgcctaacgaaacttcacgactggctggttaccttcgagggctaataccttctaatgatgtagaggtcatgagactcgctgcaaagactctgggcaagttagccgttccaggaggtacatatacctctgatttcgtggaatttgagataaagtcttgcctagaatggcttactgcctccacggaaaagaattcattctcgagttcgaagccagaccatgctaaacatcgtgcgcttctgattataacagcgttggcagagaattgtccttatttactctaccaatacttgaattccatactagataacatttggagagcactaagagacccacatttggtgatcagaattgatgcgtccattacattggccaaatgtctttccaccctacgaaatagggatcctcagttaactagccagtgggtgcagagattggctacaagttgtgaatacggatttcaagtaaacacattagaatgcatccatgcaagtttgttggtttataaggaaatcttgtttttgaaggatccctttttgaatcaagtgttcgaccaaatgtgtctaaattgcatagcttatgaaaatcataaagcgaaaatgattagagaaaagatttaccagattgttcccctattagcatcgttcaatcctcaattatttgctggcaaatatttgcaccaaattatggacaactatttagagattttaaccaatgctccagcaaagaaaataccacatctcaaagatgacaaaccacagattttaatatcgattggtgatattgcatatgaagtcgggcccgatatcgcaccttatgtgaaacaaattcttgattatattgaacatgatttacagacgaaattcaaattcagaaagaaatttgaaaatgaaattttctactgcatcggaagattggcagttcccttgggccccgttctaggtaaattattaaacagaaatatactggacctgatgttcaaatgccctctttccgactatatgcaggaaacgtttcaaattctgactgagagaataccatcactaggccccaaaataaatgacgagttgcttaacctagtctgttcaaccttatctggaacaccatttatccagccagggtcaccaatggagataccatcgttttcgagagaaagagcaagagaatggagaaataaaagcatcctacagaaaactggtgaaagtaacgatgataataatgatataaaaatcattatacaagcttttagaatgttaaaaaatatcaaaagcagattttcgttggtagaattcgtgagaattgttgcactttcttacattgagcatacagatcccagagtaaggaaactagctgcgttgacatcttgtgaaatttacgtcaaggataacatctgcaaacaaacatcactacactctctgaacactgtatctgaagtgttatcaaagcttctagccattacgattgcagaccctttacaagatatccgtttagaagttttaaagaatcttaatccatgtttcgatccccagttggcacaaccagataatttgagactcttgtttattgcactgcacgatgagtcgttcaatattcagtcagtagcaatggagcttgtcggtaggttgtcttccgtaaaccctgcatacgtcatcccatcgataagaaaaatactactggaactgctaacaaaattaaaattctcaacttcttctcgagaaaaggaagaaactgccagtttgttatgtactcttatcaggtcgagtaaagatgttgcgaaaccttatatcgaacctcttttaaatgttcttttaccaaaattccaagatacctcttcaacggttgcatcaactgcactgagaactataggtgagctatctgttgtagggggcgaagatatgaagatatatcttaaggatttgtttcctttaattatcaaaacatttcaggatcaatcaaactctttcaagagagaagctgcacttaaggcccttggtcaacttgcagcctcatctggttacgtgatagatcctttactcgactatcccgaattattgggtatattggtgaatatattgaagacagaaaactctcaaaatattaggagacaaacagtcactttgataggtatactgggagctatcgacccatatcgccaaaaagaacgtgaggttacctctactaccgatatatctacagaacagaacgccccgcctatcgacattgctcttctcatgcagggcatgtctccttcgaatgatgagtattataccactgttgtcattcactgcctgctaaaaatcctaaaagatccatccctatcatcttaccacactgccgtgatccaagcgattatgcatatttttcaaacccttggtctaaaatgtgtttcattcttggaccagatcatcccaactattttggacgtaatgcgtacatgctctcagtcactattagaattttacttccaacagctttgctctttgattattatcgtaaggcaacacataagacctcatgtcgattctatattccaggctatcaaagatttttcttcggttgctaagctacaaataacgcttgtaagtgttattgaagcaatatcaaaggctctggagggtgaattcaaaagattggtccctcttactctgaccttgttccttgtaattttggagaatgacaagtctagtgacaaggtcctctccagaagggtattgagactgttagaatcgtttggtcctaacttagaaggttattcgcatttgattacacccaagatagttcaaatggcagaattcaccagcgggaacctacaaaggtctgcaataattactattggcaaactggccaaggatgttgacctttttgagatgtcctcaagaattgttcactctttacttagggtactaagttcaacaacgagtgacgaactctcaaaagtcattatgaatactttaagtctactgctaatacaaatgggcacatcctttgctatcttcatccctgtcattaatgaagttttaatgaagaaacatattcaacacacaatatatgatgacttgacaaacagaatattaaacaatgatgttttacccacaaaaattcttgaagcaaatacaacggattataagcccgcggaacaaatggaggcagcagatgctggggtcgcaaaattacctataaaccaatcagttttgaaaagtgcatggaattctagccaacaaagaactaaagaagattggcaggaatggagcaaacgtctatccattcaattattaaaagagtcaccctcccatgctctaagagcttgttcaaatcttgcaagcatgtattatccactagccaaagaactttttaataccgcattcgcatgtgtttggaccgaactttatagccaatatcaagaagatttaattgagtcattatgtatagccttatcttctcccttaaatccaccagaaatacatcaaacattgttaaacctggtagaatttatggaacacgatgacaaggcattaccaataccaactcaaagcctgggcgagtatgctgaaagatgtcacgcctatgccaaagcgctacattataaagagattaaatttattaaagagcctgagaactcaactattgaatcattgatcagcattaacaaccagctgaatcaaacggatgctgcaattggtatattaaagcatgcccaacaacatcattcacttcaattaaaggagacatggtttgaaaaattagagcgttgggaagatgcactacatgcttataatgaacgtgaaaaggcaggtgatacttccgtgagcgttacactcggtaagatgagatcccttcatgcccttgcggaatgggaacagttgtcgcaattggcagctagaaagtggaaagtttcgaagctacaaactaagaagctaatagctcccttggcagctggtgctcgtgggggttcgggagagtgggatatgcttgacgaatatatcagcgttatgaaacctaaatctccagataaggaattttttgatgcaattttatacttgcacaagaatgattacgacaatgctagtaagcatatattaaacgccagagatttgcttgtgactgaaatttccgcgttgatcaatgaaagttataatagagcatatagcgttattgttagaactcaaataataacagagtttgaggaaatcatcaagtataaacaattgccacctaattccgagaaaaaacttcactatcaaaatctttggacaaaaagactgctgggctgccaaaaaaatgtcgatttatggcaaagagtgcttagaataagatcattggtaataaagcccaagcaagacctgcaaatatggataaaatttgcaaatttgtgcagaaaatctggtagaatgagactagcaaataaggcattgaacatgctactagaaggaggcacgatcctagtttaccaaatacggtcaaagcctcctcccccagttgtttacgcgcaactcaaatatatttgggctacaggagcttataaagaagcattaaaccacttgataggatttacatccaggttagcgcatgatcttggtttggatccgaataatatgatcgcgcaaagtgtcaaactctcaagtgcaagtactgctccgtatgttgaggaatacacaaaattattagctcgatgttttttaaagcaaggtgaatggagaatagcaacacaaccgaactggagaaacacaaatccggatgcaattcttggttcctatctattggctacacatttcgataaaaattggtacaaggcatggcataattgggccttagctaattttgaagtaatatccatggttcaggaagagactaagctcaacggaggtaagaatgatgatgatgatgacacggcagttaataatgataatgtgcggattgacggtagtatcctaggaagtggttctttgactattaatggcaacagatacccgctagagcttattcaaagacatgttgttccagcgatcaagggcttttttcattcaatatctctattagaaacaagttgtttgcaagacacgttgaggttatcgactcttttatttaactttggtggtattaaagaagtctcacaagccatgtatgaaggcttcaatttgatgaaaatagagaactggcttgaagtcttaccacagttgatctctcgtatacatcagccagatcctacggtgagtaattcccttttgtcgttgctttctgatttagggaaagctcatccacaagctctcgtgtatcctttaactgtcgcgatcaagtctgaatctgtttcaagacaaaaagcggctctttcaataatagagaaaattaggattcatagtccagtcctggtaaaccaggcagaattagttagtcacgagttgatcagagtagccgttctatggcacgaattatggtatgaaggactggaagatgcgagccgccaatttttcgttgaacataacatagaaaaaatgttttctactttagaacctttacataaacacttaggcaatgagcctcaaacgttaagtgaggtatcgtttcagaaatcatttggtagagatttgaacgatgcctacgaatggttgaataactacaaaaagtcaaaagacatcaataatttgaaccaagcttgggatatttattataacgtcttcagaaaaataacacgtcaaataccacagttacaaaccttagacttacagcatgtttctccccagcttctggctactcatgatctcgaattggctgttcctgggacatatttcccaggaaaacctaccattagaatagcgaagtttgagccattattttctgtgatctcttcgaagcaaaggccaagaaaattctccatcaagggtagcgacggtaaagattataaatacgttttaaagggacatgaagatataagacaagatagccttgttatgcaattatttggtctagttaacactttgttgaagaatgattcagagtgtttcaagagacatttggatatccaacaatacccggctattccattgtcgcctaaatctggtttactaggatgggtaccaaatagtgacacattccacgttttgatcagagaacaccgtgatgccaaaaaaattccgttgaacattgaacattgggttatgttacaaatggcccccgattatgagaatttgactcttttacaaaaaattgaagtattcacgtacgctttagataatacaaaaggccaagacctttataaaatattatggttaaagagtaggtcgtcagagacatggctagaacgtagaacaacttatacgagatctttagcagttatgtccatgactggttatattctgggactaggtgatcgccatccaagcaacctgatgctagatagaatcaccggtaaagttatccacattgatttcggcgattgttttgaagctgccatcttaagagaaaagtatccagaaaaagtgccatttagactaactaggatgttaacatacgcaatggaagttagtggaattgaaggcagtttccgaattacttgtgaaaatgtcatgagagtcttaagagataataaagaatcattaatggcgatcttggaagcttttgcgcttgatcctttgatccattggggattcgatttaccgccacaaaaacttactgagcaaactggaattcctttgccgttgattaatcctagtgaattattaagaaagggcgcaattactgtcgaagaagcggcaaatatggaagcagaacaacaaaatgagaccagaaacgccagagcaatgcttgttttgagacgtattacagataaattaacgggcaatgatatcaagaggttcaatgaattagacgtccctgagcaggttgataaactgatccaacaagccacttctattgaaaggttatgtcaacattatattggatggtgcccattctggtgactgcggtgtcatttttcatttcgtgctttgtttactatttattttttttgtattacgcatttgtatacgtgtgcaagtattgtgtattattattattattattatcattatttttgtaatatctcgtcattatgtgaaatgaaggatgatataaggtacataaattgttgaaatcaacaccatttaaaacaactttattggatagatggcacatcggtacttttcacaataggtattgacaatatcagtccatttgttat

SEQ ID NO: 61 - DNA, 820 bp, Zea mays
cccacgcgtccgtccccatccgcacctctctccatctccctgctcctccgcctccttcttgatccagccaagccagggatcgccatgtcggactcggaggagcaccacttcgaatcgaaggccgacgccggagcgtccaagacctacccgcagcaggctggcaccgtccgtaagaacggcttcatcgtcatcaagaaccgcccctgcaaggttgtggaggtttctacctcaaagactggtaagcatggccatgccaaatgccactttgttgccatagacatattcaacgggaaaaagctcgaagatattgttccttcgtcacacaactgtgatattccgcatgtgaaccgtactgagtaccagctgattgatatatcagaggatggatttgtgagccttcttacttcagatggcaacactaaggatgatcttagactcccaactgatgagactcttgtggcccagatcaaggaagggtttgaaagcggcaaggatcttgttgtgactgtccagtctgctatgggggaggagcagatctgcgcgctgaaggatgttggccccaagtaacttccctgccttggaatactgtatctcaaaacctaaatcgaaaaaagaagtgtatcaaggattgctacagagacatccatctggcttgagctggcttttgctatggcaaacacaagtgcagggatcgctgggtgttgcaccgtgtctgcattatgtggttacattctggaccctgtattttctatgcttttatgcccctactgtttagtattaattatcaataaatttgtttgggacggttgaattgcaaaaa

SEQ ID NO: 62 - DNA, 2156 bp, Saccharomyces cerevisiae
cccgggaattttagattcaggtaggaaattgattacataaatactgttaccctgaatcatattcgacgatgtcgtctcacacggaaatataattcatttcttggttttccaaaaaaattttcattttttttcacttttttgtttcgtcctcctttttttttttttttattttttttcctgtgttcaccttttttttttttttttcagtttacaactttctgcattcttttctgtgttttttttttttcgtttttccattgttcgttcgttgcctgtttttttgccctattgttctcgagcctaaaaattttttcctttcctgctttcctttcttcgttcaaagtttcctattccattgttctcttcggtaaactcattgttgtcggaactcagatatattcaggtcaatttactgtacttcaattgacttttttcttgaaatttcaacttgccttttcaacttgttcttcttttttaatcttattctacactttagttcccttaccttgttcctaattattgtctagcaaaaagaaaacatacacctatttcattcacacactaaaacatgtctgacgaagaacacacctttgaaaatgctgacgctggtgcctccgccacctacccaatgcaatgttctgccttgagaaagaatggtttcgttgtcatcaaaggtagaccatgtaagattgtcgacatgtccacttccaagaccggtaagcacggtcacgccaaggtccatttggttacccttgatatcttcactggtaagaagttggaagatttgtctccatccactcacaacttggaagttccatttgtcaagagaagcgaataccaattgttggatattgatgatggctacttgtccttgatgaccatggacggtgaaaccaaagacgatgtcaaggcaccagaaggtgaattgggtgacagcatgcaagctgctttcgatgaaggtaaggatttgatggtcactatcatttctgccatgggtgaagaagctgccatctccttcaaggaagctccaagatctgattagatattttagatttctatagcttacaaaatacgcgatgtttttttgatctagaaatcttatttatacattttatataatattataataatcataatcataattattcatcctaactaacttcgttctgtttcagctacgaagttgccttcattatcggtacgttcgtgttaattggtgtttgataccatagtcacttatgacgacttacagaacttttttttttgacggatattttcccctcaatatgccgaggatgataactttataaattgccttctttcggttccttttttctttttaatttagctgacgggaacatgtgtatataccccagaagaatttaaacagaaatttttttgagctattttacgaaaatattaaaaactagggctacagatatcagagaaaaaattacttatatgatgacaataacttaatatcacagtcactatcgttctcgcctttatatgcgcaatgacagcattcgacttttccttagaagggatccgatcaacgaaacttcaaaaagagtagaagtcgaaatattttttgcacgacgagggtgacaaaccgtgctatgtccacaaatgaggccctgctttcccaagataaattgcgtaaacatataattgttacaaggatccgatcaacgaaacttcaaaaagagtagaagtcgaaatattttttgcacgacgagggtgacaaaccgtgctatgtccacaaatgaggccctgctttcccaagataaattgcgtaaacatataattgttacaaatccaaggctctgtgatttcttcaccaagtgtagttgtgatgtatagtgtgtaggataggtaatgaccggtaaatcaagctggtaaaaagtcctaataacaagcccgaatctggaataatggtaatattcccatgccaggtggacagtgttgtccttacacaaactcaagagattaaaggcaacttggccgagtggttaaggcgaaagattagaaatcttttgggctttgcccgcgcaggttcgagtcctgcagttgtcgttattttttatttccctttcttttcgtacatacacaatgcacagtcttcaaagtaaaataccaacgtatgtatcaagatc

SEQ ID NO: 63 - DNA, 1764 bp, Saccharomyces cerevisiae
ggaagaactgaaaaaaaggtgggaaaaaaaaataaaaagtaaagtgaaaaattaaatgtaatgtatatttccattttgacgcaaagtacttccctctatcagttttgtatctaactgaagagtaaagtcgtgttttgcttagttaacttatatacaagtcaaagcaaaaaagatgtccgatatcaacgaaaaactcccagagttactacaagatgctgtcttgaaagcatctgttcctattccagatgacttcgttaaggttcaaggtattgattactcaaagcctgaagccactaacatgagagcaactgatttaattgaagctatgaagaccatgggtttccaagctagttctgttggcactgcctgtgagattattgatagtatgagatcatggagaggtaagcatattgacgaattggatgaccatgaaaagaaaggttgcttcgatgaggaagggtaccaaaagactactatcttcatgggttatacttctaacttgatcagttccggtgtacgtgaaactttacgttatttggtgcaacacaaaatggttgatgctgtcgttacttctgctggtggtgtggaagaagatttgatcaaatgtcttgctccaacttacttgggtgaatttgctttgaaaggtaaatctttgcgtgaccaaggtatgaatcgtattggtaacttgcttgttccaaatgataactactgtaagtttgaagaatggattgtcccaattttggataagatgttggaagaacaagatgaatacgtaaagaagcatggtgctgactgtttagaggctaaccaagacgtggattcaccaatctggaccccatctaagatgatagatcgttttggtaaggaaatcaacgacgaatcctccgtattgtactgggcccacaagaataaaattccaatcttttgtccatctttgactgatggttcaatcggtgacatgttgtttttccatacttttaaagcatctccaaaacaactaagagttgacattgtaggagatatccgcaaaatcaattcaatgtccatggccgcttacagagccggtatgatcatcttgggtggtggtttgatcaagcaccacattgccaatgcttgtttgatgagaaatggtgctgattatgccgtttacattaacactggtcaagaatacgatggttccgatgcaggtgcaagacctgacgaagctgtgtcttggggtaagatcaaggctgaagccaaatccgtcaaactttttgctgatgtcaccactgttcttccattgattgttgctgctacctttgccagtggtaaaccaatcaaaaaagttaagaattgatgagagaattttgagatgaaaaaaaaaaatgaatctgtactatttctttttttagtgccaaaattttgttttaatatagagataaataaaaaatgaacatattactataatatcaacaaaatatgatgtaatgtctgcaataaagatgagtcaattgcatttctataccgtacctaaaccgtgtgtacatagccatgaaattatgtaagtttatacacataaattgcgtcgagtctgctgtgtaatttataaatgtgtcacagcagcttttgtatttctattagttgccgttacctctcattttttcggcggtaagaatgtcactgccctatggattccattacatttttctcaatcagttcacctacggtttgaataaaccatactagcttcgtaagcacttactatacgttgttgagtaatgccta

SEQ ID NO: 64 - DNA, 2307 bp, Saccharomyces cerevisiae
gaattcgtatctcattctccagtgaagtatcacaaattttaccgtggaaattcgttcctcaacaacgtgaggtttacgttctgcctggtgaaacagccctcgctttttataaagccaagaattacagcgataaagatattattggtatggctacttatagcatagcgcctggtgaagcagctcaatactttaataaaatccaatgtttttgctttgaagaacaaaagctagctgccggtgaagaaatagatatgcctgtcttcttttttatcgatccagattttgctagcgatccagcgatgcgaaatatcgatgatattattttacattacacattcttcagagctcattatggtgatggtacagctgtaagtgactctaaaaaggagcctgagatgaatgcagatgaaaaagcagcgtcattggctaatgctgctattttatccccagaagttatagacacaaggaaagacaactcaaattaattgtaaatacaaagtcattcaatgtacataaatactgttatgcttttgaattaagtaaaacaccatgacttcatattgagatgttttaagcatataatcacggcaccgaacttcttgtaatcatcaaatctttgttttctagccgtcatagaaatgaagaaatgaagattcttgttcatgtgatacagcttttctagacagctaacttgtacatccagacatcctaaaacacccataaagcaaaaaaaattattgaaatattctcttttttttcttttttttttttctggtggctttcaatgcggaatcgctaacatccgaaaatttcagaggcttcacttagcgtcgcagatcccgtagtcgccagatgctttgaaaaaaaaaaaaataaatagaaaagtttgtagacatatccgatgtagtatatttcagaggccaacctttacttttgttttctcctacacttcaaaataaaagacaccgtcacaaatctcagcaacaatggctttccaaaaagacgctaagtcctctgcttactcctctcgtttccaaactcctttcagaagaagaagagaaggtaagactgattactaccaaagaaagagattggtcacccaacacaaggccaagtacaacactccaaagtacagattggttgttagattcactaacaaggatatcatctgtcaaatcatctcttctaccatcactggtgatgtcgtcttagctgctgcctactcccacgaattgccaagatacggtattacccacggtttgaccaactgggctgctgcttacgctactggtttgttgatcgccagaagaaccttgcaaaggttgggtttggacgaaacttacaagggtgttgaagaagttgaaggtgaatacgaattgaccgaagctgttgaagatggtccacgtccattcaaggtcttcttggatattggtttgcaaagaaccaccactggtgccagagttttcggtgctctaaagggtgcttctgacggtggtttgtacgttcctcactccgaaaacagattcccaggttgggacttcgaaaccgaagaaattgacccagaattattgagatcttacatctttggtggccacgtttcccaatacatggaagaattagctgacgatgatgaagaaagattctctgaattattcaagggttacctagctgacgacattgatgctgactctttggaagacatctacacttctgctcacgaagctatcagagctgacccagctttcaagccaactgaaaagaaattcaccaaggaacaatacgctgctgaatccaagaagtacagacaaaccaaattgtccaaggaagaaagagctgctcgtgttgctgccaagatcgctgctttggctggtcaacaataaattatggatatataacgtcattttgagatattttaaataaagctatcttcacataacctttgtattcatttttagttaactcatttacatcatccacttactacatttgtattttttttacgatttgcgtaccgcctcattactaccctttttttgcactgcagtaatagtacactcaaatcatgatgaaaagagaaaagaaaaaaatgccacaaaaagtagttgattttataaaagttatcatccaattttaggtaattttattctctttatgtaacgaacatatgaagatttcttctctagaatggcattctaactaagtccgtgccataaaatcatcactaacaaatataagatcacgctatactatcaatgaagaaacaaatattaatagttgctgcacaaagtattttatgtctactgtttt

SEQ ID NO: 65 - DNA, 2995 bp, Saccharomyces cerevisiae
gaattcgtccccgaacgcaactgcgaaattgaagggtaccgttgcttattttgtaattacataactgagacagtagagaattgatacatggataactgaatctctttcaactaataagagacattatcacgaaacaattgtacatttctctccttgtctgtgctaaataaactacaaataaaaattcattttctttcattttcattcgacacgccgcggcatcttcgttttcttcaccgattaattttaatctgcgccgtgcagatattttcgcccatttcgaagtgaaatcattctaataacttctcctgcgcaatagattggtcatcctgatttttattctgaaatcgaaaatgaaaagcatttattgcactgaaatagcggaacctgcttctaataagcttaaaattcaatcataatagtgtagttaatagaaaggacagaagaacttttcgttccttggtttatcatccaggtttcagcacggcttttgtttcaagtttaagtaggtaagattttttgattgttctacaactttttcatagtaatcaaaacctttgaatttcaaacttactatgtctagtactcaagtaggaaatgctctatctagttccactactactttagtggacttgtctaattctacggttacccaaaagaagcaatattataaagatggcgagacgctgcacaatcttttgcttgaactaaagaataaccaagatttggaacttttaccgcatgaacaagcgcatcctaaaatatttcaagcgctcaaggctcgtattggtagaattaataatgaaacgtgcgaccccggtgaggagaactcgtttttcatatgcgatttgggagaagtcaagagattattcaacaactgggtgaaggagcttcctagaattaagccattttatgccgtcaaatgtaatcctgataccaaggttttgtcattattagcagagttgggcgttaatttcgattgcgcttccaaagtggaaattgacagagtattatcgatgaacatctcgccggatagaattgtttacgctaatccttgtaaagtagcatctttcattagatatgcagcttcaaaaaatgtaatgaagtctacttttgacaatgtagaagaattgcataaaatcaaaaagtttcatcctgagtctcagttgttattaagaatcgctaccgatgactctaccgctcaatgtcgactttccaccaaatatggctgtgaaatggaaaacgtagacgttttattaaaggctataaaggaactaggtttaaacctggctggtgtttctttccacgtcggttcaggcgcttctgattttacaagcttatacaaagccgttagagatgcaagaacggtatttgacaaagctgctaacgaatacgggttgccccctttgaagattttggatgtaggtggtggatttcaatttgaatccttcaaagaatcaactgctgttttgcgtctagcgctagaggaatttttccctgtaggttgtggtgttgatataattgcagagcctggcagatactttgtagctacagcgttcactttggcatctcatgtgattgcgaagagaaaactgtctgagaatgaagcaatgatttacactaacgatggtgtatacgggaacatgaattgtattttattcgatcatcaagagccccatccaagaaccctttatcataatttggaatttcattacgacgattttgaatccactactgcggtcctcgactctatcaacaaaacaagatctgagtatccatataaagtttccatctggggacccacatgtgatggtttggattgtattgccaaagagtattacatgaagcatgatgttatagtcggtgattggttttattttcctgccctgggtgcctacacatcatcggcggctactcaattcaacggctttgagcagactgcggatatagtatacatagactctgaactcgattgaaggatatatttaaccacgactttcgcaagagagacggagggggtgggaaaaggctgaatgcaaccattgtcactaagaatttgagtgttcatgaacgagttatacacgctatttaagagtcagagaatgatgattcaagaaaattctggcatttttcctgtccaccactgtacgccattgtacacaaaagtatttttttatattttttttacaattttttataatttttttttatgtttagtgtatatttgctagaaagaaacaagatcttttttggtagtgtaaatgcttaaactttgtctctttttcctttttactttggaaaaatgccgacgcaagaacatagacatctgcgaaaaccaaaaataaagtaccaattgtacatacaaaaacagagaaaaagttcatgaacagaacgttactacggtatagcaagatctttgaatacatccattacttcggattgttcaccatacttcaacacaggccaagatagaccatagctacagtgatagacgaatatttatttcaaaagaagcatcaaccataaaataaaaagaaaaatgatgaaaaaaaaaccaaagtgccaaattgcaaggaccaaaccatcggtcgaaaacgtcataccatataaccaattcaagaagacgcagccgcgattcaacggcaacttttctgcactgaataatgaagaatacataatactctttggcggaggtcgggacctgatactaggctccctgacaccttgttcgagctctcatttgtccaatcaagccaacccacaagacaccagtgagtatggcacagacctgtttatactcaacagctgcattatcatttggttcaatggcttgggatatgggctggaaattccctacagcagcgttttgtaccatgcatcaagacggctaccagatggtagggaagggcttcaattagaaattttgctgactttggaaagagacgaagtgttggacatgctctaccaaagcctcgcgccacaggcctgcgaattc

SEQ ID NO: 66 - DNA, 15323 bp, Oryza sativa
tgttgcatatgtttgtgttagtgctcatttaagcgtgttatgaactagaaatgcttagtcaattccaacaaaaagttcttcttagatgattattctgccattgtgctgctttagctgtcactgagtttggcatttccactcttgcagataactctacccaggctgagttgtggctggtattggcgatataagcttgttagctgttttctcttgtgtctttggtcttcatctttgattacgcgtcattgaaaagactgtacatgagaaaactcttttgttgaaacatttctcttgtaatatgaatgtattgagtttgtgactatccttctcctgtgctagaatcatatatttcagcttcaaagctcttgtggtacttttcaagtttcctgttgaaccgaatacctagtgcattaactctaagcttgtgacaaacattcatgcaaattcgtggatattaacattggatacttggtctactggaaaattggagctccttattcatgtcatcaatggagagcctagcacagttagagctgttatgtgaaaagctttacaattctagagactccgctgagcgagcacatgcagaaagcaccctcaagtgcttctcggagaacagtgactacatttcacagtgccaatatatattggacaatgcctcaacaccatatgccctgatgctggccagttcaagcttgttgaaccaagtcaacgaccgcagtctttcattgcaattgcgtcttgatatctgtaatgttccttaccaaaaatttatcatgaaatcagttgttcacctgtttttgcttttctattgcatctgcatggcatgttttcatttacgtctctaccaatttattcagttatgattatttctgcattgcaagttaccacagaaagcagtaagcactcgtttgtactgctatttagtataagtggccatatttaaatctttgttgttccttccttgactcaacttatttctgttgcctttgatgtcttatgcttatttaatatggctcgagttgaacaaacaaatatttattctttgcattctatccttgaattcatttatgcctctgcagcatgttagaatggccaaatatttatttccatttacccactgttgttttatgcatcggtaatgtagataaattgcaaaaatacatgtctataaacaatgcttaaatctattttgtgtacttttgtgcccttgtctactgctaattttaaaccaatatattgtgatctgtttgaagtgaattatgtcataaactatcttgctatgaggggacctaaactgcagacgtttgtgattaaatccctaattcagcttgtctgtcgaattacaaaatttggatggttcgatgatgataaattcagagatattgtcaaggaggcagctgatttcttatctcttgtaagtttgttgtctgttttgttggcatttagttgagagctttttaaccgttgataacatatttaaggactatgtaccttcgatttgagtggagctatacaccttggtacataaatccttggcaatttctatgaccaatgcccgttctttagaactaagtaatatgaaaaaggataaccggcctaccagataaatctacataagaacctgatttctattaaagaatccatatgaggaacagttataggttttattccatgctctattgcgagttaattgatgcatactaaagttgctgcttatgcttttcatttcaggcatcccaggatcattatttcataggattgaagatactatatcatcttgtaggagaaatgaaccaggtgccacctagaaacttctctattattataattgttcaataactattgattctaatcaataagataagggtacccataagataatgcaatttggcaatacgtagattaatttaaaagttgaaaaaaaaatatttcaacagtattttttttgtgtttagaactgcacaacgtgcatggtgttgttggcacttataaaacatcggatgaaacacagaaggtcaaacgtacatgaaacactacatatgcactaacttgtgcatgaatcaattaatatcataagtaaaagttgttctttattttcctttgcgacacttaacaaagagttataaacatgcagatagacatatataggcatagtattattgaaaaaatattaatggttaatccaaccaatgttaacaagacaaagttaaacattgacactgatggttactgtattaatttccatttattttaaagagtattggcggcaatatgatactccttccttccctaaatgtttgacgccgttgacttttttagacatgtttgaccgttcgtcttatttaaaaacttttgtgaaatgtgtaaaactatatgtatacataaaagtatatttaacaataaatcaaatgataggaaaagaattaatagttacttaaattttttgaataagacgaacggtcaaacatttttaaaaaagtcaacggcgtcaaatattttgagatggagggagtatgtggcaccttactaaattgtgttggggtagtgttggtagcattcctttttacctgcttggagctgtgatgcacatttcagcctttttactgtcccacctttctgttagcctgtcacttctttttatgccttccttctttgtcttaactttttctggtatagtttcttgaatatgattgtgtgtcactgtatttcttgtaatgttgagtttcattttatttaacatgaaataacacagattgcttgcttagtacaagaaagggttctagttctacaaatatcttctatgaactgtttctctttttttccggtaacaattctttcaatgaatagttgatttggaccattaagctttctcagtatgtacttggcttcatactttttgcatgctgtcttctgcttatgaattatatagtgttcgttaatatcttcaattctgattgggttatgtacttatgttgttgcttatatcttttcaatatagtttatactgctgtgcccatttttatccactcttgttcaatttcctttgtcaggtggactgtaatgtgtttagctgactttttgtgtctgtgtatgcatgcaggcaaacgctatgcctttgacacttcacagaaaaattgcttgttcgttcaaggaccagtttcttctacagatcttccaaatttctttaacctcattacaccaactgaagagtgaaggtaaagttcaaggaccacattttgtaaaaagtagagtgtatcggaatgcccacactttctcacttccatcttctgatacaatctgtaattaaactgcagtacctgatgactttaggcgtgatcccctctcgcttgcattaaggtgcttgtcatttgactttgttggttgtcctgtggatgaaagctctgaggaatttggtacagtgcaggtatgttagtttgcacaattgttatcttctctgtaaaaccattgacctatcccagttggtctatttcttataatttgtgtaatttttattgatgcagcttcctgcatcttggaggcctctccttcaagatccttctactgttcagatcttcttcgattactataaagtcaacgatacatgtgtttcaaaagaggtatacattgattgggtgatttgaataatatagatgatataatctctgattatttttaccgagtgctttgtccattactccataaacacaaaagaggtatattttgcttcatagttcctcatgtttagaatgtacactttgatcgcatgatttttcattaatacattttacaaacttattgctagttagctatcactacagttctgcaatattttgattgacttccattcagcagcaatatttttccaatgttgtcttttaaaagcatgacttcctcacctctgtgaagcagcaatattctcctaatgtatggatctctaagaggcatgctttattcctttcaagaatctctaagaagaaatattttccttgtgaatttatcttacaaacagctgtttcgtttttctttctatatgagtaatgtgccatgttcagtggatttgctctttccttgactcttccccgcctccctctcctatgcacttctttatgtcatttctgcaggctttggaatgtcttgtgagacttgcttctgtcaggcgcagtatttttgttgaggacccttcaaggacccagtttctttctcatctgatgtcaggcacaaaggagatactccaaactggccaaggtataacgctttgtcctttttttgccaagttctgttctattgtagtactcctgttacaaatttcagttacttggaccagcggtttcaattgcaatcctcttacatggagtgaaaagcctcttttatgtaaagtgaagaagcatttaaaacatgagttgattgactcatgcctagtcacgctatgtggtgcactgtagaaaccagacttgctttttataagtaaaagcacacattggttcattataaatgcaatagtaatctttaaacttaggtacttgtctgtcaaattagctccatgcaggaacaaaaataaatgctccatatctttacgtaatttattctgatgtgtgatctgctcatctgcaggtcttgctgatcatggaaattaccacgagttctgccgtcttcttggacggttcaaagtgaatttccaggttggaatcctgttacttaaaatgaaggatgaagctaacttttcttgtttgttttgtgtcaaggatttgctcttcgttctctctctttgcattcttttacagaattattgacttgctagtttttggtacgtaacaactgatgaattagttggcaacagtagtgatgcattaattctggttggtatcctgactgaaatgaattgcgatggtggggattttgtgggattccaaacacgccttactgatgttattttaccctgatttgtacttttgtactattgctttgaaggaacagtaataagtaaatccaatggtttgtagcttctagtcttttggctttactagcagcactaactagtcatactgatatgcagttcaaggttttaaatagtggattgcatttttatagtgcattggttttgatgtagagcatatcgtaatgatgcagtgcatgttgtagtgaacagttgatggaatagttaatttgtatcataattataattctacgaagtgaactattgtgtttatgatgtttttatgtatttttggtaatgtttgcaacttgcaagtgctatttttgttggcatcttcttttaattttttgccttacagacatttggtaccaatttattagctttcaaagtttcaataaacaacggagcatttaatacctgtgtaatagtgttgtcaactgaagatggccattgttccaaactttcttttaccatttttctatatgcattccttgtcccaattgcctattactaacttactgtttgttaagttctaaataaaaagcatggttcaatattttcttaccacattcaaaatttgccataatgaccattccttcttatttagaactttgataataacgtagttatgtaaattagtctatgttgatcatgaaaataaaattgaactgtattatgtttgttttctgttggcatatcttcattgtgacattcggaatactcccggcattttgactaccaaatgatttggttggttgattgttacctgtgtattagatagtgttggctgcactcatttatgatcctttatcaagttctctgttattatcatagtaatattcaagctatgaatggacctctttgtgatcaagtgtggattcttgcattgttgtactttgcagttgtcagagcttctgagtattgagttttatggtgaatggattggtttagtagcagaattcacaactaaatccttgttgtcatggcaggtctgtttcccttttttttttttgactaattctcttagcactggattattcaataattaatttccaatagttctaactattgaatatttgtagtgggccagcaatagtgtctactatcttttgagcctttggtcaaggctggtgacatctgttccttacttgaaaagtgacacaccaagtatgcttgatgagactgttcccaaaatcacggagggttttatcacctctagaattaattctgttcaggtactgatttctaatgagatgatggaactgctttctatctcagattctcagttgaagagtaacgtttgttatattctgttgtttctatccatctcaggccagctttgcaaacgactcatccgatgatactttggataatgtggatgttcttcaggagcagttggagtctcttccttacctttgtagattccaggtcgccatttcctgtcaagttctggtttccaatttaagagacaattttctgttaaacttttgattggatccatctttgtaatcatgtccacctgtagataagataccttgcttaatcaattgaatgttttcttttatggagattaaccctgttccagcttttcacataacaggattcatagttttatgtaattgatttttttattgaacatatacattggttttacttttatctacttgcagtttactgcatgcacttagtaatttcttgtatatggcactagaatttctttctttaagttatggagaactaatagaatgatacaacaacagtagatgcatcaaatttaagttgcattatgctattcattttttatcgtatttaattatacgattctaaaacaagaataaccagagtaattttttggccaacttaagtgctttgttgagttgttcaacttcatattctggacgggtgcagaaaatatagtaaataagataaaaaatttgacaaatttagaaatgctattggatggatcaaaaggaaagataccagtttctctctgcatttttcttttttgggcggttgggggggggggggtcaatggctgtgatcagatgctcatgttccagtataacagtagctatttgttttgttatggcaaactggctgattgaaattttctaagcacttcatgtggtcgtcagcccttcccgattgacatggtcaagaataaaggcaactgtggatagacatgcaacttagcagttttgagccttcgcaagtgttgtgtacacatcctatgtttattatgtatgttagcttgccaacatgtgagtttagctatctacattgtgcctctcaaacagatgaagatctcttattaccatttctgctgttttcagctaatttattacgccacttcattatatatatctgttatttttgtccggatggaatttttatataattattttgagtcactactaacctccttgccagttaccaatagtacgaagaagctagatgaaatgcccttattgttcttaggcctttttttttttgatagggagttgcattatatgacatggccataacatgattttcttttgctgatttgcagtaccaaaacagtagcatttacatcataaatattatggagcctcttctacaagcttatacggtatgttagtgttatttcacagtcctcttttttgggcagaaagaatgccttttcaaagccaaatactttttacaggaaaggtcaagattaccagctcctggagatgcgaatgagctctctgtcattgaaggacagctcacatggctagtccacataattgaagccattctcaagattaggcagaccattggttgtaggtgagaaattaacattccttgcttccttatattctgtttgatttcctttttttttcacctacaatgctcattttttcatgcagccaagaatcacaggagttaattgatgcagaacttgcagcccgtgtgttacagttgataaacgttactgacacgggggtgcacgcacaggttagatgaaaatgatttggtcatctaacatcaatgctgagtgctgagctagtgtacttgtagcaacaacaattttcctttctagtattgtctgcaaattatagaatataattgcatatgtaggtaggactgattttgttttttgacaaacatagatattttctagtactgtaatgcaaataacttacaactttatttttatcgccaatactgtaacatatataaccaattactcgtttctctatttgtcgtgaagcttggagtcacagcaacgcatgtggttgttgatggtgttttggtgtttcttacagttatcatgagaatgctaccaatagaagctgtgaatttgcacttaaaaataggctgaaattgaatttatttaacgaaaatatctaaacaatgtccccctatgaacttaacctttggtaaccagcccactttaagagagttatatttcatattgtattatgtgcagcatgtaaaccacatactgtccccataaaccaaatctgtttctgtattgcgacactacgtatcacaggatgctctccaatttgttctttactttcattaacctgttttagctgctcttataaccattcacagcttcacaaatttgtgaatgatgacttgggtgcattctttgcagagatatcgagtattaagtaagcaaagacttggtcgtgctattcttatctttgtgcaaaatttcagaaggtcatatgtaggagatcaagccatgcattcttcaaaggttagaagaaaccgaataataggacataactattataatttttctttttatcttgatgtacctttttatgtaaatccccatcaagttttacttctttgctgcagcagttgtatgcaagattatctgagcttcttggattgaatgaccatttagttttactcaatgccattgttgggaaaatagctactaatctaaagtgctatgctgaggtacctattgtttagacatttactgattttaggcatactttgatctatatgctgtggctgatcctttgtgtggttacagtgcgaggatgttattgatcatactctgtccctcttccttgaacttgcatctgggtaaagttgtagctatatgtattcactttacatgtctcatgcttattatggtaacaattcttcatatgtattttcgtagcagctatatgactggaaaactgcttctcaagctggagagtacaaaatttataattgcaaatcattctgtacagtcttctcactagcttctgtttcatgttatccctgtgccattcctggtcttagaagtgattctattttcattattaatcttttcagagggattcttttccatttcttgaagaatacagatgtgcccgcagtagaacaacattctactacatccttggctgcttggttttcatggaagacaccccagtaaaattcaggagtttcatggagcctctcctacaagtgcattgctacttatattcataatctctccgccccagaatgtagctatatctggacctgtacagatcgtaggtagaaatagctacattttggggtgtaggaagtactagttaagttttttctccattcttatatggttttcttcttcgtattctccataggttgcagttaatttggaggcaaccgctgatgctgctttctggactgatgttgtgaagtacgcatttattggtttgatgagagacttacgaggcattgctatggccacaaacaggtgcacaatttgattatatgtggtatatatgtgcatcaactcactaactactttgttgatctgatccagccgcaggacctatggcctcctatttgactggctatatccatctcgcatgccacttttactgaaagccatctcactctgtgctgatgagccggaggtaactaccaaatcgcaatgctttccttgcgtagctgttctttttgaaaaagtttgaactgtttttagaaaatatctagagccttatgcttctaaatcttttgctcagctactgcaaaatcaccactttgtgttcatgcaggtcaccacacccctactcaagtttatgtgcgagtttgttttgaacaaagctcagagattgacatttgattcatcatcaccaaatgggatccttttattccaggaggttagcaagctgattgtggcttatggatcacgtattctgttgcttccaaacggcactgatatttatggaagtaaatacaaaggcatatggatatcacttgctgttctttcaagaggtgagttcagaaaatatgttttgaaaacacctgtatgctctgcaattttattacagtttcagtaaagtctacctgctgttattcactgttttctaatgcttgatttttttagtggatttcatcctttccaattttatgtgcgactctcattgcacaatttttttgtttgaaaaagtgtgctttaggttacacttttgctgtgaaatgttatttgaattccaacatgtctctacgaaatttcaagaccaaaaccttgtttttgcaccccattgagatcattgttttccaacagacaatattaacttatccccatgggccatattacctggactgtgaaagcttgttcatttctgttaatcatttaactccttactgatttgtgatatttgagttgaattgtagcctcataggccctggcagatgataaatatttcaattgcataagatttgcagtagttgagaatgggtttatgatgattttggctaaactgaaatttaactgcaactatggttaaattctgttgcaaatatggcagactttctataccttttcagtttcatgtgtggtatgatctatggatctccttattcaagaggatactgatttacttgaatttggtatgagatgttacttggagttttcggttagggtgacagctgagttccaccatctctgattcaaactttttgttgtgcttttaatgttataagaataaaattggctgagttccactcaactccgagcccaattatttgttcttaaactgtatcttctgggaaccttatctcccattgcagactaaagatttgtattttttttcttttgctgttattctgactggaaccattgcagctttatgtggaaactatgtcaattttggtgtatttgagctgtatggtgacagagcacttgctgatgcccttgatatatctttaaagatgagcctctcagttccattgtctgacatattggcattcaaaaaggtattccttgcaactttagtgatttactattgttttgctgtgtagtgctattgcttttattaatatggttattaagatctcaaatatattcattctaagttttatagcattgaagatgtaaagttctcattatatcgcaatgaaagtgaattgaatgttatgtatatcaattaagcagaggtaattacttgtgcctcaggaactggactgagtgattttagtgccaatcttctaatctaactgagaaccctgcatttacgcacttggtccagttagacaacgctgttatgacagaatatacaaattgatcagatcctagtatcttagcctgtctagaaagatttgtatattctgtcataacagcgctgtcatttttttatttgaaaatatacacagtaaaattaccaggagaaaacatgaaatgagtaccgccaacagtgggctccagagttctatcaggaaactttttctttggaacatgggatgctgctgttattttttatttttatgccagacattttcaaacatttttttaagagcattctccaacccctagaactgtactccagttgtgtttgaactttgcatattttttttcaacattttgtttgtagtctccttggcattttaccagcaggtaccctgcatgcgagcttagtttatttatttaggtgatctcctggcaatttttgcccactggtaacatgcgtacaggtttagtgctatgttttccaacaattgtgcttttactggcttgatcatagacaaataaacagcctagacaccattccaggtcttgcattgtcccacattgatttatggttaaccagatgattgagatattcttgtttcatccgtggaagcattcatactaggctctttctttatttcagctgtcaaaagcattctatggatatattgaagttctgttcagcagccatatcacttttgttctcaatttggatacaaacaccttcgtgcatattgtcagcactcttgaatctggcttaaaaggtctagatacagggatatcaacacaggtatacgacatgatgctttttactgcttgtaaaatgttccccgcttcttgttacaacagcatcggtgaatcactgcttaaactgtgtcctatcggggaagacatacttccaatctgtggttgctggtagataataattgatgccatcataatactctattctcttttatgtggtttcccttttagtttcttctcttggatctggatgtcatgtgcaacctggttagggcccacatagaagcagcagtcaacctctctaggcctgcagtactgtgcacatgaatagtaatgggaacaacatctgcctatggttactgtttaatcatttccatgttcttcgatacggggtatatcgtaaaggtttgggttgtagaggtttattaaggaagcaatacacacaagcttttagtctcttttttatctccttcccttatgcagctacctcagcactgcttggttcattaagcctaagggcccttaactatgttcatcacattggaatccatcattgttctttagtgctttctgtttggactaatctgtaaattgttgcttccttttggcagtgtgcctctgccattgatagcttggcggccttttatttcaacaatatcacagctgctgatggccctccttcaccagctgcactaaatcttgctcggcatattggagagttccccactttatttcctcaggtttgtgttaataatcttctctaccatatgcagaaaggtctggatgtaattacattttgttttttttctgtgacagatactgaagacgctttttgagatcatcatctttgaggatgcgggtaatcaatggagtcttagtaggccaatactgagtctgataatgatcagtgaacaggtgcttgtctttttaaaacttttaaatcatgttccttagcatttcttttgcactcttttttccagtttgtattgtctttgttttttttctttttttttttgcgagggtctttagatcttttctaatcagttgtttttctttgtgcagatgtttagtaatttgagagcacagatattagcatcacaggtcagtgaactctctggtctgatattccactatgcagtcctgtctttctagttttatttttgggttaattggatccatgccactgcaaatatgccaatttgaaaaaatgtcactactattcagcattcggctatgtgccactgaaaattggagaaactggaaccgttcacattttccgtcaaaaatccctgttagcccccaactgcacgtgggccccatctccctcccctctcttctctttccccttctctctccaccaccgtagatgcggtaggtgttgtcgccatcgtctcggagccggaagatttgcgattcaccctcaccgatctcgcgacgatgggtgatgtggccgcaccagctgcggcggcgcgggcggcgaggccgacgagcccgttgcgcccgcccaaggcgatccgcagcaccaagccaaggggctcgacgaggagaccgtcatggcaccattcgtcaagcaccttgtctcggagccggcctgctgggatgcgcctgcgtcgtcgtcgtcgttgtcgagcgcctcgtctcggagccggcgagccagactgcgcctgcatcgtcgtcgtctgctcccccggcaaggtccccggccaccgcccccgtgccggtcgtcaccccgcccaccgccgcatcgctgtggccaaccctcgctgccaccgccaccgacctcctcccggagcgctcgctttcatctccttcccccgtgccgctcgtccctccgcacttcaccatcggctccccggctgccgattcccctcagccgtcgccctcctgggctcgccggcgtccatggcggagaagctccccggctgctaattccctcgacgacggcggtgagggtgctgcgtccgccggcaaggacgacgaggaacggacgggtcgcggcggctgctggtggagcagcgagagatggagggggggggggatcactggctagctgcagtggcaaggaccagcgagttcgaggtggagtgctcgccggtgtccatggtggagaagtgaagaaaggaagagggagagagatgacggaggttgacagaaaactggatggaagtggcatggttccaatttccccaaattctagtggcacgtagccgatatgctcaatagtagtggcattttttcgaattggcatatttgcagtggcatggatccaattaacccttttttttcctctgcttgaagctttctagtgtcaagttatcaacaatgtttccagtcatcagcgtgcaggtgttaggagacaagtttcttttcagtaaaaatattaaattctactagtacatcttttgattagaactgtatgtccagcttgtgatgtacctaagttttgttaacatatgtctgccaataacagcattagtaatcattattgaagaactaatgtacgtcttgtttgcagcctgtagaccagcaacaacgcctttcgcaatgcttcgagaagctgatgtctgatgttgctaggaacttggaaccaaagaacagagataaattcactaaaaatcttacaacattcaggcatgatttccgtgtgaagaacattcaggcatgacagctgttcaggaccagctaccagctttaaggtggtgcactcatgtgctgtaaatactttagcttagcttcgttttaggaaccaccattcccgtggggggaaagttatggtttaactcagtttggtttggattggctgaaagatgaagggttctcctgctgcacgtggtggcaaaatgcagttgttgatctcttaccttgtcgtgtactagactggcgagtgcaggagattcttcttcttcttcttcttcttcttcttcttcttcttcttcttcttcttcttcttcttcttcttcttcttcttcttcttcttcttcttcttctctttttataccttagtgttaattccatctctttttgcttgtacagcaatattcatgtgaaagcctgtgatcgctgtttccctaagttgttagggcgaaagcagccatcgctcaaaatataattcatttgttaacaggttagaagaatagaaaaaaagttgtaaatggttgtgcttcc

SEQ ID NO: 67 - DNA, 3501 bp, Saccharomyces cerevisiae
ccagagatatgtagccttccatcagtagtaatatccaataaattgggcaccatggtttggcaatcaggctttttaccctcgccctcttttccttcgccttttacctcttctgcatccaatttcagcgtacgtacacaatgattgactttggaaattttcacttttttccactcgaagaaaaaaaattccaaacacggttctccggtatttaggcatcgaataaactttgctaatcgactaaaagcatctctgcatatctatacgtgtatatattgtattcgctacagctcgctccttgcatcaactctttttttcttttttttcttccaggttaatcaattactgtactgtagcttcttttttatattttttaggttttcatatagtgtcttacgcaaataggcggaccatagaatgactgtcaccataaaagaattgactaaccacaactacattgaccacgaactatcagccactttagactcaacggatgcgttcgagggtcccgagaagttgctggaaatctggttcttccctcacaagaagtccatcacgaccgaaaagacattaagaaatattggcatggatagatggatcgagattttgaaattagtgaaatgcgaagttctttccatgaagaagactaaagaactggatgcctttttgttgagtgagtcttccctcttcgtcttcgatcacaaattgacgatgaagacgtgcggtactacaaccacattgttctgtctcgaaaagcttttccagatcgttgagcaagagttatcgtgggctttccgcacaacacaagggggcaagtacaaaccatttaaagtgttttattctagacgatgtttccttttcccctgtaagcaagccgctatccatcaaaactgggctgacgaagtcgactatttgaacaaatttttcgacaatggtaaaagttattccgtgggaagaaatgacaagagcaaccactggaacctgtacgtcaccgagacggaccgctccacacctaagggaaaggagtacatcgaggatgacgacgaaactttcgaagtactgatgacggagctggacccagaatgcgctagtaagtttgtttgcgggcctgaggcatccacaaccgctctcgtggagccaaacgaagataagggccacaacctcggctaccaaatgactaaaaatacaaggcttgacgaaatatatgtcaactcggcccaagactccgatttatcatttcaccacgatgcatttgcgttcacgccatgtggatactcatccaatatgattctcgctgaaaaatactattacaccctgcacgtgactccggaaaagggttggtcttacgcctctttcgaaagtaacatacccgtatttgacatttcccaagggaagcaagacaacttggacgttcttctacatattctgaacgtttttcaaccaagagagttctcgatgaccttttttaccaaaaattatcagaaccaatccttccaaaaactactaagcatcaacgagtcactgcccgactacatcaagttagacaaaattgtttatgatctggacgactaccaccttttctatatgaaattgcagaagaaaatatgaaaagccgccatttgtgtctcctcatacttacatagaatagccctcttctattatccttcgcttgctttctagcactcataactaatgtagtttaacccgcttgtatatcttctacatcattaccccgcatgcttttttttttcctctagagaaaaccggcacagattggccggacccggaacaggaaaaatggccactgaaaattcctggccagaccacccctgagctaagggagtttagccgctcaagcttttatttcctctgatgtaatatatcacacacccagacacggttgccaaggcctcgacggaaggccgcttcaagggacggggcagtggctatcagaaataccttaatatcatcaatatttttcatcaatcgcaaggtgtcaaacatcaataaaggatgatgctcaaaggtttatgcccgatgttcttctaatcccctttctctcctaaaataatcctttttttactcttcttcttttcccctgtttccatttttgtcttttctcaccccttatgggacatcaataatgcaagtatgtttatacatttttatataaatgtatatataaatgccatttcttacacataacctccattctttggttaattctttcttcattcttttttttttcattctgaaaagccctccaagcaagcacgctaatttaatatcgatttaaacatgaaagtatcacaagttttcatttctgccatctctgtcttcggcctcgctactagcgtaaatgctcaaaacgcatccaacaccacgagtaacgctgctcctgctttgcacgctcaaaatggtcaactactaaacgccggagtcgtcggtgctgctgttggtggtgctttggcctttttgatttaggaaaaacgccgcttactgccacgatgatgataccctattgacgtttctgaaatgtataatttcttttctcatcttcccctttgatattccatctataggccccagagtagtaaatttggtgctttaattttttttctcttcttccagttcgtctctattttttcattccattatatttatttatcagttttactttctcaaatattcttatataacactatttcatctacgtaaccgaaaataagtagtttaataacgataataatcataattgtgataaaaatatttacatttttcttacttgtcgcccgcttcgtttttgtatagaacgtactgtattagttgtccgttcttttcacgtctgaagaggtcgatttcttgcaatttaacatcaacgtggtattttccattatatacaatcaaagaatcatcgtccagttcgatttcgccatgaaaccaaaggtgtaatgcatgtgagtccccctgcagtgggtattcgtacttgaacgacccgtataccctctccggcgatataatctcaaataaatcggctgtttccaaaccaatgcggttcagtaaatcgtcgatggttccccgtatacttattggccgatgcgttatcctccatttgcaaacaaagggtattctataccaagtgtgcgaactatcccttttatcgtctggctccattacaataccagttacacatggatcttgatcttcgcaccacatgctgaattcatttaacgtgggtgaattgccatctttatcaagcaatggtactccgtattgttccttgatcatgtcatgaccggataatatctctaaaacccttaatttagaaagcttctgtacttggtttacgtcaacctttttcaaatctctggtactcagtttacgtatcttggatgatggaaacaatggtaagaaactttgttcctttaaatatatcactctatagattagtgagtatcctaatatcacaccgaatataccaccaaatatggcggaccatatttg

SEQ ID NO: 68 - DNA, 1650 bp, Zea mays
attcggctcgaggcattgaggacgttcgacctgccggaggcgcgaagaagttccagtctgctgcttactccaactgcgcaaagaagccatcctgatatcccttttggctttctcgttctagtagtttaggatttcttttctgacacttcgattcttaccaatccccctggcctgctgctttcctgacaatcgaccagttccccagtcttgctccctgcagtcctccctcctccatctccagcgttgtgttctgactcacctgcaccaatggctgttctttctgctgctggtgctcccccggcctcagctatcgggtttgagggctatgagaagcgccttgagatcacattctctgaggcacctgtctttgtggacccccatggcagcggtttgcgtgccctctccaggtcccagattgactctgttctggatcttgcacggaagattgtcatcaagacctgtggcactaccaagctcctgctcacaattccaaggatcctagagcttgctgaagagctgtctatgcctcttgctgctgtgaagtactcccgcgggacgttcatctttcctggcgcacagccagccccccaccggagcttctccgaggaagttgctgtacttaaccgatactttgggggcctgaagtctggtggcaatgcttatgtgattggagatgcagcaagaccaggacagaagtggcacatctactacgccactgagtacccagagcaaccaatggtcaaccttgagatgtgcatgactggtctggacacgaagaaagcttcagtcttcttcaagactaatgctgatggcaacacaacatgtgccaaggaaatgacgaagctctctggtatctctgaaattatccctgagatggagatctgtgattttgacttcgaaccctgcggctactccatgaatgcaatccatggctctgcgttctccacgatccatgtgacgcctgaggatgggttcagctacgccagttatgaggttatgggcttggatgccactgccctgtcttacggtgaccttgtcaagagggtccttgggtgcttcggcccctcggaattttctgtcgccgtgaccatcttcggcgggcggggccaagctgggacatggggaaaggaacttggtgcggaggcttatgactgcaacaacatggtcgagcaggagctgcctggaggtgggatcctcatctaccagagcttctgtgctgctgaagacgccgttgctagctcgcccaaatccgttcttcgctgctttgatggcgagaatgcagcaccttttgcgaaggactgcaagctggctaatcttgtctgcttggaggaagttggatgctatcgaggagaaggatggagtgcttgatgagtaagacgggtttctggtgtcgatttgcttctgagtttttttctttttatatcgttgcgatctcgtggttgtcgtttggttagcagccaagccaggctattagtacgaagaatgtcgtctataaacatgtgttcctacgttgccacatgctgagtcaatctgtatacagctagctctaggtggtcagctgcgtctaccacaatgagcatacatgtatggataaatcttctgtgaaagcattcgatgaataaaaaaaaaaaaaaaaaaaaaaaaaaaaag

SEQ ID NO: 69 - DNA, 2082 bp, Zea mays
ccacgcgtccgcccacgcgtccgaaagaattccctcccctagccgccgccgccgccgctcgtctccctgagaggtgccgggaccgaggaactggccgagtactaggtagagaatcggtttttcttgtctcagcccggggtctgctgcgtctggtggtggtgaaggggagaaattcgtgagatctgttccggatcaggcgtgcgagctcgggaatcaggggtttcacacatagcttcgtcgatttgaatttgatgtactaatggagtctaagggtggcaaaaagtctagcagtagtcgttctatgatgtatgaagctccccttggctacagcattgaggacgttcgacctgccggaggcgtgaagaagttccagtctgctgcttactccaactgcgcgaagaagccatcctgatatcccttttggcttcctcattctagtagtttaggatttcttttctgacactttgattctgaccaatctctctggcctgctgcttcctgataatcgaccagttccccagtcttgctccttgcactcctccctccatctccagcattgtgttctgattcacctgctccaatggctgttctttctgctgctgatgcttccccggtctcagctatcgggtttgagggctatgagaagcgccttgagatcacattctctgaggcacctgtctttgtggaccctcatgggcgtggtttgcgtgccctctccagggcccagattgactctgttctggatcttgcacggtgcacaattgtgtctgagctctccaacaaggatttcgactcatatgtcctttctgagtcaagcttgtttatctatcctctgaagattgtcatcaagacctgtggcactaccaagctcctgctcaccattccaagaatccttgagcttgctgaagagctgtctatgccacttgctgctgtgaagtactcccgtgggacgttcatctttcctggcgcacagccagccccccacaggagcttctctgaggaagttgctgcacttaaccgctactttggcggcctgaaatctggtggtaatgcttatgtgattggagatccagcaagacctggacagaagtggcacgtcttctacgccactgagtacccagagcaaccaatggttaaccttgagatgtgcatgactggtctggacaagaagaaagcttgtgtctttttcaagactaatgctgatgggaacacaacatgtgccaaggaaatgacaaagctctctggcatctctgaaatcatccccgagatggagatctgcgattttgacttcgaaccctgtggctactccatgaatgcgatccatggctctgcattctccacaatccatgtgacgcccgaggacggtttcagctacgccagttacgaggttatgggcttggatgccactgctctgtcttatggtgaccttgtcaagagggtcctccggtgctttggcccctcagagttttccgttgccgtgaccatcttcggcgggcgtggccatgccgggacatggggaaaggcacttggtgcagaggtctatgactgcaacaacatggtggagcaggagctgcctggaggcgggctcctcgtgtaccagagcttctgtgctgctgaagacgctgttgctacctcgcccaaatctgttttccactgctttgacggcgagaacgtggagagtgctcctcctcctatgaagaaggactacaagctggctaatcttctctgctgggaggaggaagcggatgccatggaggagaaggcgggagtgcttgatgagtaagacgggcttctggggtcgatttgcttctgagttgtttattttatatcgtcgcaatttcgtggttgtcgtttggttattctgtgaagcagccaagccaggctattgttatgaaaatttgtcgtctgtaagcatgtgaacttccgatgttgccacatgctggatcagtctgaataagtaagtatgcagctctaggtggtcagctgcgtctaccacaatgagcatgaacgtatggagaaatatctgtgaacccattttgtttatgaataagatttgtttttttcgaaaaaaaaaaaaaaaag

SEQ ID NO: 70 - DNA, 2985 bp, Zea mays
gcggccgctgcccgggttttcgtcggtcccttcgccatgtcttcgctggacccttcgccagcgacgagcacccaacagaagcaattggagagtttggtaaatctactgacgcagggaagcaggttctaccgcaaagcatataatgaactgttctcaggtgtaactactgagcaggatccggattcatcgactaatattcctgagtatatgctttttgggtggcatctcttcttaatgctccattcgagatcaccagaattgttcaaggacctggtgtcctgcatccatggattagttgctgtgttggccatacttttgattcacgtgccagctaaatttaggagcttcacgattgaaggctcttctcacttaatcaaacaaactgagaaaggcgtggatcttattgcttcattatgtcataactatcatacctctgaagaacgtttgaaagaaatgttgcacaagtcttacaatgcaatagaagacattttccatatgaaagcactaagtgcttcagagtgcaaaccagaaaatttggataagatagacacagatgacctgatgtatttcaaaggtctgattgatatggaatgtttccagtcaaatttggaaaaaatggagaaactatgtaattctaatagctgtaaaggggagcttgattttaaatcaattttgatcaataatgattatattccctatgatgagaactcgacgggggattccaccaatttaggacgttcaaagtgtgcctttgaaacattggcatctcccacaaagacaataaagaacatgctgactgttcctagttcccctttgtcaccagccaccggtggttcagtcaagattgtgcaaatgacaccagtaacttctgccatgacgacagctaagtggcttcgtgaggtgatatcttcattgccagataagccttcatctaagcttcagcagtttctgtcatcatgcgatagggatttgacaaatgctgtcacagaaagggtcagcatagttttggaagcaatttttccaaccaaatcttctgccaatcggggtgtatcattaggcctcaattgtgcaaatgcctttgacattccgtgggcagaagccagaaaagtggaggcttccaagttgtactatagggtattagaggcaatctgcagagcggagttacaaaacagcaatgtaaataatctaactccattgctgtcaaatgagcgtttccaccgatgtttgattgcatgttcagcggacctagtattggcgacacataagacagtcatcatgatgtttcctgctgttcttgagagtaccggtctaactgcatttgatttgagcaaaataattgagaactttgtgagacatgaagagaccctcccaagagaattgaaaaggcacctaaattccttagaagaacagcttttggaaagcatggcatgggagaaaggttcatcattgtataactcactgattgttgccaggccatctgttgcttcagaaataaaccgccttggtcttttggctgaaccaatgccatctcttgatgacttagtgtcaaggcagaatgttcgtatcgagggcttgcctgctacaccatctaaaaaacgtgcttctggtccagatgacaacgctgatcctcgatcaccaaagagatcgtgcaatgaatctaggaacacagtagtagagcgcaatttgcagacacctccacccaagcaaagccacatggtgtcaactagtttgaaagcaaaatgccatccactccagtccacatttgcaagtccaactgtctgtaatcctgttggtgggaatgaaaaatgtgctgacgtgacaattcatatattcttttccaagattctgaagttggctgctattagaataagaaacttgtgcgaaagggttcaatgtgtggaacagacagagcgtgtctataatgtcttcaagcagattcttgagcaacagacaacattattttttaatagacacatcgatcaacttatcctttgctgtctttatggtgttgcaaaggtttgtcaattagaactcacattcagggagatactcaacaattacaaaagagaagcacaatgcaagccagaagttttttcaagtatctatattgggagtacgaaccgtaatggggtattagtatcgcgccatgttggtatcattactttttacaatgaggtatttgttccagcagcgaagcctttcctggtgtcactaatatcatctggtactcatccagaagacaagaagaatgctagtggccaaattcttggatcacccaagccatctcctttcccaaatttaccagatatgtccccgaagaaagtttcagcatctcataatgtatatgtgtctcctttgcggcaaaccaagttggatctactgctgtcaccaagttccaggagtttttatgcatgcattggtgaaggcacccatgcttatcagagcccatctaaggatttggctgctataaatagccgcctaaattataatggcaggaaagtaaacagtcgattaaatttcgacatggtgagtgactcagtggtagccggcagtctgggccagataaatggtggttctacctcggatcctgcagctgcatttagccccctttcaaagaagagagagacagatacttgatcaattataaatggtggcctctctcgtatatagctcacagatccgtgctccgtagcagtctattcttctgaataagtgggttaactggagcgatttaactgtacatgtatgtgttagtgagaagcagcagtttttaggcagcaaactgtttcaagttagcttttgagctatcaccatttctctgctgattgaacatatccgctgtgtagagtgctaatgaatctttagttttcattgggctgaaaaaaaaaaaaaaaaagggcggccggcgatcccacgcgtccgcccacgcgtccgcccacgcgtccgcccacgcgtccgcggacgcgtgggtcgacccgggaattc

SEQ ID NO: 71 - DNA, 889 bp, Wheat dwarf virus
cacaccccgttttttcgctaaggacctgccggacttctgttcactaccatggcctcttcatctgcacccaggttccgtgtctattccaagtacctctttctaacatatcctgaatgtacccttgagccacagtacgccttggattcacttcgcactctcttgaacaaatatgagcccctctacatcgctgctgttagagagctccacgaagatggatcaccacatctgcacgttctcgtgcagaacaagcttcgtgcttccatcaccaatcccaatgccttaaacctccgtatggatacatctccattctccatattccatccaaatatacaagctgccaaagactgcaaccaagttcgtgattacatcacgaaggaggttgactccgatgtaaacacagctgagtggggaacattcgtggctgtttcaactccaggtcgtaaagaccgtgatgcggatatgaaacagatcattgaatctagttcctctcgcgaggaattcctcagcatggtttgcaatcgttttccgtttgaatggtctatccgtctcaaagacttcgagtacacggcacgccatctatttcctgacccagttgccacttacacacctgagtttccaaccgaatcactcatttgccatgagaccattgaaagctggaaaaatgaacatctctactccgtaagcctcgaatcctatatcctttgtacttccactcctgcggatcaagcgcaatctgacttagagtggatggacgattattccaggagtcaccggggaggcataagtccatctacatctgcgggccaaccagaacaggaaagacttcctgggcaaggtctctagggacacacaattattataacagtctagttgatttcacaacatatga

SEQ ID NO: 72 - DNA, 3150 bp, Saccharomyces cerevisiae
tgcacgtttatctatctatgttgcctccaaagggttattctctcaaaaagctcaatcactgtggaaccgaaaaataatgttatgaagattttttgagcagtatgtcttgtcaaaagctcaactagtgcagctgatgttgcttaaaaaaataaaaaccaaatttttctactttgctcttgtacgttgcacaaagaagattatgtaacaaacttgaagggactctcaaaaacttgctataaattgtacaaaagcctcaatatcacctagtagtggttctatacctgtctcgagccatcgccaaatagttgataaatttgattaatttctgcccttattcgcacgtgccataacacctgtacctctcacgctaaagacctttataatcaaggaaacttgttgctgcagaggaaataggaggtaatgaattgtgataaggcacatcacatcaatttttcttgcattcttgcatagaaagataggctgatgcaattagcgcgtttcaatcgcgtgccaaagacgtatatactaagcaatataaccgaattgattaagtagttggttaattgtatattttgtgataaagatggttaactgacttaggcggacataatagtagaaaatctatataatttttcccatgcagttgttattacaaaatgcaattcttgagatagcacaagcaagaataatagggcacggtacgttcattccacgtagcgttagctagtgctgccacaaggtaaacgtacgattatattcatttttgaaacggaagttctttgtaaccctcatgctcgtttgatagtcacttaactacaagatattctcgttcagtgattgcttgcttataaatcaggaaacttcatttttattccttacattttcgaaaagcccgcaaggttttcttcgccacgctcaagcattcatcgttgaaaagcaaaactgtgcacactgtaccttaggcgactcttctccgaacaagctcatggctcatttttaaaatcacaagcttcgtataattgccaagacataatctaattgagaaggtcagacggcaaaacaaatgaccgaaatcttcgtttattggttcgcctgcgttgccaactggtacattttcccagagtaccagcaaaggaaggcatccttgatgcctactctgatactgtggaggatttaaactgaaaatgatagtctgcgcggcaaatctttctatttctactaaagttggatcctccggccgatataacgtattctttttatccaataatgtcaattttaaatgctcgattactaatcgttactaaaatagcggacgcgcttatgcgtcttcgacggatagttttcagatcatccctctcagaaagcaatgcaggaaccgcctgtaaaactatcttttgctggcactcacacattatggtattgatgccacctgaaaatacggaaattaaccattccttgtacggagatctaagagcaactattattgaattgttgccgttaaagtttcatttcagttccgtgtgtggtcaagtacaagactactgatgaaatatgttgtacacacacggaaatatatatatatatatatatataacaatattgtgggttgaggtggagacttgatttttcttatacagtatattcttgttcattttttaccattttcaacaaaccacacaaagactttattcattatgctagccgaaaaaacccgttccataatcaaagcaaccgttcctgttttggaacagcagggcactgtcatcacgcgtacattctacaaaaatatgcttactgaacacaccgaattacttaatatttttaacagaactaatcaaaaggttggcgcacaaccaaatgccttggccactactgttttggcagcggctaagaacattgacgatttgtctgtgcttatggaccatgtcaagcaaattggccacaagcatcgtgccttgcaaattaaacctgagcattatccaatcgttggtgagtacttgttaaaagcaatcaaggaagttttaggcgatgctgcgactccagagataattaatgcatggggcgaggcttaccaagcaattgctgacatcttcatcactgttgaaaaaaaaatgtacgaagaagctttatggccaggttggaaaccatttgacattactgccaaagagtacgttgcttcagatattgttgaatttactgttaagccaaagttcggttctggtattgaattggaaagcttgccaatcactccaggtcagtatattacggtaaacactcacccaattagacaggaaaaccaatacgacgctttaagacactactctctttgttctgcttcaactaaaaatggtttacgatttgcagtaaagatggaagctgccagagaaaattttcctgcaggattagtctctgaatatttacacaaggacgctaaagttggtgatgaaattaagcttagtgctccggctggtgatttcgcaataaataaagagttgatacaccaaaacgaagttccattggtgttactatcgtctggtgttggtgttacaccacttttagctatgttagaagaacaagtcaaatgcaacccaaataggccaatttactggattcaatcttcctatgatgaaaagactcaagcattcaaaaaacatgtagatgaactattagctgaatgtgcgaatgtcgacaaaataattgttcatactgatactgaaccactgattaatgctgcattcttgaaggaaaagtcacctgcgcatgccgatgtctacacttgcggctctttagcttttatgcaagctatgattggtcatctaaaagaactagagcatcgtgatgatatgattcactatgaaccatttggtccaaagatgtcaaccgtgcaagtttaggcgttaagcctcggaaacttcaattttattactgattcatttgataatttcacttgttcgatttcacagtttgagaagttatattacgaaataagaaaaatttttaaaacatgagaccattgctaatcttttgttgttatactgtgttagaaatcctcgtgaaatccttgtgaaatcctatgtggaatatttagatagtaagtaaagattgtgtatgtatttataagatgaataagcgccaggtgctaaacagagt

SEQ ID NO: 73 - DNA, 768 bp, Arabidopsis thaliana
attactcatcatcaagttcctactttctctctgacaaacatcacagagtaagtaagaatggtacagacgaagaagttcagaggtgtcaggcaacgccattggggttcttgggtcgctgagattcgtcatcctctcttgaaacggaggatttggctagggacgttcgagaccgcagaggaggcagcaagagcatacgacgaggccgccgttttaatgagcggccgcaacgccaaaaccaactttcccctcaacaacaacaacaccggagaaacttccgagggcaaaaccgatatttcagcttcgtccacaatgtcatcctcaacatcatcttcatcgctctcttccatcctcagcgccaaactgaggaaatgctgcaagtctccttccccatccctcacctgcctccgtcttgacacagccagctcccatatcggcgtctggcagaaacgggccggttcaaagtctgactccagctgggtcatgacggtggagctaggtcccgcaagctcctcccaagagactactagtaaagcttcacaagacgctattcttgctccgaccactgaagttgaaattggtggcagcagagaagaagtattggatgaggaagaaaaggttgctttgcaaatgatagaggagcttctcaatacaaactaaatcttatttgcttatatatatgtacctattttcattgctgatttacagccaaaataatcaattataccgtgtattttatagatgttttatattaaaaggttgttagatata

SEQ ID NO: 74 - DNA, 1966 bp, Oryza sativa
agaaaaccttgtgtcccccccatgatgcagaaatctaataagagcagcccaacgcttccggttggtggcggtagaccggcctctttaaactaccccatccgccccagatttatcaattactcctcgtcatctcgtctcgtctccgccaccgtgcgcgcgtcccctatattagaccccccaaccgggcaccggacacaccatcaccaacacaccactgcaaacccatccgcctccgcaccgcatcgcacctacaaattgtgcacgctgcaccgctcaaaaaaaagaagaaactaaagtcgtacgtaggacgcggcgtgcgagcgttggtgcggtgcgcggcggcgcgcggggaagtagtgagagcatcgatcatgccgggggcggcggggtactccgggtcggtgaagctgaagtacgtgaagctggggtaccagtatctggtgaaccacttcctgacgctgctgctggtgccggtgatggcggcgacggcgctggagctggcgcggatggggcccggtgagctgctgtcgctgtggcggtcgctgcagctcgacctcgtccacatcctctgctcggtgttcctcgtcgtgttcgtcggcacggtgtacttcatgtcgcggccaaggccggtgtacctcgtcgactactcctgctacaagccgccgcccagctgccgggtgccgttcgccacgttcatggagcacacgcgcctcatcaccgacgacgagaagagcgtgcggttccagaccaggatcctcgagcggtcggggctcggggaggagacctgcctcccgccggccaaccactacatcccgcctaacccgtccatggaggcgtcgcgcgccgaggcccagctcgtaatcttctccgccatcgacgacctcgtccgccgcaccggactcaagcccaaggacatcgacatcctcgtcgtcaactgcagtctcttctccccgacaccgtcgctctccgccatgatcatcaacaagtacaagctccgcagcaacatccgcagcttcaacctgtccggcatgggctgcagcgccggcctcatctccctcgacctcgcccgcgacatgctccaggtaagtactagccagctctttgatgttactactgtttagctaactaactaatcaggtgagccattaacgagcgacatggacggacacgcgcaggtgcatcccaactcgaacgcgctggtggtgtcgacggagatcatcacaccaaacttctactggggaacccggcgggacatgatgctgcccaactgcctgttccggatgggcgcggcggcgatcctgctgtcgaacaggaggagggaggcgaggagggccaagtacaggctgatgcacgtggtccgcacgcacaagggcgccgacgaccgcgcgtaccggtgcgtgtacgaggaggaggacgagcaggggcactcggggatctcgctgtccaaggagctgatggccatcgccggcgacgcgctcaagtcgaacatcaccaccatcggcccgctggtgctgcccatgtcggagcagctgctcttcttcttccgcctcgtcggccgcaagctcatcaacaagaagtggaagccgtacatcccggacttcaagctggcgttcgagcacttctgcatccacgccgggggacgcgccgtgatcgacgagctgcagaagaacctggacctgtccgcgcagcacgtggaggcgtcccgcatgacgctgcaccggttcggcaacacgtcgagcagctcgctctggtacgagctcgcctacatcgaggccaaggggcgcatgcgccgcggcgaccgcgtctggcagatcggcttcggcagcggattcaagtgcaacagcgccgtctggaagtgcctccgcacagtcaagacgcccgccgacgggccgtgggacgactgcatccaccgctaccccgtcgacatcccggaggtcgtcaagctgtgatcgaatccatggtagcc

SEQ ID NO: 75 - DNA, 1679 bp, Zea mays
cttctccttgtcccgtgtcttttcaaggatagcccgggcgcacgcagcatttcttggcgtcggtgtccgcgggttggcgactaagcaatggcgacgaggaaccaccgcgccgctgccgctccgcagccggcgaacagaggtgccgcgagggtcgccgggaaacagaaagccgccgccgccgggacacgccgagccctcggtgacattggcaacgtcgtctccgatgccctcgacagggcgatcaagctgccggaggggatccatcgccccatcaccaggagcttcggcgcccagctcatgaaggccgctttggcgaacaagaacgccgacgccgccgtagctcctgctcagcctgtagcggcgcgcgccgttacgaaaccagctaggaaagtgactacgaagaacgtccctcgtcctggcgctgggcaggctcccaaggagaacaagaagccatcagcagagggtgccgccgccgcgagcggccgctctgtgcagaagaacaggaggaagaagcccgcgtgcacgctttcgaccgtcctttctgcgcgttctaaggctgcctgtccggttaccgagaagccaaaggagcccatcgaggacattgacaagttcgacggcgacaaccagcttgctttggtggactacgttgaagacatctacacattctacagaccgcccatgcatgagagccgccccattgactacatggggcaaaccagccctgagctcagccccagaatgcgctccatcctcgcggactggctcatcgagtctcaccgaagattccagctcatgccggaaacgctctacctcacaatatacatcgtggaccggtacctgtcgctgcagcccacgccgaggagggagctccagctcgtcggcgtggcagcgttgctgatcgcctgcaaatacgaggagatctgggcaccggaggtaaatgacttaatccatatagccgatggcgcgtttaaccggagccagattcttgccgccgagaaggctattctgaacagcatggagtggaaccttacggtccccaccccgtaccacttcctgctgcggttcgcgaaggctgccggtagtgctgatgaacagcttcagcatacgataaacttctttggagagctcgcgctgatggactacggtatggtgatgaccaatccttcgacggcggctgcttgcgctgtgtacgctgctcgcctcacgttggggaggagtcctctctggacagagaccttgaagcaccacactggtcctcaacgagcagcagatactggaagggccaagacactggtcggatctcatgctgctagtgctagccctgatgcgaggctgaaggccgtctaccagaagtacgccacggagcagtttgggcgtgtggctctgcacccaccggcaccggctgctcttcccgaccttgtctagagtttttacttgacaaggctgagggatttagttgagttcgctttgattgacaagttcgagagttgtttcgtatactctattctcgcggtgtattagacactagtagtaacaactattcataactatatgaataaccacaatcaaaatttatgattggctgaagcttctttcgaaagactgtgaggtatttccacagttttgtaagactgtcagaatgaaacggtcttgattaaaaagagctgtctgccaactgc

SEQ ID NO: 76 - DNA, 6440 bp, Saccharomyces cerevisiae
tagttttctatggtggagtgaagcacagcagaaagaacgttaggaaccttagctaaaagatagaaaaaaagagcactacaaaaatcttatcctcgatttgaaatactaatgtcgagccagatcaaattaaatgaaatcgaaatgatataacgttgctcttgcacgtgtatttcgctgcttaggaaagttgtttccacatattatcttttgtacgattttaaacagtaaaatcgatgcatattaagggaggcccaatacccgcgggcagtaaccgcatctttggaaataccgggtaataataaatgcccgggaaaaaagagcataaaacagagaggcgatataggaatgaatatgtgctatttacggaagggaaaaacacttattgtttttctgaaatgtgacacagtaaagtccgtcatatacggttctccgttgggcgctaccacacacatatatataagcctgaatgcagtagacaaatttcagatatcatacaaaggaagcgttctctgggacccctttctatgtttagatggttcactgaacttgttcgttaacgtaaatatgtcttcctctttgattccaacaatgatattataaggaaattatcgtcacaatctaatcaacaaggacaaagaaaagaaaaagttgagagagagaacaaaagttcaaatcaaagaaaaaaaagaacatcaaattacctattacaataaacaattaagccatactcgcaacaatttgccataatagaaagcagcacctcgttggcgcagtcccttacatagtacacaacatttatcacttcacacaatcaggagtggaactcaatggaaaacaacaccacacgtatgatcttactaataaaagaacatgaacgttcctcagcgcgaacgttcgcattctgcgccttcgagcacaggataagttgcaggaagccatcacatctatgcaacgattatcacgacacaaccttgccgccgagaaaacgtccgtggagaaccattcggtcgattgcttcccacggaacgagtggactgaaacttaagactgcccctctctttccgcggaatcgctcatgccgcggtgccacaacattttcagatttactaagactccggtgagtgtgggctcacccgcgggtcgtgatcacgattcagcaccctttggactcgtgattccgtggaaaggtcagatctgtattcctacttatggtaatgtgctaaaaaaagagaaatgtctccgcggaactcttctacgccgtggtacgatatctgttgaacgtaatctgagcaatacaaacaaggcctctcctatacatatataattgtgatgtgcataaccttatggctgttcgcttttattatcataccttagaatgaaatccaaaagaaaaaagtcacgcaaagttgcaaacatataacaactgtgttagttatcactcgactttgttattctaattataaataaattggcaactaggaactttcgaaaaagaaattaaagacccttttaagttttcgtatccgctcgttcgaaagactttagacaaaaatgcccgaggccaagcttaacaataacgtcaacgacgttactagctactcctccgcgtcttcttctactgaaaacgctgctgatctacacaattataatgggttcgatgagcatacagaagctcgaatccaaaaactggcaaggactctgaccgcacagagtatgcaaaactccactcaatcggcacccaacaaaagtgatgctcagtctatattttctagcggtgtggaaggtgtaaacccgatattctctgatcctgaagctccaggctatgacccaaaattggaccccaactccgaaaatttttctagtgccgcctgggttaagaatatggctcacctaagtgcggcagaccctgacttttataagccttattccttaggttgcgcttggaagaacttaagtgcttctggtgcttccgcagatgtcgcctatcagtcaactgtggttaatattccatacaaaatcctaaaaagtgggctgagaaagtttcaacgttctaaagaaaccaatactttccaaatcttgaaaccaatggatggttgcctaaacccaggtgaattgctagtcgttttaggtagaccaggctctggctgtactactttattaaaatccatctcttcaaatactcatggttttgatcttggtgcagatactaaaatttcttacagcggctactcaggtgatgatattaagaaacattttcgtggtgaagttgtttacaacgcagaagctgatgtacatctgcctcatttaacagtcttcgaaactttggttacagtagcgaggttgaaaaccccacagaaccgtatcaagggtgtcgatagggaaagttatgcgaatcatttggcggaagtagcaatggcaacgtacggtttatcgcatacaaggaatacaaaagttggtaacgacatcgtcagaggtgtttccggtggtgaaaggaagcgtgtctccattgctgaagtctccatctgtggatccaaatttcaatgctgggataatgctacaaggggtttggattccgctaccgctttggaatttattcgtgccttaaagactcaagctgatatttccaatacatctgccacagtggccatctatcaatgttctcaagatgcgtacgacttgttcaataaagtctgtgttttggatgatggttatcagatctactatggccccgccgataaggccaagaagtactttgaagatatggggtatgtttgtccaagcagacaaaccaccgcagattttttgacctcagttacaagtccctctgagagaaccctgaacaaagatatgctaaaaaaaggtattcatataccacagaccccgaaggaaatgaacgattactgggtaaaatctccaaattacaaagagctaatgaaagaagtcgaccaacgattattgaatgacgatgaagcaagccgtgaagctattaaggaagcccacattgctaagcagtccaagagagcaagaccttcctctccttatactgtcagctacatgatgcaagttaaatacctattaatcagaaatatgtggagactgcgaaataatatcgggtttacattatttatgattttgggtaactgtagtatggctttaatcttgggttcaatgtttttcaagatcatgaaaaagggtgatacttctacattctatttccgtggttctgctatgttttttgcaattctattcaatgcattttcttctctgttagaaatcttttcgttatatgaggccagaccaatcactgaaaaacatagaacatattcgttataccatccaagtgctgacgcttttgcatcagttctatcagaaataccctcaaagttaatcatcgctgtttgcttcaatataatcttctatttcttagtagactttagaagaaatggtggtgtattctttttctacttattaataaacattgtcgcggttttctccatgtctcacttgtttagatgtgttggttccttaacaaagacattgtcagaagctatggttcccgcttctatgttattgttggctctatccatgtataccggttttgctattcctaagaagaagatcctacgttggtctaaatggatttggtatatcaatccgttggcttacttattcgaatctttgttaattaacgagtttcatggtataaaattcccctgcgctgaatatgttcctcgtggtcctgcgtatgcaaacatttctagtacagaatctgtttgtaccgtggttggagctgttccaggccaagactatgttctgggtgatgatttcattagaggaacttatcaatactaccacaaagacaaatggcgtggtttcggtattggtatggcttatgtcgtcttctttttctttgtctatctattcttatgtgaatacaacgagggtgctaaacaaaaaggtgaaatattagttttcccacgcagtatagttaaaagaatgaagaaaagaggtgtactaactgaaaagaatgcaaatgaccccgaaaacgttggggaacgtagtgacttatccagcgataggaaaatgctacaagaaagctctgaagaggaatccgatacttacggagaaattggtttatccaagtcagaggctatatttcactggagaaacctttgttacgaagttcagattaaggccgaaacaagacgtattttgaacaatgttgatggttgggttaaaccaggtactttaacagctttaatgggtgcttcaggtgctggtaaaaccacacttctggattgtttggccgaaagggttaccatgggtgttataactggtgatatcttggtcaatggtattccccgtgataaatctttcccaagatccattggttattgtcagcaacaagatttgcatttgaaaactgccactgtgagggagtcattgagattttctgcttacctacgtcaaccagctgaagtttccattgaagaaaagaacagatatgttgaagaagttattaaaattcttgaaatggaaaaatatgctgatgctgttgttggtgttgctggtgaaggtttaaacgttgaacaaagaaaaagattaaccattggtgttgaattaactgccaaaccaaaactgttggtctttttagatgaacctacttctggtttggattctcaaactgcttggtctatttgtcagctaatgaaaaagttggcaaatcatggtcaagcaattctatgtactattcaccaaccctctgctattttgatgcaagaattcgatcgtttactatttatgcaacgtggtggtaagactgtctactttggcgacttgggcgaaggttgtaaaactatgatcgattattttgaaagccatggtgctcataaatgccctgctgacgccaacccagctgaatggatgctagaagttgttggtgcagctccaggctctcatgcaaatcaagattattacgaagtttggaggaattctgaagagtacagggccgttcaatctgaattagattggatggaaagagaattaccaaagaaaggttcgataactgcagctgaggacaaacacgaattttcacaatcaattatttatcaaacaaaattggtcagtattcgtctattccagcaatattggagatctccagattatttatggtcgaagtttattttaactattttcaatcaattgttcatcggtttcactttcttcaaagcaggaacctcgctacagggtttacaaaatcaaatgttggctgtgttcatgtttacggttattttcaatcctattctacaacaatacctaccatcttttgtccagcaaagagatttgtatgaggccagggaacgcccctcaaggactttttcttggatttcatttatcttcgctcaaatattcgtggaagttccatggaatatattggcaggtactattgcttattttatctactattatccaattggattttactccaacgcgtctgcagctggccagttgcatgaaaggggtgctttattttggttgttctcttgtgctttctacgtttatgttggttctatgggtctgcttgtcatttcattcaaccaagttgcagaaagtgcagctaacttagcctctttgttgtttacaatgtctttgtctttttgtggtgttatgactaccccaagtgccatgcctagattttggatattcatgtacagggtttcacctttgacttatttcattcaggctctgttggctgttggtgttgctaacgtagacgtcaaatgcgctgattacgaattgctagaattcacaccaccatccggtatgacatgtgggcagtacatggaaccatatttacaactagcaaagactggttacttaactgatgaaaatgccactgacacctgtagtttctgtcaaatatctacaaccaatgattacttagctaatgtcaattctttctacagtgagagatggagaaattatggtatcttcatctgttatattgcattcaattatatcgctggtgtctttttctactggttagcaagagtgcctaaaaagaacggtaaactctccaagaaataatagaattttgaatttggttaagaaaagaaacttaccaagatggacttttttaataaacatacataatcactacatataggtgcgtaataataagtttttattttttttttcttaattcagcgagctttctacatttcaattttcttgaatttaccagctctgataaatcaaagttcaatgtccgaaagaattccgagaattttattcctaggttatctcatcggtactttttttttataggcatcagcatttagtgtgaaaacattatttcttaactgtgccttacggttaaaaagaaaggacgcaatggatatagttaaaatataagatatattatatcattatctgtccga

SEQ ID NO: 77 - DNA, 1593 bp, Oryza sativa
cgacgacgcctccctcgtacgccggcgctctcgcagttgccgccgccgccgcgaacgcccaccgcccgcgctctggtcggtggatcgtgacgtgctgtggtggtctctgatctgctctgggggtgggtgggcgtctcgcggagtcgccgtgttcgtcgagggctcgatcggctcggggagagcgagtgagaagaggtgagggttggggggaggcacatccgcggcggcggagagatggcggatttccggacctccacgcatcgggagaggtggatcttccagacgaacgatctgatggatagatggggggcggcgaaccagcgggccacggagacgctcgttcagtatggaacgacgcggttgaaggtggaccctgttgatgggtcgctgtcatacccggaacctgcgcctgatcatgttgtagggagctcaggtgtaaagcctctgtcttgtgaagaggagcgattgatgcgggtattttatgagcaaaagattcaagaagtatgttcagcatttaagttccctcacaaaatccaggctaccgcaataatatatttcaagagattttatctgcaatggtctgtaatggaacatcacccaaagcatattatgttaacttgtatttattcttcttgcaaagtggaagaaaatcatgtttctgctgaggaacttggtaaaggaattcaacaggaccaccagattattctaaataacgagatgattgttctcaaatctttagattttgatctgattgtttatgctccgtatcgatctatcgaaggatttgttgatgacatggaggatttctgcagagcaggtaatggtgagcaccaacggttgcaggatttacgtcaaactgcgatatctcaggttgacaaaatgatgttgactgacgctcctcttctctacactcctggacagttggctctggctgctttgcacaaatccaatgatatgcacaagatccttaattttgaaaggtacttggaaagtgttttttcaaggcaacattctgattgtccaatcgaacaatttgttgggtcaatcaatatgatcaattatttggttgagcagcttaaaatacctactcctaaggacatgaggcatattgaccgcaagcttaagcattgtttggatccaagctcacaggatgagcataagaagaaagagaagaagtcgaagcacaaatcaaaaagggcagctaatgaagcccaacttgacagctagaaaacatacggttgggctgcaccgtgtaagaatcagttctttagtttgttgtggctccaattgatcaaaagagctactttcctgagcaggtgaggttccgttttagccgaggacaaccaattttgagatgaagcgagataatacccatgacctcgccttcttgtaatcttgtatgcctggaagccctagcaaactcctcgttgcaatggctactgtactttttttggggggtaatttatcccttgtcaaatgggaagaagcagcatacatcggatgattgcctccatatacgaaaatgacagctaactcagacttttgtcggttgcatttttctgtttaaaaaaaaaaaaaaaaaaaaaaaaaaaa

SEQ ID NO: 78 - DNA, 1764 bp, Oryza sativa
cgcgcatcgcagccgagacgagccgccccccgcaccgcactctccgccgccggccgcgccgacctcctccgccgcgccgcctccccggcgcgcgcccccgtcaccctctctcgcctcgccgccgccgccgctgcctcctcgtgaggggggacggtggtgggggcctctgcctatggcgagcggcgacggcggcgacgacgcgggcgtgaagcgcgtggcggaccgctacctgaagcgcgaggtcctgggagagggaacctacggcgtcgtcttcaaggccgtcgacaccaagactgggaatacagtcgcaataaagaaaatccggctagggaagtacaaggaaggtgtcaatttcactgcattgagggaaattaaacttcttaaggagctgaaagattctaatattatagagctgattgatgctttcccttacaagggaaacttacatcttgtatttgagttcatggagactgatttggaagctgtcatacgagataggaacattgtattatctccagctgatacaaaatcttatattcagatgatgttaaaaggtttagccttctgccataagaaatgggtgctacacagggatatgaaaccaaataatttactcattggcgctgatgggcagcttaagcttgctgactttggtctggcgcgcatatttgggagtccagagcggaacttcactcatcaggtctttgcacgatggtaccgagcaccagaattattatttggcaccaagcagtatggatctgcagttgatatttgggctgctggttgtatttttgctgaactgctgcttaggcgaccgtttctccagggttctagtgacattgatcaacttgggaagatctttgctgcatttggaactccaaagtcttctcaatggccggacatggtttatcttccagattatgttgaataccaatttgtctctgcacctccacttcgctcattgtttccaatggccagtgatgatgcattggatcttctatcaagaatgtttacatatgatccaaaagcaagaattacagctcagcaggctctagaacaccggtactttttatcagtaccagcgccaacaaaaccatcacagcttccaaggccaccacctaagggtgattcagggaataacaagataccagacttgaacctgcaggacggccctgttgttctgtccccgccaagaaagttgcgcagggtgactgcccatgaagggatggaagtccatatgcatcgggcggatagaacagaagagcatccttcaggggcaaggcacatggatgacatgtccagccagagttctagaataccaatgtcagttgatgttggagctatttttgggacacgacctgctcctagaccaacgttaaacagtgccgacaagtctcgtttaaaacggaaacttgatatggatccagaatttggatacacagagtaaatcaccattttttccatactggcttgttgatttttaaaatattctttggggagatagttccactatctaccaacaaaagaggattgtgtcgaaagccataaaaacttcactgaagggcgctgacaggatggcacagccaactatgctgttatcgtttttgactaccaaagccggctcaggaagaggaaactgaagagttacgtgttacgatgctaatttacaccaggacgtgcacatgccatttcattttggctggcatacataaatctgtaatctttattgcatagatgagtttgcttgtgtgagcatgtttcttc

SEQ ID NO: 79 - DNA, 1583 bp, Glycine max
attcggctcgaggatggatcctccaccgaagagctggagcatccacacccgatccgagatcatcgcaaaatacgaggtcatggagcgggtcgggtcgggagcctacgccgacgtctaccgtggccgtcgcctctccgacggcctcaccgtggccctcaaggaaatccacgactaccagtccgccttccgagaaatcgacgcgttgcagctcctcgagggctccccaaacgtcgtggttttgcacgagtacttctggcgcgaagacgaggacgccgtcctcgtccttgagttcctcagaaccgacttggccaccgtcatcgccgacaccgccaaggccaaccagcccctccccgccggcgagctcaagtgctggatgatccagattctctccggcctcgacgcctgtcaccgccacatggtcctccaccgagatttgaagccctctaatctcttaatttccgaacacggcctcctcaagatcgctgattttggacaggcaagaattctcatggagcctggtattgatgcttctaataatcatgaagaatattctagagttttagatgacattgacaataaggatactattactagcacccacgatgggaatgcaacatgcaacacaagtgacgtagatagggaagaggaagaacttggttgttttacgtcatgcgttgggactcgttggtttagggctcctgagttgctttatggatcaagaaactatggtttagaggttgatttgtggtccttgggatgtatctttgcagagcttttaacgctgcaacctttgtttcctggaactgctgatattgaccagcttagtagaatcattggtgttttgggtaaccttgatgagaatgcttgggctgcttgttctaaacttcctgattatgggataatctcctttagcaaggtggagaaccctgctggtcttgaagcttgtttgcccaatcggtcccctgatgaagtggctctggtgaaaaaactggtttgttatgatcctgccaagagggccacggcgatggagctgcttcatgacaagtactttagtgatgagcctcttcctgttctggtttctgagctgcgagttcctctgaccagaaaagagcaagatggggattcccctggtgggtggggtgatatcaacgatatggattccgattccgattcccagtttgatgagtttggccctctgaatatcacaaggactggtactggtttctccatacagtttccttgaagaattcaaggtacattgtattcttggaactgcctttttgccttttctgtcgtgttgctcaactgttactatttgctggaaattcttcggtgagaatattgataagaaaaatccctttttttttttctgatttgtcattcacttgtgaacaaagggataaattattcaaaagtaattagaatgattgtgtgtttacatgacattcatagttgaccatgacactcacagttgatagtttatataatacatggacttgtatccttccaaattcacacatataatgatagcacgtactatagttatttttgtgttaaaaaaaaaaaaaaaaaaaaaaaaaggc

SEQ ID NO: 80 - DNA, 1977 bp, Arabidopsis thaliana
ctcaaacaaaacagccttttacataagaacaaacacccccaaaaactgcaaaaaaaagagagagatcattaatccatcttcaagatgtctcttcctgaaactaaatctgatgatatccttcttgatgcttgggacttccaaggccgtcccgccgatcgctcaaaaaccggcggctgggccagcgccgccatgattctttgtattgaggccgtggagaggctgacgacgttaggtatcggagttaatctggtgacgtatttgacgggaactatgcatttaggcaatgcaactgcggctaacaccgttaccaatttcctcggaacttctttcatgctctgtctcctcggtggcttcatcgccgatacctttctcggcaggtacctaacgattgctatattcgccgcaatccaagccacgggtgtttcaatcttaactctatcaacaatcataccgggacttcgaccaccaagatgcaatccaacaacgtcgtctcactgcgaacaagcaagtggaatacaactgacggtcctatacttagccttatacctcaccgctctaggaacgggaggcgtgaaggctagtgtctcgggtttcgggtcggaccaattcgatgagaccgaaccaaaagaacgatcgaaaatgacatatttcttcaaccgtttcttcttttgtatcaacgttggctctcttttagctgtgacggtccttgtctacgtacaagacgatgttggacgcaaatggggctatggaatttgcgcgtttgcgatcgtgcttgcactcagcgttttcttggccggaacaaaccgctaccgtttcaagaagttgatcggtagcccgatgacgcaggttgctgcggttatcgtggcggcgtggaggaataggaagctcgagctgccggcagatccgtcctatctctacgatgtggatgatattattgcggcggaaggttcgatgaagggtaaacaaaagctgccacacactgaacaattccgttcattagataaggcagcaataagggatcaggaagcgggagttacctcgaatgtattcaacaagtggacactctcaacactaacagatgttgaggaagtgaaacaaatcgtgcgaatgttaccaatttgggcaacatgcatcctcttctggaccgtccacgctcaattaacgacattatcagtcgcacaatccgagacattggaccgttccatcgggagcttcgagatccctccagcatcgatggcagtcttctacgtcggtggcctcctcctaaccaccgccgtctatgaccgcgtcgccattcgtctatgcaaaaagctattcaactacccccatggtctaagaccgcttcaacggatcggtttggggcttttcttcggatcaatggctatggctgtggctgctttggtcgagctcaaacgtcttagaactgcacacgctcatggtccaacagtcaaaacgcttcctctagggttttatctactcatcccacaatatcttattgtcggtatcggcgaagcgttaatctacacaggacagttagatttcttcttgagagagtgccctaaaggtatgaaagggatgagcacgggtctattgttgagcacattggcattaggctttttcttcagctcggttctcgtgacaatcgtcgagaaattcaccgggaaagctcatccatggattgccgatgatctcaacaagggccgtctttacaatttctactggcttgtggccgtacttgttgccttgaacttcctcattttcctagttttctccaagtggtacgtttacaaggaaaaaagactagctgaggtggggattgagttggatgatgagccgagtattccaatgggtcattgatcatgaattcatgatcatgatcatgatgatgaacattatgcatgtctatgttgatatgtttgaatttgattttgagttttgtttgtatattttatgatgcttttcttaattaaaaaaaaa

SEQ ID NO: 81 - DNA, 1965 bp, Oryza sativa
ggtggaggagagtgaggacggcccacgcggacgagcagagagtggcgggctcagtgtcgggctcgccggagtccgcgcaatccggccgttcatgcttcattctctcggacattaacctggtttacttgtaagaaagtagagccatggactcctcataccagcatgacaagcctctgctggatgaagagaactcctcgcaagtgacccttgaatatacaggtgatggatctgtttgcatccgtgggcatcctgctttaaggaaacatacagggaactggaagggttcctcattagccatcgttttttcattctgctcttatctggcctttacttcaattgtaaaaaacctagtcagttatctcacaaaagttctacatgaaacaaacgtggccgctgcaagagatgttgcaacttggtcaggaacaagttatcttgcacctctggttggagccttcttagctgattcatatctggggaagtactgtacaattctgatcttctgcacgatcttcattatcggattgatgatgttgcttctgtcagcagcagttccattaatctctactggtcctcactcatggatcatatggacagatccagtctcttctcagaacatcatattctttgtcggtttgtacatggttgctttagggtatggtgcacagtgcccctgcatatcatcatttggtgctgatcaatttgatgacactgatgaaaatgagagaacaaaaaagagttcttttttcaattggacctatttcgtagccaatgcgggctcattgatctcggggactgttattgtgtgggtgcaagatcacaaaggttggatctggggttttaccatttctgcactatttgtgtatttaggttttggtacttttatctttggctcctctatgtatgatttcagaaacctggaggaagcccctcttgcgagaatatgccaggttgttgttgctgctattcacaaacgcgataaagatttgccatgtgattcctcagttctttatgagtttctggggcagagttcagcaatcgaaggcagccgaaaattggagcatacaactggacttaagttctttgatagagctgcaatggtgacaccatctgattttgaatctgatggcctactaaacacatggaagatttgcacagtcactcaagtggaggaactgaagattttgatcaggatgttccccgtttgggcaacgatgatattatttgctgcagttctggacaacatgttttcgacattcatagaacaggggatggtgatggagaaacacatcggctctttcgaaatacctgcggcgtccttccaatccattgatgtcattgctgtccttatactagttccagtctatgaaagagtccttgttccagtgttcagaaaattcactggcagagcaaatggcattactccactgcagcgaatggggatcggcctgttcttttccatgctctccatggtatcagcagcattggtggagagtaatcggttgcggattgcgcaggatgaaggtttggtgcacaggaaggtggctgttccaatgagcatcctgtggcagggaccccagtacttcctgataggcgtgggagaggtgttctcaaacattgggttaactgaatttttctaccaggaatcaccggacgccatgagaagcttatgtctcgcattctcacttgctaacgtttcggcaggaagttacctcagctcgtttatcgtttctcttgtgccagtgttcacagccagagaaggcagtcctggatggatacctgataacttgaacgaagggcatttggatcggttcttctggatgatggctggcttgtgtttcttgaatatgctggcctttgtgttctgtgccatgaggtacaaatgtaagaaggcttcctgaaccttgttaacattagcaatataatggtggtggaaaaggacaattgtgttgcaaaaaaaaaaaaaaa

SEQ ID NO: 82 - DNA, 1048 bp, Zea mays
cctagccgcctgaggccgacgccaaatctctcctgaccgcaacggggaactcgacccccgcctccgccaccgccaccgcgccggtcgccgacccactcagatgaacacgtctccgtccagatacagggcaatgatgggaggctgggggggttcggatgggtacgagggatcaaagaggacgcgaatgatgatggaatcgaatccctacttcgcagtgaacgcagggagcccactggatgtctcaaagagggccaggatgatggaaccaggtgctccctattttggggctatgggaagcagcgccagcggtgccggcggcggcttctaccagccctttaacagcaacctagctggtgcagggtctagcaccggtatccaaagcttcccatgtgtccggctgcgaggccttccctttgattgcaacgacattgacgtctgcaagttctttgtggggctggacatagtggactgcctcctggtcaacaagaacgggcgcttcaccggcgaggctttcgtggtcttcccaacatccatgcaggcagagtttgcgctgcatcgcgacaggcagaatatggggcggaggtatgtcgaggtgttcaggtgcaagaagcacgagtactactgcgcaatagccaatgaggtgaaccagggcggttatttcgagccggagtaccgtcgctccccgcctcctccgaggcctaggaagccgtctgaagataagggcagcatggagtacacagaggttctgaagctccgcgggcttccctactctgccaccactgaggacatcatcaagttcttcctggagtacgagctggcagaggagaacgtgcatatcgcctaccgcaccgatgggaaggccacgggtgaagccttcgttgagtttccgacagctgaagtcgcgaagacggccatgtgcaaggataagatgaccattgggacgaggtacgtggagctgttcccgtcgaccccagaggaggccagcagggcgaaatcccgaggcaggcattgaagaaacgtgttccagtgatcttctgtatgcatgcat

SEQ ID NO: 83 - DNA, 1797 bp, Zea mays
gccggcgagccccgctccgagcatctccgctgctgcttctgccgaatcccagagctccttctcccgcttgccccctttccctcctgtcacattgattcgattttcgtcgcccatggagctacaaattaagtgtaggaaccaattaaaagcttgccaaaactagggcggcggcatcagcattcagcaataccctaggcgggctctcctcgcctccacagctccaggaagccgacccagagcagcacagcgccgcccattctgtctctctcggtctcggcagcgtaggcagcgtcaccctccgcttaaaccaccagcaccagctgctggtgcgccgccccgcccggcaccgccgctcctctacctcttcctggtggattggtgagaggaagccctaacttggcctctcttgaatcaactcggcggtggctttgagtcagtaggtgttgttttgcgctcttattcaaaacccaaatctgtccctcctctcagattattgtgagtttatccctgccccaatccatctgtccatggtccgcgtgggcttgtcttccgcgcccggggtcaatctgacagagcaaatcgataatgtttttgaccaactgatcaacaagatagaacatgcggattttgatacgcggcctttcttgaaacaattgaatgtgttaggccgctatgaaccaatcaagcggaatgtatattgcactaagagacgcattgaagattatggcatttcttgtcactgtaagccttctcctggttcatcagttgtgtgtggcagagactgccattgtggcatgcttttctcttgctgttcatcacaatgtgaatgtgatgacacatgcaccaataaatcattccagcacagacctcttaagaaaaccaaattgattaagacagagaaatgtggtcatggattggttgctgaggatgaaataaagaaaggagaatttgttattgagtatgttggagaagttattgatgacagaacatgtgagaataggctatggacaatgaaaaggctgcttgacactgacttctacctttgtgaggtcagtagtaatatggtcattgatgcaacaaacaagggaaaccggtcccgattcataaaccatagctgtgaaccaaacacagcgatgcagaaatggactgttgatggagagaccagggttggaatttttgcacttcgtgacataaagataggggaggagctgacctatgactataaatttgtccagtttggagcagctcaagtttgtcattgtgggtcttcgaactgcagaaaaatgctaggcacgacgaagtattcaggaagctcacagaatcatcatgccaagaagaaaaagcggaaaacaagttgtgagaattgcatacagcagtttcttcggctgtggcatccacataaaaaaatgtatgttggttgttggataattgacttcgatcaagaaactaaaatgcatactctgaagttcaatgatctccatactgaaaagttcaatttgaaggaagaagaatggcacttcttagaggtcgattttgatgaagattgatcattgaaggtaactgcaagagttggctgccatggtttgtgacagggttgccatggtttgctgcaccgccggcctactagttgggggttcatttgcgatggcagcatagacagacggacggccatttttcttccattttggagtaatagtccaagcctgaactgtgacattcgtgcatgcttatacgtgaaagtgtacctgagagcagattatacgtgaaagtgtatcagcgttgcataaaaaaaaaaaa

SEQ ID NO: 84 - DNA, 3926 bp, Saccharomyces cerevisiae
ttcatacttacgataaaatcacttggaatagaatctacaccaatgaacgcgttttctaagatttccctgaggggtgattaaccaaattgaaaaagatatcgtcaaattcttctttgtgtattttaaagaaggtttttgtattagaaaacgtgcgaaacaaatctttattgatttctgaaaacaatggcaatcgaagctcataggaaccacttttctgtgccttttgaaagatattctcaattatctcgattagctttggcaaatctttaccatatataaagtctccactgatgggtttgtcaatgtggccccatgcgtactcaaaaatagcatcaaacgcaccgttactcatacttacgttgtcaaagacagaattgtttgtaaagctttctttcttaaccttggagccgccaaaaaaatactccactaaggccagtagcaacaacacgttttcttggatgatgcgttttcttgaacaaacagtaccgactaggactgtttcaatgaagttgtgtacggtctggtagtatatctatattccgtgatgcctttgtggaggacgttgagatgagactgagtcgtacaccatgttattcctgtttatggttaattgcgcgtcgcgctttctctagcaaatatctcggttcgaagtaaagcaggtccttcatgtaatggtaacctaaggcaaagggtttgtcatatacccgtgaaggcatttacacaagcgcacttctagtcatatgcagttcatgcatattaagtgagtgttataacgcaagagttatatttgaaatagggttgttaaagaagggagaaacccattcaccacattatctttgcgagtgtaaaactagataacttaaatttttaggagagattttgccacttggcagcaaataccaaatagcagtactgttccggtagataaaggcaaagagttagaggtgtgctttacgaacagcgctggaagggaaaggaaacaaaaaagacaaaaagacagctgtattgttggcgccatgaataatgctgcaaatacagggacgaccaatgagtcaaacgtgagcgatgctccccgtattgagcctttaccaagcttgaatgatgatgacattgaaaaaatcttacaaccgaacgatatctttacgaccgatcgtaccgatgcaagtactacatcttccacagccattgaagatattattaacccctcattggatccgcagtcagcagcatcgccggttccttcttcctcttttttccatgactcaaggaaaccttccaccagtacacatttagtaaggagaggtactccattgggaatttaccaaaccaatctatacggtcacaatagcagagaaaatactaatcctaatagtacattattatcttctaagttactcgcgcatccaccagttccttatgggcaaaatcccgatttactacaacatgctgtgtacagggcacagccgtcaagtggaaccactaacgcgcaaccgcgccaaaccacaagaagatatcaatcccataaatcacggcctgcatttgttaataaactatggagcatgttaaacgatgattctaatacgaaacttatacagtgggcggaggatggaaaatcttttattgtcacgaatagggaggaatttgtgcaccaaattttaccaaaatattttaaacattccaatttcgcttcctttgtaagacaattgaacatgtatggatggcataaagttcaagatgtcaagtcaggatcaattcaaagtagttcagatgataagtggcaatttgaaaatgaaaacttcattagaggtagagaagatttgctggaaaaaataatcaggcagaaaggttcctccaataaccataatagccctagtggtaacggtaatccagcgaatggtagcaacatccctctggacaatgccgcaggaagtaataatagcaataataacatcagtagtagtaattcattttttaacaatggtcatttattgcagggtaaaacactaagattaatgaacgaagcgaatcttggagataagaatgatgtcaccgcgattttgggggaattagagcaaataaaatataaccagattgcaatttccaaagatttactaagaataaacaaagataatgagttattatggcaagagaatatgatggccagggaaagacatagaacccaacagcaagccttggaaaaaatgttcagattcttgacatctatagtcccacacttagatcccaaaatgattatggacgggctgggagatccgaaagttaataatgaaaagctaaacagtgcgaataacattgggttaaatcgcgacaacacaggcactatagatgaactaaaatccaacgattctttcataaacgatgatcgtaattctttcaccaatgctacaaccaacgcccgtaataacatgagtcccaacaatgatgacaatagtattgacaccgctagcactaataccaccaacagaaagaaaaatatagatgaaaacatcaaaaataacaacgacataattaatgacattatatttaataccaaccttgccaacaatctcagcaattacaatttcaacaataatgctggctcgccaataaggccctataaacaaagatatcttttgaaaaatagagccaattcctcgacatcgagtgagaatccaagcctaacgcctttgatatcgaatctaataatgaccgcaaaatttcagaaattccttttgatgacgaagaagaagaagaaaccggattttaggccttttacctcgcgagatcctaataaccaaacgagtgaaaacacttttgatccaaacagatttacgatgctctctgatgatgatttaaaaaaagattctcataccaatgacaataaacacaacgaaagtgatcttttttgggacaacgtacatagaaatatagacgaacaagatgcaagactccagaacttggaaaatatggttcacatactttctcctggatatcctaataagtcgttcaacaacaaaacttcctcgacaaacactaattccaatatggaaagtgctgtcaacgttaatagccctggtttcaacttacaggattatttaactggagagtctaattcccccaattctgttcattctgttccctccaatggcagcggctccacaccgttgcccatgccaaatgataatgacaccgagcacgcaagtacaagtgtcaatcaaggcgaaaatggaagcggattaacgcccttcctcacggtagatgatcacacactaaacgacaataacactagtgagggaagtacaagggtgtcccccgatataaagttcagcgccactgaaaacactaaagtgagtgataacctgccaagctttaatgaccacagttattccacccaggccgacacggcgcccgagaacgctaagaaaagatttgtggaggaaataccggaaccggctatagtcgaaatacaggacccgacagagtacaacgatcaccgcctgcccaaacgagttaagaaatagtacacaggacgaggtcattaaatagcgtatataatcatttaatatagtatgttctcgaagctgatcgcgtaaggcgcagaacgaactaaaaaaaataccggcacccatgcacctcacaccgccgcacgcgagtgaggttgaactgcacccggaaaatgccaagtagatgagtcgtgaagagttctcgttattcgagctagtgagagcctgagaagggcttgccgagtgaactggggtcacattggccgttttaacgcaagttggcgtacttatgttgactgttggatgaaagggtaatcaagagaaacggaaacggcctcctcatcgtaaagctcatcagtattcatttctcccctttctgctccatcgcgtgctcgagactatactcttcagattatcaagcagaaa

SEQ ID NO: 85 - DNA, 3942 bp, Zea mays
  unsure (1)..(3942): unsure at all n locations
gtgggcccatggcacagacggcttacagagatcctaccccacattccagagatatggaacgccaccatggccgataccgaacagccgcgccatgtgtcacacatcgggagcacttcgtcaacaatccaacggtccatgattattaaggcccacatgtcatagaaccctctggcaccctctcgccgcttcgtcacctgtcccgtcgctcgtcctctcgtttccacggccttctagactcccggcgaacactcccctccgccttcttatgctcatcccctccgcttccgaagcacaacatttcaaccagaaacactagccgaagcaaatccattccacaagcacctggtgggatcatctcatcatcagaaaccaagagagagattccgtgtccgcttgttgtagtagattgtgaggactgaggaccgagaagcagccatgaatccggacaacttcacccacaagacgaacgaggcgatcgtgggggcgcacgagattgcggtggaggccggccacgcgcagctcacgccgctgcacctggccgcagtgctggctgcggacaagggcggcatcctgcggcaggccatcacgggggcgtcggggggcgacggagcggccggggactcgttcgagcgcgtgctgaacaactcgctcaagaagctgccgtcgcagtccccgccgccggactccgttccggcgtctacggcgctgatcaaggtcatccgccgggcgcagtccgcgcagaagaaacgcggggactcgcacctcgccgtcgaccagctgctgctcggcctgctcgaggactcgcagatctccgactgcctcaaggaggccggcgtgtccgcggcgcgggtgcgcgccgagcttgagaagctccgcggcggggaggggcgccgcgtggagtccgcgtcgggggataccaacttccaggcgctcaagacatacggccgggacctcgtcgagcaggccgggaagcttgaccccgtcatcggccgcgacgaggagatccgccgcgtcgtgcgcattctctcgcgccgcaccaagaataaccccgtcctcatcggcgagcccggcgttggcaagacggccgtcgtggagggcctcgcgcagcgcatcgttcgcggcgacgtgcccagtaacctcctcgacgtccgcctcatcgcgctcgacatgggcgcgctcgtcgcgggcgccaagtaccgcggcgagttcgaggagcggctcaaggccgtgctcaaggaggtggaagaggccgaggggaaggtcattctcttcatcgacgagatacacctcgtcctgggcgcgggcaggacggagggttccatggacgcggccaacctgttcaagccaatgctggcgaggggacagctcaggtgcatcggcgccaccacgctggaggagtaccgcaagtacgtggagaaggacgcagcgttcgagcggcggttccagcaggtgttcgtcgcggagccgagcgtgcccgacaccgtcagcattctgaggggcctcaaggagaagtacgaggggcaccatggcgtgaggatccaggaccgcgccctcgtggtcgcggcacagctctccgcgaggtacatcatgggtcggcacctgcctgacaaagccatagacctggtggacgaggcctgcgccaatgtgagggtgcagctcgacagccagccggaagagattgataacctggagaggaagagaatccagcttgaggttgagctccacgcgctcgagaaggagaaggacaaggccagcaaagcccggctgattgaggtgcgtgtctcgagcactgaattttcctcaaacaagtcctcttgtctgatgttcctgttttgaacttttgatactaacgtcgcttaactgtggccattgttcaggtcaggaaggaattggacgatctgagggacaagctgcagcccctgaccatgaagtacaggaaggagaaggagagaattgatgagatcaggaagctgaagcagcgccgcgaggagctccagttcaccctgcaggaggccgagcgccggatggacctggcccgtgtggccgacctcaagtacggcgccctccaggaaatcgacgctgctatctccaagctggagagcgaaacaggggagaacctgatgctcaccgaaaccgtcggccctgaacaaattgcagaggtatgttattattcttgttcaccgtcacaaaaattttgcagagcaagtgccgaatttgccgatcgtctcctagtagagtagtcgtgcagcgtgctgaaatggtgtttcgtcctatgggcaggtggtgagccgttggacgggtattccagtgacccggcttggccagaacgacaaggagaggctggttggcctggctgacaggcttcaccagagggtggtcggccagacagaggctgtgagcgccgtcgcagaggcggtgctgaggtcgagggccggtcttggcaggccacaacagcccactggctcgttcctcttcctgggtccgactggcgtggggaaaactgagctggccaaggccctagccgaacagctgttcgacgacgagaaccttcttgtccgcatcgacatgtcggagtacatggagcagcactcggttgcccgcctcatcggagcaccacctgggtaagtagcagaaaatgcatgcatcttcgtatttttaactgcgaattgcgatgaactcttgttctgacagtgggccggacctgtgacagctacgtcggccatgaagagggtgggcagctgactgaacaagtgaggaggaggccgtacagcgtgatcctgttcgacgaggtcgagaaggcccatgtcgccgtgttcaacaccctgctccaggtcctcgacgacggcaggctgacggatgggcaaggcaggacggtggacttcaggaacaccgtgatcatcatgacatcgaacctcggcgccgagcacctcctcgctgggatggtgggcaagaactccatgaaggtcgctcgcgatctggtcatgcaggaggtatgcattgcgataacgttctgaatcgtcgttagacattgttcctctgcagcgtgatgctcaatcggatcgttattgctgtgtgcaggtgaggaggcacttccgccctgagctgctgaaccgtctcgacgagatcgtgatcttcgatcctctgtcccacgagcagctgaggaaggtcgctcgccttcagatgaaggatgtggccgtccgtcttgccgaaaggggcatcgctctggctgtgaccgacgccgcattggacatcatcttgtctctctcttacgatccggtatgtgaccatccatgatttgatccatctgaattcgtcggtgacacctgatggtgctgactctcttatctttcttgtgtggcttcaacaacaggtgtatggcgcgcggccaatcaggaggtggatcgagaagagggtggtgacgcagctgtcgaagatgctgatccaggaggagatcgacgagaactgcacggtctacatcgacgccgcgcccggcaaggacgagctggtctacagggtggaccggagcggcggtctggtgaacgctgagacggggatgaagtcggacatcctgatccaggtccccaacagctccaccaggagcgacgctgcgcaggccgtcaagaagatgaggatcatggaggaggacgaggacggcatggacgaggagtaaaaggcgggccggaggacgcggagctgcgcccaggccgcangtctggcgccggcatcatcgagtgtcttttgaataagcgtgtagataagcccgtgaatatgcagacgaggttgagatgatgttcttgtaacgctgctgtttgtcaagcatggacggatggtctctcatatggtatcaaagtgacgaaggtctctcaatcgatgtcttgtcattatttttatctccctaaatgtttttacatgttttcctctattcattgcatcctttatgca

SEQ ID NO: 86 - DNA, 4248 bp, Escherichia coli
agatgactgccgactgcctccctgtgctgtttttgcaatcgacgggaacgaagtcgccgccgctcatgctggctggcgtggactgtgcgcaggcgtgctggaagagacggtttcctgttttgctgataatccggaaaatattctcgcctggttagggccggcaattggtccacgcgcgttcgaagtggggggggaggttcgcgaggcgtttatggcagtagacgctaaagcaagtgcagctttcattcagcatggtgataagtatctggcggatatttatcagcttgcccggcagcgtctggcgaacgtgggtgttgagcaaattttcggcggcgaccgttgtacatatacggaaaatgagactttcttctcttatcgtcgcgacaagaccaccggtcgtatggcaagtttcatttggctgatataacctaaagaatcaagacgatccggtacgcgtgattttcttttcacattaatctggtcaataaccttgaataattgagggatgacctcatttaatctccagtagcaactttgatccgttatgggaggagttatgcgtctggatcgtcttactaataaattccagcttgctcttgccgatgcccaatcacttgcactcgggcacgacaaccaatttatcgaaccacttcatttaatgagcgccctgctgaatcaggaagggggttcggttagtcctttattaacatccgctggcataaatgctggccagttgcgcacagatatcaatcaggcattaaatcgtttaccgcaggttgaaggtactggtggtgatgtccagccatcacaggatctggtgcgcgttcttaatctttgcgacaacgtggcgcaaaaacgtggtgataactttatctcgtcagaactgttcgttctggcggcacttgagtctcgcggcaccgtggccgacatcctgaaagcagcaggggcgaccaccgccaacattactcaagcgattgaacaaatgcgtggaggtgaaagcgtgaacgatcaaggtgctgaagaccaacgtcaggctttgaaaaaatataccatcgaccttaccgaacgagccgaacagggcaaactcgatccggtgattggtcgtgatgaagaaattcgccgtaccattcaggtgctgcaacgtcgtactaaaaataacccggtactgattggtgaacccggcgtcggtaaaactgccatcgttgaaggtctggcgcagcgtattatcaacggcgaagtgccggaagggttgaaaggccgccgggtactggcgctggatatgggcgcgctggtggctggggcgaaatatcgcggtgagtttgaagaacgtttaaaaggcgtgcttaacgatcttgccaaacaggaaggcaacgtcatcctatttatcgacgaattacataccatggtcggcgcgggtaaagccgatggcgcaatggacgccggaaacatgctgaaaccggcgctggcgcgtggtgaattgcactgcgtaggtgccacgacgcttgacgaatatcgccagtacattgaaaaagatgctgcgctggaacgtcgtttccagaaagtgtttgttgccgagccttctgttgaagataccattgcgattctgcgtggcctgaaagaacgttacgaattgcaccaccatgtgcaaattactgacccggcaattgttgcagcggcgacgttgtctcatcgctacattgctgaccgtcagctgccggataaagccatcgacctgatcgatgaagcagcatccagcattcgtatgcagattgactcaaaaccagaagaactcgaccgactcgatcgtcgtatcatccagctcaaactggaacaacaggcgttaatgaaagagtctgatgaagccagtaaaaaacgtctggatatgctcaacgaagaactgagcgacaaagaacgtcagtactccgagttagaagaagagtggaaagcagagaaggcatcgctttctggtacgcagaccattaaagcggaactggaacaggcgaaaatcgctattgaacaggctcgccgtgtgggggacctggcgcggatgtctgaactgcaatacggcaaaatcccggaactggaaaagcaactggaagccgcaacgcagctcgaaggcaaaactatgcgtctgttgcgtaataaagtgaccgacgccgaaattgctgaagtgctggcgcgttggacggggattccggtttctcgcatgatggaaagcgagcgcgaaaaactgctgcgtatggagcaagaactgcaccatcgcgtaattggtcagaacgaagcggttgatgcggtatctaacgctattcgtcgtagccgtgcggggctggcggatccaaatcgcccgattggttcattcctgttcctcggcccaactggtgtggggaaaacagagctttgtaaggcgctggcgaactttatgtttgatagcgacgaggcgatggtccgtatcgatatgtccgagtttatggagaaacactcggtgtctcgtttggttggtgcgcctccgggatatgtcggttatgaagaaggtggctacctgaccgaagcggtgcgtcgtcgtccgtattccgtcatcctgctggatgaagtggaaaaagcgcatccggatgtcttcaacattctgttgcaggtactggatgatgggcgtctgactgacgggcaagggagaacggtcgacttccgtaatacggtcgtcattatgacctctaacctcggttccgatctgattcaggaacgcttcggtgaactggattatgcgcacatgaaagagctggtgctcggtgtggtaagccataacttccgtccggaattcattaaccgtatcgatgaagtggtggtcttccatccgctgggtgaacagcacattgcctcgattgcgcagattcagttgaaacgtctgtacaaacgtctggaagaacgtggttatgaaatccacatttctgacgaggcgctgaaactgctgagcgagaacggttacgatccggtctatggtgcacgtcctctgaaacgtgcaattcagcagcagatcgaaaacccgctggcacagcaaatactgtctggtgaattggttccgggtaaagtgattcgcctggaagttaatgaagaccggattgtcgccgtccagtaaatgataaaacgagcccttcggggctcgtttttgtctataagttagacggaaaagactatatttaagatgttttgcctgaaaagtgagcgaacgataaagtttttatatttttcgcttgtcaggccggaataactccctataatgcgccaccactgacacggaacaacggcaaacacgccgccgggtcggcggggttctcctgagaatctcaacagagaaaagcaaagaaatgcttgactctgtagcgggaaggcgtattatgcacaccgccgcgccgctgagaaaaagcgaagcggcactgctctttaacaatttatcagacaatctgtgtgggcactcgaagatacggattcttaacgtcgcaagacgaaaaatgaataccaagtctcaagagtgaacacgtaattcattacgaagtttaattctttgagcatcaaacttttaaattgaagagtttgatcatggctcagattgaacgctggcggcaggcctaacacatgcaagtcgaacggtaacaggaagcagcttgctcttcgctgacgagtggcggacgggtgagtaatgtctgggaagctgcctgatggagggggataactactggaaacggtagctaataccgcataatgtcgcaagaccaaagagggggaccttcgggcctcttgccatcggatgtgcccagatgggattagcttgttggtggggtaacggctcacctaggcgacgatccctagctggtctgagaggatgaccagccacactggaactgagacacggtccagactcctacgggaggcagcagtggggaatattgcacaatgggcgcaagcctgatgcagccatgccgcgtgtatgaagaaggccttcgggttgtaaagtactttcagcggggaggaagggagtaaagttaatacctttgctcattgacgttacccgcagaagaagcaccggctaactccgtgccagcagccgcggtaatacggagggtgcaagcgttaatcggaattactgggcgtaaagcgcacgcaggcggtttgttaagtcagatgtgaaatccccgggctcaacctgggaactgcatctgatactggcaagcttgagtctcgtagaggggggtagaa

SEQ ID NO: 87 - DNA, 3180 bp, Synechocystis PCC6803
acttctaggacgtagccctcattccaagtcatggcgtctgattctgcgtaggggtcaagattagcccttagcttacaagaaaggggctttggggcctagttgaatggcacaaattttccttccctgactgtttttgcgccattgtctagctcaaagtcagcctccggcatcctctagaaagacttccatcccctggttgagcaagggtaaaccccaccactgcattgggaaaaccctccttcctagctccggattccaccccctaaaattgatttggtagtccttacacacccaatagccaatatagaaaattttatgcaacccacagatcctaataaatttacggagaaagcttgggaggcgatcgccaaaacaccggagattgctaaacagcatcgacaacagcaaattgagacggaacacctactcagtgccctactagaacaaaatggtctggccaccagcatctttaataaggctggggcgagcattccccgagttaacgatcaagttaatagctttattgcccaacagccaaaattaagtaatccgagtgaatcgatttatttaggccgcagtctcgataaattgttggacaatgcggaaatagccaagtctaaatatggagacgactatatttccatcgagcacttgatggcggcttacggccaagatgaccgcctgggcaaaaacttatatcgagaaattggcctaacagaaaataagttggcagaaattatcaagcaaattagaggaacccaaaaagtgaccgatcaaaatccagagggcaaatacgaatcccttgaaaaatatgggcgagatttaacggaattagcccgggaaggtaaactagatcctgtcattggccgggatgaagaagtgcggcgcaccattcagatcctttcccgccgcacaaaaaataaccctgtgttaattggggaaccgggggttggtaaaacggcgatcgccgaaggtttagcccaaagaattattaaccatgacgtaccggaatcattgcgggatcgcaaactaatttccctcgatatgggggcgttaattgccggggcaaaataccggggggaatttgaagaaagacttaaagcggtacttaaagaagttaccgacagccaggggcaaattattctctttattgacgaaattcataccgttgtcggcgctggggccacccaaggagccatggatgcgggcaacttattgaaacccatgttagcccggggtgctttgcgttgtatcggggccaccactttagatgaatatcgcaaatatatcgaaaaagatgcggctttggaacgacgtttccaggaagttttagtggatgaacccaatgtattagataccatttccattctccggggattaaaagaacgctatgaagtacaccacggcgtaaaaattgccgatagtgccctggtagcggcggccatgttgtccaatcgttacatcagtgatcgttttctgccggataaagctattgatttagtagacgaagcagcggccaaattaaaaatggaaatcacctccaaaccagaggaattagatgaagttgaccggaaaattctccaactagaaatggagcgtttatctttacaacgggaaaatgattctgcttccaaggagcggctagaaaaattggagaaagagttggctgattttaaagaagaacagtctaaacttaatggccaatggcagtcggaaaaaacggttattgatcaaattcgtactgttaaggaaaccatcgaccaggtgaacctagaaattcaacaggcccaacgggattacgactacaataaagcagcggagttacagtatggcaaattaactgatttacagcggcaagtggaagctttggaaacccaattggcggagcaacaaacctctggcaaatccctcttacgggaagaagttttagagtctgacattgctgaaattatctcgaaatggaccggcattcccatcagtaaattggtggaatcggaaaaagaaaaactgctccacttggaagatgaactacacagccgagtgattggtcaggatgaagcggtaaccgccgtagccgaagccattcaacgctcccgagctggtctttccgatcctaatcgtcccaccgctagctttatttttctgggccccacaggggtcgggaaaactgagttagcgaaggctttggcgaaaaatttattcgacacggaagaagccctggtgcggattgatatgtctgaatatatggaaaaacacgctgtttcccgtttaatgggggcccctccgggctatgtgggctatgaagaagggggacaattgacggaagcaattcgccgccggccctattcggtcattctttttgacgagattgaaaaagcccatggggatgtgtttaacgtcatgctccaaatcctggatgatggccgtttaaccgatgcccaaggccatgtggtggacttcaaaaatacgattatcattatgaccagtaacctgggctcccaatacattttggatgtggcgggggatgatagtcgttatgaagaaatgcggagccgagttatggatgtaatgcgggaaaacttccgcccagaatttctcaatcgggtggatgaaacgattattttccatggcttacaaaaatccgagttacgatccattgtccaaattcaaattcagtctttggctacccgtttggaggaacaaaaattaactttgaagttaacggataaagccctagattttctggctgccgtgggctatgaccccgtttatggggcccgacctttaaaacgagccgtccaaaaatacctagaaacggcgatcgccaagggaattttacggggggattacaaacctggtgagaccattgtggtggatgaaaccgacgaacgcctcagttttaccagtttaaggggggatttagtcatcgtttagggacttctgttccgtcaactctgacggattaataactccatcaatgctaaccctaggggattccaactccgccgtcatggttgcccctggggtttggtgatggggtaataactcctgaccccggttaatcaaagccgccatgcccttgtcataattgctggcgatcgccaaaaaagcaccggccataacgtaaataggcaggggcaaaattaccccccatagccattggaaaagttgcactccggc

SEQ ID NO: 88 - DNA, 3000 bp, Xylella fastidiosa
tgttggcgtgtgggctgtttcatcagttttgtgtatttggggtaggttgtgtatctctgttcgatcgggtgttctcaaatgaacacatacttggtcatcggtcgtgtccttgaaagtgacttgttaaaccgcatctgttggatgtcgccggcagatgtccggtctctttcctaactggggctttttatgcggatggataagcttacttcgcgtttccagaatgcgttggctgatgcgcaatcgctggccgtcggtcgtgaccatactattattgagccggtgcatgttttttcggcattgcttgatcagcagggggggagtacacgtccgttgctcatgcaggccggtgtcaatgtgccattgctgcgtgagcggttgaccgagatacttgaggcattgccgaaagtgagtggtcagacggttaatgtctcacccagcaatgaattgagtcgtttgtttcatcggactgataagttagcgcagcagcatggcgatcagtttatggccagtgagtggttcgtgttggctgtggtcgatgatagtggggggctgggccaggcgttgcgtgctgctggtgcggaaaaaaagaagattgaggctgcgattgataaattgcgtggcggtgaaactgtccagactgagaatgcggaggagcagcgtcaagcgttggaaaagtacacgattgatctgactgccagggctgagagtggcaagcttgatccggtgattggtcgcgatgaggaaattcgccgcacgatacaggtattgcagcggcgtacaaaaaataatcctgtgctgattggtgagccgggtgtgggtaaaactgccattgtagaagggctggctcagcgcattgtcaatggtgaggttccggaagggttgcgcagtaagcgtctgctctcgctggatttgggagcgttgattgctggggccaagtttcgtggtgagtttgaggagcgcttgaagggggtgcttaacgatctcgctaagaatgaggggcgggtcattttgttcattgacgagctgcataccatggttggtgccggtaaagccgatggtgcgatggatgctggcaatatgctcaagccggcgttagcacgtggtgagttgcattgtatcggtgcgactacgttggatgagtatcgcaagtacattgagaaggatgcggcgttggaacgccgtttccagaaggtgtttgttggggagccgacggtggaggataccatcgcaattcttcgtggacttaaggaaaagtatgcgttgcaccacggtgtggaaatcactgatccggctattgttgctgcggctacgctgtctaatcgctacatcactgatcgtcagttaccagataaagcgattgacttgatggatgaggctgccagtcgtattcgtatggaaattgactccaagccggaagagcttgatcgtttggagcgtcggttgattcagttgaaaattcagcgtgagatgctgaagaaagaaaaggatgaggcgagcaagcagcgtttagccgatcttgagcgtgatattgaggttctggaccgtgaattttccgatctggaggaggtgtggagatcagaaaaagccgcgctacagggggcgactaagatcaaggagtcgatcgagcaggccaagcttgatttggaagccgcgcagcgccgtcaggactacgccaagatgagcgagattcagtatggtgtactccccgcgttggagaagcagctggtggcagcaagtcaggcggaacagcacgattttacgttggtgcaggagaaagtgactgctgaggagattgccgaggtagtcagtcgttggactggtattccagtgagcaagatgcttgagggcgagcgcgataagttgttgcgtatggaagctgatctaggccgacgtgtggttggtcaagaggaggcgatcaaggtggtatcggatgcggtacgccgttcgcgtactggtttgtctgatccaaatcgaccgagcggctcgttcctttttctgggtccgacgggtgttggtaagactgagttatgtaaggcgctggctgaatttttgttcgacagtcaagatgcaatggtccgcattgatatgagtgagttcatggaaaagcattctgtggcgcgcctgattggtgcgcctccgggctatgtgggttatgaggaaggaggttatcttactgaattggtgcgacgtcggccttactctctgattcttttggatgaagtggagaaggcgcatagtgatgtgttcaatattctgctgcaagtacttgatgatggacgcttgactgatggtcagggccgtactgttgattttcgcaataccgttattgtgatgacatcgaacttgggttcacatcagatccaagaactcagtggagacgattctccggaggtgtatacgcaaatgaaggcggcagtgatggaggtggtgcaggcgcattttcgcccagagttcattaacaggttggatgatattgttgttttccacccgttggacaaggcgcaaatcaagcagattgcgcggattcaactgcaggggcttgagaagcgtctcgctgaatctgagttgaaactagatttggatgatcgtgcgttggaattgcttggtaatgtcggatttgatcctgtatatggtgcccgcccgctgaagagagcgatccaatctcagctggagaatcccttagcgcagcagatcttagctgaagcgttcgtcagtggagatactgtgcaggtgggtgttgatggagggaagcttgtattcgctaaggtgtgaagttgtttactgtatatagtcagtagtgctgtgtattgtatgggtgtacgaggggtgtggttataaataacctttcttggttgccagtagtgttggtttatattgatcaggttgggtccgcgcgcatcgtgcgcggacagatgtaaggtctgtatggaaagccaaattaatttggctggatgctaagaaatggacgaaggaggagatcaattgcgacagtcattgagt

SEQ ID NO: 89 - DNA, 1864 bp, Zea mays
ggtaccggtccggaattcccgggtcgacccacgcgtccgcccacgcgtccgcgtcactcgccacgccacgccaaagaccaagaaaaaaaaggacgattttttcctagctgcaacttccctcacgccatggaggaggagatgccgctgcagctgctctccgcttcctccgccgccgtcgctgtctgagctcccccttcgctcgatctctccatcgggccgggcctacctctcctagcagtgaatcaaaccatggcagctttcgccgcgctgttcgaccccctgtactgcccggaggagcacctcgatctgtaccgcgacgaacccggcgagggtgcggacgagcagtggccgggccagcacggacagcaggagccggctgtcctcgacgacgagctgccggcgctgttcgaggcacaccgggccaaggagggggtggtgctggcggaggatggcgggtacggcggcgcagctgggcgtgaggccgcggtcggctgggtttcacgcgccgcggcgcggctaggcttatccgcgctcaccgccgcgctcgccgccgcctacctcgaccgctgcttcctccccgggggcgcgctccggctcggcgaccagccctggatggcgcgcctagccgccgtcacctgcttcgcgctcgccgccaaggtcgaggagacgcgcgtgccgccgctcctcgacctccagctctacgccgccgctgacgccgcggatccgtacgtattcgaggccaagacggtgcgccggatggagctgctcgtgctctccgcgcttgggtggcggatgcaccctgtcacgcccttctcctacctccagcccgtcctcgccgacgctgcgacgcgcctgcgtagctgcgagggcgtcctgctcgcggtcatggccgactggaggtggcctcggcaccggccttcggcgtgggccgccgccgcgttgctgatcacagccgccgccggcgacggcggcgacggcgacggcgacacggagctcctggcgctcatcaatgcccccgaggacaagaccgccgagtgtgccaagatcatctccgaggtgacgggcatgagcttcctcgcctgcgatgtcggcgtgagcgccggaaataagcgtaagcacgcggcggcgcagttgtactcgccgccgccgagcccgagcggcgtgatcggcgcgctgtcctgcttcagctgcgagagctcgacgtccgccaccgctatggctgcggcggtcggcccgtgggcgccgtcggcgtccgtgtccgtgtcgtcctctccagagccaccaggtcgggcccccaagcgcgcagcggcggcgtcggcgtcggcgtcggcgtcagccggggtcgcgccaccggtccaggtcccgcatcagctaccccccgacgaggagagccgcgacgcctggccgtccacctgcgccgcgtgacgcaccgtgccggaaacggtgcctatggcgagaccgccgttcggtggcggtggagaatggagaacaaggagcatcattggctcgcgtcggtgagcaggagaacgaactattttgcccattgccgtgacagatggggggcaagagagataagaaaagatgtccttgtttgcatgcttatggcgggagtaatgtttgcatgcttgtggcagcacattttgcaatgatggttctcagagaacttagctggaggtggaagatgattagcggataatttgccgtcgagatcgatggcgatttagtatttgttgcaactgtagtgatgctagttcttgccgtgttcttgttggttcttggcattgcttgcttggaaggggcctccgacctccgttgtcctgaaaaaaaaaaaaaaaaagggcggccgctctagaggatccaagct

SEQ ID NO: 90 - DNA, 1304 bp, Emericella nidulans
caaacaaagggatcgtcgtcctgacttttattttatagtccagagatccgtcttgtctgacatctactgccaaaccacaggtgtctgttcaattgcgctggttgtgccctgatttctgaattctctttccgccgcatactccgcaatgccatctactacaagccgcgctgccttcgaggcggtcttcccctccctggctgaggccatgcttgaccatgcgaggaaatacaacctgccccaaaatgctcaggaatggttcagcaaggccattcacaccaacgtccctggcggcaagctcaaccgcggtctctctgtccccgacaccggcgtggccctcctgcagaaggaactgagcgaggagcaatacaaggaccttgctacacttgggtggctgaccgagctgctccaggccttcttcctcgtcagcgatgaccttatggatggttcaatcacccgtcgcggccagccctgctggtaccgccaccagggggtcggtctcattgccatcaacgacgctttcctccttgagtccggtatctacgttatcctgaagaagcaattccgttcacaccctgcctacgtcgactttattgagctgttccatgagaccacctggcagacggaattgggccagctgtgtgatctgatcacggcgcccgaggacaaggtcgatctcaacaacttctccatggagaagtacatgttcattgtcacctacaagaccgcctactatagcttctacctcccggttgccctggccctccactaccttcagcttgctacccccgagaacctccgtcaggctcacgacatcctcattccgctcggccaatacttccaggtccaggatgactacctcgatgcgtacggcgaccccgaggtcattggcaagatcggaacagatatccaggacaacaagtgctcttggttagtgaaccaggctctgcagcgctgcagtgccgagcagcgcaaggtgctcgacgctgcctatggtcgtaaggacgctgagcaagaggccaaggtcaaggctattttccgggaattggacctcgaatccgtctacaaggagtacgaggagaagatcgtgggtgagctgaagacgaagatcgcggctgtcaacgagtcggaggggttgaagaaggaggtttttgaggcattcctcgggaagatctacaagcgcagtaaataagcgataggcagcatagtatgccattttgagatacctcgcaatagactaaagacattaattcggattccaaaaaaaaaaaaaaaaaaaaaaaaaaaagcggccgctcgagcatgca

SEQ ID NO: 91 - DNA, 1289 bp, Oryza sativa
ccctcgcatcgcacgtgaggcagtcgagggatagcggcgcaatggcggcggcggtggtggcgaacggcgcgagcggcgactcctccaaggccgcgttcgcggagatatacagcaggctcaaggaggagatgctcgaggacccggccttcgagttcaccgacgagtcgctccagtggatcgaccgcatgctggattacaatgtgctcggaggaaagtgcaaccgcgggatctctgtcattgatagtttcaagatgttgaagggcactgatgttctgaataaggaggagacatttcttgcctgcacccttggttggtgcattgaatggcttcaagcttattttcttgtgcttgatgatattatggacaactctcaaacacgacgtggccagccttgctggtttagggtgcctcaggttgggctcattgctgtaaatgatggtattatccttcgcaaccatatttcacgaattcttcaacgccattttaaaggaaagctgtattatgttgatctcattgatttgttcaatgaggttgagtttaagactgcttcaggtcaattgttggatcttattactactcatgagggagaaaaggatctcacaaagtacaacttgacagttcaccgccgcattgttcagtacaagacagcttactactcattctatcttccggttgcatgtgctttgctgctatctggtgagaatttggataacttcggtgatgttaagaacattcttgtggaaatggggacatacttccaagttcaggatgattatctagattgttatggtgatcctgagtttattggcaagattggaacggacattgaagactacaagtgctcatggttagttgtgcaagctctcgagcgtgctgacgagaaccaaaagcacattctatttgaaaattatgggaagccagatcctgaatgtgttgcaaaagtgaaggatctgtataaagaacttaatctggaggccgtatttcatgaatacgagagggagagttacaataagctgattgccgacatcgaagcacatccgaacaaagcagttcagaatgtattgaaatccttcctgcacaagatctacaagaggcagaagtagagctaagctcatggagaagctgtttcatgtttgcttggtaactagagtcgtggggacaaataactggtaactagaatcatggggactgttccctgatgttgtgtgtattatggttatgttcgtaccgtgtagtacagcgtgctactccgtaaaataatgaagcatggtgctatttatgcgtgcgtg

SEQ ID NO: 92 - DNA, 1569 bp, Zea mays
attcggctcgagctagagttaaaaaaacacttacagcacgcagttgtcgtcgtcattgtcttcgactcttcgtggcacctcccgtccataaaaataaacgtgtgcccacaaatctgttcgctcgcattggcaactgaaccgcaccaggcaccacagtcccgtgcggcagtggcagacgcacagcagatcagcagcgcctccctctgcggctctgcctcttgccaaagccccccacagaattcttctccctccccgtctcctctcgcgctcgcgcgtggtgaggtgaggtggagttccgaccccgaggccgcaatggcgacagcggaggtggtggtggccaacggctcgggcggcgccgacaccaagaccgcgtttaaggagatatacagcaagctcaagcaggagatgctcgaggaccccgccttcgaattcactgacgagtcgctccagtggatcgaccgcatgttggattacaatgtgcttggaggaaagtgcaatcgtgggctatctgttgtcgatagctacaagattttgaagggtgttgacgttctgagcaaggaggagacatttctggcctgcacccttggctggtgtattgaatggcttcaagcttattttcttgtgcttgatgatattatggacaactcccagacacggcgtggccagccttgctggtttagagtgccacaggttggtctcattgcagtaaatgatgggattatccttcgcaatcatatctcacgaatccttcaacgccacttcaaaggaaagccatattatgttgatatcattgacttgttcaacgaggttgagttcaagacagcttcagggcaaatgttggatcttatcactacccacgagggtgaaaaggatctaactaaatataacttgacagttcaccgccgcatcgttcagtacaagacagcttattattcattctaccttcctgttgcatgtgcattgctgctggctggtgagaacttggaaaactttgttgatgtaaagaacattctcgttgaaatgggaacatactttcaagttcaggatgactatctagattgttttggtgatcctgaattcattggcaagatcggaactgacattgaagactacaaatgttcctggctagttgtgcaagctcttgagcgtgctgctgagaaccaaaagagcattctgtttgaaaattacggaaagtctgatccagcgtgtgttgcaaaggtgaaggacttgtacaaagagcttaaactggaggaggttttccatgagtacgagagggagagttacaacaagctgattgccgacatcgaggcccagccgagcaaggcagtccaaactgttttgaagtccttccttcacaagatctacaagagggacaagtagacccagatcgtcgacaagctgctccatcgacgcttgcatcaatcgaattactatacttgattgatgcggacgagtaatttgtactatgttgttttgtgttttcattctcctgttgtacggtacaccttaatataataaagcacagtggtactagggatgcaaaaaaaaaaaaaaaaaaaaaaaaaaagg

SEQ ID NO: 93 - DNA, 1647 bp, Zea mays
gaattcccgggtcgacccacgcgtccgaatagaggtgtgatcggctcaagcaccagctagccacctcgctgcctcgctggtgctcttccacctcctgcaccacagcgccattgcgcttccacggccagctaccgctgccggaatatacactggtggatctttaacaggttcctccggtccgatccaccgccagcttccgacgtcgtactcgggcggatcggttccacaatgggggaacggggagcagaggaggacggctcgggcggctcctccctctccctcatgtgcctggaggacggcgccgacctcgacgccggtggctccgcggagagcgccgacgacggcgagccggccgtcgttgctcacagcgacgccggtgaggaccaggaggaggagtacatggactacctcgtgtccaaggagagcagcttctgctgctccccttcctcctcgcccgtctcctccgacgccggcgccgagacgcgcccttcgtccacggcgtcgtcatccgacgagtggttccgctgcgcgcgccacgccaccgtcgcgtgggtccttgagacgcgggcttacttcggcttctcccaccgcgcggcgtacctggccgtctcctacatggaccgcttctgcctccgccggtgcatggacgtgtcagtgatgccctgggcggcgcggctgctggcggtggcgtgcctgtccctggcggcgaagatggaggagtaccgcgcgccggcgctgtccgagttccgcgcccacgacgactacgacttcagcagcgtctgcatccggcgcgtggagctgctggtgctgtcaacgctggggtggcgcatgggcggtgtcacgccgctggattacctcccctgcctctccttcaggctacgccgaggcggtggcggcgggctcatcgccgccaaggccgccgcacttatcttctccgccgcggaagctgccagcgtgctcgactacaggccgtccaccgtggccgtcgccgccgtcctggcggcggcccacggcgccatgacaaaggaagcgctggagtgcaatatgagcagcctcactccgtcctgcctgctcgacaaggacgacgtgcacgcctgctacagcacgatgctgagcgagagctcctcgcctacgccgagcaagctggcggacaagagaccgccgccatccagctccggctcgacgatgtacgagtcggtcgacgcggcctcctcgttcgcggccacggcgggccggagcaagagggcgcggctggagatgccggccattggcccatgagaagcaccgccgggacacgatcgtttatttttttgccacttgtcctgtgctgtgcggctgtggcggcctgccggggctaatcttcttcgccaactgtagttttttttttcttcttccagctttgacttttcagttgtttgattgatcacgcggcgcgcgcgcgcagcacgctctgctggagaaacggtgacgcgcacgggcagtgccccggttgtggagatggagggtttggttgcctgtgctttgtttgcatactatagtttgatcctaatgatctaatccacgtacgatgaggtgaatgagaatgtaagttacacctcaatccacctaaaaaaaaaaaaaaaaaaaaaaaaaaaaaagggcggccgc

SEQ ID NO: 94 - DNA, 1920 bp, Zea mays
gaattcccgggtcgacccacgcgtccgacgtcggcctcttccacggccgccgccgtcgtcgccgccgccgccacctcgccgccgaccaccataccatcagatatttcagagctcgcgcccctcacgcatggttcttggcttcttgcttcttgctcgacgtgcgccgtaactaatcgactataagcgtggtgacacgtctgacgagatgatgccggtggcggcggtggatgactggtcggagcgcggtttctcgctgacctgcgaggaagactgcgccgacctcggcaacggcgtcgtagacgacgacgagttcctcccgctctacaatgccggcgaagaggaggaagaggagtatttggagcagctggtgtttaaggagaccagcctctgctcctcctccgactcagccgcggactgcgacggcgacggcgaaggagacgaagaatacccctcgctcgcctctgaggagtggtttcggcaagctcgcctcgccgccgtcaagtggattcttgaaacccgcgggtgcttcggcttcggccaccggacggcgtacctcgccatcgcctacttcgatagcttcctcctccggcgacgcgtcgatagggaggcgatgccgtgggcggcgcagctgctgtccgtggcgtgcgtgtccgtggccgccaagatggaggagtgccaggtgccggcgctgtcggagttccacgccggcggctacgatttcgactcggcgtccatccggcggatggagctgctggtgctgtccacgctcggatggcgcatgggcgccgtcacgcccttggacttcctcccctgcttctcctcccgggtccacccgcacggcggcgccggcgccggcggccacgtcgcccacaaggccatcggtttcatctttgccacggctgaagctggtagcgtgcttgatcacaggccgtccactgtggctgcagctgcaatcttggctgcaacctatggacctctactgaccaaagaagcactcgattccaagatgagctacctttctccatcttgtcttattgagaaggaacatgtacatgcctgctacagtatgatggttggggacaataacaggagaggtagcaagagatcattgccatgttcagtctccaacgagattgccactagtacatatcattctgttcttgttgatgatgttacggacaccgccgccgcctttgccacggcggtatcggccaggaataagcggatcaggctggagctgacgggcatcagttgagaaagctagcaccaccggggacacagtttttagccagatgtctaggggggcttggtttgatcttccctttcattttcttcccttctttttgaacttatatgtttgcgaaaaagaagatatttttttaggttctttgagccattgccatgggttggcattggctgttgtcagatttgattggtttggtttgtgagaggtggaagagatgaacaaagcagagggctgagctttcctatggagaggagagcttaggttaataagcccaatgccagcgcccaaacagggcacacttcacattcagtgaactttacttcaaaggttgatgcaatgttgcattgcatgtggtgagagatgctgctgcagagaagatgcaaaacaagtggtaacaacactgagaggttgagggttttgccattgtttatagaacgagtgagcgagagagggagatgtttccctttttcacctgtgcaagtggatgtgagagtggtgtttcactctgcacttgcgagggttacatcgatttgtaacaaaccctgtgtacttgtgtaaccccctcttgttcctgaggaatggaatcagattgcgttttgcgtcaaaaaaaaaaaaaaaaaaaaaaaaaaaaaaaaaaaaaaaaaaaaaaaaaaaaaaaaaaaaagggcggccgc

SEQ ID NO: 95 - DNA, 974 bp, Arabidopsis thaliana
ctctctcagcttacgaacaagaaaaaaagaagaatctttagccacctttgagatcaaaagatgaacatcgctcacactatcttcggcgttttcggaaatgcaactgctctgtttcttttcttggctccttcgataacattcaagagaatcatcaagaacaaatccactgaacaattctctggtatcccttatccaatgactctcctcaactgtctcctctctgcttggtatggacttccctttgtgtcaaaagacaacacacttgtgagcacaatcaatggcacaggagcagtgatcgaaacagtctacgtgttaatctttcttttctacgcaccaaagaaggagaaaattaagatctttggtatcttctcttgcgttttggctgtattcgcaacagtagctctcgtctctctctttgctcttcaaggaaacggtagaaaactcttttgtggtctcgcagctactgttttctccatcatcatgtacgcttctccactctccatcatgagattggtggtaaagacgaagagtgtagagtttatgccattctttttgtcactctttgtcttcctctgtggtacttcgtggttcgtctatggtctaatcggtcgtgacccttttgttgcaatcccaaatgggtttggatgtgcattagggacactgcaattgatactatacttcatctactgtggaaacaaaggagagaaatctgcagatgctcagaaagatgagaagtcagtggagatgaaagatgatgagaagaagcagaatgtggttaatggaaagcaagaccttcaagtttaaaagagcttttgaggatgatttggttatgtgatttcgtattaactctgcttaactagagttttccttttcgtttcgttggaatgtaaaaaaaatgatgctgaaaaatgtaacgtttcctagtttcgtactgatacactagtgattgatgaagaatgacgatgccttttgtg

SEQ ID NO: 96 - DNA, 1163 bp, Oryza sativa
ccgtgttgtagtgttgtgtagcagtagtccaccgctgagaagctagcaaagccagccatccattcagcgcagtactctcgggagagctagaagcgatctattctagccacaaggaggagagataaacgtatcgaaatggagcacatcgcgaggttcttctttggagtttccggcaatgtcatcgctctcttcctgttcctttcgccagttgtcaccttctggaggatcatcaagaagagatcaacggaggacttctccggcgtgccttacaacatgacacttctcaactgcctgctatctgcttggtacgggctgccgttcgtgtcaccgaacaacatcctggtgacgacgatcaacgggacggggtcggtgatcgaggccatctacgtggtgatcttcctcatcttcgcggagaggaaggccaggctgaagatgatgggtctcctgggcctcgtcacctccatcttcaccatggtggtgctcgtctccctcctggccctgcacggccagggccgcaagctcttctgcggcctcgccgccaccatcttctccatctgcatgtacgcctcgcctctctccatcatgaggctggtgatcaagacgaagagcgtggagttcatgccgttcctgctctccctgtccgtgttcctgtgcggcacctcctggttcatctacggcctgctcggccgcgaccctttcatcgcgatccccaatggatgcgggagctttctgggcttgatgcagctgatcctctacgcgatctaccggaaccacaagggggccacgccggcggcggcggccgggaagggggacgccgccgacgacgtggagatggccgaggggaggaacaacaaggtcgccgacggcggcgccgccgacgacgactcgtacggccggcggcaaggcgggcaccgaagtgtagctctggcgtgcgtctcgaatcggctaagatttcccgcgtgtgttctacttctacaagtagtaatattagctagacccttgctgctttgatctttactagaaaggagagcgcggcgccacgccgcgcgcgatggcaaatagttctacataaaatggttagatagtagatacatattttgataaatatagtctacatttgtttaataaacagagtacaatgaagtataaaaaaaaaaaaaaaa

SEQ ID NO: 97 - DNA, 2501 bp, Oryza sativa
ttcagaaaaaaacttttagtcttgccctagtatttgtttcatgagttgtgtcttaatcaacaaacggttgggctcatgaaatgacactattggtggttgtgatattctttgctaaattttagagtttagttcccacaatctttacttgttctgattaatgtttcaataaaaaaagaagcgaatgtatgcttttgaaagcaaccggatgccaaacggagcataatctgtttgtgccatcctactgaatttcatggagcatatgcatagcttttggccttctgtgcttcatccacccattctgcatttcagacttttaagtatgctttaggcattataaatagacagacccacacttggagcaaagaagtaactattttgtcaaatactagtccattcgagttgaaacgttcagtgaacagctagaatggtttccaacacaatccgtgtagcagtaggaattctaggtacttctcttctgaatgttcttggaataaattcagattttcattattttcagagcataatttagtgtctcccactttcaggaaatgctgcttccatgctcctgtatgcagcacctatgtatgtacatcacatccacagataccatacatgatcagaatttatttcatttgctatctttgcttatcaatgtgctctgaaaatcacagattaacatttaggagggtgatcaagaagggcagtgtagaagaattctcttgtgttccatacatcttagctctgttcaactgcctcctgtacacatggtatgggcttcctgtagtaagctcaggatgggagaattctacagtgtcttccatcaatgggcttggcatactgcttgagatcgcattcatcagcatatacacatggtttgcacccagagaaagaaaggcaagttctttgcagaggaattcttcagatattcatgatacatgaactcttgaaacaatgttttgacaggcttatctaatgatcttatttcagaagtttgtgttgcgaatggtgctacccgttcttgcattctttgcgctgacagcaattttttcaagctttctgtttcatacgcacggtttacgcaaagtttttgtgggtagtattggcctggtggcttccatatcgatgtacagctctccaatggtagctgcagtgagtatctttcacatatactgccctacttcagagtcataatctgcacagacaaaattaagttccaaatagcattaacttcaagaaaaaaacttgtattgacaaggaataagtacagatcatatccataggagtgatgaaacaattcggcatctcaaaaaaagatatcataaacatggctaaacttgaaagaacataattaatcaacaccagtctaccactaacagataaatgcttgccttttcaactactaagccttttctcaattctctcttcaataagtttccaatctttattagaaagcttcctaaatcaaattcggaagttggaactgtgtacaagaagaattgttttcatttttcttacgcggtaatcttaaattttctaatggagctaacatttgcagaaacaagtcataacaacaaaaagtgtggagttcatgcccttctacctgtcattgttttccttcctctccagtgctctatggatgatatatgggcttctagggaaggatctcttcatcgcggttagtacataccgggtacatatgtttttattcagagatggatcgatcgagctgtaaaatcactctgttttcatttctttcttctgcttgtttcgtgcagtcaccaaacttcattggctgtccaatgggtatccttcagttggtcctgtactgcatttacaggaaaagccacaaggaagctgaaaagcttcatgacatcgaccaggaaaatggtctgaaagtggtaaccacgcatgagaagataactggaagggagccagaggctcagagagattgatgtgttttatgtactcacttggggactttgtttcatttctgttgtcttaagagtaggtacgatagcagactacaaacatattttaaggagataaagaaaagagagaaaagcaacgggctataaatttgtagctagccgcaacacactccaagatgcaatgtatgtataacaggtgggatcaagtattaatagtgtagtaactattgtatgaattagctattaaattaattataaatgattaggagctagtagttgactatactattaaacttgctcttagggcactcgcaatggttatctataggctctctacaagagatccatgtcagcatattttttctcttggaagagattaaatgaagagagagagcaaagctatctattaacctgaagatagtctatagagaaaaacgaggcaatggattagagagctatagatacccatgtagatatactattgaggtggtttaccattaatctagtgtattgctgagatgtacatattttatagagagtacattactttaccattaccattgcgggtgatct

SEQ ID NO: 98 - DNA, 2959 bp, Zea mays
ggtgagcgagacagattccacagcaatttgctcctcttccacgcacaggcaagactgctccccagaaaagattgtagttttcatcgatttagccggtttctgcccggggggatcgctgctggagatctcagagaaccgggaggctccgagcttttgctccgtttgcgtcgaatctgcctcgggagcggagaaaggagcggccttccgagctcgtaggggccgtccctgagaaggcgagaggggacgcggcggcggcggagtcagctctagggcgctcgtggaagtcggtgatgccggtggtttgaggacgaggcggcctcggtggttttgaggaagccagcctctgccgcggcaaggatggactccagcggggaggaactcctgaagaagatccgggaactggaggttgggcaggcgcagctcaagcaggagatgtctaagctaatacccggcgctggggagcgtcggcgctcgcaatccgtctcgccgcggcgcggcgtgccggtgccgccgccaccgccggccaaggcgaaggcgggggcgccaggtaggcggctgtccggggggtttgagggcgggcagcgcgcgtgggcccgtgggtcggcgtctttcccgcactcatcaccgctgcagcgggagggccgcgcaggcgctggagacgctagcaccagcgctaggctgccggagaggcagtactccagggtgcttcagtcaatggggcagtccgtccacattcttgacctcgacgggaggatcatatactggaatcagtctgcggagaatctgtttggctatcctgcatcagaagcccttggtcaggatgccctcatgcttctggttgattcccatgaccacaatgcggtaaataacatcttccaacgtatttctatgggtgaaagttggactgggaagtttccagttaagaacaagcaaggacatagattttcagctgttgccaccaatacacctttctatgatgaagatggcagtttgatgggtttcatttgtgtttcaagtgattcccgccaattggagcagatattttgtaagcctccgacctctgcaaggtcccagtcagaatcatctatgacatcttgtgatgggagttgcagcaacactagtcacagaatcaattcgttgaatagaagttcttttgattctaatctacccctgcaaagcactttagcatccaagataacgaatttggctaccaaggtcacaaataaagttcgttctcgggtcaggacagacgagaatgacgatggtggcagtggtgagagccattgcttggatcgtggtgcaaaggaagagccaacatctagcggaacaagcacaccaagaggggatgcaccacatggtccctttgctacagaagagaactcacctgggaaatcaacgaacccaaacagcgacgaatcagaaggaaaagtaggtctgcacaagattttgggttctaaggcagaggcactattgaacaagaaagggatatcatggccttggaaagggcgcgagaatgagggacctgatgaaagaaaccatgtgatattgccgtggttgcatggtggccaagagaatggtgtgaatcatcagaaggtttctgattctagtatatctccagacgcccaaggcgctgaacacaaccaacctagcaaaaatgaggcatcaggttcctggtcctctttcaacaataacagcacaggcagtgcaagcagcacgggaagcactaatagcagtgctctctacaaagtagatcatgaagcagattgtctggattatgagatcctgtgggaagaccttgtcattggagaacaaataggtcaaggctcttgtgggacagtatatcatgctttgtggtatggttcggatgtggctgttaaagttttctccaagcaagaatattcagaagaagtgatactgacctttcgacaagaggtatcccttatgaagaaattgcgccatcctaacatactgctcttcatgggtgcggttatgtctccacaacgcctttgtattgtatcagagtttctcccccgtggaagcttgtttcgcttacttcaaaggagcgctaccaagttggatgtgagacggcgtgtccacatggctttagatattgtaaggggcatgaattatcttcaccattccagcccgcctatcattcatcgagatttaaaatcatctaaccttttggtcgacaagaactggattgtgaaggtggcagactttggtctttcacgtctcaagcgtgaaactttcttgacaacaaaaacaggaaaaggaacaccccaatggatggcgcccgaggtgttgcgcaatgaaccttccgatgagaagtctgatgtgtacagttacggggttatcctgtgggaacttgttactcagaagataccctgggaaaatctgaactcaatgcaggtcattggtgcagtgggttttatgaaccaaaggttggatatcccaagtgaagtagatcctcagtggaaatcaattatcctgagctgctgggaaagcgacccgcagcaacggccgtcgttccaggagcttcttgagaggctccgggagctgcagaggcactacgccatccagcaccggaacacaaagaacagcatcgaggagtaaagaacacaatgcgacctctcagagcggcttgcttcgaagcattttgcgagcgaacgaacgaagaaccccaggtctctagaagggcctggaccctcctgtactgtatggttttgcttctgcggaacagccaaggctggaagaagtttgttgtacagacgggggtacgttcttctttgtttgacagggcaattgtgactgtaatctctgggtcctgacacccaagggtagggtagagactatagagtgagtagtgactgagctccggattgctggcgcatttgggttcttctgattcgtggcaatgcaaatgcgtggttaacaataacaaaaaaaaaaaaaaaaa

SEQ ID NO: 99 - DNA, 1383 bp, Zea mays
gcctgaagaacttttgccacatggcagttctttgccttgggaaggatttcactatatcacaaaccgtgtgatggattcatctcttattgattcagagaactctatgcctgggtgtgcatgttctcatcctgaatgttctcctgagaactgtggtcacgtgagtctctttgatggtgtctacaatagcctggtggatatcaatggaacaccaatgcatggcagatttgcatatgatgaagatagtaaaattattttacaggaagggtatccaatatatgagtgcaattcatcatgtatttgtgactcgtcctgccagaataaagtattgcagaaagggctgcttgttaggttggaactctttagaagtgagaataagggttgggctattagggctgctgaacctattctacagggtacctttgtctgcgagtatattggtgaagttgtgaaggctgacaaggctatgaaaaatgcagaaagtgtgtcatcaaagggtgggtgcagttacttgtttagcattgcttcccagattgatagggaaagagttcggactgtaggggctattgaatactttattgatgccacaaggtctggaaatgtttcccgttatattagtcacagttgttccccgaatctcagtacccggttggttttggtagagagcaaagattgccagcttgctcacattggattgtttgctaatcaagatattgccgtaggagaagaactcgcctatgattaccgacaaaagcttgtagcaggcgatggctgcccatgccattgtggaactaccaattgccgaggccgtgtctattgattttgcaggaatacactaactgttcaatgctcggttgcagaactccagagatttcaacagttgtgtaggcttgctgagcgatttagcattgcaattttcctacagcttgagtgcagggctaggatctcattgttaatgctacaaatagtgattgtgatataggactcaggcaagcattaggcaataacatagtgtcgattttagtcatggtaccatcatgtttaactgattatttgttagaagcagcctgaaatgaaactgattcaggctgctctgttcgtaggcgagaattctctctgtaaaattccttcatattttatggttcatgagcaccatcattgacgtgaagtaataaactagttatcccagtggcctattgtgcggataatactccctctgttttttttagggagcgacaaataaaaaaaaaaaaaaaaaaaaaaaaaaaaaaaaaaaaaaaaaaaaaaaaaaaaaaaaaaaaaaaaaaaaaaaaaaaaaaaaaaaaaaaaaaaaaaaaaaaaaaaaaaaaaaaaaaaaaaaaaaaaaaaaaaaaaaaaaaaaaaaaa

SEQ ID NO: 100 - DNA, 1164 bp, Zea mays
ctctctgctccgggttcagagcagagctcagcgccctgtctccctccctccctccattcctcctcctccgctctctctctgcaggcctgcactgtgaggagactgtgacccggggacggagagctcctttcttctctctcatcgctccaccccttatttaccggtcggttgttcctgggccgtcccgtcccgtcccgtcgtctcgcctgggttctcgcttgcttctcaccatcactaccaccgtccacaccatcgcgagggcctggagggaagaggatgggacagggaggagaagtgaaggcggcgccggccgtgagggtgctggtggtggacgactcccccgtcgaccgcaaggtcgtggagctgctgctccggaaccacaaccaccagggcggcgccgcgccattccacgttaccgccgtcgacagcggcaagaaggcaatggagcatctccggctgatggagcaaggcggccagctggattcatgtgccgctgatgctaatcggataaccattgacatcgtgctcacggactactgcatgccggagatgactggctacgacctgctcaaggccatcaaggcgctgagctcccctaacccgatcccggtggtggtgatgtcgtcggagaacgagccccagaggatcagcagatgcctaaccgccggtgccgaggatttcatcctcaagccactcaagaccaaggacgtgcagcgcctgcgcaactgctccagcgccgctagacccagggacgacgcggcccaccagtgcgagagcttgaggaggagcagcagaaagctgcggtcggatcaggtcgccgcgcctggccacagatcgcaaccgacgacgggattaaccatggtgctgcatgcctccagcattgagctctcgcactacttccagttcctcctcaagttcgtgctgctcgcgtacgcggtgctgtgcctgaccgagctcctccacagatggtccaatggctccgtcctctccctgtggtctgcatgaggtcgactggaaccgcgatgcggtattattagtgtaaccactaaggctccaggctttcagttcaattcccccctgtaatccagtcctggcatgaggagccaccagttcttgctcgccgctccctatatttccatttcacttaaaaaaaaaaaaaaaaaa

SEQ ID NO: 101 - DNA, 2594 bp, Zea mays
cccacgcgtccgccctgcttcgctgttccctttccccgcccctacctggggcatctgcctctgaatcgcggcggctcccgaggcgccgcctggcgagcgtctaggcgccggtctacggcgacgatggaggtgtgatttggacgggagagagcgtggtggtgaggtctcggttttctcgatataggagatggcggcggcagaggcgcggggaggggagttccccgtgggcatgaaggtgctggttgtggacgacgacccgacgtgcctcgttgtgctcaagaggatgctccttgagtgccgatatgacgtgacaacatgtcctcaggctacaagagcactaactatgttgcgagagaataggcgtggttttgatgttataataagtgatgtccacatgccggatatggacggattcaggctacttgaacttgtaggccttgagatggaccttccagttatcatgatgtctgctgattcaagaacggatattgtaatgaacggaattaagcatggagcatgtgactatttaataaaacctgtcagaatggaggagctgaaaaacatctggcaacatgttattaggaaaaaatttaatgaaaacaaggaccatgagcattctggtagcctagatgacaccgatcgtaacagaccaaccaataatgataatgaatacgcttcctccgcgaatgatggaggtgatggcagctggaaatctcagagaaagaaaagagagaaagaagatgatgaaactgacctcgaaaatggtgatccttcttctacatcaaagaaaccaagagttgtttggtcagttgagcttcatcaacaatttgtgaatgcagtcaatcacctcgggatagacaaagctgtcccaaagaaaattttggaattgatgaatgtcccaggcttaaccagggaaaatgttgccagccatttgcagaaattcagactctacctgaagagaattgctcagcatcatgcaggaatacctcatccatttgttgcgcctgtatctagtgctaacgttgctccgttaggaggactggaattccaagctttggctgcttctggtcagatccctcctcaagctctggctgctttgcaggatgaactccttggtcgacctacaagcagtttggcgttgcctggaagggaccagtcatctttgcgagtggctgcaatcaaaggaaacaagcaccatgaagaaagagaaatagcatttggtcaacccatatacaagtgtcagaataatgcatatggtgcattccctcaaaacagcccagcagttggaggattgcaaccttttgcagcttggcccaataacaaagttggtatgactgattcaacaagcacattgggaaatgtgggcaattctcaaaatagcaatatgctattgcatgaattgcagcaacagccagacaccttgctgttaggaacccttcacaatattgatgccaaaccttctggtgtagttatgccatctcagtcgttaaatacattcccggctagtgagggtatctcacctaatcaaaatcccttgattataccatctcaacccccaagttttgtgtcatcaattcctccatccatgaaacatgaatctcttcttggattaccttcaacgtcaaccagtctgttgggcgggcttgatatggttaatcaagcttcaacaagtcaggctttgattagtagccatggaacaaatcttcctggtctcatgaaccgtagctcaaatgcaatcccttcaccaggaattagtaattttcaaagtggaaatattcattatgttgttaatcagaacgctatgggagttagctctaagccaccaggtgttctaaagaccgagagcactgactcactgagttgtagttatggctatattggtggtagcaccagtgtggactctggcttgttctcttctcagtccaaaaatccacagtatggtctactgcagaatcaaaatgatgttaacggcagctggtcgccttcacaagattttgatagttttggaaattctcttgggcaaggccaccctggtaccacttcatctaacttccagagttccgcccttgggaagttgcctgaccaaggacgagggagaaatcatgggtttgtcgggaaaggcacttgcattccaagccgctttgcagtggatgaggttgaatctccaactaacaacttgagccacagcattggaaacagtggagacatagtgaaccacgacatatttggatttagtggacatatgtgaaactttcttgaatttcgttgatcagtgagcactggaaacaaatctagtggtttgatgaatggttgctagtaatttcgtttcttttttttttcttctgtaattggtttataaagggaataatctatgtggcagcatgtggaatcttactttatagaagtttgttcagttcaaaggacttaaaattggtcagtcccttgtcatatagcttcttttctttgttctctttttctgtaattaccaattgtagcattatttttatgaccgtcgtaattcagcctagtcgatttattcccggccaaaaaaaaaaaaaaaaaaaaaaaaaaaaaaaaaaaaaaaaaaaaaaaaa

SEQ ID NO: 102 - DNA, 2542 bp, Zea mays
gggaatgccgccttagagaatggccaccatcaggctgaagctgacgcagatgaatggagggaaaaggaagaggacttggccaacaacgggcacagtgcgccaccgccaggcatgcagcaggtggatgagcataaggaggaacaaagacaaagcattcactgggagaggttcctacctgtgaagacactgagagtcttgctggtggagaatgatgactctactcgtcaggtggtcagtgccctgctccgtaagtgctgctatgaagttattcctgctgaaaatggtttgcatgcatggcgatatcttgaagatctgcagaacaacatcgaccttgtattgactgaggttttcatgccttgtctatctggtatcggtctgcttagcaaaatcacaagtcacaaaatttgcaaagacattcctgtgattatgatgtctacgaatgattctatgagtatggtgtttaagtgtttgtcgaagggagcagttgatttcttggtaaaaccactacgtaagaatgagcttaagaacctttggcagcatgtttggaggcgatgccacagttccagtggaagtgaaagtggcatccagacacagaagtgtgccaaactaaatactggcgacgagtatgagaacggcagtgacagcaatcatgatgatgaagaaaatgatgacggcgacgatgacgacttcagtgttggactcaatgctagggatggaagtgacaatggcagtggtactcaaagctcatggacaaagcgtgctgtggagattgacagcccacaacctatatctcccgatcaactagttgatccacctgatagtacatgtgcacaagtaattcaccctagatcagagatatgcagtaacaagtggttaccgacagcaaacaaaaggaatgtcaagaaacagaaggagaataaagatgaatctatgggaagatacttaggaataggtgctcctaggaactcaagtgcagaatatcaatcatctctcaatgatgtatctgttaatccaatagaaaaaggacatgagaatcacatgtccaaatgcaaatctaaaaaggaaacaatggcagaagatgattgtacaaacatgcctagtgcaacaaatgctgaaactgctgatttgattagctcaatagccagaaacacagaaggccaacaagcagtacaagccgttgacgcaccagatggcccttccaaaatggctaatggaaatgataagaatcatgattctcatatcgaagtgacaccccatgagttgggtttgaagagatcgagaacaaatggagctacagcggaaatccatgatgagcgaaatattctgaaaagatcagatcagtcagccttcaccaggtaccatacatctgtggcttccaatcaaggtggagcaagatatggggaaagctcttcaccacaagataacagttctgaggccatgaaaacggactctacatgcaagatgaagtcaaattcagatgctgctccaataaagcagggctccaatggcagtagcaataacgatgtgggatccagtacaaagaatgttgctgcaaggccttcgggtgacagggagagagtagcgtcaccattagccatcaaatctacccagcatgcctcagcatttcatactatacagaatcaaacgtcaccagctaatctgattggggaagacaaagctgatgaaggaatttccaatacagtgaaaatgagccacccaacagaggttccacaaggctgcgtccagcatcatcatcatgtgcattattacctccatgttatgacacagaaacagccatcaacagaccgtggatcatcagatgttcactgtggttcgtcaaatgtgtttgatcctcctgttgaaggacatgctgcaaactacagtgtgaatgggggtgtctcagttggtcataatgggtgcaatgggcagaatggaagtagcgctgtccccaatattgcaagaccaaacatagagagtattaatggtaccatgagccaaaatattgccggaggtggcattgtaagtgggagtgggagtggcaatgacatgtatcagaatcggttcctgcaacgagaagctgcattgaacaaattcagactgaagcggaaagatcggaactttggtaaaaaggttcgctaccaaagcaggaagaggcttgctgagcagcggccacgggtccgaggacagtttgtgcgacaatctgagcaagaagatcaaacagcgcaaggttcagaaagatgacacgtaatttctaatacaacgtatcatcttcttcggcagatctgagaattaggcggttcttcctattgcgcatcttcgtcgacagatctgagaattaagtggtccttcccattgctgatagtagcccactgattcccaacgttagagtacacaataaataagactctagttgtcaatttctgtggttgactgcagatgatcaccctagcgctatggagtcaacaatgtaatatttatatactatgttcgtgccttggcgccttggcggtttgcaatcttcagtttcctttctgagaaaaaa

SEQ ID NO: 103 - DNA, 2382 bp, Zea mays
cccacgcgtccggcgagaatagggagagatcagacaagctgttgtcggaatccactccggcgaggaggagtgctgaggtcgaaatggggggaggagcggatgaggtggtgaaggtcgtggattcggaggacggcgagggggaggaggaagaggcagaggccgcggcggcggaggggtcgagcaaggagacgccgatgctgccaaggatgccggtgcgcgtgctgctcgccgagggcgacgactccacgcgccacgtcatctccgcgctgctccgcaagtgcggctaccgagttgctgcagcctctgatggtgtgaaggcgtgggacatattaaaggaaaaatctttcaacatagaccttgttttaactgaagttgaactgcctttgatgtctgggttcctcttgttatccacgatcatggagcatgatgcatccaagaacatccctgttataatgatgtcttcacacgactctgtaagcatggttttcaaatgcatgctaaagggtgcagcagatttccttgttaagccgctaagaaagaacgaattaaggaacttgtggcagcacgtttggagaaaacaactggcaaacggcgggcccgatgtgcagcacatacaagaagagaatctcgcagaaagaatggaacagaagactggcgtgacaaaagctgataatttgaacagtgatggtccccataaaaatagagaatgcagtgaacaagaaagtgatgctcaaagttcttgcacaaggtcagagttggaggctgaaagtaagcaaactaacaacattttggagtatatgcaatcaactgaaaggcatttgtttattcgtagccacaaggatttagagctaaatggagagaccaaaacacgaactaagggtaataacttgattccaacaagagaagacgatttattgccaaagaaaagaacatgtttgaatgacaatgattctgagagaacttccagagatatggagctagtccacattatggacaatcagcagaagcatgacacacagagggatgtggatactatgagaacaacatccaggggaaatgatgagaagaactccatcccagcacaccagttggaactttctcttagaagaactgactatggaaaattagagaaccacgagaaaaatgatagaagaacactgaaccattcaacttcatctgcattttacttgtataattgcaggactgcgtccagcttaggaaatgctggtgatggtcaattatgcagcacctcagaaacactagtggatgttgaaaatagaaatggagatttggcagctctgtctgaagacacgactgaaacaaatcgtcctcctatcagagttgtaccatttcctgtccctgttcaatgcttcacatttgatgggcagccgttctggaatggtacaccggtggcatctccattctacccacagtcagctccccccatttggaatagcaaaacaccaacgtggcaagaatcaaccccacaggcaacttcactgccgcaaaaatcgcaacagaatgaaccagttgaaatggatgctaaaccagttgaaaatgcagaggaacaatttgtcgtaggtcctcccagtgccagtgggaagcagctgcatgttgaaattcctaaagatggtctacggcacatttctcctgtgaccggtgaaagtggaatcagtacggtgctagacagcaccagaaatactctgagcagcagtggctgtgatagcacttccaaccggatcaccgcctctactgaaccatcatccaatgtatacaggggcgttcctgaaaccgcaagagccgaaggtttacgacacctgagccagcgtgaggctgcactgaacaagttccggctaaagaggaaggacaggtgctttgagaagaaggttcggtaccagagccggaaattactcgcagagcagcgtccacgggtcaagggccagtttgtccgtcaagatcatagcatccaaggaagctagggtccagttactgagctggaactcttccccattatctaaaaaaaagtcactgtaagtgactccactgcggggtatcctgatgtcaggttttttcgaagagttggaagcaatcacaccgagttacggtttgctgtgtatgtttgctaaagcttgtaatataagtatgtataggctgactcttctttccttaggttaggcacaggacctggcacgttctagacggtttgtcgttagacgttagaaaatacaggcatacttgtgtcctccagtagcacgtcctccagtagcacgtgtgctttaagccttgtattatgtaattagccaaggtgctgtttggttcacgaaatgtaacgtaaagggtaatggtaatggtttacactaaaaaaaaaaaaaaaaaaaaaaa

SEQ ID NO: 104 - DNA, 2232 bp, Zea mays
ccgctgctgttggattcgccgagccggagccgccggagatgaccgtcgacgagctgaagctgcaggcgagggccagcggcggccacggcgccaaggaccagttccccgtcggcatgcgcgtgctcgccgtcgacgacgacccgacctgcctcaagatcctcgagaacctcttgctccgctgccagtaccatgtgacaacaacgggacaggcagccacggccttgaagctgctgagggagaagaaggaccagtttgaccttgtgatcagcgacgtccacatgccggacatggacggcttcaagctcctcgagcttgtgggcctcgagatggacctcccggtcattatgctgtctgcaaatggggagacacagacagtcatgaaggggattacccatggagcatgtgactacctgctgaagccagtgcgtattgagcagctgaggactatatggcagcatgtggttaggcggaggagttgtgacgccaagaacagtggcaatgacaacgatgattcgggtaaaaagttgcaggtggtgagcgctgaaggtgacaatggcggtgttaatcgcaacaagagaatttcacgcaagggtagggatgataatggtgatgacggtgatgattctgatgacaacagtaatgagaatggagactcgtcgagccagaagaagccaagggttgtgtggtctgttgaattgcaccgaaagtttgtggctgctgtcaaccagcttggcattgacaaggctgttccaaagaaaatattggatcttatgaatgttgagaacatcacaagggagaacgttgcaagtcatctgcagaagtatcggctgtatctgaaaagactcagcgcagatgcaagcaggcaggctaacctaactgctgcatttggaggaagaaaccctgcttatgtgaacatgggactagacgccttcaggcagtacaatgcatatgggagataccggccagttccaaccactaaccattcacagccaaacaacctccttgcaaggatgaactctcctgcatttggtatgcatggtctgctgccttcgcagccacttcagattggacacaaccagaacaatctgagcacttccctagggaatgtcggggggatgaacaacggcaacctgatcaggggtgcgcatatgccactgcaggatactagcaaatgctttcctactggcccttctggtaattcgttcgcgaacatatcaaacagcacacaactggttacgacaaacaacttgccattacagtctcttgagccaagcaaccaacaacaccttggtcggctgcattcctctgcagaccctttcaactcatttgttggtgagcccccccagtttgcagatcttggaaggtgcaacaccacctggccaaccgcggtctcatcatccaatgttcaggagattggccagaaggacaggatcgtgaataggcccaagcttgagcctctctcaagctttacagaagcatccagtcagatccctttgctgggaagtgaaatgcagagccaccaagtagcatcactagccagcaacggtcttccgatgccgttcactcaggaagcggtgcccttcgcttatggaagcagcacgaactcgagagagatgctgaataacaaccttgcgcttagtaattcaggcgtcaactctacattgccgaaccttcgcatagacggttctgttgttccagggcagacactgggtggtagcaattcaggtggttgtgttgtcccccctctgcaagatggcaggattgatcaccaagctgtcagcagtcatctaaactacaacaacgaactcatggggacaggtaggctgcaaaggggacttagtggtggtctggatgacattgtcgtggacatgtttaggccggaccgcgcagacgatggcgtctccttcattgatggggactgggaactggtctagcaagtttcagttctctacatcaagtctgccttcgtgtgagattttccgcatttgtggttgtggaggggttcggcgcttgattggtccaaagttgtttatagtagcaagattgcatcacaaatgccctttgcatttggtttttcagtttagcgaccaggttccagtgtcacgtccgaatatcaactatgtggtatttgctaccttaactcgtatggctatgttttcaagtcaggtgttaactgtggctatcgtgatatatacagcatggttatgagccaaaaaaaaaaaaaaaaaaaaa

SEQ ID NO: 105 - DNA, 2079 bp, Zea mays
ccttcgccctcccccgcctgcgagcgcgaggcgcggaggggctagcgcgctagcggcgccatggccctgaccgacgccaccgcgttcccctacggcctgcgggtcctcgtcgtcgacgacgaccccacctggctcaagatcctcgagaagatgctccgcaagtgttcatacgaagtcaccacatgcggtttagccagtgttgctatccaaattctccgggagaggagaaacaagtttgacattgtaatcagtgatgtcaacatgcctgacatggatggtttcaagcttctcgaactcattgggcttgagatggatctacctgttataatgatgtccatagacggagagacaagtagggtgatgaaaggtgtccagcatggtgcatgtgactacctcctcaagcctgttcggatgaaggaactccgaaacatttggcaacatgtgtataggaaaaaaatgcatgaggtgaaagagattgaaggtaatgacagctatgatgatctccaaatgtttagaaatggtgtagagggattcgacgagagggacctatttatgagagctgactctgatactatgaggaagagaaaagacgtgaataaggaccatgcagatcaggactcaagtgatggagctactgttaagaaggctagagttgtctggtctgttgaccttcaccagaaatttgtaaatgctgtcaaccaaattggatttgacaaagtcgggccgaagaaaatactggatcttatgaatgttcctggcctgacaagagagaatgtggccagtcatcttcagaaataccgcctctacttgagtaggttgcaaaagcagaacgaggaaaggataatgggtgctgctaggcaagatttcaatcaaaagggaccatcggatcatcttaacctccgaagttccttccaagagcaaccaggcaacctttccaatggatgtcagcatagttctcagaaggtcgaagctcagaccaacattctcgatcctcatctggacgacacgaagacttcaatgcccttgaaggtgccagataaaaatggaatttcagcaagtgatgctgttgaccctcacaatatcaccactgcttcacctttaagtggggtgttctcttttgaaagaatgccagtgaatcaggacaggaagctatcagaaaccatgatcttggaatgtgagtcctggagtggaagtgtgccaccaaagcagttcatgcagtatccaaagcataaccatgagcgctgcgaccttctaggagactattcttgcttgcctaaaccggacttggagcacccaattgcccctggtcatctgtatgccccaccgccagtaatttcgatgagttacaatgtggagaaagatgtcagagacttctcagatgtaaaaccagatcttcttggctgtatgaagtccttatcaccagcactgacatgtacagttgagtcggtttctgctcaacttagtgacagtgttgtgacctcaactaacagtgaccggaagttttccagcgtggaggggttgtccagcattaaagattgtgactttgatcaggaaaggaacggagctattttgtttacttcagaagaggcaagtatattatgcggcactgattttacttgtctacctgaagacctgtccggctatcaacttcaaggtgtctccttcgggaataaaggattgaacagcatcgatttatatcagtgcaatgatacaatgttaatacctggactgcagaataattggtatgatgatgatgtagagtttagcagtgaaaccgtggagttcccattgctagacggaggcctgtttgcataaatgcctcatctggccctatctttcaaccatgcccttatgtcagcagggatgatgttcattggtatgttcccctatagcgcctcctgtagggctatatttaacctaacttgatcctgtggtggaaggatttaatttgtagtctcgccacttttgataattgtctgtattatagactgtgccatggcacaatgactgcaatatatactcttcacggtgatcaaaattacatatgaagactgtcaaaaaaaaaaaaaaaaaaaaaaa

SEQ ID NO: 106 - DNA, 1708 bp, Zea mays
caactcatcgggcgcggagaccaccgcggggggaaaagcgagggaggggggagaggactgaagagaaatcatggagccgatttgctgtggagattcgggcgcgtgatccggtcggatcttgctttcccggggggcgatcgaggccacgccgctgctgccgcggtgccctccctctgcctctgggctctgcgtgtgacgtgccgtgccatggcgctcgccctcgcctatatccccagcctccctcgccccgccgctggccgccgcattcagtaaaaagccacctaccctaccctcctgcgctggtactacttactacctagccaggccaaggagcccaacgagggggaacgctgcggtaggcgcgcgctgctcgtcccaccccacgccgccatgacggtgccagatgccgagtcgcgcttccatgtcctcgcggtggacgacagcctcgtcgacaggaaactcatcgagatgctgctcaagacctcgtcctaccaagtgaccacggtggattccgggagcaaggcgctggagctgctggggctgagggacgcgtcgtcgccgtctccgtcctcgcctgaccaccaggagatcgacgtgaatctcatcatcactgactactgcatgccaggcatgacaggatacgatctgctcaagagagtgaaggggtcctcctcgctcaaggacattcctgtggtgatcatgtcgtctgagaatgtgcctgcccggatcagcaggtgcttgcaagacggcgcggaggagttcttcctgaagcccgtgaagctggccgacatgaagaagctcaagtcgcacctgctgaaacggaagcagcccaaggaggcgcaggcgcaggcgcaggcgcaggcgcagcagggacaggcggtggagctggagcctgagcagcagctggacccgcgcacgcagccggcgcacgacgcggaggaaaccgcggcagagccgccgccggccgcatccaacggaaccaccgatggcggcaacaagaggaaggcggcagccatggaggaggaggggatgctggccgtgatgacggtggcggcgccggagagcagcaccaagccgaggctgtccaccaccaccagcagcctggcggtggaaacctgagctgagaatcggacggcgaccggatcacatactactacctacgtacattaatccaccattgcgggcagtcgagaggcaaccaaccaaccaagaaccaaccgaccaaacccaggccaccgccgagaaagagctcgtcctccttttctttcgctggttcttttggttctcggagctaattaatggaatgaaggtgtgagctcctggggatggaggggcggttacgggctctaagtgaagaacaattacgacgtaccttacctagcggctgctgcttcggccggcaaattttgttgtgctcgtggtcatggacacccttgtgttcgttaggagggggtcggggtggaacggtgaaaaggaagctgtagatagaaaaggcaggcgtctcatgctcttgttgtctagtctaatttttaattttactcggcttattaatcacggtactgactagctgccaaaaaaaaaaaaaaaaaaaaaaaaaaaaaaaaaaaaaaaaaaaaaaaaaaaaaaaaaaaaaaaaaaaaaaaaaaaaaaaaaaaaaaaaaaaaaaaaaaaaaaaaaaaaaaaaaaaaaaaaaaaaaaaaaaaaaaaa

SEQ ID NO: 107 - DNA, 1395 bp, Zea mays
cctgacaccatactatacctccccctccccggccctgtcctactagccgtcagaggtttgccgcctcctcgctcctcgtcttcatcactctctctctctctctctctctcttccttcgtcctcgacctgtggccacctgtggcgtcacgctttataagagcacgcggccggcaaccatctcccttgccacccacaagtagagaagaatcttttgttgctgacgcctgagacgctggcactgccgccgcgccgtctggagagaaagagcagagggacactgaagcagaggagccgaggggtagcgacgagagacgagcgagagcggacgacggagatggaagcaggaggagcaggagcggagggggtgatgagggtgctgctggtggacgactcccccgtcgaccgccgcgtggcgcagctgctcctcagcagcaactcctgcgccggctcattccacgtcatcgccgtggacagcgccaagaaggcgatggagttcctcggcctcaaggacggcggcaaggagcaggccatcgacatggtgctcacggactactgcatgccagagatgaccggatacgacctgctcaaggccatcaaggcactgaacccgctgaagccgatccctgtcatcgtcatgtcgtcagaagacgagccccagaggatcagccgatgcctgaacgccggcgccgaggacttcatcgtgaagcccctgcagagcaaggacgtgcagcgcctccggaactgctccacggtcgggaggcccagcaacaagggcggcgccacgttgccgtgcgaggagaacgccgtggccaagtggagtaacaacaagctgccgccctccgccggcgccggcgccggcgccagcgccacgtcgccgtcgggacggcgggcgaacctcgccggagtcgccatgcgccaggtgctgcactcgtcgagcgtggagatctcgcagtacctgccgctcctgctcaagctcgtcgtgctggcgtacgccgcgctgtgcctgggcgagctcctgcacagatggtcgtcgggcggcagctgctcgctctccccgtggtgcgcctgatcaggaaggagcaagcagcgcaaaaagccagcaacggtgcaagagccccccctgggcaccgacgacaggagactgctgctgcaccaagcattatttcaggctccaatagccctagtcttttaatttaggtagagattgtctctgctctgagatcctaaccggggtttcgaccgatgatgagtccccccgtggcttttgttcgttgatttgaggggccgtagacgtaggaaggaggaggaactgaacgaaccccttgtatcctctgctctgtatagaatgaatgaatgaatgaatgaatcagaatgcaacgcgtcaaaaaaaaaaaa

SEQ ID NO: 108 - DNA, 1214 bp, Zea mays
cggacgcgtgggtcctccaccaccattcatcagaaagcgaagcacaagcctctgatgccaagccaaagcacacacacctcctccagcctttcttcctctacagccccaattcttccctgcagctctgctgctgccttgtttcgatcggtcatggcggcggtggccacagagactccgttccatgtcctggcggtggacgacagcctcccggacaggaagctcatcgagaggctcctcaagacctcttccttccaagtgaccactgtcgactccgggagcaaggcgctgcagttcctgggcctccatgaccaggatagcacggttcctcctgtccacacgcaccagctggatgtggctgccaatcaggatgtggctgtgaacctgatcatcacagactactgcatgcctggcatgacaggatatgacctgctcaagaagatcaaggagtcgtcgtctctcagagatatcccggtggtgatcatgtcctctgagaacattccttcaaggatcaataggtgcctggaggaaggagctgacgagttcttcctaaaacctgtgcggctatcagacatgaacaagctcaagccccacatactgaaaagcagatgcaaccaggaacagcaccagcaaagtgacagtcacagtggcgaacgcaggaaccccacaatcagcagcagcgatagcataaacaaccgcaagagaaagggtgcaggcaccgaagaaatcttgccccagctggcaaacagatcaaggcacagttaactgagaactgactagtacagctaaaaccttttctttttcactttactttggcctactgatttgtaacgtagatgttagccctggatttgcaaaacggaacggaatctgtaaactgatactgcttgagtcgaatcgatcgaagtgattctgcaccagatctccctatttcatttatcagaatcgaaagccagctgacagagtcacagtaacagcccgttggacatagcagcaggtgccgaagccaagaacatctgaaactgaccgtcggataacctacgatgggagtagccttttactgcttctaagctttagcctggatacaagttgtcactacagtagtcagtagggcagtaacttggtgcatctccaagagttttcaaaacacactgtcaatctagaaatttttggtgaaaaaaaaaaaaaaaaaaaaaaaaaaaaaaaaaaaaaaaaaa

SEQ ID NO: 109 - DNA, 975 bp, Zea mays
gactagttctagatcgccgcaactgcccgtctgctcctgcttttcatccagtcgcaaaacaaagagaagagatctccgcgtccgcaaccgcatcgcttccctcccggcagaagaagaagattcggttgggttgtttgtctcttgcaaaccgcaatggctgctgctgccactgctactccggccgtggcgccggaggccggcgaccggaaggcggtggcaccgccggtcgacgcggtggatctggagctggagctggaggagaagcacgtgctggcggtggacgacagctccgtggaccgcgcggtgatcgccaagatcctacgcagctccaaatacagagtgacgaccgtggactcggcgacgcgcgcgctggagctgctggcgctggggctggtccccgacgtgaacatgatcatcacggactactggatgcccgggatgaccgggtacgagctgctgaagcacgtgaaggagtcgtcggcgctgcgggccatcccggtggtgatcatgtcgtcggagaacgtgcccacccgcatcagccggtgcctggaggagggcgccgaggacttcctcctcaagcccgtccgccccgccgacgtctcccgcctctgcagccggatccggtgaccgcccgcgcaaggatggaggatctggttgcgcgctctgacttaattagaggagttgttaggatccaattttttgtgtgttcgttcgttcgttcgttcttttctttctttcttcttggacatagatctgctgccgccgctgctgccgtcgactgaaacaagaagctaacttagttttagggtccaggttgttgttgttgttgttaggaaggcgagtcgttgggggcattcacggatgttcttcctcgtttcccctccctccgtgcctgaggctgcaaaaatatgccccccagacatgaaaaaaaaacaagacctgttaacagttccaaaaaaaaaaaaaaaaaaaaaa

SEQ ID NO: 110 - DNA, 2229 bp, Zea mays
caacagagaagagcggacgccaccggacgccaccgccgccaatcaatagattaggcgcggataatggtgctggccggaccgcgacgggcggaggagggcgccgcggcccccgcccgccgccgctgacagagtatacctgcttaaccagccgtctgcaggcacggcgcacgcgcggtggtacctcgcgaggggctcgggttgactgggcgctactcgtggccgcggggatggaggaggaggcgtctgcagatccaccgaccgcttcgtcctgcaccggcgtctctggttccggccgctgctgaatccgacgcttcggttcgcgtccccagtccccttggcggaggcgtggatcgtgtgtttggggggtttgggtatggtgggcggcggtgagggggatcgcgtgggcggcggcgtaggggttgggggaggccagcagttcgtggaccgcagcaaggtgaggattcttctctgcgacggcgacgccagcagctcccgggaggtgctgcggctcctctgcaactgctcgtaccatgtaacttgcgccaagtctccgcggcaggtgatcaatattctcaactacgagggcggcgagatcgacatcatcctggctgaggttgatctgccggtctccaagtgcttcaagatgctcaagtacattgccaggaacaaggacctgcgccacatccccatcatcagtaggcagccttcctattctgagccttgtgcggttgtgcctattactgtgatgtgctttctgtgaccgtcctccctgtcttatggaactgtgcagtgatgtccaacagagacgaggtgtctgttgttgtcaagtgcttgaggcttggtgcggccgagtacctggtgaagccgctgcgcacgaatgagctgctgaacctttggacccatgtgtggcggcggagacggatgcttggtttgcccgagaaaaacttcttcaatgacaacttcgagttggtgctctcagaacctagtgatgcaaataccaatagcgccaccctcctctcagatgagacagacgacaggcctaaagaaaacacaaatcaagaaacgggcacctcaaatcagcttgaatacgagtctaatccttccgttgctgagcgcgaccagagagacaagatcggtgctccaggctctgccctagatgccagtcaatcatcgactccgggaagaatgttttcacgtcctataaaaactaacctgaaggttgctgagtcgtctgcatttctagcatatgttaagtcaagcaccccagccaccagttcatttgatagcggactacaaagaggtgacagccggttagattctttggataaccatggtaattgctctagtgcaacagatagaagtgacaccggtactgatgtaaatattcggaataaagaagcttttgagatgcctgtgcagtatcctatggtatgcttttcttcctctagcatgcatatggagcgaagcaatgaaggccataatgacacttcaggaactccacctgcataccatttcccattttattatccagggatggtagaacacaacatggcactttcatcagtgcaaaattttcaagcaaacataaacagtgctcaagcacatacaccaccagcgatgcttcatcagtacaatgttttctcccaatgccatagtttacccatgatatcaccatttcagtttaatacttctggcatgagtatgcactcaagtcatttaccgacgcaaaatgtgtggtcatcggcatcgagcacaccaacgcctgacgaaacatgcaatcgctccgagagaagggctgcagcacttgctaaattcaggcagaaaaggaaagagcgctgttttgacaagaaggtgaggtatgtgaacaggaagaaacttgctgagacgaggctaagggtgcgaggtcaatttgttaggcatgcaagcaatatggatatcataagcactggagatgacatatctgaagacgaagatgacgatccaacctccagggaggtagatatgatttcttctccagagtagtggagaggtcctcttgtgtgaaaaattagagtgcagatggttactgctcactttgttacaactcagtaggactagacaatacattcttctactggcaacaaggcaatacaccctttttgctcacacacagtataaacttttgtccccaaatatctggctgttactccggttgctttaatcgagaaatcatctttttgataaaaaaaa

SEQ ID NO: 111 - DNA, 1645 bp, Zea mays
cccacgcgtccgcccacgcgtccggccccgcatggcaccccaggggcggagagcgacgaggagatacggcggggtgccagagatgggcggcgcgtcggcgtcggcctcgtcgggcgccggcgcggacgagcgtcccaagggggaggacggcaagcaggggcaggtggcggcgggggcgcagcctccagcgggcgggaagaagcgcgggcgcacggcgggggacaaggagcagaaccggctgaagcggctgctgcggaaccacgtgtccgcgcagcaagcgcgagagcggaagaaggcgtacctgacggagctggaggcgaaggccaagggtctggagctccgcaatgcggagctggagcagcgggtgtccacgctccaaaacgagaacaacacgctccgccaggttatagatgttagtggaaaagaattcaaattcacctgggcatctggacgtggcgaattgtgtgatatttatgaagaacgtcagagtggagaggatggaaatgggttgcttctggagtgtggctctacttggcgcaagtgaaccctatagcctgggcagttcctacaaaacatgagggtgatgccagtgaagaagcttctctcgccgatgagacacttgcatcagaagtagtgctaacccggaagaggaaaataggaagctctttgtcagtagagccaaaccatctctctgatgaacttgaaccaaagttggaggatgcttagaacggggagacgtctaactgaaaagtaaaagtgggcagcatcgtgatgccaacttacccccctgccatggttttattggtcctctgcttgtttctcgttttccttgggagtcagcttctctgttttatgtggtcgcacacggccttatttgtagtattacaccacagaagctggctgacccccactgagggagaggtgattgatgcaagcattgtgtatgatccttggacaagggaatcgcgggggtttggttttgtcaccatggctgctactaaggaggcagatcactgcatcaaatatctggattgttctgtgttgcaagtactctacacagaacattttattgttttgtcttcaccaccgagaatccgagatcgcctcccatagcctccacatccataaggtcctgcttgactgcgacgacgtccaggctgatgccctcatcgtggatcgactcgcctcgctctagaaggagtggcccctctggagttgaatatgcagttataaccaatttttaccccttttatcctagaagagttgccaagacacggtataagaccatgataatagactaagagaggatttggctctaattactatatgttttatttatgcagtcccatgagaactttgagtatttgcagattgctttattaatttattaaagttaaagattgtatgtgttgagtatgtatccactcttgttggaagtgtcttgcaattccaatccaaggatgtataaaatactgcatgggctaagtatgtgttttttcatgtatttggagtatatatactttttgttgcttgagaacatgtatgtacactagaagcttgtcaattgtgtgaacttgagttgatccctgtctaacctgagtatatatatatatatatatatattttgttgcttgagaaaaaaaaa

SEQ ID NO: 112 - DNA, 2358 bp, Zea mays
cagtgaggcacccctctcctggcctcttctcgccttctccgtttccgcgaacccagctgcctcgtagccccaccacaccgccgagcacgcggtctcccgcgccgccttccacccaagcgaagctacccctactcgacccagaattatcttctaccagcgctagtccgctccgcctctctactggctgccgtggagtggggatccgtccggacttccttctttcgctgttgatgtcatcatgctgagcattttgtggtagagacgatcatctctttgggttccagcatataactcatgcccataaaatttgcactagaaaatatgtcgacacaagcctctaaccggtcatacagatatccagacagaacccaactgccgtaccacaatggcaatccaatgcatgttgggggcaatggtaattactgtgtgcaacaaaatcacgatgatgttaactacatttcctctgatgatggatcacagagcagtagttctagagttcaagattttcaagcacagttttgcaccctagattcgtcttcggccaattgtgtttatcctgcacatagttctacctcttctcagagcataagtggaagccctctgtctcagcaggagagccactctgatcatgcatatggttcctctccaagtgcatcgtgcatcactcaggttcccacctggacacttaaggatctagaaaatgtgatgcttggacccgattctgacataggtagccctgacagttcctttctgcttgacactgccttgcatggaaataactggagagaacttttgggaattcaaactggggatttgaggcaggtaattgtagcatgtggtaaggctgttgacgagaatgctgtctatatggatgcattgatgtctgagttaagggagatggtttctgtctctggtgaaccgatgcaacgtctgggagcttacatgttggaaggcctcattgcgaggctttctttcactggacatgccttgtataaatctctgaagtgcaaagagcctgtggctacgagttctgagctcttgtcctatatgcatcttctttatgagatctgtccattcttcaagttcggttacatgtctgccaatggtgccatagctgaagcggttaagggggaagacattattcacatcatcgattttcaaatcgctcagggtagtcagtggatgactatgatacaggcccttgcttcaaggcctgggaggcgaccatacctaaggatcactggcatagatgactcgaattctgctcatgcccgaggtggtggactggatatggttggacagaggttgcacagaatggcccagtcatgtggtctgcccttcgagttcaatgctgtgccagcagctagtcatgaggttgtgtttgaagatctttgtctaagatctggggaggccatcgttgtcaattttgcttatcagctgcatcatactcctgatgagagcgtgggcatagaaaaccatcgtgatagaatactgagaatggtcaagagcctctctcctaaggtggtaactcttgtagagcaggaggcaaacacaaacacagcacctttctttcttagatacatggagactcttgattattacacagcgatgtttgaggcaatagatgttgcttgccccagggatgataagaagcgcattagcacagagcaacactgtgttgcaagggatattgtcaatttaattgcttgtgaaggtgcggaaaggatagagagacatgagccttttggaaagtggagggcaagacttgtaatggctggttttagaccatacccgttaagtccagtggtgaacagaaccatcaaaacactgcttgacagttaccacagccattacaggcttgaggagagagatggcatcctttatcttggctggaagaacagaaagctggtcgtatcttctgcctggtgctgatatttccaacttcttctaagaagcattgttaagattctttcgtggcttggggttcaggcgttcagcacatgaatccaaggtggaacctaaacttcagtatgaagactgcacaatcaaaaaaacaagctggttgcttccttactatttgttgcccagccttgaaactctcccacgctcactatcatcgctgatgtacttaccatgactcagttccatccttatatataggtgcaaacaatggtcttaatattgtatattggtagaatctggtggtattagcttccaaatctggattgctgaatcgtttgtgttactacatttagccaggatttgacagtagacacaaggagtgctgtaagatcctgtatgtacaacgtgcttcagttggtgtattgtacgtacttgggtgctaaaaaaaaaaaaaaa

SEQ ID NO: 113 - DNA, 2470 bp, Zea mays
cgtagctatagctggctagcttcctcctcctggctagctgctacccttcccggttctcaccgcgctgccattaaaacccccttccttgttaccacttcgaccttgagcaagcgcactcttcatgttgccgcctcgccgcagtagcagcttacatggatacgctgtttaggttggttagccttcaagcctccgaacagcagcagcagcagcaatcggcgtcctacaactcgaggagcaccacgtcgagcggctccaggtcgtcgtcgcaccagaccaacgcatcctacaactactactaccacagcaacagcagcggcggcggcggcggcgggcagtactactacggtcagcagcacccacagcagcaccagcaccagcagtactacctggagccgtaccagcaagaagaatgcggcaacacccaccacctttacatggatgaagacttctcctcctcgtcctcgtcgaggcagcatttccactcgcacggcgcggtggtgcagccgccgacgtcgtccacggccacgcccacggcgccgacgccctcgctgtccacgtcgtccacggccgctggggcggcgcacgcgctgttcgaggcggccgacctgtcgttcccgcctgacctcaacctcgacttctcatccccggcctcgtcgtccggcgggggcgcggcctcgtcggcggcggtcgggggaggtggcgggggaaggtgggcgagccagctgctgctggagtgcgcgcgcgcggtggcgggccgcgacagccagcgcgtgcagcagctgatgtggatgctcaacgagctggcctcgccgtacggggacgtcgagcagaagctggcgtcctacttcctccaggggctcttcgcgcgcctcacggcgtccggaccgcggacgctgcgcacgctcgcggcggcgtccgaccggaacacgtccttcgactccacgcggcgcacggcgctgcggttccaggagctcagcccgtggtcgtcgtttgggcacgtggccgccaacggcgccatcctggagtcgttcctggaggccgccgcggcgtcgccggagccccagaggctccacatcctcgacctcagcaacacgttctgcacgcagtggcccacgctgctggaggcgctcgccacgcggtccgccgacgacacgccgcacctgtcgatcaccacggtggtctcctccgcgccgtccgcgccgacggccgccgtgcagcgcgtgatgcgggagatcgggcagcggatggaaaagttcgcgcggctgatgggcgtgcccttcagcttccgcgcagtgcaccacgccggggaccttgcggggctcgacctcgacgcgctcgacctgcgcgacggcggcgccaccaccgcgctcgccatcaactgcgtcaactcgctgcgcggcgtggtgccgggcggtgcgcggagacgggacgcgttcgccgcgtccctccggcgtctcgatccgcgggttgttactgtcgtcgaggaggaggccgatctcgtggcttttgaccccggcgcgcccgaggaaagcggcgacacggaggcagcgttcctgaaggtgttcggcgagggcttgcggttcttctcggcttacatggactcgctggaagagagcttccccaagactagcaacgagaggctggcgctggagaggggagccggacgtgccattgtagacttggtctcgtgcccggcgtcggagtccatggagcggcgggagacggcggcttcatgggcgcgccgcatgcggtcttccggcttctctccggtggcgttcagcgaggacgtcgccgacgacgtgcggtcgttgctccgtcggtatcgggaaggctggtcgatgcgggacgccggtttagacgactcggcagccggagcaggcgtcttcctggcgtggaaggaacagcctctcgtgtgggcgagcgcgtggaggccatgatagagatccccgtcgacgcaagatgcaagctcggtggagtacgcgcgtacgtggaacatcatgaaccacaggagaagcaagggcgccatccgccatacctagccggcgcgtggatgcaatgatccatgcagtggatcgggcgcacgtgcatgtgtatggcgagctgaatggcgcaacgcatctagggttttggagcagtagtagggattgctagttcacgcacacatggttgtatgcagcaaggtgatccaggaggaggtatggtcgatggttttaggttttagacttgcatctatttcaaatttggatcatcgatcgccacaagctcttggcgtgatgattccgattttcttgcttctttgtttttttttttttgtcacatttctctgtgtttcttcatgtaattcaaggttaacgactttcttccctctggagggatttacgtgcatggttttgtcatactttctctcattcctctgtttgcatttgcattgcatggttgttgagatgtcgcttcctaaaaaaaaaaaaaa

SEQ ID NO: 114 - DNA, 1480 bp, Zea mays
gcttcatgcgtggatcctcgtagaccccgacccgcgtgcactcaatccctaggcggcggcctccggcgcgaggctagcgggcggcacccatggcgtccgtggcggagctcaaggagaagcacgccgcagctacggcgtcggtgaactccctgcgcgagcgcctccgccagcgccgggagacgctcctcgacaccgacgtggcgaggtactccaagtcgcaggggagggtgccggtgagcttcaaccctacggatctggtctgctgccgcacgctgcagggccatagcggaaaggtatattctctggattggacccctgaaaagaattggatagtcagtgcctctcaagatggaaggttaattgtgtggaatgcattgacaagccagaaaacacatgccataaagctgcattgcccatgggttatggcgtgtgcttttgcacccaatggccaatctgtcgcctgtggtggtcttgatagtgcgtgctctattttcaatctcaattctcaagcagacagagatgggaacatgccagtatcaagaattcttactggacacaagggctatgtctcatcatgtcaatatgtcccagatcaggaaacacgtcttattactagttcaggtgatcaaacatgtgttctttgggatgttactactggacagaggatatcaatatttggtggtgaattcccatcagggcatacagctgatgttcaaagtgtgtccatcaactcatcaaatacaaatatgtttgtctctggctcatgtgatacaactgtgaggctgtgggatatcagaattgcaagtcgagctgttcgaacctaccatggacatgaggatgatgttaacagtgtgaagtttttccctgatggccataggtttggtactggctcagatgatggcacatgtagattatttgatatgagaacagggcatcaacttcaggtgtacagtagggagcctgatagaaatagtaatgaactacctactgttacatctattgcattttcaatatcaggaaggctactttttgctggttactccaatggtgactgttatgtgtgggacacacttctcgccgaggtggtacttaatttgggaaacctgcaaaactcccatgatggccgtataagttgcctcgggatgtcatctgatgggagtgcattgtgtacaggaagctgggacaaaaatttgaagatttgggccttcagtggacaccggaagatagtttgaaggccaacttttctcccccatgttgtatgttccttgttgccccttaacaacggacagtggtgattggtgaccaactcgacttgttcctgggaatccctttgttgttttgtaagctctgttcgcgctatgtttaatggaaaaatgtgcaatttgtcagtgtcacggcgctacatcttgttgagttggtaactgtttatactgttattacgagaatatcagtaacgtgtgatctgcccttttctttgtac

SEQ ID NO: 115 - DNA, 1123 bp, Glycine max
attcggctcgagttttttctttctccgccccttttttgttgttccttcttctcgttcgtcgctttgtgatctctctctgcaaccatgtccgtcgagaaagagagagagacccaggtttacttggccaagcttgccgagcaggccgagagatacgaagaaatggttgagtgtatgaagaaagtagcaaaacttgatcttgatctgactgtggaagaaaggaaccttctctcagtgggatacaaaaatgtgattggtgcacgaagggcctcttggcgcataatgtcctcaattgagcagaaggaagagtctaagggaaatgagcacaatgttaaactgatcaagagttactgccaaaaagttgaggaggaactctccaaaatctgtggtgacattctgactattatagaccagcatttgattccttcttccggatcagcagaagctagcgttttctactacaagatgaaaggtgattattttcggtatcttgctgagttcaagactgaccaagaaaggaaagaggcagctgagcagtcactaaaaggatacgaggctgcttctgccactgcaaacacagatcttccatcaacacatccaatccgtcttggacttgcactcaatttctctgtcttttattatgagataatgaactctcctgaaagggcctgccatttggccaagcaagcttttgatgaggcaattgcggagttggacaccctgagtgaagagtcatacaaggacagcactttgatcatgcagctgttgagagacaaccttactctctggacttccgatttaccagaggatggaggtgaggacaacataaaagctgaagaagccaaaccttctgagcctgagcattgatgtgattcagtagtcagaaatctaaggtactccccaagagggcatttttcagcttttcttgcaatggatttggaccggacaatagggactgtggtggccatttcataattcttgttctctcttaatatctttaccaaagccagaagatctgcacccttttttttcccttaaaactttttatttttattgccttctctgttttaagtggtcagttaagcaatgaacaatttacatttacccttaaaaaaaaaaaaaaagg

SEQ ID NO: 116 - DNA, 1179 bp, Glycine max
attcggctcgagcgtaaaccctaatttcggaaagatcggcgatgactgcctccaaggatcgcgagaacttcgtctacatcgccaaactcgccgagcaggccgagcgttacgaagagatggtggaatcaatgaagaacgttgcgaatctcgacgttgaactgacggtggaggagcggaatttgctttctgttgggtacaagaatgtgattggtgctcgcagagcgtcctggaggatcctgtcttccattgagcagaaggaagaaacaaaagggaacgagttgaatgcgaagcggattaaggagtacagacagaaggttgaattggagctatcgaacatctgtaatgatgttatgagagtgattgatgagcaccttatcccttcggctgcagctggtgaatccactgtgttttactataagatgaaaggagattattatcgttatcttgctgaatttaagtcaggcaatgagaagaaggaagctgctgatcagtctatgaaagcatatgagtctgctaccgctgcagcagaggctgatttacctcccacacatcccatccgattgggtctagctttaaatttctctgttttctattatgagatcttgaactcccctgaaagagcctgtcatcttgcgaagcaagcttttgatgaagctatttctgagcttgacaccttgaatgaggagtcatacaaagatagcaccttaatcatgcaacttctcagggacaacctaactttgtggacttctgacatcccagaagatggagaagatgcccagaaagtgaatggcactgccaagcttggtggaggtgaggatgcagagtgagtccgatggatgatggaatcttccataggattcgatgcatgcgtttgggaatgaaacatgagggccgattacttatctgtgtattagctagagatagggattctattgtttcctctttgtttcctgttggattgcccaatacttcccgataggggaaagagatactccatttgtgctatatttatggtatgtttttatttgtgtggtgtctggaaatggcctatttcattcccaatccgtttcctccagtctctgggggatttgattgatgagaattgcttatggtgggtgtatttccttttccaatgaaatgctacaacatttactgcaaaaaaaaaaaaaaaaaaaaagg

SEQ ID NO: 117 - DNA, 1092 bp, Glycine max
attcggctcgagctctcatccagatcttgcaaaaaaaaaaaaaacacaatggcagcgagcgctcccactccacgcgaagagttcgtgtacatggcgaagctggcggagcaggccgagcgctacgaggagatggtggagttcatggagaaggtctccgcctccgccgagagcgaggagctgaccgtggaggagcgcaacctcctctccgtcgcctacaagaacgtaatcggcgctcgccgcgcctcctggcgcatcatctcctccattgagcagaaggaggagagccgcggcaacgaggaccacgtcgccgtcatccgtgactaccgctccaagatcgaggccgagctctccaacatctgcgacggaatcctcaagctcctcgacacgcgcctcgtcccctccgccgcctccggcgactccaaggtcttctacctcaagatgaagggagactaccacaggtacctcgctgagttcaagaccggcgccgaccgcaaggaagccgccgagagcacgctctccgcctacaaagccgctcaggacattgctaacaccgagctgcctccaactcaccctatcaggctgggtcttgctctgaatttctctgtgttttactatgagattcttaactctcctgatcgtgcatgcagccttgcaaaacaggcttttgatgaggctattgctgaattggatacgttgggagaggaatcatacaaggatagcactttgatcatgcaacttcttcgtgataaccttaccctctggacctctgacatgcaggatgatggtgcagatgaaattaaagaagccgcacccaaaggtgacggggaacaaaattaaacataccatacttctaattagtgattgaacttcccttgtgtaatgttttcaaagggagaaggtgttgaatgctaatctcggtgttactgagattttgggcattcatgttcttcgttatgaattgtggatgtactgggctattttagtttgtccttccattagtacgcgtttctgaactgcctattttcataatgacactgaaatttccattataatgctgtttagaatattaagatataaaaaaaaaaaaaaagg

SEQ ID NO: 118 - DNA, 6501 bp, Oryza sativa
agctaacctgcgtgatatttctaatcaattcgggaagggaaggataaaattgttttttgttgctatgtgttcgaatcttaatgttaatcacaccgcttaaccaaatgtcttctacagagttgtccctccgtcccgaaaattttcttcttcactgagaataccaagtttatttctcacctgcattttagattctcatcgacttgcacttagccaagaatctgttacacgaagaagggcaaatttacatgtattttcttcacagggagatttgcaataatgacattgtaaacattaacttttactataatgatataggatccatatttcatagacatagatgggtccatgtttgcagttctaatattataattttaaggataagggaattaatatatacaacgtgtcgaaattttgagtcaatttgccaactatggataaaaaattacaaattcaaaaagaaacttgttgcccgacagatcagcccacacaaagtttgaaggctaaaagcccaatctggggggcgcaagaattccagcccaagttataaaaatcacgaaatatcttggatctgacagtctgacagcaaaaggccacactcctcacaaatctcgtgcgcgccaccgtcatctccggcgaccacctcaccgccggccatgccattctcctacgccgccgcggcctctggctccgcgtcctcttctcgcaagccggttcccgtcgccgcggccgccgcccgccgacccgcgccctcgccggcagcggcggcggcacccgcgccctcgccgtcaaaccctagcgcggtctccgattccgacccctcctcgtactcctcctccggggaggagaccgacctcaccgcctccgatccggcggccgcctccgtcatctcctcctacctctccgttgcgggggatggcgccgacctctccaaggtcgggatcttcctcagctccgcggcgcgccgccgatcgccgccgtgcctgatatgcttcgatcccatccgcccctccgaccccgtctggtcctgctccgcctcctgcttcgccctcctccacctccactgcatccagtcatgggcacatcagtcatcctctgccgcgccttctcccacctggggttgccccaaatgccgcttcccctatcccaaatcccagactcccacctcctacctctgcttctgctccaagacggtagacccagctccggacccctggatcctcccccactcctgcggcgacgtctgtggccgacgtctcaatgcagaccgtgactctggctgtgagcacaactgcctcctgctttgccaccctgggccatgtccaccgtgcccggcaattgttccaaatgctatgtgcttttgcggctcacatcgtgagacgcgtcgatgctcacatcagcgttattcttgctcggggaaatgcaataaacgcctcggctgtggaatccaccggtgtcctgtggattgccatgatgggccttgcccgccttgtgcggtgcgaggaaagcacaaatgtgagtgtggagaaacaatggaggagaggctatgctctgaaagggtgttccagtgcaagagggagtgtggtgggatgttgcagtgtgggaagcatagttgtgagaggggttgccatgctggaaagtgtggaggatgcccactccaagggcgacgaacttgcccatgtgggaagaaagattatccaagtttggactgtgatgcagaggctgccacatgtggatcaacttgcgagaaggtgcttgggtgcgggcggcacaaatgcccagagcggtgtcatcgtggttcatgcgttgagacatgtcggcttgtgatcacaaaatcgtgccgctgtgggggtctcaagaaggaggtacaatatatcacacgttttttatgtcaaaattcttaaaaggaaggaaacaaggaatatgtttaaacccttcaagcagataaattaaacaaatcaattccttggttgtctaaaatgcaaaaagcaattagagaatgtcattgtcaattatgtttgatacattattagttaaaatgccttttaagttacttcacatagttctctatagttctaccgacctatttctatatttggaggcaagtatgcttcaaccgttctgagtggaaacaaaacagagtaaaaataagtaaaatcttctttctttatgttacctcaatctgggccagtatagtaaatactggttgtgcaccatcctagcgctggtattgaatgtggagggctgcagcttttgagtacttctctcttattagaatgcaaaccaaatttgttgttcatgtgatgctgcatcaggtgccttgctaccaagaattgacatgcgaaaggaagtgtcagcgtttgcgaaactgtggccgccatgcttgtagacgacgttgctgcgagggtgattgtgcaccctgcccagaggtaaatcctttctttggggggtgtgatgtattgatacctatcaattactaaagtagatttatttctgtttgtaggtttgtgacaagaggctcagatgtggcaaccataaatgcctatctccatgccacaggtattctcttaatcaaatatacatctttggcttgccatgttgaattgtttagtgctagtactgctaattgcattggtgcataccttttatacatatgttcccattttgagccatatttttgcaatggatgtaccacattgccatgataggttccacaaatttaagaatgctgttttgctctcagacatttgcactttattctcttttattccaaatttcaagactaattcaatgtcccgaatcataaatattcttgtttatccaaactgctaatatatgtgacaatatttttcttcattttgtttaacagaggtgcttgtgcaccttgtcctttgatgaagaccatttcatgcaactgtgggcaaacattttttgaggtggaattcggtacactctaaatatgttgtttgtttcttatgcatcccatgtttgatgatcacagcacttcacttgaacagcaagtttacaggaaaaaaagatattcagttagcattaggagtaccattgttttcatatgattttatgtactttgttaaaaaagttaattcttgtccgatccttccacacaaaacttgccttgtgactcgacttcttgtccaaaattcgtatgcacaactttgtatgtaggtgccctgtgggactgagaagaatcagaagccacccaaatgctcaaaaaaatgcaatatagctcgcctttgcaggcacaaacttgaatgccgggtaaacaattacatatctctgctttaaccttatcattaatgataatctcatctattttgtgtttagaaatttatcctggagcattttggggttctcttctataaattaatcctcagaattttcttcttagccccacaagtgccactatggagcttgcccaccttgcaaactaatctgcggagaagaactttcttgtggccacaggtgtaagctgaggtttgtattttgactattttctgaatgtgccagtgttggtaatttgccccaggagtatatccttctgatatgtaaccatccgctcgcactctgccaggtgtcatggccccattgctcctccaaatcctgagttcacactgaaaccaataaaaaggaaaaagggaaagcatatagactctacacctggaacaccatgcccgccatgccaagaagttgttttggtgccatgctttggacatcatcttggccaagaacgtgcagtaagtttcacccttcctcacacatccacactcatatgtgtgctccgtgattgctgagtgcctgagtgcatacaaattctttctccctgcagatactttgctccaaaaggaggcagtttccatgtcagaatttatgtggtaaccctctcaactgtggcaatcattattgtacgaaggcttgccatgtgttacagattccattgagtcagcctgaaggagatcaatcggctatactgtctcttgctagtgcaagtgcattcgctgagccttgcgaagaatgtaacctgccttgtcaaagggtcagtgttctttattgtccttagcaataactttggtttagttctgtttacagacttttaatgtgaaattttgtgcatggttccacatcttttaactttggtgcagcatatttggtatttaccatttctttcaggtcagggagcctccatgttcacatccctgccctttgccatgccatcttaacgattgtccaccttgcaaagcccttgttaaaagaccatgtcattgtggtgctatggtacacgcttttgagtgcatgtattataacaacttaaatgctacaaaacagcagaaagtaaggtcctgtggtggcccatgtcataggtcagttacttttttcctcggtcctatcatcttttttgaatgttggtaacattttccattgctgattttgtaagtttctttcatctgttctttttgcagaaaattaccgaattgtccccatctgtgctcagaaatatgtcaccctggtcagtgcccatcagttgatcagtgcatgaaaaaggtatcttggtgaaactagagttacctaattggcatgatatcacttggtaggcatatatttacattacataattagcatgacattattagcaacctgttctgtggcttagcgatactacaatttttacttgatgaaactggagtaaggtttggaactttgggatatggtccacttatgttctatatatatttttagcgagatcaatcacagaataccatagttgtttttacctctttcatgtaatgtaattaggcactaggctttctcttttctgtccttgtgcgctatcacaagaactttgctgtttttcttgaagaacttgcttaatgaaggcagagctgcttacactttacctaaaaaaaatcacaacatacttttgaaaatatgtattaatacatgttcctctacctatctgatatccattaaggtcaatgtccgttgtgcatgcaacaaccttaaaaaagagtggatatgtcaagatgttctgaaggaataccgtcagtctggtcgtgacccaaaacaaatacctaaaaatcaatatgcagttggcctacttgcctgtggtgaagattgtgttaaaaaggttaaagctgcagattctgagttgcatctccggaaaattcaggagatcaaggtactggaccttaccatctgaaccaaacttcataagttgttacactgttgtgcaaacaatcagctcttgtagttatttttgcttctgtgcttattggctgtaatttccatgtagacccctgctgtggaagttgaaaatgtgcccaagcgcaggaagaggcgtaaccgtggccaagaaagtgttgaaagctcaaaattccaggtgtgctagatactgatgtgctggtttgttatttgggttcgctaagcatgcgttccttacatgaactttatatattgcaggaaatcaaagctgttgcgttgaaatttctcctggttatttttctgtgcataatcgttgtagctggattgtaccttttgtggaaaggtgtttaccggctttctgattggatgaatgacatggaggagcagagggccaggcagaggcatttgaagcctggaagattgtaaattaaagactacggagggtgtttgtggaatattcacaactgagatgtgcatcggttcaccgtcagggattggtttcggatatatggtagtgaaagatgtcatcattttgttattggagccaagccccggagtttgtaactagtttggtctcttgtccgaagctactggttaatggaaactaaagttatccgtgtcaaaagaaagatatcattttgttctttgtttgccaaacaaaatgtaggaactcaacaaccttgtactgtagtttacatgcatactgtgttcgagtgaattaagggtgtgtttagttcacgtcaaaattagaagtttcattgaaattgaaacgatgtgatggaaaagttagaagtttatatgtgtagaaaagttttgatgtgatggaaaaattagaagtttgaagaaaaaattgggaactaaatcaggcctaattaaatgaacaaattctgtcaagtaattgatatacgataaccactgtaatttctacggtgcacataaatatccatcataataaggtacagccttacaggcgatcacatttctgcaccttttgcagtgttgagttctgttgcagtaataacacctagtgattcaggtaaaattggttttgttagtataataagtttatttttgttttgagagagagtacaaacacaagcgtttccgaggtacagcacctgcgtactcattcctataaacaagtgcacgtaaacggcacattttatttctatgagcactttcaacagactagatcggtatattttaaaattgataaagtcactatcgatgtcttaaccgactgatggtatatattgagattaacgaagtcatcaccgatgtctcgct

SEQ ID NO: 119 - DNA, 1585 bp, Oryza sativa
gccaagctcgaaattaaccctcactaaagggaacaaaagctggagctccaccgcggtggcggccgctctagaactagtggatcccccgggctgcaggaattcggcacgagccgcgtcgcttcccttccttcgcgcggcgctgctccggtagggttttagccggcgatctctcccctctcgcgcgctcggcgactgagaatggtcgaggtggaggaagtcagcaacaagatgcaggtgcagatgcgcctccaccccgccgcggcggcggaggaggaggacgccgacctcccgctccccgccctcttcgacaaggcgtcccacctccactccctcgcctccagctcctccctcgaccaggaagggatccgcaagggggtcgacctgctgcggcggtgcgacgagatggtcagtaaggtcggcctcttctcctccaacgagaccaaggatgacatctccaccgccaacctcaaatacctactcgtaccgtactaccttggggaaatgactgaaagggtagcgcaggaagatcggatcccagtccttaaggcgtcgcaggatcatttgaaggaattcatttctatctgtgaagcactggagcttatatcagaggatgagcttgaaatatctaggcagaagaacctgataccatggcaaatcgaagagcacagaaggttgcacggttcaagcgccaaaaggctgcagaaacaaagctctagaatcaaggagaggaaagaaaggcgtaggcgtcatgagagcagctgcttatcagctcctattgagctgggaggagatcttttgaggatgatggagaaggaaagagaaggcatggttagctactatctcattggctctatcgaaggctttgaccttcttgacatgttaaagaaggaagaagaaatcgttccggcagtaaaagaaggaaagcgaaggatggtaatgcatttgctcgtgaaatgcttgatgaacgtacaaaaagggctgaagcatggcaccataatgctgccaaccgtgcaccatactccaaaccagctgatccaatcacttgtgcaactaaccagtgaaagagagagaatggcagcacaagtttttcagccaagttataggttgccaacgatgagcatagaagaagctggcttacgtgagatgaaaatgatggagaaatggcaagaaagaactgccaagatgattcaagaatcaaactccgcatggcacaaggatggcagtcggtcagcccaagaggacgaggacgccgaagaggagaaagcgagaggatgggatgactggaaggacgataaccctcgtggtgcaggcaacaagaagctcactccctgtggctaaattatatgctatggcaattctattgaacttacatctgaaactgaagctcgtgtaaaaatatgtggtttttactaactttccttactgcggcatttgttgattgctgagtaataatgtgttccatatgtatattataattgtgcatggtttccttctgccaatatatgggcaaccaagtaatgccagaaaagctgatttgagaagcaaaaaaaaaaaaaaaaaaaaaaaaaaaaaaaaaaaaaaaaaa

SEQ ID NO: 120 - DNA, 1284 bp, Saccharomyces cerevisiae
tagtttttcctattttcaaaattgagagcgcaagcaagtgagaagaaaaagcaagttaaagataaactaaagataaaaatgtcaaccagtcgtgaagattctgtgtacctagccaagttggctgaacaggccgaacgttatgaagaaatggtcgaaaacatgaagactgttgcctcctctggccaagagttgtcggtcgaagagcgtaatttgttgtctgttgcttataagaacgttattggtgctcgtcgtgcctcttggagaattgtttcttctattgagcaaaaggaggagtccaaggagaagtccgaacaccaggtcgagttgatttgttcgtaccgttcgaagattgagaccgaactaactaagatctccgacgatattttgtccgtgctagactcccacttaattccatcagccaccactggcgagtccaaggttttctactataagatgaagggtgactaccaccgttatttggctgaattttctagtggcgatgctagagaaaaggccacaaacgcctctttagaagcatacaagaccgcttctgaaattgccaccacagagttacccccaactcacccaatccgtctaggtttggctcttaacttctctgtcttctattatgaaattcaaaactctccagacaaagcctgccatttgcgcaagcaagcttttgacgacgctattgctgagttggacactctgtctgaagaatcatacaaagatagcacacttatcatgcaactgctaagggacaatttaaccttatggacttcagacatgtccgagtccggtcaagctgaagaccaacaacaacaacaacaacatcagcaacagcagccacctgctgccgccgaaggtgaagcaccaaagtaagtattctgataaatctaaagagaaattactaaaaaaaagaaaaaaaaaagaacgagggtgtaataatttgtagttcattattgcaattatatatctatatctatatatgtatataacattaacatgtgcatgtacacacgtaatcgcgcgtgtacatgtctatatgtgttacttgaactatactgttttgacgtgtatgtttatttatctctcttctgattcctccaccccttccttactcaaccgggtaaatgtcgcatcatgactcccgacaataatcccctctggtatacgcagaagcaactttagcttcttaacggcaagaacttttttatgtttgtcgcacctgtatcttcacaaaagttggatacagcaataagaaaggaaaccacatttgtgcca

SEQ ID NO: 121 - DNA, 1424 bp, Oryza sativa
ggagagcgcgagcagagcaagcaaccaagcagcagcagcgatggccgccgcagccacgacatcctcccacctgctcctgctctcccgccagcaggcggcggcctcgctccaatgcggcctctccttccggaggcagcccggcaggctcgccggtgggtcgtcggccccgagcgtgcggtgcatggcggccgtcgacacggcctcggcgcccgccgcgacggaggctagcaagaagagcagctacgagatcaccacgctgacgacgtggctgctgaagcaggagcaggccgggaccatcgacggcgagatgaccatcgtgctggccagcatctccacggcgtgcaagcagatcgcctcgctggtgcagcgcgcgcccatctccaacctcaccggcgtccagggcgccgtcaacgtgcagggcgaggaccagaaaaaactcgacgtcgtctccaacgaggtgttctccaactgcctcaaatcgagcgggcgcaccggcgtgatcgcgtcggaggaggaggacgtgccggtggccgtggaggagagctactcgggcaactacatcgtggtgttcgacccgctcgacggctcctccaacatcgacgccgccgtctccaccggctccatcttcggcatctacagccccaacgacgagtgcctagccgacatcgccgacgaccaaaatcttgaccaggtggagcagaggtgcatcgtgagcgtgtgccagccggggagcaacctgctcgccgccggctactgcatgtactcgagctcggtcatcttcgtgctcaccatcgggacaggggtgtacgtgttcacgctggacccgatgtacggcgagttcgtgctgacgcaggagaaggtgcagatccccaaggcaggcaagatctatgccttcaacgagggcaactacgcgctctgggacgacaagctcaagagctacatggacagcctcaaggagcccgggccgtccgggaagccatactccgcgcgctacatcggcagcctcgtcggcgacttccaccgcacgctgctctacggcggcatctacggctaccccagggaccagaagagcaagaacggcaagctgcggctgctgtacgagtgcgcgccgatgagcttcatcgtcgagcaggccggcggcaagggctccgatggccaccagaggatacttgacatcatgcctacggagatccatcagagagtgccgctgtacatcgggagcgtggaggaagtggagaaggtcgagaagttcttggcttgactgcaagtttcatatacgggggtgtttctaaaaaaaaaagtattgtaactaaattataatatatttgtagaaattttcttttctgatggcgaattaattaaacccattgtgaaggatttcatccctactgttgataggtcgaggctccttctcactagtcctg

SEQ ID NO: 122 - DNA, 1501 bp, Escherichia coli
gtgccacaaattcctaaaatatgaatgcgcatacgtcactatccttttttaatctgccgctcattttacgcatatgtcgggcaagtgagaaacgcatttcaggataatccgtaatttgctggcgcgattcacctgagcgcaacattgagattatttgttaagattgttgcggtcgctttactccataaacattgcagggaaagttttatgaaaacgttaggtgaatttattgtcgaaaagcagcacgagttttctcatgctaccggtgagctcactgctttgctgtcggcaataaaactgggcgccaagattatccatcgcgatatcaacaaagcaggactggttgatatcctgggtgccagcggtgctgagaacgtgcagggcgaggttcagcagaaactcgacttgttcgctaatgaaaaactgaaagccgcactgaaagcacgcgatatcgttgcgggcattgcctctgaagaagaagatgagattgtcgtctttgaaggctgtgaacacgcaaaatacgtggtgctgatggaccccctggatggctcgtccaacatcgatgttaacgtctctgtcggtaccattttctccatctaccgccgcgttacgcctgttggcacgccggtaacggaagaagatttcctccagcctggtaacaaacaggttgcggcaggttacgtggtatacggctcctctaccatgctggtttacaccaccggatgcggtgttcacgcctttacttacgatccttcgctcggcgttttctgcctgtgccaggaacggatgcgcttcccggagaaaggcaaaacctactccatcaacgaaggaaactacattaagtttccgaacggggtgaagaagtacattaaattctgccaggaagaagataaatccaccaaccgcccttatacctcacgttatatcggttcactggtcgcggatttccaccgtaacctgctgaaaggcggtatttatctctacccaagcaccgccagccacccggacggcaaactgcgtttgctgtatgagtgcaacccgatggcattcctggcggaacaagcgggcggtaaagcgagcgatggcaaagagcgtattctggatatcatcccggaaaccctgcaccagcgccgttcattctttgtcggcaacgaccatatggttgaagatgtcgaacgctttatccgtgagttcccggacgcgtaatctcctgcgcctctccacacggagaggcgtttttattgctgcgcaatgttgactcttgtcactggcgaactctgacgattctcccacagcaccgttaatccacgctgtaatgctataaaaataaacaacaaaataccgatggcgattttcgtccaccaggaactcagcgtgccatcaaagtttatgtaagtctgaatcagtccctgaatcgccacgccaaaaagcgtccctaataccgttccaacgccaccgctcaaaagcgtaccgccaattaccactgaggcgatagcatcca

SEQ ID NO: 123 - DNA, 1167 bp, Synechocystis sp. PCC 6803
atggacagcaccctcggtttagaaattattgaagtcgtagaacaagcggcgatcgcctcggcaaaatggatgggcaaaggtgaaaaaaacaccgctgaccaagtagccgtagaagccatgcgggaacggatgaataaaatccacatgcggggccgcatcgtcattggcgagggggaaagggatgatgcacccatgctctacatcggcgaagaagtaggcatttgcaccagagaagatgccaaatccttctgcaatcccgacgaattggtagaaattgacattgctgttgacccctgtgaaggtaccaacctagtagcctatggtcaaaacggttccatggccgtgttggcaatttctgaaaaaggtggtttgtttgccgctcccgacttctacatgaaaaaactggcggctcccccagcggccaaaggtcatgtggacatcgacaaatcggccaccgaaaacctgaaaatcctctccgattgcctcaaccgcagcattgaagaattggtggtagtggtcatggatcgtccccgccacaaagaattgatccaagaaatccgcaatgccggtgctcgggtacgtctaatcagtgatggagacgtttccgccgccatttcctgtgctttttccggcaccaacatccacgctctgatgggcatcggggctgctcctgaaggggtaatttccgctgctgccatgcgctgtctggggggtcacttccaaggtcagttaatctacgatcccgaagtggttaaaaccggcctaatcggtgaaagtcgggaaggcaacctagagcgtctcgcttccatgggcatcaaaaatcctgaccaggtttataactgcgaagaattggcctgtggcgaaaccgtattatttgccgcctgtggtatcacccctggcactttgatggaaggagtccgcttcttccatggtggggtacggacccaaagcttggttatttctagccagtccagcaccgcccgctttgtagacactgtccatatgaaaggaaagccccaaagtaatccaactgcattaatttccctctcggcaactatccccaagaaggttaaaacctggggaaatacatcgccgtttcccttgtcccctgaagttcagactttgggggacttatgttttggttgggtcatagtaactggggtttga

SEQ ID NO: 124 - DNA, 2001 bp, Synechocystis PCC6803
ttaatccacgacggtgcccgttgtttggctacgccggatttgtttgatcgttgcacagaggctctccagcattgccaaggattaattgccgccatgccagtgaaggacaccatcaaaatagttaacgctgatggttggatcactgacacccccgatcgccaaggattgtggggagcccaaacgccccagggttttgacgtggccctgctcaaagcctgccatgacaaaggtaaacaggaaggttgggaagtaacggatgatgcggccctgctggaaaaatgtgggcaacccgtgaaaatagtgccaggggaagatactaacttgaaaattaccacccccgtagatttggcgatcgccgaatttattttggggcagaggtcggcaaaatccgcctgaaaataggcaaatttcggggttcggaaagatcaagctaggatggaagggactttgagcctagcaatccaaggagacttttatccatgaccgttagtgagattcatattcctaactctttactagaccgggattgcaccaccctttcacgccacgtactccaacaactgaatagctttggggccgatgcccaggatttgagtgccatcatgaaccgcattgccctagcgggaaaactgattgcccgtcgcctgagtcgagctgggttaatggccgatgtgttgggcttcactggggaaaccaacgtccagggggaatcggtgaaaaaaatggacgtatttgccaatgatgtttttatttctgtctttaagcaaagtggcttggtttgtcgtctggcttcggaggagatggaaaaaccctactatattcctgaaaattgccccattggtcgctatactttgctgtacgaccccattgatggttcctccaacgtggacattaacctcaacgtgggttccatttttgccattcggcaacaggaaggggacgatctagacggcagtgcgtcagatttattggctaacggagacaagcaaattgctgctggttatatcctctacggcccctccaccatcctggtttattccctcggctccggagtgcatagctttatcctcgatcccagtttgggggaatttattttagcccaggaaaatatccgcattcccaaccacggccccatttacagcaccaatgaaggtaacttttggcaatgggatgaagccctgagggattacacccgttacgtccatcgccacgaaggttacactgcccgttatagcggtgctctggtgggggatattcaccggattttgatgcaagggggagtgtttctttatcctggtacggaaaaaaatcccgacggcaaattgcgtttgctctatgaaactgcgccgctggcctttttggtggaacaggctgggggaagggctagtgacggccaaaaacgtttactggacttaattccttctaaattacatcagcgtacccccgccattattggcagcgcagaagatgtgaaattggtggaatctttcatcagcgaccacaaacaacggcagggtaattagtttacttaatcactgcaaatcgtttgaggtctaggaacgtcttttaaaagccccctagccccccaattctggggggaatagtgttcaaagtcccccaaatttgccggagctttagtgaagacatttggagagtggatcatgacttttcaaacatactctaacgccggagattcaactttgttggtaaatctacattgatcaatcctatgcgacagttattgctaatttctgacctggacaatacctgggtcggagatcaacaagccctggaacatttgcaagaatatctaggcgatcgccggggaaatttttatttggcctatgccacggggcgttcctaccattccgcgagggagttgcaaaaacaggtgggactcatggaaccggactattggctcaccgcggtggggagtgaaatttaccatccagaaggcctggaccaacattgggctgattacctctctgagcattggcaacg

SEQ ID NO: 125 - DNA, 2877 bp, Saccharomyces cerevisiae
gaattcttcgaaattgcgggactcgcttacagttttggagaaagcagatagtattgaacacaataaaggaacaactatgtaaccaaccagtgatgagtttaaaaatttagtgcagatggaaaagaaaaaaatgatctagtatactgtctgcaatcaacaaaaactctagccacaacaaactaagcaatcttccccaaatcaacgatattgtacgattaatatatgcaaagaatagtaaggtaagctatagtaaaagggcaagtttaacctcttctgttatttgatctggtgatgagttctgccagaagagcctgtgcaataattttgccaaaaaaaatggcaaatttgctgaaacacgatattcacgtatatagtgatgataataagcatgctatatatcagtagtatgtattttgcagcttctactttctgcaatgtgatgccgttggcattgagattccaacgaatatacacagatgcctgatttgtttgcgattagttactgtaatagagaaaaaaaaatttaaaaaagacgaaagccccaaaagagacgagtgcaattagtggtgatactttatactatgtttaatatatatacctggtttacctagtgagtatgttcgtaaaaaaataacgtcagtaatggttgttggtcggcagccttggcgaattcttttattagcaatggtttaatcatgtagttacccggcaaatatgtggtggcaaaaatgaattaatgtatattttactgaaaaggaccccattaatgaactcttgggtaaaaagggcacatcaggagtttgtctaaaacgtttatacgagtgatttatttgtgcattatagaggtgagaacaaattggaaagttttaattttagtttaagatggccaccttggaagaattggatgctcaaactttaccaggagacgatgaattagatcaagagattttgaatctttcgacgcaggagcttcaaacaagagccaagctcttggacaatgaaattcgtatttttagatctgaattgcaaagactgtcccatgaaaacaacgttatgctcgagaagattaaggacaataaggaaaaaatcaagaataatagacagttaccgtaccttgtggctaacgttgtcgaggtcatggatatgaatgagattgaagacaaagaaaatagtgaatctactacacaaggtggcaatgtcaacttagataacaccgctgttggcaaagctgctgtagtcaagacttcttctagacagactgttttcttgcccatggtcggtttagtagatcctgataaacttaagccaaatgacctggtaggtgtgaataaagactcgtatttgattttggatactttaccctctgaatttgattctcgtgtaaaagctatggaggtagatgaaaaacccacagaaacttactcggacgtgggtgggttggataaacagattgaagagctggtggaggccattgtgttacctatgaaacgtgcagataaattcaaagatatgggaattagagcgcccaagggtgccctaatgtacgggcctccgggtacaggtaaaactttattagctcgtgcttgcgcagctcagacgaatgctacttttttgaagctggcagcacctcaattggtacaaatgtatatcggtgaaggtgctaaactagtgcgcgatgcttttgcactggccaaggaaaaggcaccaactattattttcattgacgaattggatgccattggtactaagagatttgattctgaaaaatccggtgatagggaagtgcaaagaaccatgctggaattattgaatcaattggatggctttagctccgatgatcgtgtcaaagtcttggcggctaccaatagagttgatgttttagatcctgctttgttaagatcaggaagattggatagaaaaattgaattcccactcccatccgaagactcgagagctcaaattttacaaattcattccagaaaaatgaccactgatgatgatattaactggcaagaacttgccaggtctactgatgagtttaatggtgcccagttaaaggcggtaactgtggaggcaggtatgattgccttaaggaatgggcaatcttccgttaaacacgaagatttcgttgagggtataagtgaagttcaagcaagaaaatcgaaatcggtatccttttatgcataaaaataataatattttgatttatcaagccgccattcacatatctacatattagaacaatccttttatttaaagtcgcgtaacttccttattattgatactgtatatggctaattgtatactacttattatttgatgaaaccgaaagcgtagacacaagtatatattcattggcgtttgactttttttttactgtattttcttttcgttggcaccttcgcaatttcaaggatgcattgaaggaaagagaaaagcgtaggagaacaagacgcatcgacggctacgggtgctttgagatttaacttgcagagctccatatacagcacacatctgtagatgatttagtgacatattaataggctgcagaaagggagtaaaacaggtagaagtaagatatcggcaccattctacttttcatataacgattgattaatcttaccaaagcattaaatttaaacaggcttgcagactgaaggagtactcataaagcaaccggaccaggtaatatttgttgtagtattatgggacagtcttcttcaatcagttccagttcagtaacgaagagggttcttcccactcaaaaaaattcacaaatagcaaagatattttggcatatttcaataacaaagcacagcaacaggtcactattccagaattagtcagttttaagggaaatttgcaaattgaagatct

SEQ ID NO: 126 - DNA, 6001 bp, Saccharomyces cerevisiae
gtttctgggcttactttattcaacaaattattagtagacgtaaacttacttgttgccgcggtacatatttcaccattagagagtttattgtcactacattggccagtcattcaatgcccgcgtgcaaagtgatctaagtcgtttctgattccgaaaaattttgaaaaattttaagatgagatgagctaaacccttctatacattagcagcaactgaagaaagctcagtaaggttcgtctattcatttttatttaaagctattagtatctactactacagtctgaatcaaggaccgtttaatataaaaaacacacctgtactgttgcaaaaatggtagcttccaccaaaagaaagagagatgaagattttccactttcgagggaagactccacaaagcagccctctacctcatcattagtaaggaacactgaggaagtctcttttccaaggggtggtgcgtctgctttgactcctttagaactgaaacaagttgctaacgaagctgcaagtgatgtgttatttggtaatgaaagtgtcaaagcatctgaaccagcaagtagacccttgaaaaagaagaagacaacaaagaaatccacttctaaagattccgaggcctcatcagcaaactctgatgaagctagagctggactaattgaacatgtcaactttaaaacgttgaagaatggctcttctttgcttggtcagatttctgctatcactaaacaagatttatgtataacattcacagacggaatttctggttatgtgaacctaacacatatctcagaagaatttacttcgattttggaagatctggatgaagatatggatagtgatactgatgctgctgatgagaaaaaatccaaagttgaagatgcagaatacgaatcgtccgacgacgaagatgaaaaattagataaatctaatgaattacctaatttaagaaggtactttcacattggtcaatggctaagatgctctgtcatcaagaatacctctttagaaccatcaactaagaaatccaaaaagaagagaatagagttaaccatcgaaccttcatccgtcaacatatacgcagatgaagatttggttaaatccacgtctattcaatgcgcggtcaaatccatcgaggatcacggtgctaccttagatgttggtctgccaggctttacagggttcattgctaagaaggattttggcaattttgaaaaattattgccgggggctgttttcttaggtaatatcaccaaaaaatccgacagatcaattgttgtaaatacagacttttcggacaagaaaaacaaaattactcaaatctcctcaattgatgccattatccctggtcaaatcgtcgacttattgtgtgaatcaatcactaaaaatggtattgccggtaaagtttttgggttagtatccggtgttgtcaacgtatcacatttaagaacattttccgaagaagatttaaagcataaatttgttattggttctagtattagatgccgaattattgcttgtttagaaaacaaaagcggtgacaaggtcttgattttgtcaaaccttccacacattttaaaactagaagacgctttgagatctactgaaggtcttgatgcattccctatcggctacacatttgaatcatgcagcattaaagggcgtgattccgaatatctatacttagcattggatgatgatagattaggtaaagtacattcttcaagagttggtgaaattgaaaattcagaaaatttaagttccagggtccttggttatagccctgttgatgacatttatcaattgtccactgatccaaaatacctaaaattaaagtatctaagaacaaatgatattccaatcggagaattattaccaagttgtgaaataacttccgtctctagttcaggtattgaattgaagatatttaacgggcaatttaaggcttctgttccaccattacacatttcagataccaggctagtttatccagaaaggaagttcaagataggttctaaggttaaaggtagagttatatcagttaattcaagaggtaatgtgcatgtcactttgaaaaaatcattagttaatattgaagacaacgaattaccactggtttccacttatgaaaacgccaaaaatatcaaagaaaaaaatgaaaagactttagcaactattcaagttttcaaaccaaatggttgcatcatttccttttttggtggtttatcgggatttttacctaattctgagatctcagaagtctttgtgaagagaccagaagaacatttaagactcggtcaaacagtaatagtaaaacttcttgacgtcgatgctgacaggaggagaattattgccacatgcaaagtttcaaatgaacaggctgcccaacaaaaagataccattgaaaatattgttccaggcagaacaatcattactgtccatgttatcgaaaaaaccaaagattctgttattgttgaaattcctgatgttggcttgcgtggtgtcatctacgttggtcatctctctgattccagaattgaacaaaatagggctcagttgaaaaagctcagaatcggcactgaactgactggtttggtaattgataaagatacaagaacccgcgttttcaatatgtccctcaaaagttctctgattaaagacgctaaaaaggagactcttccattaacatatgatgatgttaaggatctaaataaagatgtaccaatgcacgcttacattaaatccatttctgataagggtctctttgttgcatttaacggtaagttcattgggttggttttaccaagttacgctgttgatagtagggatattgatatcagcaaggcgttttatattaaccaatccgttaccgtctatttattaagaacagacgacaaaaaccagaaattcctattatctctaaaagctccaaaggtcaaagaagagaagaagaaagttgaatctaatatcgaagatcctgttgattcgtctatcaaaagctgggacgatttgtctattggtagtattgttaaagcaaaaatcaagagcgtcaagaaaaatcaattgaatgttattttagcggcaaatttgcatggcagagtggacattgctgaagtgtttgacacgtatgaagaaattacagataagaaacagccgttgagtaattacaaaaaagacgatgtcatcaaggtaaaaatcataggtaatcacgatgtcaagagccataagttcttgccgattacacacaaaatctcaaaggctagcgttttggaattatccatgaaaccatcagaattaaaatctaaggaagtgcacacaaaaagtcttgaggaaatcaacattgggcaagagttaactggctttgtcaacaattcatcaggtaaccacctatggctaacaatttctccagttttgaaggcgagaatttctctactagatttagctgataacgattcaaatttttcagaaaatattgaatctgttttcccattaggttcagccctccaagtgaaagttgcctctattgaccgcgagcatggctttgtcaatgccattggaaagagtcatgttgacataaatatgtccacaattaaagttggtgatgaattgccaggtcgtgttctaaaaatagctgaaaagtatgttttgttagaccttggtaacaaagtgactggtatttcctttattacggatgcgttaaatgatttctccctaacattgaaggaagcttttgaagacaaaattaacaacgtcattccaactaccgttttatctgttgatgaacagaataagaaaattgaactatcccttcgtcctgctactgcaaaaactcgttcgatcaaatctcatgaagatttgaagcaaggcgagattgtagatggtattgttaagaatgtgaatgacaaaggtatttttgtttacttgagtaggaaagttgaagcctttgtccctgttagtaaactatctgattcttacttgaaggaatggaagaagttttacaagcctatgcaatacgttttgggaaaagtcgttacatgcgatgaagattctcgtatttctctaaccctaagagaatccgaaataaatggtgatttaaaggttctaaagacctattcagacattaaggctggtgatgttttcgagggtacaattaaaagcgtcactgattttggtgttttcgtcaaactagataacactgttaatgttactggtttggcacatattactgaaattgcggacaaaaaacctgaagatctttctgccttgtttggtgttggggacagagtaaaagctattgttttgaaaacaaatccagaaaaaaaacaaatttcattgagcttgaaagcgtctcatttctctaaagaagccgaattggcttctactaccaccaccactactactgtggatcaactggaaaaggaggatgaagatgaagtcatggcagatgctggcttcaacgattccgacagcgaatctgatatcggagaccaaaacaccgaagttgccgataggaagcctgaaacatcttcggatgggctatccttgagtgctggttttgattggactgcttccattttggatcaagcgcaagaagaagaagagtctgaccaagatcaagaagactttactgaaaataagaaacacaagcacaagagaagaaaggaaaatgttgttcaggataagaccattgatatcaacactagggcaccagaatctgttgccgattttgaacgtctacttatcggtaatccaaattcgtccgtagtgtggatgaactatatggctttccaactacaactgagtgagatcgagaaggctcgagagctcgcagaacgtgcgctaaagaccatcaacttcagagaagaagccgagaagttgaatatttggattgcaatgctgaatttagaaaatacttttggtaccgaagaaactttagaagaagtgtttagcagggcttgtcagtatatggactcatatactattcatacaaaactgcttggtatttatgaaataagtgaaaagttcgacaaagcagcagaattattcaaagctacagctaagaaatttggcggcgagaaagtttctatctgggtatcgtggggtgattttttgatcagccacaatgaagagcaagaggcacgtactattttaggtaatgctttgaaggccctaccaaagcgtaatcatatcgaggttgtccgcaagtttgctcaattagaatttgcaaagggtgacccagaaaggggtcggtcattattcgaaggtttggttgctgatgcgccaaagagaattgacctgtggaacgtttacgtagaccaggaagtgaaggcaaaagataagaagaaggtggaagatttatttgagagaataataaccaaaaaaataacaaggaagcaggctaagtttttctttaataaatggttacaatttgaggaatctgaaggtgacgaaaagaccattgaatacgttaaagctaaagctactgagtatgtcgctagccatgaatctcaaaaagcagacgaataattcctgatggatttttaactgtaaagtaatataaatggctaagtttgtaaagtatatttgtaaagtacatagaatgtaaagtttcaagaagcaatttctatcgatcaatttagctttgacggttcgtagagctccttttcttaaagttttagttccgcttctcgcttcttgattacaagatggttccgtgttaacgaagattgagttctatgtattttttatattcacacgctaaaatcacatatttattaaataatgaagtaaattttaaaagcacttttttcaaccagagtgctctgtttgatacatatcaacaaaatccattaaaatatctggtttgaaaggccactccatgaataatttcgttagatatataaactcgtcatttgtcaaatcaatcggacacttttttagcagatctttgtcagtgattctactattaaaatattgttggccaccatgtcccagcgagtccatgaca

SEQ ID NO: 127 - DNA, 6001 bp, Oryza sativa
caattctgcatcatttcggggtagtatgtttcattggagtgcttcagcagcttcatccaaactaaactcacaacagctgcctgtgatggaggtgcccatctaccatgatagagttactcctggacctaataatctgccctcctgtgcatataatgtatcctccactcagggtgagttgagatgatgagttacctattttaacctcacaatacaccttaatttttttaattctttattggcttgattttggcaggatataaccaatatgaaaactgtatgggtgctgctaactttgctcattcgttggctgataaacccaagcagatgcctgaaagattagcaaacaccatttttacctcatgtgcatcaactctaccgaaatgtagccctagtattgatgtactgcatattggccatataaaagaacatttctcaggtgagtttacatcccctttcttatgtctgaaacagagttgagctgaagttatttggcatcataaacactatggtcaaattttgccaggtgatgcgtatcaaaatgatagttcacaaccatcaacctctgggagttctagttctttgtcagcagtgtgggatcaaacaacatgttctagtgcaatgagaacacttccgatggattctttctcaacagtgaacggacaaaacctttccacaaacaataaaagtttgtatcccacaaccggtcagggacctttgttgcaacaatacatagaatgtgagatgaagcaagagacgtggagtcggtcactagagcaatcagatcagtcaaacattaccactggaaaccgtgacttgtatcatgctcaaattcatccgtacatcaatggagagcacaaacgggatcgatgcattcaaatgaaagaaaaacttgggcatacttctgatcatgaaggtttctccagggagaaaagctcaaatttaagcaaccactttatgcatcatcagcagggcttcatgactaattatggtgcttgtagccctgtaagcaagacagtggatagagctgaacagacatcaaatagtactgtatcaaagccgacttcacctgcttcagatggatcttctggcaagcattatccagcaaaacgcttgaaagttgatgttccccatcttgtccatgtcaatgaaatggaggcttcaaaggaacaacaacctgctgccaatgagacttatgcatctgctgaaacagtacaatctgaagtcactaattcaccaacaaaatcaccatgttgtacttccttgggggacaacattgcttgcaccgataatgtacatggaatggatatggtcagattgtcggggagtgctgtacaaactgaagaagaatttcgtcgtgaaaatagtgacattgagatgaaggatgcaaaggttgatttattggaccaaacattgtcaggggacagcctgagggcaaggaagagaagaggggcctcagtactttatgcattaacttctgaggagcttaaagatcacttgtgtactctgaaccatgatacttctcaggtgagtgaataacctgttggatcttgtatgatttatctagtattgtaaagcacttgattattattggttgatgtagtctagagaaattttcaaactgagcagctgcaaaattaactaaatattatgtactttcaattgattttcatttggtactaagattttgggttttgttgtcactcaagctttcttgattatattgtacagagtgtgtgcttgttttaagcaaagtttatatctcttaacatgattaacttattttttgtagagcaaagtgccgactgaagagctgctatcagttgaaggcttgcctgatcagaacacatgcaatttatgtgggatggaaagactcctctttgagccccctccacgattttgcgcgctctgttttaaaataattaattctacaggatcctattatgttgaagtggaaaatggaaatgacaaatcttcaatatgtggcagatgccaccatcttagtagtgccaaagccaaatatcagaagagattcagctatgcagagacagatgctgaggcagaatgggtaacatatgcttctcttatttctctctagtcatttggaatcatatacgaattactcattttttgtttaattatgccttttcagtgggtccagtgcgataagtgcaaagcttggcagcatcaaatctgcgcactttttaaccccaaaatcgtggatccagaggctgaatatacttgtgcaaaatgtttcttgaaggaaaaggataatgaagatgttgattcacttgagccatctactattctgggagcacgcgagttaccaagaactagactaagtgatcatattgagcaaaggctttctgagcggcttgtgcaggagcggcaacagagggcaattgcttctggaaaaagtgttgatgaggtagttgtgttatgcttttcttttataccttgtcccgtgtacagaatatgctggtgttgcattctgctaccgttgaacaggctacctcactgttaacctattgaaccacagccaaaagttacatacgtctttccaattgcatttttgtgcttcttgctctatgtgctggattgaaggttacaagtaacatgttagtccttatattatagtcttctaagttgacttagataattcattacatgaatgcatctttactgtcatacgtttctttttattttttacaatgtactgatggcatttcacttaatcatgttcttaatacttctcttggtgcatctagcaatgtgtatttatggcttcaggattgcagctgattacacatgaattcatctttggaacacatgttgatgaccatatatttgttgcgtttcagtatcctttttagtgaaactacttttttcttctttttccttgcattttattggattccgataaaagttggttctgcatattcatctgatttagctgaccaagatgtcatattacaattcatggtcaaacttggaacataaacttgtggatgctttgcttagtcttatctgatcatctatgctgatcttaatgttatttttctgcctctaggatttttattacactgtaatatactggagaaacttattgggcgaacttttatggtccaattattaggtaccaggagttgaaggtcttactgttagagtggtatcttcagctgatagaacactgcaagtccaaccacgtttcaaggatttttttaaaaaagaacaatatcctggggaatttccgtacaaatcaaaggtgattatgtgatacttatactttactaatgctattattataacatccatttaaattatgctttcattatttagtggataatgtgggttaccatttccgtgttttgtgcttgtgcaggccattctcttgtttcaaaagaatgaaggtgtagatgtatgcctgttcgccatgtatgtgcaagagtatggttcagcctgcccatcaccaaatcaaaggcacgtttatcttgcatatattgattctgtcaagtacttcagaccggaaatcaagtcggccagtggagaagctctccgtacctttgtgtatcatgaaattttggtatgagaatgcataatcattaaacacttagtgttcttgatcttgatttcagtttatggatctcatgttggtctgattatcttccaatctgttttcccccagattggctacttggatttctgcaagaaacgagggtttgtaagctgttccatatggacttgcccatctacaaagcgtgacgattatgttttatattgtcatcctacaatacagaagatgccaaagtctgacaagcttcggagctggttggtcttcatcatcttttacagtcaatcctaaaattatttatgggccttcatttgataatcttttcaatatatttaggtaccagaatttggtaaagaaggctgttaaggagggggtagttgtggaacggaatacactctatgacttcttccttcagcccaccaatgaatgcaagaccaatatctcagctgcatggttgccatactgtgataatgatttctggcctggggaagcagagaggctccttgaaaagaaagatgatgacacctcacagaagaaagaaactcaactaggaaggcttctacgggttgccaaacgtgatgaccggaaaggaaacctcgaggatattttacttgtgcataaggttggttgtttaaatcatggtgctccctttcttcagaattttttttcgccgggccttcttcagtattttaggcacttgaccccttaattttcattgttggcagcttggagaaaggttgcgaaccatgaaagaagattttttaatgctttgtctgcagcaattttgcaagcattgccaccatcctattgtatctggtagtagttgggtttgcaccagctgcaaaaacttctttctttgtgaacggtaagcattcagtcatgtaaacttttgtgaccatatagaatgcatttcccatactgaagaactttctggaacagcactaggggaaatgtctgctgttggtaaaaatatataattgcacatggcacttgcatagttcaaccattctagcttatacagtgaccgtttgcctgtcaaattgcaaaatgaatctacattcctactcttttgttgttattcaattactctttgtcgttaaggcacccattatttatgatgccattcttatttgtcctcgtagttgttatgctgaggagctgaatacccctctgaaggacaggcacccagctacaacaaaacaaaagcatgcatttgaaagagtacgtatatgaattcatctatttaaggtagctacaatctgcctgcatggaaatactaaccagattactaatctcctctgacagatagaggaagaacctcttccagaaacggatgatgtagatccaacaatggaaagcaagtactttgacagcagaatagatttcctgaagcattgtcaagacaatcaataccagtttgatactctccggagggcaaaacattccacaatgatgattctttatcatctacatgattcaacttgttcttcttgtcaccgtgccatggatcaatgcttggcatggcggtgcttggtttgcctaggctgcaacttttgtgattcatgctataaacaagacggtgaaagtttgcatattcataagttgaggcagaaaaaagaccatcacgtattgcagaagtacactctacaggtatccttaaattggtagctgaatctttttcatctcctatttgtgtttttcatgaatgtttattatgcactcgaaattaacatcttctgattttttgggaacaactctggggatctgatttttttttggttgtttgctcttcgcatgattatatttggcataaactgtagaatataagtgagttgcactattattatttgttccataattttatccttttggtttaatcttgagcatatgtgtgaagtgtatgcttcactattcttatgtgttgcttcatgttatgttttgtcccagtattttgtgactgcatatccaaattttcaatcaggatgaaaaatattctatgagcttttagattctaatgtggtaattatgtggtttcatcccaaatattattttctgctagtgatatttacggtgcctcttgctaatgaattggatgctttcaaagcaggactaccttgaaggcttggtgcatgcatcaagatgttttgatcgaagttgcacttccaaactttgtttgacgttaaagaaactgttcttccatggtgtacgatgtcatacccgtgcccgtggtggaggaggttgccatatgtgtgtattcatgtggaaactgctgttcacgcactcactgctttgtgacaatgcagactgttcagctcccagatgcaggtaaagtgtgcatcacccgcaatattgatctgccttccggagttgtgaaataattttcacaattttattttttccaattggcttgttaattatctttttcccttttaa

SEQ ID NO: 128 - DNA, 6001 bp, Oryza sativa
ttagcgggttcactgctaatggctatggttgtattaacttatatttttttgttgttaagggtgtaatgccgctgcttgcagccataactaaggctatagggagcgttcttctggccggctacaatggttgcagttgtagctacgcacagtgagtgcggcactattcgtgtcgatcatggtgcagtcacaaaagcaacagccgaaaatgctcattaaatagagccgcttatttttaagttaattagaactgatctaaaagttttacatataaattatattttggttgatactaataaaaacatgatggctggaaacaacaagacataaattttggaggaaaaaccgctgtaaaatacactccgtctcccacaagagaacacgccattttggcaggcgtttccccctccgaactccaccgaggtgatccctcccatggcggccgttagctacgagtagccgcggagacggaagactctcccacctagcaaaaggactagtagcaatccagcgaactcaaagccacccctcctcgtctccctcgcccaagtccacggcgagccgcggcggcggcggcggcggaggaggaggcgcagcgagtgggaggggaggcggaaaatggtggtggtggacgcgtcggagttcggggcggaggggttcgacccgaagcggtggatcaacgcggcgctggacgcgcgccacccgtcggagccgctcgaccgcttcctcgccgacgccgaggagcgcctccgctcggccgccgacgacgccgcggccgcgctcgagcgggacagcgccgacgcgctccgccgcgtcccgctcgcctgccgcgacgcgctccgcctccgcgacgacgccgtctcgctccggtcccatctcgcctccgtcctccagtcgctctcccaggtgcgcccccgctcgcctgctagttggatctggatctcacagttcactcgtgcacaattgtacgtgtatcacgcgaaacccagatcattttggaggattacgaacttgcgataatagttggtgcgaatgagcaaatgttgaaccaatttggcacaataggttttagtttgattcatttatgcgtatgattcagcctctggccgcttttagtaccccccgttttttcacttggatctggatctcacgtactgtatttggtcatgtcaattttatccttgtacgctttgcattgaacagtgcgtacaactagaactgtatttagtcatgtcaattttatcgctgtacgcttttatcaaatgatatgttaatttgatcatctctgttaactgaaactgaagtcagaatttgcgtgggcttggcaaaaccaagctggagctctgttggcaaaatccttgcatgtgtcgggatgttataatgctgtgtacttatgcaatgcagttatgtgcatgtaaactttgagtatgctgtagaggacattcaaatccagcagttcagtgatgcccataaaactatgcctatagtctattataatgggataccgtcacttatatcatttagttcatataggtgataggtcaggatgctacatcaaatcacaagcaaaacattttctcctgtagcatgtacttcttgttacgtgtagcgttatcttctcataacatttagcttgacattttgtagaatacactggaatgaatttgctagcactagaacttttttttttgggtactgagtgattccttctttgtaacggccaatgctgaatactgggtgttaatgaatgaaatatgacatacatatgcatgtatgatcaactaactaggtattcagtcccatctacatttcataaattctgtattactgatgatgatgatttcttcaatcaggctgagggttcatctgcagagtcaataactgcactagcacgaattgatactgtgaaacaacgaatggaagcggcgtatgcaacattacaggtaagttgtatgtggactatggtgcatgttactgaagtaaatgcttcactcacagtggtaggttatcttttaatagatttaacagcttgttggtcggaatgccaggatgcggctggactagctcagttgagccaaagtgttgaggatgtattttctagtggtgatcttccaaaagctgcagaaaccctggcaaccatgagacattgcttgtcggcagttggtgaggtattgtactctctcacacaaacatgcacagtacactgagtttatatgcagaagctatttgttttgcttatataaaagttgctttcaggttgcggagttcgctaatgtgagaaagcagcttgaagtattggaagaacggctagatgacatggttcaacctcgtttggtggatgcactttctaaccgcaaggtttttcttactaatctcatttatatttgttaaacagtagtacaggcatctctatttcatctaaagcctacaaattttggttggaaggtcgatgctgtgcaagatcttcgtggaatactgatacgtattggcagattcaagtcactggaggtgcaatatactaagatccatgtcaagcctctaaagaaactttgggaagattttgatctaaaacagagagctaagcgggtagagatggagaagtatggtggagaaagcataaacagtctctcatttgctagctggcttccaaatttctatgatgagacactactttaccttgaacaagaatggaagtggtatgttcattgtaccctgttgtcttttgttctgaatcagcaatgtttgcccttgtaaacagaagccagtttttggcagcatcttttagctgcattcggacaatatttttgctccaccaaaaattaatggatgttctacaatgctaatgctgaaggtgcctgactgctttccctgaagaatacaaatcactagtcccaaaagtacttgttgaaaccatgagtgagttgaattcaagttttgtctctcgtgtcaacctagcaactggagatgctgttcctgaaactagatctgttgcaaaaggtaatgcataaacttctcgtattatttcatttttgtatgtctatactaatttcatgattgaattacatgttttatttttctctgttcaattaaaaaaggatattacttgtttgccacatatgcgtacttctttcgtaacaataaattgattttatgtcctctgtacccaggtatactagatgttttatcaggtgacttgccaaaaagtaccaaattgcagaataagcatcttggagcactgatcgacctgcacaacatgacgggcacttttgctcggaacatccaacatttattttcagagtcagatcttttagttctgctgaatacattgaaagctatttattccccatatgagacttttaaagcaaggtaaaaaaaaaacttgtgaaaaattctgttgcatgcagttaactgcattggtgagattttttttgttgctattgctgtagtactcagccagtggtgtttcatgctatgtaggtatgggcaaatggagcgtgctttactttctgctgagatggctggtatagatatccgtggggccattgctcgtggtgtgggtgcacagggtatagagctgagtgaaactgttcgtagaatggaggaatccatcccacaaattatagtgcttcttgaagcagctgtcgagagatgcattagtcttactggtggttcagaggcagatgaactggtattggctctagatgacattatgctgcagtacatatcaaacctacaagaaactttaaaatcccttaggattgtatgtggggtggataatactgcacatagtgattcctctaaaaaggaagcaggactagagaaaaaagaagcacaacgattggtcgatgtctctgaagaggaagaatggtctattgtccagggtgctttgcagattcttacagttgctgattgcctaactagcagaacctcagtttttgaagcttctttaagggctactcttgccaggattggaaccaacttttctatttctggttttggttctagcctagataaatcaactgcagcaaatggtgatgagaatgcagaagtgcctatcacagggagggcagcacttgatattgcagctattcgcctcaccgatctaccagacaagtctaagaagctcttcactgtactagaacaggcaagttatatatttttaaattatcttgctagtgtcacaacactagagttatcacatgtttctctgatttgtttgaacagcctgattgcaaacttaggtggtagtattaagctagattatctggttttataggaaattcggagatcttttttagctttccttttctattatgcatttttttaagctactcatatgtggcatagaacctattttttgacctataatttcccaagtatcacaagtaactctttgtttgtcttcatggctaatttaaagataacatttctgttatacagtcaaaagatccaaggttccatgctctacctctgacatcacaaagagttgcggccttctcagacacagtaaatgaactcgtctatgacgtgctcatatctaaagtccgacagcgtctcaatgaggttgctcgcctcccaatttggtcatcggtggaggaaccaggtggccttccccttccaagcttcagtgcctacccgcaggcatatgtgaccagtgttggggagtatctcctaactttaccccagcagttggagccacttgcagaaggtatctcaggcggtgaggctggcaacgaggaggctcagttctttgctactgaatggatatttaaggtaatatattcaaagcattttttttcatcatgctgtgtacattcgcaacataccatcgacaaaaccattcatacttcacactgcgactttcgcaaattccgtacagaagagttgaccatttagaactacatgcattgcaactgaatacaacattacataaaaccccaataatctgaccacaacataaacaccgaacccaaatcttttgatgaattaatctagaactgtctctgatctctgtttccatgatgaaccaggtcgcggaaggcgccaccgcgctgttcatggagcagctgcgagggatccattacatcaccgaccgaggcgcgcagcagctggcggcggacatagagtacctgagcaacgtcctctcggcgctgtccatgccgatcccacccttcctcgccaccttccacacctgcatctccaccccgagagaccaggtccgcgacctcatcaagtctgacggcggcagccagctcgacctccccaccgcccatctggtctgcaagatccggcgcatctcgtcatcagattagtgaaacacaaaggttgccttggtttgttcacgccctgtaacatcgtgtgcatccatccctccaccgttttcccacatcctgagcaaactgatcctgccgacgagtggttgacagtttgacatgtgcttgtaattctttaccattctgcatcttggctacagagttttgcctgtgtaatcgtattccttacagatagagaataatcattagtatatcatcatagaagaaaattctacactatgtgtaaattcgacgaggaaaaaaattcagtcggcaggtcgtgcaagggaaatggacggctctggctttgtttacccaataactaatgttggcagcaacttagtatgtcatattgccatgctctgaccagtgtgtcgccttcacatctccaggattccaagcagtccaatcttgcgtgagccgtgagtccagcagccacgacactacaagccatcggaggaaaaccccactggctacgaaaatggcacgcaaaaaatacgagccatttgccaatttcaccaggacggagagatatttcacttcgtctccatgggctttggcttccgtctaagtgggctcatctcttccttatcgacgctgtgggcacggaggcggccacgtcgcccccatccccctctcctcctcttcctccccaaatccccacgcaactgcgcaccggagagagagagaga

SEQ ID NO: 129 - DNA, 1179 bp, Zea mays
cccacgcgtccgcccactttcattgagagacgaacacgcgagtagagaatttctcctgcctgctcacgaccgccctctcgccggtcgccggtcgccgctcgcaacgcaagtcggaagaggaatctctccaagctccaatcctccgatcctgccccaacccaagtcccctccaccaggccgcacacctccgccgcccggcgcgaccttgcatccaccagcctgccctctccttcgcgtgaggcggccccggcgaccgcgtcggcagtgcaagaccagaccgaggcttctcccgttggaaggttccagccatggcgagcgccgatctgctgcggaaggaggaggagttctactcctccctctttgattccgcaaaaggcgacggcgtcaagtcgcgctcgcaggtgattgagaggaagattgaatccctcgaggacatggccaccaaggtcagcaaccggagatcaagaagatggttgaacgaccgcttgctgattgagcttgtcccacgccttcatgttgaagaaatcaaaggcctctttgctcctccaccatggggtgaggagctgcccttgtcagcattctgcaggacaagtgttagtgactgggaggccttcaggagcatcgacatggatgctgaggcaagattgatgcaacacatgaaacgatcatccgaaaaacaaaggactcatgtcgacgaagatgaattgattgctctgaatgcttggcgtcgtataggtcgccaaacaagagaagctattaagaaaaaatttctacctgatctacttcaaatatatgaagaacaggttagggccttcattgaaggtactggtgacagcgacgtgcttgtgctgaatgtccaggacccgttccagaggctgcttctgcacggtgtttgtgagttctataacgtaacctcaatgaccacaagcagtgtaagggacgggaagccatggaagagcaccaccatcaagaagaggcatgtcaccggtcttcctccgagaatcacattagttagcttcctgaggatgaggaagaattagtcgtcccagtaacatgtggatgtgagggtcctacactaattcgcctggatgtgtactaaaaagacaaatttgttgctttaggtcgcatctagcatgtaatcaaatgtaaaatatccatgtcaaatgtaaaatacattgc

SEQ ID NO: 130 - DNA, 939 bp, Zea mays
cccaaattcttgggtggacccacgcgtccgcccacgcgtccgaaaaaccctcgctccccacaacccgccgccgcccacgccgccgcctgtaccagcggcgtcaagatgagtcggcaccctgaagtgaagtgggctcagaggatcgacaaggtttacatcactgtacagttacctgatgccaaggacgctaaggtcaatttggaaccagatggtgtcttcacattctctggcagtgttggtacaaacttatatgaattgaaactagatctgaatgacaaagtaaacgttgaggctagcaaaataagtgtgggtgtcaggtccatattctgtattgtagaaaaagctgaggccaaatggtggaagaaacttgttcgagatgatcaaagggcacctcactttgtgaaagttgattgggacaaatgggttgacgaagatgatgatggtgctgatgtcaacttggatgggatggacttttcgaattttggcggcatgggtggtatgggtggcatgggtggtatgggtgatatggctggcttgggtggtcttggtggcatgggtggaatgggcggtatgggtggtatgggaatggatgattttgaggatgatagtgatgaagaagaagtgtcgaaacctcaagctgccggacatgctgctgaggccgagaagactgagtcggcggaagccaagactgagtcggctcagagcagttgaagatgctttcgacatgatctaaactagttgtatcgtcaagttaattctgctgaatcgatggacaaacttctacgttgttggcactggccgatcccagtgacttgccctaaaatttacgttctgtctttacatgggcatcctagtgttgtgctcatcacattattgatattgtttctgtgatgcttcctttggtcgacaatcatgtgctggagtttggtttaaaaaaaa

SEQ ID NO: 131 - DNA, 2019 bp, Zea mays
ctctctctcgaaccttcttccaaagcacccgaaccctagtgatctcggaaccctagccgcgcgcggatctcggcttttccccttcctccacgccagccatggacgaggacttcgagatgcctcccgccggcgccgatgagatgatgggcgacgacgagatgggcgacttcggcggcgacgagggcccggtgatgaaggtgggcgaggagaaggaggtcggcaaggaggggctcaagaagaagctgctcaaggagggcgagggctgggagactcccgaggtcggcgacgaggttgaagtgcattacacgggcacgctccttgatgggacaaaattcgactcaagccgtgatcgtggagaacccttcaagttcaagcttggacaaggtcaagtgataaagggttgggatcaaggaatcaagaccatgaagaaaggagaaaatgctatttttaccattcctccagagctggcttatggagcatctggttcacctccaactatcccacccaatgcaaccctgcagtttgatgttgagctgctttcatggaccagtgtcaaagacatttgcaaagatggcggcatattcaagaagatccttaaagagggagagaaatgggagaacccaaaggatcctgatgaagtacttgtgaaatatgaggcccgtctggaagatggtactgttgtatccaagtctgagggggttgagtttactgtgaaagatggctacttttgtcctgccctggccaaagctgtcaaaaccatgaaaaaggcagagaaggtgctccttacagtaaagccacaatatggatttggtgagaagggtagaccagcagctggagaggaaggtgctgtgccgccaaatgcttcgctgctcattgaccttgagttgatttcatggaagactgtcacagaaattggggatgataagaaaatccttaagaaggttctcaaggagggagaaggttatgagcgtcccaacgagggtgctgttgttgaagtcaaaattatcggaaagcttcaggatggcgcggtgtttacaaagaaggggcatgacgaagagccatttaaattcaagaccgatgaagaggaagttattgccggtcttgatcgtgctgtgttgaacatgaagaagggcgaggttgctcttgtcacaattcctcctgaatatgcatttggttcaactgagtcaaagcaggatcttgctgttgttccacctaacagcacagtaatatatgaagttgagcttatttcatttgtgaaggacaaggagtcgtgggacttgaacaatgaagagaagattgaggctgctggtaagaagaaagaggaagggaatgcattgttcaaatcgggcaaatatgctagagcttccaagcgatatgagaaggctgccaagtacattgagtacgacacttcgttcagtgaagatgagaagaagcaatccaagcaactgaagatcagctgcaacctaaacaatgctgcctgcaaactgaagttgaaggattacaaggaagctgcgaagctttgcaccaaggttctggaactagacagccaaaatgtcaaggctctctacaggagggtgcaagcttacattcaacttgctgacctagagctagcagaggccgatatcaaaaaggcactggaaatcgatcctgacaacagggatgtcaagttggaatataagatcctgaaggagaagatcaaggagtacaacaagaaggacgccaaattctacagcaacatgttcgccaagatgacaaagtagcttttggggtggaggatgttgtggtgaagcgaagggattaaaaacaccgatttctgctgccgaaggacttcgcccgttgcttaacttctcgcttttcgcatactttgtagtcaattagtgtgcacggatgcttggatatgtgaaactgaggaacatgtacttcgaggattattattggttctgaatttttatgttttctggttcttgttaggaccgttgaatgttctctctatataattttcggacacatgttcttaat

SEQ ID NO: 132 - DNA, 2280 bp, Saccharomyces cerevisiae
aatattctatgtctggcaacttctgatgatactttcaagacaaacgccgcaattgaccaaactattgaactaaacgcaagttcaatatacataatatttgactatgagaactgatatcttcgtgaagattcgtgtagtatgatagaacattccagaaaaaaaattcagattcatcgctctctcttcgcttctcctcctttaaggaataaagaaaaaatcacatacatagattaagtaaataggatctgctagaaaaattatatatagatcaatcatcttattaaggtatcttgtttaagcccaaaagtctgctcccaaattcctcactgtagctactaaaacaacctatacgcaagaaagatgtcattgacagccgatgaatacaaacaacaaggtaacgctgcatttaccgctaaggattacgataaagcgatagagctcttcactaaagctattgaagtttctgaaactccaaaccatgttttatattctaacaggtccgcctgttatacttctttaaagaaatttagtgacgcattgaatgatgctaatgaatgtgtcaaaatcaatccatcttggtctaagggttataatagactcggtgccgcccacttaggtcttggcgatctcgacgaagctgaaagcaactacaaaaaagccttggagttggatgccagtaacaaggccgccaaagaaggattggatcaggttcatcgtacccaacaggcaagacaggcacagcctgatttagggttgacacagttgtttgctgacccaaatttaattgaaaatttaaagaagaacccaaaaactagcgaaatgatgaaggaccctcaattagtggctaaactgattgggtacaaacaaaatccgcaagctattggccaagatctgtttactgatccaagattaatgaccatcatggctacattgatgggggttgatttaaacatggatgatataaaccaatcaaactccatgccaaaggaaccggaaaccagtaaaagcactgaacaaaagaaagatgctgaaccacaaagcgattccactacgagcaaggaaaattcctctaaagcaccacagaaagaagaaagtaaggaatccgagccaatggaagttgatgaagatgactctaaaattgaggccgacaaggaaaaggccgaaggtaacaagttttacaaggcacgtcaattcgatgaagctatagagcactacaacaaggcgtgggaactgcataaagatattacctatttaaacaaccgtgctgctgctgaatacgaaaaaggcgaatacgagacagctatttctaccttgaatgatgctgttgagcaaggtagagaaatgagagcggattacaaggtcatttccaaatcatttgcgcgtattggtaatgcctatcacaaattgggtgacttgaagaaaactatagaatactaccaaaaatcattgaccgaacatcgtactgctgacattttgaccaagttaaggaatgctgaaaaagaattgaagaaagctgaggcggaggcgtatgttaaccctgaaaaggcggaggaagcccgtcttgaaggtaaggaatattttaccaagagtgattggccgaatgctgttaaggcttacactgaaatgatcaaaagggcacctgaagatgctagaggatattctaatagagctgctgcactagcgaagttaatgtctttccctgaagctatcgcagattgtaacaaagccattgaaaaagatccaaatttcgtgagagcttatatcagaaaggccaccgcacaaattgctgttaaagaatatgcttccgctttggaaacactagatgcggccagaaccaaagatgctgaagtgaataatggttctagtgcaagggaaattgatcaactgtactacaaggcaagccaacaaagattccaacctggtaccagtaacgaaaccccagaagaaacctatcaaagggccatgaaagatcctgaagtggctgcgatcatgcaagatcctgttatgcaaagtattttgcagcaggcccaacagaatcccgctgctttacaagaacacatgaaaaatccagaagtattcaaaaagattcagacgttgatcgctgctggtatcatccggactggccgctaaaaataatacgaaatataactttattatcttgaattctttttttactgctttttcatacatacgtacatataatgatcttctcacttagtatactaaatttgtttcatgctatggttgatatttgagaaatcggaacttgaagataataag

SEQ ID NO: 133 - DNA, 2097 bp, Saccharomyces cerevisiae
tgtcttagcttattagtaatatccacctgcgcacaaattttgtaaatcccctactaatttaatttgaattcaaattggctcgtgatctgttgacccttgttagcaacgtttgtaatcttcctcaccgaattgcgtcgttttgaataatatatatgattgaaaatttttcaagagaaaagaaaaatttttccttccgcggtcagccattgctaaaaaaaggcctccgttaggagtcgaatagaggacaacaacaatacattgccactttaattttaaatgcttgcatattaactagcgatcagatgctctgctctatataaaataaattattgatacggtttctagtctcggttgatgataagagtacgttaatccacctaccgagcattaccaagatatctggcactttatatgtagagagtctgtgttctcaagtttacttgtgcggataatgagcttaaagacttaaatactaaaagcgtatgcgttcgtatctctgtttaggcaccttgtacagtttcacagaaaactgtgtaatgtgtgattatagtacacagaacaaaataacttcacctcatctctttcttaacgcagtgaggaaaaaggtggaaaaaaaagaaagaaaaaaagaatatgtgtaatttccggcacttttcagagcgatgagcttaaattcaaaagcagcattgaattaaaagtgaggtcttgagcactacattctagcaagtaaaagaaaagaataaattggttttgcatctagaatgagctccgttaacgcaaatggaggatataccaaaccacaaaaatatgtgccagggccaggtgatcctgaacttccaccccaactatccgaatttaaagataaaacatcggatgaaatcttgaaagaaatgaacagaatgccttttttcatgaccaagttggatgaaacagacggtgcaggtggtgaaaacgtggagttagaagctttaaaggcattagcttatgaaggcgaaccacacgaaatcgctgaaaatttcaagaagcaaggtaacgaactatacaaagcaaaaagattcaaggatgcaagggaactttactcaaagggcttggctgtagaatgcgaagataaatcaataaatgagtcactatatgccaatagagcggcatgtgagttagagctgaaaaattacaggaggtgtatcgaggactgcagtaaagctctaactattaaccccaagaatgttaagtgctactatcgtacaagcaaggcttttttccaattaaacaagttggaggaggccaaatcagccgcaacatttgccaatcaaaggattgacccagagaacaaatcaattttgaatatgttatcagtgattgatagaaaagaacaagaattgaaagcaaaagaagaaaaacagcaaagagaagctcaggaacgtgaaaacaagaaaattatgttagagagcgcaatgacgctgagaaacataactaacatcaaaactcactctccagtagagttacttaatgagggtaaaataaggctagaagacccaatggattttgaatctcaattgatctatcccgcattaattatgtaccccacgcaagatgaatttgattttgtaggtgaagtaagtgagttaactactgtgcaagaacttgttgacctagttttggaagggccgcaagaacgcttcaaaaaagaaggtaaggaaaacttcacaccaaagaaagtgttggtgttcatggaaacaaaggcaggtggtttgattaaagctggtaagaaactgacatttcacgatatcttgaagaaagagtcgccagatgtaccattgttcgataacgctttgaaaatatatattgtgccaaaggtagaaagtgaagggtggatttccaagtgggataagcaaaaagccttagaaagaagatctgtgtgaagtgtcaaatagttaaaaatatgtaacgcaaagttgtagatagaaataacaaagcaagaaggaaaagtaaagaaagtgaacgatatacgtaatgcagggggaataccagagtatttaaagtgtacttgatttaatgttaaccagtttgaatttttcttttctggggtaatcgaattca

SEQ ID NO: 134 - DNA, 949 bp, Zea mays
cgctgcaagcaacaaagttctactctgtccacccgtccatctagctctcaagaaccaacccgtaccagcgctatccggccggccatggcggcggcgcgccggctctccctgcccctcgtcctgctggtcgtcctggccgtcgccgggcgcgcggcggcgcaggactacgacttcttctacctcgtgctgcagtggccgggggcctactgcgacaccaagcagagctgctgctaccccaagtccggcaagccggcggcggacttcgggatccacggcctctggcccaaccgcgacgacggcacgtacccgcagaactgcagccccgacaacgccttcaacccgtcgaaggtgagcgacctaatgagcagcctccgcgccaagtggccgacgctggcgtgcccgtccaacgacgggctgcgcttctggggccacgagtgggagaagcacggcacctgcgcagccgacgtcttcgacgagcacggctacttccaggccgcgctgcgcctccgcgaccagctgggagtcctcggcgcgctcacctccgccggcgtcaagcccgacggcggctactacacgctgagccagatcaagggcgccatccgccagggcaccggcttcgagccctacgtggagtgcaaccgcgacgaggccggcaacagccagctctaccagctctacttctgcgtcgacgccgccggcgacagcttcgtcgactgccccgtcctccccagcggcaggccctgtggcaaccggatcgagttcccggctttctaagctaactcactcttcacgtcagttgctgcaatatactgctagtccttttgcttgcattctatgcaagaggataatggaatgttcattccccattcttcattttttttgcaaataaaaggagggcgatcggtgttccatatttattatgttgatcataacatgacattcagagaac

SEQ ID NO: 135 - DNA, 3010 bp, Zea mays
catctgcctgccccccctcggccgccggcggcggcgatcgcgggtagccgccccaaccggccgaggttgcatagaggtgctggtatcttactctgcttctggttatgctatctgcctatgacttcagcttcccaaacttctccctgcttcttgcccctggttggtaaaaatctgtaacaactgctgccctgactgcaaaagacgcaactatgcgtctttcttcttctcttcaagatttgccgaccttcaccagaattgatgctttggaaaggggttctagcgtaggcagtgatctgagctcagggcgcccaaaacctgtccgcatgcttcaaagagatggtgccgtcgcaagcttttcaaaagaaagaacacccccctcatcgccgacaaatagaaagaaatgcatgagagcagccgggtgtgctattgcattgatcttactggtgttctttgcgtatggttcatggagatattttcatgtgttcctctctgaaggaagatctgaatactatgttgttcttgattgtggcagcactggtacgagagtttatgtctatgaatggcatattaatcataatgacgcaaatgcatttcctattgttttgaaacctttagggaatgctcccaagaagaaatctggtaaattaacccgactatatcagcgaatggagacagaacctggattgagcaagctcgttcacaatgaatctggattgaagaaggcaatagagccccttcttcagatggctgagaaattgatccctagacatgcacacaagcacactccactttttctatatgctactgctggtgttcgcaagctacctagtgcagattcagagtggctcctggataagtcctgggatatcctgaacaattcatcatttttatgtagtagagatagagttaagatcattagtggcatggatgaagcttattatggatggatagctcttaaccacaacatggatatgcttggcacctcatcatctaaaatgacatatggttcacttgatttagggggatcatcattacaggttacatttgagaatgataaatcagtgcaggatgagacaagcattcgtctgagtattggttcagttgaacatcacctcagtgcttattctcttactggttatgggttaaatgatgcatttgataaatctgtagcacatctagtgaaaagactgggaggagttgctagcaatggcaaggttcaagtcaaacatccctgtctacagactggattcaaggaagattatatttgttcttactgccatccattgaaacaagatggaagtcccagtgtcggcgagaagaacagtggcaaagagaagcagggaatagctgttgaactggtcggagcacctcagtggaatgaatgtagtgctcttgcaaaagtaacagtcaatctttctgagtggtccagtgcaagtccagggcttgattgtaacatccatccttgtgctcttgcctctaactttccccgaccatatgggcagtttttcgctatctctggcttctatgtggtttttaaattttttaatttgactgctgatgcgactctaggtgatgttcaaaaaagaggtcaggaattttgtgaaaaaccatggaaagttgcaaagagtagtgttcctccacagccttttgtagaacaatattgcttcagagctccttatatttcatcactactgagagagggattgcagattaaagatagtcaggtgataattggctctggcagtattacttggactcatggagttgctttgctggaggctggtcaagcattgtcttcacgactagatattcaaggataccgaatactgcacagggagataaatccaaatattctcatagtactgtttctgatttcaattgtgttggtcatatgtgccatactatgcgtcagcaattcgataccaagatcattccgcaagtcttatctgccaattcataggcataattctggaggcagttctgttcttggtatgggattgcctttcaaacatttattatggaatcccattagttcaggtgatggtagaacaaagacaccactgagccctactgttgctgggtcagatcctcatccatttgcaggactaggaggcagcagtgtcgagcttatggagtcctcgaggcaatccttgggtgcctatcacagctattctgttgggagcttaggtcagatgcagttttctagcggggtgaggaaccctagccgaggtcagactacacttcaaagtcggaggtcgcaatcaagagaggatctcagttcttcacttgctgatattcattttccaaaagtgtagcactgcatcaaggaatgactagaatgagatccttacatgccataacaaactctgtaaataatagctccagagttcgaactgcttgatttcttctctaatcagaagtcaattttgtctgtccgcttacacttcaatgaggtttaggattcatataaatgaacttatgacttgtgcctatcctggacatgatacatccattcatcccattgtatgtgctcaagaacataccatagcagtgaagttctggtagtgtactggaagatatatttatgccgttcaccagactggttgaccatggctacagcctacaactttatagatcgattgtgctgcaatcagggatgttatttttttgtatctgagacataataaaggtgcatgtggtctcatgtactgttgtaccctctaggctctagtggctctgtgaggttactcttctttcctggaataccttttgataggctactctgtggtatcaactgaaatcatgaaacactgacatcagttctactggattatctagttgcgtactgtgtatacacatctattgagttttttttgttggcatagtatctactttgatgacactgaaaatcagtataggaacatttgggccaatgtttttcctcgttgagctgagtttgatctgtattgcacatttgcttgtggatcaaaaaaaaaaaaaaaaaaaaaaa

SEQ ID NO: 136 - DNA, 1404 bp, Saccharomyces cerevisiae
atgtttaaatctgttgtttattcaattttagccgcttctttggccaatgcaggtaccattcccttaggcaaactagccgatgtcgacaagattggtacccaaaaagatatcttcccatttttgggtggtgccggaccatactactctttccctggcgactatggtatttctcgtgatttgcctgaaggttgtgaaatgaagcaactgcaaatggttggtagacatggtgaaagataccctactgtcagtctggctaagactatcaagagtacatggtataagttgagcaattacactcgtcaattcaacggctcattgtcattcttgaacgatgattacgagtttttcatccgtgatgacgatgatttggaaatggaaaccacttttgccaactcggacgatgttttgaacccatacactggtgaaatgaacgccaagagacatgctcgtgacttcttggctcaatacggttacatggtcgaaaaccaaaccagtttcgccgtttttacctctaattctaagagatgtcatgacactgctcaatatttcattgatggtttaggtgaccaattcaacatcaccttgcagactgtcagtgaagctgaatccgctggtgccaacactttgagtgcttgtaactcatgtcctgcttgggactacgatgccaatgatgacattgtaaatgaatacgacacaacctacttggatgacattgccaagagattgaacaaggaaaacaagggtttgaacttgacctcaactgacgctagtactttattctcgtggtgtgcatttgaagtgaacgctaaaggttacagtgatgtctgtgatattttcaccaaggatgaattagtccattactcctactaccaagacttgcacacttattaccatgagggtccaggttacgacattatcaagtctgtcggttccaacttgttcaatgcctcagtcaaattattaaagcaaagtgagattcaagaccaaaaggtttggttgagttttacccacgataccgatatcctaaactttttgaccaccgctggtataattgacgacaaaaacaacttaactgccgaatacgttccattcatgggcaacactttccacagatcctggtacgttcctcaaggtgctcgtgtctacaccgaaaaattccaatgttctaacgacacctacgtcagatacgtcattaacgatgctgttgttccaattgaaacctgttccactggtccagggttctcttgtgaaatcaatgacttctacgactatgctgaaaagagagtagccggtactgacttcctaaaggtctgtaacgtcagcagcgtcagtaactctactgaattgaccttctactgggactggaacactactcattacaacgccagtctattgagacaatag

SEQ ID NO: 137 - DNA, 1995 bp, Glycine max
cacttgttcaattactccttcaaatcagtctggcttgacaagcaggaaaggtatttattgctctctacttaggtaacataagccaacaattttagtagtaattaatggctggagaattgggagttttgaatgcacttgatgtggcaaagacacaatggtaccacttcactgctattgtgatcgctggaatgggtttcttcaccgatgcctatgacctcttctgcatttccctagtcaccaagcttctagggaggctatattacacagaaccaggtgcaccaaagccaggttcacttcctccaagagttcaagcttctgtgactggtgtagcactatgtggcacattagccggccaactattctttggttggcttggtgacaaaatggggagaaaaagagtctatggactaacactcattctcatggtagtgtgctcccttgcctcaggactctcctttgggtcaactccagagggtgtcatggcctcactttgcttcttcaggttctggctagggtttgggattggtggtgactaccctctttctgccacaatcatgtctgaatatgccaacaagaagacgcgtggcgcgttcatagccgcggtgtttgcaatgcaaggattcggaatcctggctggtggagtggtggcattgattgtttcatatgcatatgaccaaaagtacaagcttcctagttatgaacagaatccagaagcatccttggaccccgcatttgactatgtttggagaatagttttgatgtttggtgcagttcctgctgcactcacctactactggcgcatgaagatgccagagacagcacgttacactgcccttgtggccaagaatgcaaaacaagctgctgcagacatgtctaaggtgttgcaagtggaacttgaagctgaagaggagaaggtgaagaaattgacagagaatgagagcaacaagtatggtttgttcaccaaggaatttgtgaaacgccatggcctgcatttgttgggaaccaccaccacttggttcttgttggacatagcattctacagccaaaaccttttccagaaggacattttcagtgcaattgggtggatccctccagcaaaggaaatgaatgcaatccacgaggtgtataagattgcaagagcacaaacactcatagcactatgcagtactgtgccaggttactggttcacagtggcattaattgattacatgggccgttttgccatccaattgttggggttcttcttcatgactgtgttcatgtttgctttggctataccatatgatcattggtctgagaaagaaaacagaattgggtttgtggtgatgtactctttcacctttttctttgccaattttggtccaaattccaccacatttgttgtgccagcagagattttccctgcaaggctaaggtccacttgccatggaatctctgctgctgcaggaaaggctggtgcaattgtgggtgcatttgggttcctatatgctgcacaaagcaaggacccttccaagactgatgcagggtaccctactggtattggaattaagaactcactcattatgcttggtgtgatcaacttcattgggatgttgttcaccttgcttgttccagaatcaaagggaaaatcactggaggagttgagtggggagaatggtgaaaatgatgctgaacatgcagtgtctgctaggacagttcctgtttgattgaagttaagtttgtgttcaacaatgtggttcaacttcaaattgtgatatgtgtacattttaatactgggttttggttgtgacgtgtttacaccaatgatgtagtagttgcacggttcagggtgctagagcttaaaaataattacagtttgtttgcttttggttcttacttttgtttttttttttgtttaaaatagatacctggtaattttacttttgattatttgtaaagttttattgttttgttatttaatcacaatttatgattaatttattgtcttttaaaaaa

SEQ ID NO: 138 - DNA, 1947 bp, Zea mays
cccacgcgtccggcttcaacaagctaggcagctgcaagcatctcccaaatcccagcctgctgccccgcgcgaacacacttctcttgtcgttgcattgcagggcagctagccggctacagcatccgccatggcgcgcggcggggacggcctgcaggtgctcagcgcgctggacgcggcgaagacgcagtggtaccacttcacggccatcatcgtcgccggcatgggcttcttcacggacgcctacgacctcttctgcatctccctcgtcaccaagctgctggggcgcatctactacacggacaccagcaaggacaacccgggctcgctcccgcccaacgtcgccgcggcggtcaacggcgtcgccttctgcggcacgctggccggccagctcttcttcggctggctcggggacaagctcgggcgcaagagcgtgtacgggatgacgctcatgctcatggtcatctgctccgtcgcgtcgggcctctcgttcggccacacgcccacgggggtcatggccacgctctgcttcttccgcttctggctcgggttcggcatcggcggggactacccgctgtcggcgaccatcatgtccgagtacgccaacaagaagacccgcggcgccttcatcgcggccgtcctcgccatgcagggcttcggcatcctcgccggcggcattgtcacgctcgtcatctccgccgccttccgcgcggggtacccggccccggcgtacagggacgaccacttcaactccaccgtgccgcaggccgactacgtgtggcgcatcatcctcatcctgggcgccgcgccggcgatgctcacctactactggcggatgaagatgcccgagacggcgcgctacaccgcgctcgtggccaagaacgccaagcaggccgcggccgacatgtccagggtgctccagacggagatcgtcgacgagcaggagaagctggacgagatggtcaccgccgagagcaacaccttcggcctcttctccagggagttcgcgcgccgccacgggctccacctcgtcggcacctccaccacgtggttcctgctcgacatcgccttctacagccagaacctgttccagaaggacatcttcaccagcatcaactggatccccaaggccaacaccatgagcgcgctggaggaggtgttccgcatctcccgcgcccagacgctcatcgcgctctgcggcaccgtcccgggctactggttcaccgtcgcgctcatcgacgtcgtcggccgcttcgccatccagctgctcggcttcttcatgatgaccgtcttcatgctcggcctcgccatcccctaccaccactggaccacgcccggcaaccacatcggcttcgtcgtcatgtacgccttcaccttcttcttcgcaaacttcggccccaacagcaccaccttcatcgtgccggccgagatcttcccggcgcggctgcggtccacatgccacggcatctccgccgcctcggggaaggccggcgccatcatcggggcctttgggttcctgtacgcggcgcagaaccaggacaagagcaaggcggacgccgggtaccccgcgggcatcggcgtgcgcaattcgctcttcgtcctcgctgcctccaacttgcttggctttatcctcaccttcctcgtgccggagtccaagggtaagtcgctcgaggagatgtccggggaggctgacgacgccgaggacgacgccgtcggcacccgcgcggtgcggccgtcggggacccagatggtgtagaatcgaacatggcgacgcgtgcacacgggtcctccatcctggggcccgactgggaagacaaggcgcgccggttcaagcctgccgatgctttgctgtgcagaagtagttcgtacaggtgcatgtgtgttataggcgggaaagtaagtgaacttacatgcttgtatttattatatccaaccttacgtacaaaaaaa

SEQ ID NO: 139 - DNA, 1701 bp, Xylella fastidiosa
taagtttaaaaagcgttacgcacgttaagttgcctatttttttatgtattttgcgattcacgcagattgcgtgagcgctttaaggataacccaagaggcggatctataagcgcttaactattaaggtggtttcctttgcatacatctttttttgtggatgtctgtaatagcttaagcgcattattctttgatacctaacaaccgcccttacggtttgccgtttgggcgtctttccattgttaaggagcccacgctatgtccgatcttgataaggtcacgctcaatgccggtgagacttctctcgttttaccggttttgaaacccacgttaggtaatggttgcgttgatattgccaagttgacaaaggaaaccgggctgtttacttacgactctggttttacggcaactgcaagctgtaagtctgccatcacttacattgatggtgaaaagggtgtgttgttgtaccgcggctatccgattgagcagttagctgagcactccagttttttggaggtcgcttatttgttgatgaacggtgagttgccgagaaaagacgagtttgccaagtttgatgatgaaatcacgcatcacacgatgatgcatgagtcgttgaagaactttcttggcggttttcattatgatgcacatccaatggctatgttggctgcttcggtggcttcgctgtcggcgttctaccacgatacccttgatttgaacgatcttgagcaacgtcgcttagctgcaattcgtttgatcgctaaggtgccgacgcttgcagcagcagcgcatcgctactcgattggctggccgatccgctatccacgaaacaatcttggttatgtcgagcgctttttgcatatgatgttcgaagtgcctagtgaaccgctgcagttgaatccagttgtgaccaaagctctggatttactgtttattttgcatgctgatcatgagcagaacgcttcgacatcaacagtccgcttggtgggttcgactggtgctaatccttatgcatcggttgccgcgggtatcaccgcgttgtggggaccggcacacggtggcgctaatgaggccgtgttaaagatgttggaggagattggtgatgctaagaatgttgacttggttattgcaaaagcaaaaactaaggacaaaaactctccattccgtttgatgggtttcggccatcgtgtctataaacattttgatccgcgtgcgaaaatcatccgtgagatggcacacacagttcttggtgagttaggtgtgaacgatccgctactggaagtggcattaaagttggaagaggcagcgctgaaagatgattactttgtgcagcgtaagttgtaccctaacgttgatttttattcgggcatcatctacaaagccatcaacattcctttggaaatgtttacagtgatgtttgccatcgcgcgtaccgcagggtgggtttctcattggcttgagcagcaagtcgacccggagatgaaaatcagcaggccacgccaaatttacacaggtcatggcgagcgtgactacaaagatgctaggtaaagagtaaagagactcttatatcttccaatgtgcttctcagatgaaggagctattgtggatgcctgacgagatcgcgggtaataacccgaatgaccgaccaggaacagcgcctcaaacaacgtgaggtgctgacaatgtatagatggaccaactcat

SEQ ID NO: 140 - DNA, 1701 bp, Escherichia coli
taaaagttatgaagtcggtatttcacctaagattaacttatgtaacagtgtggaagtattgaccaattcattcgggacagttattagtggtagacaagtttaataattcggattgctaagtacttgattcgccatttattcgtcatcaatggatcctttacctgcaagcgcccagagctctgtacccaggttttcccctctttcacagagcggcgagccaaataaaaaacgggtaaagccaggttgatgtgcgaaggcaaatttaagttccggcagtcttacgcaataaggcgctaaggagaccttaaatggctgatacaaaagcaaaactcaccctcaacggggatacagctgttgaactggatgtgctgaaaggcacgctgggtcaagatgttattgatatccgtactctcggttcaaaaggtgtgttcacctttgacccaggcttcacttcaaccgcatcctgcgaatctaaaattacttttattgatggtgatgaaggtattttgctgcaccgcggtttcccgatcgatcagctggcgaccgattctaactacctggaagtttgttacatcctgctgaatggtgaaaaaccgactcaggaacagtatgacgaatttaaaactacggtgacccgtcataccatgatccacgagcagattacccgtctgttccatgctttccgtcgcgactcgcatccaatggcagtcatgtgtggtattaccggcgcgctggcggcgttctatcacgactcgctggatgttaacaatcctcgtcaccgtgaaattgccgcgttccgcctgctgtcgaaaatgccgaccatggccgcgatgtgttacaagtattccattggtcagccatttgtttacccgcgcaacgatctctcctacgccggtaacttcctgaatatgatgttctccacgccgtgcgaaccgtatgaagttaatccgattctggaacgtgctatggaccgtattctgatcctgcacgctgaccatgaacagaacgcctctacctccaccgtgcgtaccgctggctcttcgggtgcgaacccgtttgcctgtatcgcagcaggtattgcttcactgtggggacctgcgcacggcggtgctaacgaagcggcgctgaaaatgctggaagaaatcagctccgttaaacacattccggaatttgttcgtcgtgcgaaagacaaaaatgattctttccgcctgatgggcttcggtcaccgcgtgtacaaaaattacgacccgcgcgccaccgtaatgcgtgaaacctgccatgaagtgctgaaagagctgggcacgaaggatgacctgctggaagtggctatggagctggaaaacatcgcgctgaacgacccgtactttatcgagaagaaactgtacccgaacgtcgatttctactctggtatcatcctgaaagcgatgggtattccgtcttccatgttcaccgtcattttcgcaatggcacgtaccgttggctggatcgcccactggagcgaaatgcacagtgacggtatgaagattgcccgtccgcgtcagctgtatacaggatatgaaaaacgcgactttaaaagcgatatcaagcgttaatggttgattgctaagttgtaaatattttaacccgccgttcatatggcgggttgatttttatatgcctaaacacaaaaaattgtaaaaataaaatccattaacagaccta

SEQ ID NO: 141 - DNA, 1523 bp, Oryza sativa
gaacaatcgctctctctctctctccctccccgattcgattcaattcgcgacgcctccgtgaaattctccaaagccagcttgccctgtagccgcgtgctccggccatggcgttcttcaggggcctgaccgcggtgtcgaggcttcgatcccgcgtggcacaggaggccaccacgcttggtggtgtgcgatggctgcagatgcagagcgcatctgatcttgatctcaagtcccagctgcaggaattgattcctgaacaacaggaccgcttaaagaaacttaaatcggagcatggaaaggtccaacttggaaatataacagtcgatatggtccttggtgggatgagagggatgactggaatgctttgggaaacatcattgcttgacccggatgagggtattcgttttaggggtctctcgattccagagtgccagaaagtgctgccgacagcagttaaagatggggagcctttgcctgagggtctactttggcttcttttgaccggaaaggtgccaaccaaagagcaagttgatgctctatcaaaggaattggctagtcgttcgagtgttccaggtcatgtgtataaggcaatcgatgctctccctgtaactgctcatccgatgacccagtttaccacaggagtgatggcacttcaggtggagagtgagtttcaaaaagcctatgacaaaggaatgtcaaaatcaaagttctgggagcctacctatgaagattgcttaaatttgatagctcgccttccagcagtggcttcatatgtttaccggaggatattcaagggagggaaaactatagcagctgataatgcactggattatgcagcaaatttttcacacatgcttgggtttgatgatcccaaaatgcttgagttgatgcgactatatataacaatccacactgatcatgaaggtggaaacgtcagtgctcatactggacatctggttggaagtgctctgtcagacccttatctttcttttgcagctgcactgaatggtttagctggaccgttgcacggcctggctaatcaggaagtgttgttgtggatcaaatctgtaataggtgagactggtagtgacgttacaactgatcaactcaaagagtatgtgtggaagacactaaaaagtggaaaggttgttcctggctttggtcatggagttctacgtaagaccgatccacggtatacatgtcagagggagtttgctttgaagtacttgcctgaggatccacttttccaactggtctccaagttgtatgaagttgtgcctcctatcctcactgagcttggcaaggtcaaaaacccatggcctaatgttgatgctcacagcggagttctactgaaccactttggattatctgaagctcggtattacactgttcttttcggagtttcaaggagcattggaataggatctcagctcatttgggaccgtgctcttggcctgccgctcgaaagaccgaagagtgtcaccatggagtggctggagaaccactgcaagaaggttgctgcttga

SEQ ID NO: 142 - DNA, 1813 bp, Zea mays
ctgcatttgcttggctgctgctcccttctcccaccgaccaactcgatcccgcgccatggatcgcgccgaccccgcgcggggccgccttgccgtgctctcctcccacctccgtggtgcaggggccgaggaggcggcggggctggagaggtcgccggtatccgcgccggcgcccgggccccgcgccggcgcgcttgccgtggtggacgggaggaccgggaagcggcacgaggtcaaggtctccgaagacggcaccgtgcgcgccaccgacttcaagaagattaccactggaaaggacgacaagggtcttaagatttatgatcctggttaccttaacactgcccctgttcgctcgtccatctgctacatcgatggagatgagggaatccttcgctataggggttatccaatcgaagaattggctgaaagcagctcgtttgttgaggtggcctaccttttaatgtatgggaacttgcctactcagagtcaattggcaggctgggaatttgctatttctcagcattctgctgttccccaaggactgttggatatcatacaatcaatgccccatgatgctcaccccatgggtgttcttgccagtgcaatgagcaccctttctgtctttcatccagatgcaaaccctgctctacaaggtcaagatctttataaatcgaagcaggtgagggataaacaaattgtgcgagtacttgggaaggcaccaacaatagcagctgctgcctacttgagattagcaggaagacctcccgtccttcctttaaatactctatcttattcagagaacttcttgtacatgctggactctttgggtgacagaacatataaaccaaatcctcgacttgctcgagctctagatattctttttattctgcatgctgaacatgaaatgaactgctccactgctgctgttaggcaccttgcttcaagtggtgtggatgtatttactgctctttctggtggtgttggagctctatatggtcctctgcatggcggcgcaaacgaggcagtacttaaaatgttaaatgagattggaagcatggaaaatattccagatttcattgtaggagtgaagaacaggaagaggaagatgtccggttttgggcaccgtgtgtataaaaactatgaccctcgtgctaaagtcataaggaaattggcagatgaggtgttctcaattgttggacgggatccacttattgaggtggccattgccctagaaaaggcagccctgtcagacgaatattttatcaagaggaagctgtatccaaatgtggatttctactctgggctaatttatagggcaatgggattccctacagaattttttcctgtgctgtttgctattcctcgcatgggtggctggctagcgcattggaaagagtcactcgatgatcctgacactaagattataaggccccaacaggtatacaccggcttctggcttaggcactatacccccgtcagagaacgagtgctatcaagccagagtgaggaacttggtcaggttgccacctcaaacgcaactaggcgccgccgtgctggttctgccctgtagaagctgcagcgtataaacgcaccggcatactcaataaacatcgaccacttttgtgcttgaaaaggccacaaatgctttttagcttggttggagttgtaggccttttgttgtcgagtatataggcaataatgcagtgagaacaccacaccgttacaatgtaaaactgtcacgaggcatcacttgctggtgtacaccccttgcgttctctatgacttaatcacttaacttcccaaaagatgaaaaaaa

SEQ ID NO: 143 - DNA, 1854 bp, Glycine max
aacaatttcgcttttcccttcaaacttccaagttccaattcaactctgatccttaaattcatttgcatattcagtcctttgaattattccactttcttcaaatcattccaattccacaaccaacgaagaagcatcatcaacacaacacaacaatgtcaaaaacaacaacttcttccgaacaaactgcacgaaaccgtttggccaccctcgcagctcacttgcttccctccgacgccacctccgccgccgcgatcctccacccccaccggctctccgcccccaccggagacttgccgccggcgaacctgaagggcacccttaccgtcgtcgacgagaggaccggcaagaagtaccagatcgaagtcaccccagatggcaccgtcagagcctctgacttcaagaagatatcatctgggaaaaatgacaagggactcaaactttatgatcctggctatttgaacactgctcctgtcatctcaaggatttcttacattgatggtgatgctggaatccttagatatagaggatatcctattgaagacttggcagagaaaagcacctttacagaagtgtcatatctcatactgtatggaaatttgccttctgaaagtcagttagcggaatgggaattcgccttatctcagcattcagctgtaccacaaggagttttggatatgatagaatcaatgcctcatgatgcacatcctatgggcatgcttgtcaatgccatgagcgctttgtctgtttttcatcctgatgcaaatcctgctctcaaaggtcttgatatctacaactcaaagcaagtgagagacaagcaaatagcacgggttattggaaagataacaacaattgctgctgcgattaatcttagattggcaggaaggccgcctgtgcttccatccaacaaactttcttacacagagaacttcctatacatgctagattcttttggcaatcgatcatataaacctaatcctcgactaactcgagcgctggacattatcttcgtcctgcatgcagaacatgaaatgaattgctctacatctgctgtacgtcacctctcatcaagtggtgttgatgtatatactgctattgctggggctgttggagctctatatggacctcttcatggtggagccaatgaggctgtcctcaaaatgttgagtgaaattggaactgttgagaacattccagcattcattgagggtgttaaagccaggaaacggaagctcagtggttttggacatcgtgtgtacaaaaattatgatccaagagcaaaggtcttgaggaaactgacagaggaagtgttttccattgttggccgggatcctcttatagagattgctgttgccttggagaagattgcactgtctgatgagtatttcatcaagaggaagctatatccaaatgttgacttctactctggactgatttatagggccatggggtttcaacctgagtttttcactgttttatttgccatccctcgaatggccgggtacttggcacattggcgagagtccttggatgatcctgatacaaagattatgagacctcaacaggtttatgttggggagtggttgaggcattatgcaccaattaatcaaaggactgcatcaagtaacactgacaaacttggtcaattggctgtatcaaacgcctcaaagaggcgtcttgctggatctggggcttaactagtgaaactgccaagtgctcaataaggtccagactccagagaaaaaattaattttttttctggtacataaaataagtttgtttgtttatgtataaaattatgatatcaaatagataaataaaatcatgaaatcaataagaccatggtttcagtaaaaa

SEQ ID NO: 144 - DNA, 945 bp, Zea mays
agatgatgcttagggtttccgcgtctccggccgccgcggtggccaaccatctctctggtggggccgcggcgaccacggctcctgccagggtgacggcgcagcgcagcggcgtctcgctgtccgccgccgccgccgccggcaaggggaaggaggtgctcagcggggtggtgttccagcccttcgaggagatcaagggggagctcgccctcgtgccccagtcccccgacaggtcgctcgcgcgccacaagttcgtcgacgactgcgaggcagccatcaacgagcagatcaatgtggagtacaacgcctcgtatgcgtaccactccctcttcgcctacttcgaccgcgacaacgtggccctcaaaggatttgccaagttcttcaaggaatccagcgacgaggagagggagcacgctgaaaagctcatggagtatcagaacaaacgcggaggcagggtgaggctccagtcgattgtggcgcctttgaccgagtttgaccaccccgagaaaggcgatgctctgtacgctatggagctgactctggctctggaaaagctggttaatgagaagctgcacagcctgcatggtgtggcaacaaggtgcaatgatcctcagctgatagacttcatcgagagtgagttcctcgaggagcaggtggaagccataaataaggtctccaagtatgtcgcgcagctgaggagagtgggcaacaaggggcacggggtgtggcactttgatcagatgctgcttcaggaaggggcctgaaggccaacaagggtggcgtggacggagctgagctctgggtggtgtattcttttctttttcttttctttccagttggttagtgttttagttgtagaacggtgttgcgttgcccacatgacatgatggatgttacgtggaggattgtctcttatatttgaacattatattgtcgttcgtttttggc

SEQ ID NO: 145 - DNA, 1213 bp, Zea mays
gcgaacgcacacgcacccacacgacacatccagatgatgcttagggtttccccgtccccggccgccgcggtgccaacccagctctccggtgcgcccgcgacccctgctcccgtcgtcagggtggcggcgccgcgcggagtcgcctcgccgtccgctggcgccgcgtgcagggccgcgggcaaggggaaggaggtgctcagcggggtcgtgttccagcccttcgaggagatcaagggggagctcgccctcgtgccccagtccccagacaagtcgctcgcgcgccacaagttcgtcgatgactgcgaggccgccctcaacgagcagatcaacgtggagtacaacgcctcgtatgcataccactccctcttcgcctatttcgaccgcgacaacgtggctctcaaaggatttgccaagttcttcaaggaatccagcgacgaggagagggagcacgctgaaaagctcatggagtaccagaacaaacgtggaggcagggtgaggctccaatcgattgtgacgcctttaaccgagtttgaccaccctgagaaaggagatgctctgtacgctatggagctggctctggccctggaaaagctggtcaatgaaaagctgcacaacctgcatggtgtggcaacaaggtgcaatgatcctcagctgacagacttcatcgagagtgagttcctcgaggagcaggtggaagccataaacaagatctccaagtatgtcgcccagctgaggagagtgggcaaggggcacggggtgtggcacttcgatcagatgctgcttgaggaagaggcctaaaaagaagaacggacagatgaatgaaggaaacaagtgtgtaatgttgatcaggcggaggaataatgggtcaactgacaactctgggtcggtggatttgtagttggtttgggttttttagttgtagaacggtgttgcccccctcctagagagggatgaacacattatgcatgcgatgtgtcagttcggtcggtgctatgctcgttgggatttgattgtcggaaataaaacatgggtgatgaatgtgtaccctccctaatctatgtcttggtgatgaagttgagaaagccctgcgggtgtaggtggatttgtagagttttttcttcagttggttaggttcgctgttgcctacctcatttgcccctcatcatcgccgtaatttatttatttataatataaaagatccagattttccccc

SEQ ID NO: 146 - DNA, 1001 bp, Escherichia coli
gttccttatgtttgaatacggaattcactttgtcatatcagtgccatcattccgccttccctgtctttctctaaatattttaatcagcgaggggatcttcgctgattaaagaaatagcggtaatgcgttttattcccattcgtatttttaataattgaagtttatattttaccttttgcaaataataaaataacaaattatagtgacgccacagcaacaaatataacctttgtggagcactatcatgctgaaaccagaaatgattgaaaaacttaatgagcagatgaacctggaactgtactcttcactgctttatcagcaaatgagcgcctggtgcagctatcataccttcgaaggtgctgccgcgttcctgcgccgtcacgcccaggaagagatgacgcatatgcagcgtctgtttgattacctgactgataccggcaatttaccgcgtattaataccgttgaatctccgtttgctgaatattcctcacttgatgaattattccaggaaacctataaacacgaacaattaatcacccagaaaattaacgaactggctcatgctgcaatgaccaatcaggactacccaacatttaatttcctgcaatggtatgtttctgagcagcatgaagaagagaaactgttcaaatcgattattgataaattaagcctggcaggcaaaagcggcgaaggtctgtattttatcgacaaagaactctctaccctcgacacacaaaactaatgctctccggcggcaggtttactgccgccgtttcaaatcagtgacggcaaatcttactctgatcggtcgaaaaaccgtctttcgaaggtataaatttgccttttgctgccagaaacgctaccagctctcccgctgtcatcccttctgccgagcaggtgtgaaaacgtgcctgttcaccaaaacgcgctttaatcgcagcttccagactggcatgcgtatattgctcgcctgattcaatcatcatatttaacacttcatg

SEQ ID NO: 147 - DNA, 1052 bp, Zea mays
ccacgcgtccgctgttcgaagctttcagccgagcaccatcgtcacagtcagtagccaagcatatttctttctccgagtgatttgcgctgagcgatcagttcatccagagcgagcggagctgagctgagctgagctgagcgagcttgcgttgcttgagagaccctgctgccatggcttcccaccaggacaaggctagctaccaggccggcgagaccaaggcccgcaccgaggagaagaccgggcaggcggtgggggcgaccaaggacacggcgcagcacgccaaggaccgggcggcggacgcggcggggcacgcggcgggcaagggccaggacgccaaggaggccaccaagcagaaggcgtccgacaccggcggctacctgggaaagaagaccgacgaggccaagcacaaggccggcgagacgacggaggccaccaagcagaaggccagcgagacgacggaggcgaccaagcagaaggccggcgagacgacggaggccgccaggcagaaggcagccgacgccatggaggcagccaagcagaaggccgccgaggccgggcagtacgccaaggacaccgccgtctccggcaaggacaagtccagcggcgtcatccagcaggccactgagcaggtgaagagcgcggcggcgggcgccaaggacgcggtgatgagcacgctggggatgggcggggacgacaagcagggcgacgccaacaccaacaccaacaaggactcctctaccatcaccagggatcactagacgcgtgtatgcacacgcacttggtccgatcctgtcgtccgtgaccctgtttgcttgttcgcgagtccagtatgggtttgtgcatgttttcagtgtcatggtttccttttctacgaatttggcgttgtaagttcgattcgcaggtacgttgctgtgttttttttctgcgccatcaggtgtctgtaaacgagtcgggcgggtttgagtgtcctttgttgtgataataaagttggtaaatcgtaattaatatatagcatgcgactgtcttgctatggcctaaaaaaaaaaaaaaag

SEQ ID NO: 148 - DNA, 1595 bp, Glycine max
attcggctcgagtgcgattgcgatggtgaaatcgaacgagaacggttctggttccgtttcggtgcctcctttcctgaaaaaatgttacgatatggtggaagaccgcaacactgattctatcatccgttggagcgatggcggtgacagctttgtcatctccgacatcactcaattctccgtcacgctccttcccacctatttcaaacacaacaatttctccagtttcatcagacaactcaatatctatggtttcaggaaaattgatacggattgctgggaatttgccaatgagaactttgttagaggtcaaaagcatttgttgaagaatatacgtagaaggaaacatccacacagtgcagatcagcaaaaagcattgccacagcaagacaattgtgatgaaccatcacaagaagcaccgtatcatggcctttggaaagaagttgagaatctaaaacttgataaaaattcgctcacgcaagaattggtcaaacttaggcaacaccaggaatctgctgagaataagttgctgctcctgagtgatcgccttcaaggaatggaaaagcatcagcagcagatgttatcatttttagtcatggttgtgcaaagccctgggttcatggttcagcttcttcatcctaaggaaaataattggcatttggctgaatcatggaatatattggatcaagataaacaagatgacaagccagttgcttctgatgggatgataataaagtataaaccacctgtaggtgaaaaactaaagcctgtagttcctctgtctcctggtttcgaaaagcaaacagaacccgagctttctgcagaagggctaaaagacttgtgcgtcagttctgaattcttgaaagtgcttctggatgaaaaattatctccattagaaaatcattctccatttctcctaccagatttacctgatgatggttcatgggaacagctttttctaggtagtcctttcatgggaaacattcaagattctaataaagaaagtgaggggcacaccaatggtggaatggagatggaaccaacaatatctgagactccaaatgaaaattctcgaacttttgaatcgatgattgtagagatggagaaaactcgagaatgagttggagttgtatgcacatggtgggctgtcttcttggaatccatcagatatttttcagctgggctgtctcatactgagctaatggagctttagtttctgaaactaacaatatatagggaaggaagtaataatgtccatcagatatttttcagctgggctgtcttcacagattacttcacactataattatattatagtattaagtcgcaattattttctctcccatcttccttcagcagttgttagatcctcttctagaatccatattttggcttcctgatacatggtgtcggagatcaggagttgtatggtagtgcacaagtgcggcgacctatatatatagcggatcaattatttcttttatggaaaattgtaagggaaaacggcaactttattttttgtgccacattaaacagtggcacttgccttcatatatattataaaatttcacgaaaaaaaaaaaaaaaaaaaaaaaagg

SEQ ID NO: 149 - DNA, 1159 bp, Glycine max
gattccttttcctttctatctctctctcttcttatatttccacattccacgtgaaccttctagaactataatagaaagaaaccctccattccatggctccgccgctcgaacacaacggcgtttccacgagcggtgactctcagagatccattcccacgccgtttctcaccaaaacctaccagctcgtcgacgatcacaccatcgacgatgtcatttcgtggaacgattctggatcgtccttcatcgtctggaacaccaccgctttcgccaaggatttgcttcctaaatatttcaagcacaacaacttctccagcttcgttcgccaactcaacacttatggatttagaaaagttgtacctgaccgctgggagttctcgaacgagtattttcgaagaggcgaaaagcgtcttctctgcgaaatccagcgacggaagatcctctccgcatctcctccgccggcgggagcaactgccaccgtggcggttccgtcgccgctgccgctatctgcgatcccgacggcgaagccgatcgtgtcgccgtcgaactccgcggaggagcaggtgctttcgtcgaactcgtcgccggcgagagcaccggtggagctgttggacgagaacgagcggctgagaaaggagaacattctgttgacgaaggaattggtgaagatgagatcgctctgcaacaatatattcaatctcatgtcgaattacgctaacgctcaagcggacggtagttccgcggcggcggcgaagcggtgctccggcgaggatgcggtggaggagatgaatccgaagctgtttggggtggcgattggtaagaagcgagcgagagaggaggaaggacatggagcgaagtatgatacggctttgagtctgcatcagccgtttcatgcggacgtgaaatctgaagcgttggatttaccaggacgtggcgaaaataaaaaaacgccgtggctaaatcaatgtcatagagcaaatcagagggtgtgtaattgacacacgacgttgtaatagctaggtaacacgttaggttaagttaggggcgtcgtagagaatcagagtctgtaagcacggagacgcgcgtgtcaaatgtacgtcgttaaccgtttgggacttttttcgtagaagtttctcagaagaaaactatattttgttgttcc

SEQ ID NO: 150 - DNA, 1409 bp, Glycine max
gaagaagagagagacagacagaacaatgggggaagcaaagggaaaggaagaagaagtgttagcctcagttcactcaaccgtgttcaaagaatcagaaagccttgatggaaagtgtgttaagattgagggctatgatttcaaccgcggcgtcaattatccgttgctactcagctccatggtcacaactgggtttcaagcttccaacctcggtgatgccatccaagtcgttaatcaaatgctagattggaggctagttgatgaacccgtagctgaggattgcagtgaccaagagagggatttggagtaccgaaaatctgtgacgtgtaaagtgtttctgggtttcacttctaatcttatttcttctggtgttagagatactgtgaggtttcttcttcagcatcgcatggttgatgtagttgttacaactacaggtggcattgaagaagatcttataaagtgcctggcaccaacatataaaggagatttctctttgcctggagcatatctgcgctcaaaagggttgaatcggattggtaatttattggtcccgaatgacaactattgcaaatttgaggactggattattcctatctttgatcagatgttgggggaacaaaataatgagaatgtgttgtggacaccatctaagttaatagctcgattgggaaaagaaataaaaaatgaaagctcttacctttactgggcatacaagaacaacattccagttttctgtccgggcttaactgatggctcattgggggacatgctgtacttccattccttccgcaatcctggtctgattgtggacatagtgcaagatataagggcaatgaacggtgaagcagtacatgcaagtcccaggaagaccggaatgataattttaggaggtggccttccaaaacatcacatttgcaatgccaatatgatgcgcaatggtgcagactatgctgtttttatcaatactgcacaagaatatgatgggagtgattctggagctcgtccagatgaagctgtttcatggggaaagatacgagactctgctcagactgttaaggtacactgtgatgcaacaatagcatttcctctgctggttgctgaaacgtttgcttcaaaagtgaaacctccccattgatgaaggttaaagatgaatttactctgaagttcattttaattgtgtgtgtttgaggatcttgatggacaagttcggcattggtgttcaatttgactatcatttgattcctaagctcctcttagcagtggagacctttttgaccattcaaaggtaatccattaatcctgtcagtgaggaagtcaggaattatagatgtgaggatcattgtactaatatctttagggaaaataaggctaagaaaactaactgatcatatatggcatttttaatattttcc

SEQ ID NO: 151 - DNA, 1383 bp, Chlamydomonas reinhardtii
cttttgtagacccacttgtcagtgggcactgcccctagaagcggcttcttgaccagagaagatgcgctcagccgttctacaacgcggccaggcgcggcgagtgtcttgccgggttcgggcggatggttcgggcgtggattcgctgccctcgaccagcgccagcagcagcgcacgccctctcattgatcgccgtcagctcctgaccggtgctgctgcgtcggtcataaccttcgttggctgcccttgccccctgtgcaagcctggggaggcaaaggccgcagcttggaactatggcgaagttgcgggtccgccaacctggaagggtgtgtgtgcgacgggcaagcgccagtcgcccatcaacatcccgttgaacacatcggcgccgaaggtcgacgcggagatgggcgaattcgatttcgcctacggcagcttcgagaagtgcgacgtgctgaacacgggacacggcaccatgcaggtgaacttccccgctggcaacctggcgttcattggcaacatggagctggagctgctgcagttccacttccacgcgccctcggagcacgccatggatggccgccgttacgccatggaggcgcatctggtgcacaagaataaaagcaccggcaacctagctgtgctgggcattatgctggagcccggcggcctgatcaagaacccggcgctgtccactgctctggaggtggcgcccgaggtgcccctggccaagaagccctcgcccaagggcatcaaccccgtcatgctgctgcccaagaagagcaaggccgggacacggccgttcgtgcactaccctggctcgcttaccacgcccccgtgttcggagggggtggactggtttgtgttcatgcagcccatcaaggtgcccgacagccagatcctggacttcatgcgcttcgtgggcgacaacaagacatacgccaccaacacgcggccactgcagctgctcaacagccgcctggtcgaatacgagctgtgagcggacacgagtgtgctagggtcagtgagcagcgtgtgaacatgaagattacaagtttgctgacagagagcgggcggagtgcccatgcatcgcatcgtaacagcccgcgaagtacgacttaacatgacataaaagtgcaatgcgcatattgactggtttggcccacggtggggaaggcgtacgcgcggttccatcaagcagcctttggggaggcatcgccttgcacgcacttgccgtatgtaggcgtgctggtgaatgaggtatggggcgagagacccgcgaactaaacttaagtagattacccatgtatcctttatttggcttgcgtgccctctcaattggggcaccgatgcaggggctggaaggccccgtgtaacacatgacactca

SEQ ID NO: 152 - DNA, 900 bp, Nostoc PCC7120
gtttgcaacgtttagtttaatatcgcagtatgtttcaaccgcagggaaatgagtagtactttatatcgaaggcaactactgaaattattgggtatgagtgtcttgggaacctcattttctagttgtgtcacatctccagctagggcaaaaacggtaaactggggatatatcggcaaagtaggcccagagcattggggtgagctttcccctgactttgccctttgccaaataggcagaaaacaaacgccgattgatttgcagattgcagatgtgaaagatgtccacagcagcagtcaagatttgttagttaccaattatcagccaacggcattacacctaatcaacaacggtaaaacagtccaagtcaactatcaaccaggcagttatctcaagtatgctcaccaaaaatttgagctgcttcagtttcactttcatcacttcagcgaacatcgggttgatgggaaattatatgatatggaactccatttagttcaccggagtaaatctggcgacttagccgttatgggtattttcttgcaagcaggagcatttaacccgacgctgcaaattatctgggatgccacacctcaaaaccaaggaacagacaaaagaatagaggatataaatatagacgcttcccaatttctcccagcacaacacagattttttacttattctggctctctgacaaccccaccctgttcagaaaatgttctctggtgcgtaatggcgacacctatcgaagcctctcctgcacagatagctaagtttagtcaaatgtttccccaaaacgcacgtccagtgcaacctctcaacgatcgcctagttatcgaagccatttaaaatttttctgtcaacttccccggattttgtgttgctatgtcatactaagagatgaga

SEQ ID NO: 153 - DNA, 2025 bp, Chlamydomonas reinhardtii
cataacttcaaagcctaaacgtctattcctcgtgccaaggcactttctccggaagcgcacccacctctccgcgccgctcgccttcacgcgtgctctcagctcaacaccactgtaactcaggccttgacgggcttgttttatcaaaaccagcaagaatgtcatccgacgctatgactatcaacgagtcgctgatggaggtggagcacactcccgccgtccacaagcgcattctggatatcctgcccggcatttcaggcggtgtggcccgtgtcatgatcggccagccctttgacaccatcaaggtgcggctgcaagtgctgggtcagggcactgccctggcggccaagctgcctccgtcggaggtgtacaaggactcgatggactgcatccgcaagatggtcaagagcgagggcccgctgtccttctacaagggcaccgtcgcgcccctggtcggcaacatggtcctgctgggcatccacttccccgtcttctcggccgtgcgaaagcagctggagggtgatgaccactactccaacttctcccacgccaacgtcctgctgtcgggcgcggctgccggtgccgccggttctctgatctctgcccccgtggagctggtccgcaccaagatgcagatgcagcgccgcgccgctctggctggcacggtggccgcaggcgccgccgcctcggctggcgccgaggagttctacaagggctcgctggactgcttcaagcaggtcatgtccaagcacggcatcaagggcctgtaccgtggtttcacctccaccatcctgcgtgacatgcagggctacgcctggttcttcctgggctacgaggccactgtcaaccacttcctgcagaacgccggccccggtgtgcacaccaaggccgacctcaactacctgcaggtcatggccgccggcgtggtggcgggcttcggcctgtggggctccatgttccccatcgacaccatcaagtccaagctgcaggccgactccttcgccaagccccagtactcgtccacgatggactgcctcaagaaggtgctggcgagcgagggccaggcgggtctgtggcgcggcttctccgccgccatgtaccgtgccatccccgtcaacgccggcatcttcctggcggtggagggcacgcgccagggcatcaagtggtacgaggagaacgtggagcacatctacggcggcgtgatcggccccgccacgcccaccgccgcgcagtaaatgtggccgcggctgcggctacgtgcttgagcgcccgcgtgtgctctatctagctgctgcaacagctgctgttgcgcacgcggcgcaaggcgcaacctcctggcatgacaacatggctcaaaaggtgtcacgtgtgtgtgtgtgtgtgtatgtttgtgtgtgcgtgtggagagtctggcataggtagatgtggtcgttagctttctgcttcgttccccatcgtgaggcgcatacatgcggcaacaagccagtggatgcactctgggcagaacgtgcgtgtgtgctcgtttttcctagcttagtggtggcagcagcggcaacagaaagaggtaggcagaagcaggagcggtcgagggaacaggacagctgctgaatacaaaggcgtcagacctgaacgtaattttgtgcgggcaccataccccgcttacggtccaagggcatgatgcctttttgatgcacacatcacccctccccgcgcatgtatgttaaatgatgattttgactgctgtttttgagagcggaacaaggggaactgcagtactggctcggacatgagaggagaggccggcgagagaggctcatgacaaaaagtggaatgggcttgcagatgtatatagcagggcaaactggcaaaaggagcgatacctttcgtaagcacagggctgaggtgcatggtcgtggaaggtcacgggagttgagccgctacaccggctgtcagtgctggtctgtttctccatcgggaaacgcgggtcaatatgtaatcgtgatgggtttcaaaaaaaaaaaaaaaaaa

SEQ ID NO: 154 - DNA, 1801 bp, Synechococcus sp. PCC 7942
ctggtgcaagccctcgcgactgcgttacctgctggtgcagaggtctttctgcaatccgatgtgctggaagtgcaggcagagatgtgcgaacactttgcggcggaaccccgctttcagcgcacctgcttggactggctgccggaaaatccgctgcccgtcccgaccgagcgcgaaattgccgttcaaaacaaacagttgccagtctaccgtgctctcttcattcggcagccagcggactaagctcttaaggcaagcgttgacgcgatcgcgatgactgtctggcaaactctgacttttgcccattaccaaccccaacagtggggccacagcagtttcttgcatcggctgtttggcagcctgcgagcttggcgggcctccagccagctgttggtttggtctgaggcactgggtggcttcttgcttgctgtcgtctacggttcggctccgtttgtgcccagttccgccctagggttggggctagccgcgatcgcggcctattgggccctgctctcgctgacagatatcgatctgcggcaagcaacccccattcactggctggtgctgctctactggggcgtcgatgccctagcaacgggactctcacccgtacgcgctgcagctttagttgggctagccaaactgacgctctacctgttggtttttgccctagcggctcgggttctccgcaatccccgtctgcgatcgctgctgttctcggtcgtcgtgatcacatcgctttttgtcagtgtctacggcctcaaccaatggatctacggcgttgaagagctggcgacttgggtggatcgcaactcggttgccgacttcacctcacgggtttacagctatctgggcaaccccaacctgctggctgcttatctggtgccgacgactgccttttctgcagcagcgatcggggtgtggcgcggctggctccccaagctgctggcgatcgctgcgacaggtgcgagcagcttatgtctgatcctcacctacagtcgcggtggctggctgggttttgtcgccatgatttttgtctgggcgttattagggctctactggtttcaaccccgtctacccgcaccctggcgacgctggctattcccagtcgtattgggtggactagtcgcggtgctcttggtggcggtgcttggacttgagccgttgcgcgtgcgcgtgttgagcatctttgtggggcgtgaagacagcagcaacaacttccggatcaatgtctggctggcggtgctgcagatgattcaagatcggccttggctgggcatcggccccggcaataccgcctttaacctggtttatcccctctatcaacaggcgcgctttacggcgttgagcgcctactccgtcccgctggaagtcgcggttgagggcggactactgggcttgacggccttcgcttggctgctgctggtcacggcggtgacggcggtgcggcaggtgagccgactgcggcgcgatcgcaatccccaagccttttggttgatggctagcttggccggtttggcaggaatgctgggtcacggtctgtttgataccgtgctctatcgaccggaagccagtacgctctggtggctctgtattggagcgatcgcgagtttctggcagccccaaccttccaagcaactccctccagaagccgagcattcagacgaaaaaatgtagcgggctccccaacaaattcctgtgcacccgactggatccaccacctaaactggatcccaaaggtatccggtggatctagggtcataacgaactccgaccgcgatcgcgtccgcgaactgaacctcca

SEQ ID NO: 155 - DNA, 1135 bp, Zea mays
gtcgaggagtagggttctagcgcctatctggtttctccctgcgccgccgccgccgccgtggacaaccggagcgtagtgggaggggatgatggagggaggtagccgcgcggatgggcggaatccgaaccagctccggccgttcacctgcaccgggaacccgctccaccgcgcccacggctccgcgcggtgggcgcagggcgacaccgtcgtgctggccgctgtgtacgggcccaagccgggaacccggaagggcgagaaccccgagaaggcctccatcgaggtcgtgtggaagcccaagaccggccagatcggaaggcaagaaagggaatatgagatgacactcaagaggacgttgcagagcatctgcttgctcacagttcatcctaacaccaccacctctgtcgtgcttcaggttgtgggtgatgatggttctcttatgccatgtgcaattaatgcttcttgtgctgctcttgcatttgctggaatccctatgaaacatctcgctgtcgcaattagctgtggagtgatggacaatggtgtggttatcttagacactagcagagcagaagagcagcaagctaggtcgtttgctcacctggtgtttccgaactcgcgcaagtcagtcgaatcgaaggacccgacacagcgagatgaggagtccgagcgaggattgataacttgcatcacgcatggagcaatgtctgaagatgactatttcaactgcatagagaggggtgtcatggcgtcctcgaggatctcggatttcatgaggaagacactgcagaaggaggcgtccagggatgcctgacctgagtagcaaatgtattagcacgactgagaagctgcctgcctgtgatagacgatggcgatggcaatggtgtgtagacagcagctgggtctctagtttagacggcatgtagtcgtgttagaacgaaggaggcaagggtgcggagtggaggtcaatcggcgtgtgatgccatgtctcaattgtgcggtggagtggtttggtggacttttgatgaacagataatgaggttgtatttggtggtacccaattgtgtgtgttgaaatcatatgatgcacggcacgctgaaattttactcgaacgccgcccgattaaaacaatatccatact

SEQ ID NO: 156 - DNA, 5218 bp, Saccharomyces cerevisiae
tctagaggaagttttcaattccaaatgggcggataggctaatttggatgactacgattccgatgaagattcgaggacccaaggcgactacgacgattatgaatctgagtattcagagtctgacatcgatgaaactataattacaaatccagccatccagtatttggaagaacaacttgctcggatgaaagtggagttgcaacaattaaaaaagcaagaactggaaaaaataagaaaagagaggcgcttacgacgtggatcaaagaaacgcggcaaaagatcgaagggaaggagtgggtctaagaacgcttcttcgaaaggaaggcgagataaaaagaataaattgaaaacagtagtgacatatgatatgaaacgtatcattacagagaggatcaatgatttaccaacttccaaattagaaagagcaatcgacataataaaaaaatccatgcccaatatttctgaagacgatgaagtagaacttgacctcgacactttagataatcacaccatcttaacattgtacaacactttctttagacaatatgaaagctcatccggtgcttctaacggtttggacggtacttcaggtgttacgcgagatgcttcgtccttgtcgcctacaagtgcgggaagcagaaagagaagatctaaggcattaagccaagaggagcagagtaggcagatagaaaagataaaaaataaactagctatcttagacagtgcttcacctctgagccaaaacggctccccaggccaaattcaaagcgctgcacacaacgggttttcctcatcttcagatgacgatgttagcagcgaaagtgaagaagagtgactgaattttgaatttgattatcttcaacgactgagaagaatgagcaccattttgatattttgattaattaagtggtaatcttaagctcatatacaaaaagggaaggaaaaaaaataaagatagaaaagatcttaggaacggatagaggtttgaaaaaggaataacaggtaatttttcattttcatatcggttgtaacattataaagctcacaaatttaaaacaaaaaaaaacataaacctaacaaggttaatcatttgcacatgatctcatcatatagatcaattcataatctatataataatgaataattagaataaaaatttcctcttgtctcagaacgcccatcggatggcataactttagttaatgatatcacgacggacgaagtattgaaagacaacctaacctgttcatcaatttaaaagtcaacgcagaaactataatacattgccacatagttctttccgatatgaacaacctaactcacaaaatttactgtactaatactaatttatatgtctgagggattcagtagcagttccatacaggaattatatcaatcgttaaaagaaatcactaacaacgcagacgtagagcttttcgaagatcgcattactaaattagattttgagagcaccgatgaaccaaagcatgcaaatgatatcataaaggatagatttttgagaccttctaatgctcttccttggagcttgttggacatggtccaagacgttccacatacgtcttctccagaagattgctctggtaaactagattacaaggaattgctgaaagtcccggacccaattaatagaacatcataccagtttaaaagaactgggttagaaggtaaaatttcaggctacaaagaagaggttgatttgaaggaagttgcaaatgccaatgcatcaaattcactgtcgattacgagaagtatcaaccataaccaaaactcagtaaggggttctacagcgcaattgcctttcacaccaggcggaattcccatgaaatctgtcaagacagattcagaacaaaatggatcttctacaatggccaacgctactaaattgttacacaaggatggtcaaggtttattcgatattccagagggtatgaatagaggcattaagccgatggattctccagctgaaaatgaggatcaaaacggacagttcaaagaattgaaacagctaaatgagatagataatgaattagacataaggattgaggcgaacgaggcaaagttaaaagaggaggaaaaatctgccaagtcaatttctgaagaaattatggaggaagccactgaagaaacgactgccgataatgctgatgatgccgaaatcgatgaactattaccaattggaatagactttggcagaactaaaccagtttcgaaaagtgttcctgttaaaaaggaatgggcccatgttgttgatttgaaccataagatcgaaaatttcgatgagttgattccaaaccccgctagatcgtgtccttttgaattggatacatttcaaaaggaagccgtctatcatctcgaacaaggtgattccgtatttgttgccgcccacacatctgctggtaaaactgttgttgcagaatacgcaattgccatggcacatagaaacatgactaaaactatatatacatcacccattaaagccttatccaatcaaaaattccgagactttaaagaaacttttgacgatgttaatattgggttgattactggtgatgtgcaaattaatccggatgctaactgtttgattatgacgaccgaaattttaagatcaatgctttatagaggtgccgatttgatcagagatgtagagtttgtcattttcgatgaagttcactacgttaatgatcaagaccgtggtgttgtctgggaagaagttattattatgcttccacagcatgtcaagtttatcttattatctgccaccgttcctaacacttatgagtttgctaattggattggaagaactaagcaaaaaaatatttatgtcatttccacaccaaaaagacccgttccattggaaataaatatatgggctaaaaaggaactgataccggttattaatcaaaattcagaatttttagaagctaatttcaggaaacataaagagattctaaatggggagagtgcaaaaggggctccttcaaaaactgacaacgggagaggtggatccacagcaagagggggccgtggtggatccaatactcgagatggaagaggaggccgtggtaattcaacacgtggaggtgccaaccgtggaggttcaagaggtgctggcgcaattggctccaacaagcgtaagtttttcactcaagatggtccttcgaaaaaaacatggcccgaaattgtcaattacctaaggaaaagagagcttctaccaatggttgttttcgtatttagtaaaaagaggtgcgaggaatatgctgactggttggagggaattaacttctgcaacaataaggaaaaatcacaaatccacatgtttattgagaagtcgattactcgtttgaaaaaagaggatagagatttgcctcaaattcttaaaaccagatcattacttgaacgtggtatagctgttcatcatggggggctattgcccattgtcaaggagttgatcgaaatattattttccaagggttttatcaaagttttatttgcaacagaaacttttgccatgggtttgaaccttcccacaagaacagttatctttagcagcatccgtaaacatgatggtaatggattaagagaactgactccaggtgagtttaccctggctggtagagctggtagaaggggcttggattccactggtacagtcattgtgatggcatataatagtcctttatctattgctacgttcaaagaagtaacgatgggtgttccgacgaggttgcagtctcagtttagattaacatacaatatgatattaaatcttttaagaattgaggcgttgagagttgaagaaatgatcaagtattcttttagtgagaatgccaaagaaactttacaacctgaacatgaaaaacaaatcaaagtattacaagaggaattacaaaccatagagtacaaaagttgtgaaatctgtgataatgatatcgaaaagtttttggaattgatgctggcatataaggaggcaacagtcaacctaatgcaagaaatggttaaatcgccttcgatattgcatatcttgaaagagggcagactcgttgcttttagggaccccaatgattgcttgaaattaggatttgtatttaaagtttctctgaaggatgctgtttgtgtcattatgacgttcacaaaaccatacaaactcccaaatggtgagccaaatcatttaatatactttccaaaagcggatggatacagaagaaggaacttccctaaattccagaagactgatttttatatggaagaagttcctgtgacggctattgaagtgatcactaaacgcaagtttgccgcacccttgggaaaagtgattaaaaaggatgttgccgctttgaacgagtttaacgctgaaacaaataacattttggacggcaaaacgctaaaagaagcaattaacattgaaaagcaaggtttaaaaattcaccaaatattgttagaccgtacaaatataagggatgagatattcaaactaaaaagcattaaatgtcccaacctaagccaacacattgttcccaagtttaaggcgcatgtaattaaaaagaaaattgaagaattgtaccatttgatgtctgaccaaaatctgagcttactacccgattatgaaaagagattggctgttctgaaagacactgaatttatcgaccaaaaccacaacgtgctgttaaaaggtagagtggcatgtgaaattaattctggttatgagttagttttaactgaattaattttagacaactttttaggaagctttgaacctgaagagattgtagccttattatcagtatttgtttatgaggggaaaaccagggaagaggagcctcctattgtcacaccaaggctagcaaagggtaaacaaagaattgaggaaatttacaagaaaatgctttgtgttttcaatacgcatcagattccattaactcaggatgaagctgagtttttggacagaaaaaggtttgccatgatgaatgtggtgtatgagtgggcccgtggtttatcattcaaagaaatcatggaaatgagccccgaggctgaaggtactgtagtcagagttatcacttggctagacgaaatttgccgcgaagttaagactgcctctattattattggtaattccacattacatatgaagatgagcagggctcaagagttgattaagagagatattgttttcgccgcaagtttgtatttatagagagctc

SEQ ID NO: 157 - DNA, 5192 bp, Saccharomyces cerevisiae
tttgtaatgcaaataactggacgagagaaccacgctataacctatttggtaataaaaatgtttgtatgaataaaaaagctgctgactgctttctttgatatgtgtatatagaatatttaatcggtgattgaatctaagaaaagcttacctctgaaagttctctcttcggtcgcttgctgatttgtagtaaacaatttgaaaagtttagcaaattcttcctcaggattttcaaaaccggcttcctttaaagaatcaatgacctcattcaagggaacgtttaaatcgtgtcctcttccaatggcttttaaactttcttccaattcttcacgctcgggaaactgcgataagttcttccccatgatagataagaatatgggaaagcttacaccttcttctccaacttccgcggtactggtgtcattgtcaggtaccattttggaccattcctcatctgtcaatgtcttccccaatgttgcatatatcttggtaagatctcccctactaatcagaccatcctcatcctcatccagcatttggaaagcatctttgagtttatttatgtagtcctgcgtaagttggttaaacgttagcgattcactatggtccatatctacttcaagtttgctcaataaacgattcgaaattactcttttcttagctgtgcattgtatagtttagaaatacgagaaatgtaaaaaaaaaaataaagttggaaaacaactaactaataaaactttcttgtcaagaaagacactaagaacacagaaaagaaacacgaagagcagaggaaatatgtcggatattaaacagctattgaaggaagccaaacaagaattgacaaatcgtgactatgaagagaccatcgaaatatcggaaaaggttcttaaactagatcccgataattatttcgcacatatttttctagggaaagcactttcgagtcttccagctagtaataatgtcagttcaaatcggaacctggagagagctactaatcattacgtgtccgctgccaaattagttcctgataaccttttagcgtggaaaggactttttctcttatttagaaccactgaggttgtcccagacatactttcgtatgatgaatattttgacctgtgtggccaatatgcagacgcacttttaaagcaggaacagtctcaagtagaactaataaatgacataaaattactaaagaaaacgcatccagattgtcaaaaagccttttatcagcatttgaaacctgggtcgctaatggcggaaactattggtcgtcatctatctacaccccaggacgctttattaaatcttataaagatactgtctaatattgaaacaacggaaataggtaagacccttagtcagaacaggttaaaactaaaagctagtgatcctgattatcaaattaaactaaattcattctcctgggaaataattaaaaattcagaaattgatcagttatacaaccagttggtaaatattctcgctgacgatcaaaagagaagtgaaattgagaaccagtggttagaatatagaatcaaagtgctaaaatcaatgccgctggatgtaaaaaaagattttttcacgaaagttaaggaaatggtcgaggatatggttcttgtgaatcatcaatctttgcttgcatggcaaaagtatttcgaatggacagattacgaagatctggacaacatggatgccccattgataataaagtactttaagaaatttcctaaagatccattggccatgatcctctattcctggctttcctcaaaactatcgaaatatgatattaaaagtttggaatcggctaataaaccacctgaaggccataaaaagacggagaaggaaacagatattaaggatgtagatgagacaaatgaagatgaagttaaagatcgcgttgaagatgaagttaaagatcgtgttgaagatgaagtcaaagatcaagatgaggaggcaaaggaagatgaagaagaagaccttgatgatatagaaattggtttattagaggaagaggttgtcactgtattgacggagaatatcgtaaaatgtaaaaataatatcttagcgcatcgcattctttgtcaatattacctactgaccaaggagtatgaggcagctttaccatacatcaaaaatggtatttctttaattgcctataatataaaggacctgggggtacatttgccattaacaaaaagagaattttctctggatttggctaccgtttatacatatgtcgatgccccaaaggaccacaatgctgcattaaagttatatgataacattttatccggtgattttagtaatatacaagcaaaaatgggcaaaggtataatttttattgaaaggaaaaattggaaggatgctatgacattactaacacaggtgcatgaacaatcgcctaataatctggaagttttatctgaactgtcatggagtaaagcccatatgggttatatggacgaggcattagctggcttagatactgtcatcaagggtatcaaaggtatggatttacgttcgatagatttcagagcattaaacttatggaggcaagccaaagtttacattatgaagcatgcttccattaacgatgctaaacaggaaaacgtcaagtgcgcattcaaattactcattcagagtattaaaatattggacacttttgctcccggattttcgacactgggcgatatttattgccactattataaagaccatttgagggccttcaaatgttatttcaaagctttcgatctggatgcgggggattacacagcagcgaagtatattaccgaaacttatgcaagcaagcccaattggcaagctgcttcttccatcgcttcaagattaattaaaggtgaaaaagcaaaggcagaactgcgctcaaataactggccctttagggtcgtagggattgctcatttggaaaagcaagaagaaagtgattctattgagtggtttcaatctgctttacgtgttgatccaaatgatgtagagtcatgggtgggcctgggacaagcataccacgcgtgtggtcgtatagaagcatctatcaaagtttttgacaaggcaattcaattaaggccctctcatacttttgcccaatactttaaagctatttctctatgtgacgtaggtgaatatcttgaaagtttagacattctggaaaaggtatgtcaagaagccgctacagaagagtcattccaaattggtttagtggaagtgcttatgagatgttccttggatttatattcgcaagggttcttgctcaaatcagtttcaattgcaaaggacactattgaacggatcaagataattatcagtgaattaaaatgtgagaaccaacaggtttggatctacctttcacaagtactgagattatttatttggatagagtcaaaggttgatactttacctgttgaatcactagtatcaatttttgaaaattctcaattttctggtagtgaagaaattgattctgtcgacaatatcaaaatcgatactttactcgatagcactactgatgataatgtgtccattgcgtgcaagtttttgatcttagcttcaaaatatagtgtttcggatcaaaaatttacagatatagcaggaacggtcagggcctcatactggtataatataggtatctcagagcttactgctttcataacattgaaagaaccgcagtatagagatgctgctatttttgcttttaagaaatccattcaattacagtctaatataagtgaaacttggattggtctagggatagccactatggacatcaactttcgtgtctctcaacattgctttattaaagcaactgctttggaaccgaaggcgacaaatacatggttcaacttggctatgctaggtttaaagaaaaaggatactgaatttgctcaacaggttctgaataaattacaaagccttgccccacaagattcgtcaccttggctaggtatggccttgattcttgaggaacaaggagacattatcggaagttctaaactttttgcacactccttcatattatctaatggaaggtcaaaggctgcgcaatttatgtatgctaaaaatgtccttgagaatcacattaataatggtgacgatgaaagagatattgagacagtggaaaaactaaccactgcttcaatagctttagagcagtttttcaaaaaaagtcctgatagtcaatttgctcttcaatgtgctcttctaactcttgaaaggttacatcactatgaaaatgcaaacgaactggctaatcggttgataggcattttggaaaaaaagtttgagaaaactcaagatgaaagagaactgtttaattttgcgataattaaaggacaattcgctcgtattcacttaggtttaggaaatttcgaactctctattgaaaacgctgatctttctcaaggtattatatctgaatcgagcgacgaaaaatcaatgaaaaccaaaatatccaatcacatttgcttaggattaagttatttcttcttaaacgactttgatcagactttgaaccaattccaagaactgctaagcatttcaaaggattctaagcacctagttgttttaattgcgaaggtgctttatgatgtaggtgaatctgacacaaaggaaattgctttacaggaactaacagaatatatagccacaagcggcgcagacttgttagtaacactaacgattgcagctatgtcaattctagacgataagcgtgaagatttaagcattattttagaagaattgaaagctttgccattatccaaacaaataatagataagcacaaagacgcaccatatctgatagaagaaattactaagagactttatcgtaacgataccggtaaacaagtatggcaaaggagtgcgtactttttccctaataacctcaaggtttgggagagattagataagaatattcaacgaagaatagcttctaatggacaaaataaagttactgcggaggagatgagtaaactatattgtgagagtaagaatttgagaagcatacaaagaggtatgtttttgtgcccttggaacgttactgcagtgaaggcgctaaacgaatgtttctaaaaatttggattcgagatagtcaatcaaaccttaatgtaacattagtaataaattttatcttttctatagagtataaaaggttattagacagagtttatcag

SEQ ID NO: 158 - DNA, 1386 bp, Saccharomyces cerevisiae
agcagaaaactgggagaaatggaaatgaatcaaatcatacatatcaagacattctagtttttataaacctataatttatcgcaagaatcttgggtgttatgtgttgtatttgcggcatcatttcaaaataccgtctgcattacccgtctccgtcacgtgaagtaaaaatttccaaaaaatattgaaaaaagaaagaaaaataagatccagaattcactgatgatgagcttatggtacggcatgattaactacgcatttgtatattaaagattctttgattttttccagagcattgaatacctcaatctataagtgtattataatggcatgcaattttcagtttccagaaatagcttatccaggtaaactaatatgcccacagtacggtacggaaaataaagatggcgaagatataattttcaattatgtgcccggtcccggaactaaactaattcaatatgaacacaacggacgaactttagaagctataactgctacactagttgggacagtgaggtgtgaggaagaaaaaaaaactgatcaggaagaagagcgtgaaggcactgatcaatctacagaggaagaaaaatcagtagatgcatcacctaatgatgtcacaagaagaactgtaaaaaatattctggtttcagtgcttcctgggacagaaaagggtcgtaaaaccaacaaatatgctaataatgattttgccaataacctaccgaaggaaggtgatattgtgctgaccagggtgacaaggctttcgttgcaacgagccaatgtcgaaattttagctgtggaagataaaccatctccaattgatagtggcatcggcagtaatggatcgggaatagtcgctgctggtggcggttctggagcagctacgttctctgtttctcaagcatcatcagatttaggtgagacattcagaggtataatcaggtctcaggatgtacggtctacagacagagatcgtgtgaaagtgatagaatgtttcaagccgggagatattgttagggcgcaagttttatcattaggtgacggaaccaactactatttgaccactgcaaggaatgaccttggggtcgtgttcgccagagctgctaatggtgctggtggattgatgtatgctacagactggcaaatgatgacttcaccggttacaggcgctacagaaaagcgcaaatgtgccaaacctttttgatatgtaacagcttatctacagtgcatatagacgcgtatatatttaaaagagggtattcgcttcttcttctttagattgcattctttgatggttaggaaaaagaagcgggaacgtgattaaactttttattctcttttatttattatatattatagtgcattatcattatctatctaaatttgcct

SEQ ID NO: 159 - DNA, 1857 bp, Saccharomyces cerevisiae
taaagtactaatctcatcctccttttgtttttctcgagagggcccccttattcgtccgcctgagattgcattggccgaattgaaaagtgacagttatgcacctcagcggctattccctgcgtcgcttgctgaagattgaggattataggaagtagtaagctggaaatggtaatttgtaaaaagaaaatttctaatactgtgacaatgttattaaatcggggttgtttttgtttggggcggccagcggaataatttgttttcaaggacagcagaagctcagaagaacaaaatctccgtgatcttttaaacttttttccattctgatggaataatggtcttgatcccctaaatatttccttttttattgcaattatgatagaaattaatagtagtctatgctggatgatatatatatctcttttgagcttgcttcaaattttttcccgttataatgatgagtgttttgcttattaagggtctaggacatttctatcagtttctataccaaaagaagaaaaagtggagaattgtttgtttattttaatattttgttctttagttttaaaaattcagaagagaaaaaaattttatttgtcacaaggaaataaaacataaacaaaaaagaaaaattaagatttgcaattctgccgcttaagcaaaagtagatcattcactggaatatatatatataaacgcatttataatcttgtaacgtgcactcaatttagctacgaaagccaaccagcaaggaaccttttatttgagtaggtacatttacatcttcgggtaacgcggtgaaattgaaaaattttaaggcattaataattgaaaagctagaagaaatggatgaatgaatgacattgcgaaccattgtgcaatgaacatcatccaaaagaaaacatcatttacacatattttctttccagggtcccactggtaaaatctattaacatataaaaagatttacaaaaaaactttagtgccataactacagcaggatcatcatatgtcaagactagaaatatactcgccagaagggctacgtctcgatggacgtcgatggaatgaactccgccgttttgaaagttccatcaacacacatccgcacgctgcagacggttcatcctacatggaacaaggtaacaacaaaattatcactcttgttaaaggtccaaaagagccaagattgaaatctcaaatggatacctcaaaggctttattgaacgtatcggtaaacattacaaaattctccaaattcgaaagaagtaaatcaagccacaagaatgaaaggcgtgttcttgagatacaaacctccctggtgaggatgtttgagaagaatgtcatgctgaatatctaccccagaacagttatcgatatcgagatccatgtccttgagcaagatggcggtattatgggatctttaatcaacggtattaccctcgctttaatagatgccggtatatcaatgttcgattacataagtggtatatccgtcgggctgtacgatactaccccattattagataccaattcattagaagaaaatgctatgagtacagtgacactaggtgtggtagggaagtcagaaaaactttctcttttattggtggaagacaaaattccgttagataggttagagaacgttcttgccatcggcatcgcaggtgctcatagggtaagagatttgatggatgaagaactgaggaaacatgctcagaaaagagtcagtaacgcctctgctaggtagaataaaaaacgccattaattgccactgtttatataaaagtacataaaaaacagtaaaattgaaaattgaacgcatttacattttcgtgtttctaccgtaaagcaaaacgc

SEQ ID NO: 160 - DNA, 2646 bp, Saccharomyces cerevisiae
cgctgtgattttctacaatcaaacaaccctgtgttttcgctctttttaggacttgtcaagaaaagaatgatgatactgacttttccatttgatattaatttcaactagcggagtttttccagttttcaaagtacaggacaaagtgttgtgtaacccggaccagatttacattggtgtactataatatgtactataacagattggaggtataaacctagagacccttctacaatacacgtacgaggaggtggtcttcgaaacttacagtaccacctgacatgtcgttattagagcaattagcaagaaaaagaatagaaaaatctaaaggccttttaagtgcggaccagtctcatagtacatcgaaaagtgcatccttactagaaagactacataagaatagagaaactaaagataacaatgctgagacaaaaaggaaggatctgaagacgctacttgcaaaagacaaggtaaaaagaagcgactttaccccgaaccagcatagtgtttcattgagtttaaagttgtctgccttaaagaagtcaaatagtgatttggagaaacaaggaaaatcagtgacattagacagcaaagaaaacgaactccctaccaaaaggaaatcgcctgatgataaactcaacttagaagagtcatggaaggctattaaagaaatgaaccattactgtttcttgaaaaacgatccatgcataaatcaaaccgacgattttgcgttcacaaactttatcataaaagataaaaaaaactcgttgagtacatcaataccgctatcgtcgcagaattcatcatttctgtccttaaaaaagcataacaatgagctccttggtatttttgtgccttgtaacctgccgaaaacaactcgtaaagtagccattgagaatttcaatagaccaagtcctgatgatataatacaatcggcccaacttaatgctttcaatgaaaaattagaaaacttaaatatcaaatctgtgcccaaggccgaaaaaaaggaaccaattaaccttcaaacaccacctactgagtcgattgatattcattcattcattgccacccatcctctgaatttgacatgtttgttcctcggtgatacaaacgcaggcaaatccactttgcttggtcatcttttatatgatctaaacgaaatttctatgtcatcaatgagggaactacaaaaaaaaagcagtaatttggatccttcatcttcaaatagttttaaggtcattctagacaataccaaaacagaaagagaaaatggattttccatgtttaagaaagttattcaggtagaaaatgatttactaccgccatcatcaaccttgacgcttatagacactcctggtagtatcaaatacttcaataaagaaactctgaactcaattttgacctttgatcctgaagtttatgtattggttattgattgcaattatgactcgtgggaaaaatcattagatggtccaaataatcagatttatgaaattttaaaagtgatctcttatttgaacaagaattccgcatgcaaaaagcacttgataattcttttgaataaggcagatctaattagttgggataagcaccgactagaaatgattcagtctgagctaaattatgtgttgaaggaaaactttcagtggacagacgcagaattccaatttatcccgtgttcgggtttattaggttcgaatttgaataaaactgaaaacatcacaaaatctaagtataagtcagaatttgactctataaattatgttcccgaatggtatgaaggtccgacatttttttcgcaactatatctattggtagagcataatatgaacaaaatagaaacaactttggaagagccatttgtaggcacaatactgcaatcttctgttcttcaaccgatagcggagataaattacgtgtcactcaaagtcttgatcaacagcggatatattcaatcaggccagacaattgaaattcatacacaatatgaagattttcattactatggtatagtttcaagaatgaagaattcaaaacaaatactggagactaacacaaaaaataatatatcagtcggtttgaaccctgacattttagaggttcttgttaagattcataataccgaagacttcacgaaaaagcaatttcacattcgtaagggtgatataataattcactctagaaagacgaatacactatcaccgaatttaccaaacacactaaagttgttagccttgcgtttaataaaattatcaatacaaacgcacgcgctaagtgatcccgttgacttgggttctgaattgcttctttaccataatttgacgcacaacgcggtaaaattggtgaagattctcgggactaacgacatctcaattaatccaaatcagtcacttattgtcgaagtcgaaattatagaaccagactttgctcttaatgtgattgattccaaatacattaccaacaatattgttttaacatcaatagatcataaggttatcgcagttggcagaattgcatgccagtaatcctacaactaagaaattatactaggcattcatacttattgtttaatatataaaatgaatagtaataagttgatgatagattgatttttttaacccattttacacatatcttatgaaagtgata

SEQ ID NO: 161 - DNA, 6001 bp, Oryza sativa
cacgttgcgaaatgctgactgctgaagctgcttatatatgtgatgattgtatttttctgtgtacgctagcgtcattacgcggaggcccatgtatatgtagttttatgaacttagtattatcaagcaaagaagtacagtgaacttgtccttataagttgcttttatttttatccaagtttgaccaactttataaaaaaatatactagcattttcaacataaaataaacatattatcaaaatatgttcaatgttaaatttaataaaaggaaaaaagtccactttgactcccttaaaagtcacccgaatctaatccgtgaccctcaaccgtaaaaccggataggatgactccccgaactattcaaactagtgcaatttgactccctcagcggttttggatggcggttttgctgatgtggcgttgacgtgccgacccgatggcaaccgtgcggtgccgtaccggcccatgggctcagacgtcgggccaagcacggcacggctgaacgggtcgtgccggcacggcccacgagcgggcgtgccgtgccgttcctgggccggctacagtgctgccgtgctcgggccggcacgccttggcccggcccatttggccaggtatactagtcggctccagtcctcctccccccagcgacctaagccgccaccgccctcgccgcgctaccgccagcgccgcctgccgtccctccgtccctcctcctccggcgggcgcgcggcctgccgtccctcgccgcgcgaccgccagcgccgcctgccgtccgccgtccctcctccgccagcctccgtcgccgcctcccaccagcgccggcccgtcggcgtcccccaggccccagcgcgcgaccaccagagctcgccgctgccggagctcgcccgtcatcgtcgctcaggcccccaggccctcgccggagctcgcccgtcatcgtcgcccaccgagccacttcatacttcaatcaagctatttgttcaaagcctcctttcttgatttgatggtagggttagtgttatttgtaaagagaaaaccagcttccagatctcgaatttgcctcaaacttatcttctcttgtagatctggaagctaggttttctctttacaaataacactattttttcccccattaggtctgccctgtgtcagcaggatgccgcgcaaggttgtctctgggcctgactacgatgatgagtacaatgatgactatgatgagtatgatgaagactatgatgattacggtgggactgggcacagtgacgacattcagcaccctacgaaggagaaaggtattatgtcaaaggtttgaagctagtactagacagtgtacacctcagcatgtaagaatggtgaaatagctattggagtcgcttcatgatgcacacctaacatatctactcgtgtaggttagtcacggcggtgtaggttactaggagccttcacccgttatcataatttgctcagtggtgttaaatgttgttaatgtcattacattgtttccatcctgcattcgtacttgctatcgcatcctctattgcctgattatgcaaataagaatttctagtgcttaattactctaaaacttccaatagcattgcttgttcaaacaaatgcagtgatcgtgtagcttatgtttgccgattacctggtcttgtgataatttccttgcccatttatcccatcatatgcacttcagatatttgttttcttgaaggcattgttattcaacatgcattttttggaatgagtcaaatatcattcatccagtccatcaaaataaaaacttactacaaattaaatctacccaaattgggtgagaatcgaaacatagctggctgccagttagaactaccagtattacctactggttgcttgctgaatcctggtgcatatgcatattattgttttatatatttgacacattttgaaataattcatatgcttatacatttaaccgttgctttccgcataagctccacgcatcgaatgctttgctttgttgttgtacagtgaagtttttttgtgacttactcagcatatcaagctaactgcgtgtagtgcagctccttgatctctaatgttatgtcaccactctattgtgcagagtcatcgaagaagtcctcaagtatggtgcctgtgctttggagatgctccatgtgcatgttcgataatcatgaaagcatggtgtattgtgagatgtgtggggtttttcgagaatcctttatgaaatctgccaaggatggttcaataaaaggtaacatccttcacccattctaattctctttgaatcacaatttgtattctgacaaggaattctaatgtaatcatagtgtactataactattaaattacagtccatgggataccaagtgattttgggacaccttcgatgccgaaatctgattctacaaagatgccagtgaatactcgtactacagactttggtggtgaccctgagataaagaatgctagcatatctcatgagaaaggtactgctggtgcaaatggtagatgctgtacaattttgtgtatgcaactctgttctacctttaaactagcttctcctaccataacaccttattgagttatgaaaaggataattcataattcaccatataaaagaatcacattagctcatcttatgtgcgggaagcagattttgatccttttctttcccaagcaccattgtcacttactgtggctgaacagattgttcccttgcataccactaaaaaatgtttcacttgttggacaacaacaacccacagctcacgtgtcatgccctctgaagtctgaaccaagctacttttgtaagggtgacttatttgtacttgatttgcagatcttcccaaccagttgtatcatctgttggttgataagccttcctgttgaaaaaaaagcctgttagctttgttcttttattgtcaccttaatttaaattattttattattcaacagttggttccacacagtacgcatctgttggtagctcatcaggcgctgggaaaaaggtgaaacacattgcacttcctgaagatgtgcctgtcgagaggacagctcaattgatttctgatcattttcagctgaaggaggaccagagtagtagggctaccagttctgcacagaatgaggatgtggcccagaaactttcttctgacatacagaagctaggtttagaaaagaatgaagtagatactgcaaaaccttatttacctgaagaatataagcctgagaagtggatgtttgctaatgaggaatcaggagtgctgagccaactaaaccttgcaatagtatgctatactcatcttctgttctgaatatggcatatgttccgtaacaattttgttattctaaaagtgctttgtctaaataggttactgtctacgaacaatttgtttaggtaggtcatgttgattctggcaagtcaacactctctgggagactgctacatctgttaggaaggatatcgaaaaaagatatgcacaagaatgagaaggaggctaaagaaaaagtaagtttattattgttgttattgtactatacttgatcctgatgttccattcatattcttgtattatggaaattattttttaccagggaaaaggatcatttgcttatgcgtgggctatggatgaaagcagtgaagaaagagaaagaggtgtgacaatgactgtggctgtggcttatttggagaccaataagtaccgtgtagttttgcttgactctccaggccataaagattttgtaccaaatatgatatctggcgcaacgcaagctgatgcagctattcttgttgttgatgcttgcactggttcatttgaagctggcatggacggtgaaggagggaaaagtgttggccagacaaaagaacatgctcagcttattagaagcttcggcgttgaacagcttattgttgcggtcaacaagatggatgccatcgggtactccaaagaaagattcgagttcatcaaggttcaacttggtagttttctgcgggcatgcaacttcaaagattcatctgttacctggattcctcttagtgctgttgaaaatcagaatttgatcaaaattccttctgatgtccgtttaacttcctggtaagttatgttttgacacactacttccatgccattcgaaacactacattgtgtagaatttttcaacagagatggctgtttcatgcatcttgcaatttctaaccttttcacatggtaatatcgacatattgtagtaagcactcgtgagaatagcattactgatattttgaaatatttgggaccatactgtcttattagaaaaaaaatcatttgtttatctgaagaataggaatcttgaactgatgtcctttcaggtatcaaggattttgtctcttggatgctatagattccttgcagcttccatctcgggatgtttcaaagcccctcattcttcctatctgtgatgttatcaagtctcagtcaacagggcagttggcagcatttggaaaattagagactggagctattcgaattggttcaaaggtacattcctcacaaatcagcagggactattgatacttgtatatttcattgagatgagctccaaatatgaggatagaggaaagattgatcaagagcgtttacattgtgacatttgctagttgcatatttgcatgccaatctttcagtaacagcatgatgtcggaatttggtctttttaaaaaatatatatatttatacttgcttttgtacgcaaatgtcttgacattcctatctgttttgacagcttggaacttgctgttgcaggttttaatttcaccttgtggggaagtggcgacagtgaaatccatcgagcgggattcaaattcatgtgacatagcaagagctggtgataatgtagcggttagtttacagggcatcgatgggagtaagctaatagcaggtgggattctttgcaaccctggtttcccagtgcctgtctctaacttcttggagctaagggttctagtgttggacgtcaccattcctatccttattggctatcaggtaaagatatgaccaaaagctctccttttgattattttcttccctgatgcaatctgataaaaatatgggcctaggtcgagtttcacatacatcatgtgaaggaggctgcgagggttacgaaaatcgtggcattgcttgacaaggctggcaaaccaagcaaaactgcacctcgatttcttaagtcaaagcagaatgcagttgtgcaggtaacaactgatcacagatccttgtgaggagccattgcttccgaagtcatcatttgcgatgttgtgattttcttgatatttgtcaggttaccttagacgctccggtctgtgttgaagaattctccaaatgccgagctcttggcagggcattcttaaggtctggtggaagcacaatcgctgttggagtcgtaacgcgggtactcgggcaagatcagaactgaaagacctccgcccaacatctgaaaatttgaacgtatctgcagccgtgccctgctttggggtccataatattgtagttgactcaaaacggtattgccgatgagaagaagtttggcgacggcatttttcactgtgtgttcgtcgccatttcagaatttaatccgtcactcttttagttatttgtaattttcttatgcctaatgaaaaagggggtttcaggatttcatttttatttagacaggggcacaagaaaagaagacagtgcaacgtactgcatataaaatcgcatccgacctgaccaatgaatactacatttgactgttggtgatagggaggaaattacgacatggccattaatccgttggtgatttaatgatctgatggcactagatctacatctacggagttgctagaaatatggcgctatatgctacagttgatttttttagccacttacacagtagttatatcttatttacaccccacttacatatataattagtatgtaattttcgaatttacatatgtaattttagtacttacatatgtaattt

SEQ ID NO: 162 - DNA, 901 bp, Synechocystis PCC6803
ctatgagcagcagggctcaccagaggcgcaacggctagaactgcggctgcaagccatgggaattcggctatgacgggcaaagtctatctcgtcggcgctgggccgggcgaccctgaatatctgacgctgcaggcacagcaatgtttgcagtcagcagaggtgttgatctacgacgcgctgatcgacccccgaattctcgacttagtgccagctaattgcgatcgcattgccgtgggtaaacgcggtggcgcggagagtacgccgcaagccactatcaatcaactactggtcgagcactgccagcaagggcgcaaagtcatccgcctcaaaagtggcgatccctttgtctttggtcgcgctgccagtgaattggatgcgctggagcgatcgggctgtgattatgctgtcctgcccgggctttcgaccgctttagcggctccactgttggcgggcattccgattaccgatccggtgctgagccgtggctttgcggtttacaccgtccatgagccagacgcgttgaattgggaagcgctggcgcaactggaaacgctgattctgctgatgggtagtcgccacttgctgacgattggccacgagctgattcggcatgggcgatcgccggatagtcctgtggcgctgattcagtgggccggacatccacagcagaccgttttggaaagtagcctcagccgcatggcgcagcagtggggcgatcagccgttatcgccctgcgtaattgtgattggcgaggtggtacggttgcgaaagtactgggcgcactaccgttacgatggctgagcagccgctgatcggtaaaaccattttgacgacgcgagccgcggggcaatcttcgccctttgccgcacaactgcgggccgctggcgcagccgtgatcgag

SEQ ID NO: 163 - DNA, 774 bp, Xylella fastidiosa
atgagcgtcaccctggtgggcgctggcgccggcgacgccgggctactgaccttaaatgcactgcgcgccttgaatgaagccgacatcatcctctacgaccgcttggtcagcgacaccgtgttacaggtggcacggcgcgatgcggagcagatcgaagtaggcaaatccgcgacaggccacagtgtgcgccaagaagacattcacagcctgatgctgcaacacgcccgtgctggccagcgtgtcgtacggctgaaaggtggcgatccattcgtcttcggtcgtggcggcgaagaactggaatttttacgtacccacaacatcccctatgaggtcatccccggaatcactgccgccctggcctgtgccgcctatgccggtatccccttgacccaccgcgaccatgcccaatcgctatgcctgatcaccgcccattgccaatcctcgctagacaccctggactgggctgcactagcacaagaacgccaaacgctggcgttctacatgggcgtggcggggctacccaccatccagcaacgcctgtgtgaggctggacgcgccgaaacaacgccttttgcactgatcgaaaatggcgcacgcgcgcaacagcgggtgctcaccggaacgctgaaaacactcgcgcacaccgcacagacatatgccgtgcgcccccccgcactgctgatcctcggcgaagtcaccacgctggccgaacacctgcattggttcggcaccgcaccattatctgccccatgcccccccgcactcatcctataa

SEQ ID NO: 164 - DNA, 1637 bp, Zea mays
ccccgcgcatcgccatggctctcgccgtccgcacgcctcgcttccagcctcgaccggcctccatttctgcgcccacaacacccgcatcgacctccctcgccgccgggaacgcgaggccccgcccctgcgccggcgccgccgttcgcgcctcgcccttcaccgaggccacctcctcctcgcgctaccgccgcgacgcctggtcatacgccgccgatggctcctccaactccgcatccccgtcctccgctgccgctgctgccgcgggccgtcgggatgacgagatcgcgctgcagctgccggaactgcggaggctcctggacgtgctgagggcgtccagggggaggggcgccgaggagggcggcggacccggggaggtggcactggtgggcacagggcccggggaccccgagctgctcacgctcaaggcggtccgggccatcgaggcggcggacctggtgctctacgacaggctggtgtctaacgacgtgttggacttggtcggggagggcgccaggctgctctatgtcggcaagaccgcgggataccacagccgcacccaggaggagattcacgagctgctgctgagctttgcggaggccggtgccaatgttgtgcgcttgaaaggtggcgatcctctggtttttggaaggggtggagaagagatggatttcttacagcaacagggaattaaagttgaagttatcccaggaattacttctgcttcgggtattgcagcagagctaggcattccgttaacccatagaggtgttgctaccagtgtcagatttttaactggccactccagaaatggtgggacagatccactatatgtagctggaaatgcggctgatccagacactactttggttgtgtatatgggtttgtcaacacttccatcacttgctccaaagttaatgaagcacggcctgccaccagatacccctgctgttgcagtagagcgcgggactacaccccaacaacgaacggtgttcgcctcgttgaaggatcttgtggatgaagtcaagtcagccgatctagtttctccaactctaataattattgggaaagtggtatccttgtcacccttctgggttgagtcatctgaacatgatgcactgaaagttcagagctcgtatgcaaatgaggcagatgacaacagattttcttggtttttagtgactggacaatacttgagaaatgcaagatcccagatatgggagcacaggttcgacctggtgtacacagaaacatctcaggaagcatggatcctgaatggcggatggtagcttaagcttataacagacttggggcagaagcgcacttggactgatcatgcttgattctttggcctaatctacatgagattcacaatttttcgatttagttgagttcgacaatagttgtgtgcttctttgttactagtagccatgtacgtgcggcgcagcggtgtttacgattctatgccctagcatagtaaggctattccaacgctgccacgttatgattttatgataatgggagtttcgtagcaccatgataatgagaaatagtgctacgaagctcttattatatgacaagtgccataaatcgtagcacttatgattttatgatatggggagcttcgtagagctctttct

SEQ ID NO: 165 - DNA, 1794 bp, Zea mays
ggcagccagcaggggaggaggacacgaatcgtagtcggcctcccgcccgccccggcaattgttgttgctgctgcgcgcagggcggttctggattgcggtctgccccacccacgaacaatccatggctccatctccgcctcggcgtgctgcgctcctcctcaccactgtgcttctgctggcggcggccgggtccacccccggcgccacggctgctggcatcttccaggtgcgccgcaagttcaccgccggggtgggagggggtgctggcgccaacatcagcgcccttcgcgcccacgacggcacccgtcacggccgcctcctcgcagccgccgacctccctcttggcggcctcggcctccccactgacactggcctctattacacggagatcaagctcgggacgccacccaagcactactacgtccaggtcgacaccggcagcgacatcctctgggtcaactgcatcacctgcgagcaatgcccccacaagagcgggctcgggttagacttgacgctttacgaccccaaggcatcctcgaccgggagcatggtgatgtgcgatcaggcattctgtgcagccacctttggcggaaagctgccgaagtgcggcgccaatgtgccctgcgaatatagtgtcacctacggtgatggtagctcgacgataggttcctttgtcaccgatgcgctgcagtttgatcaggtgactagggatgggcagacacagccggctaatgccagcgtcattttcgggtgtggtgctcaacaaggtggggatttgggaagttcaaaccaagcccttgatggaattcttggttttggtgaggcaaatacatcaatgctatcacaactaactaccgctggtaaagtgaagaagatatttgcccattgtttggataccataaaaggaggtggaattttttctattggagatgtggtgcagccaaaagtaaaaacaacgccattggtagccgacaagccacactacaatgtgaaccttaagacaatcgatgttggtggcactactctacaactcccagctcatatttttgaaccaggagaaaaaaagggtaccataatcgacagtggtaccaccttgacataccttccagaattggttttcaaagaagtaatgctcgcggtatttaacaagcatcaggatataaccttccatgatgttcaaggttttttgtgtttccaatatcctggaagtgtagatgatggattcccaaccatcacattccattttgaggatgatcttgcactacatgtgtatccccacgagtactttttcgcaaatgggaatgacgtatactgcgtgggattccaaaatggtgcatcacagtcaaaggatggaaaggacattgtgcttatgggagatcttgtcctttccaacaagttggttatctatgacttggaaaatcgagtcattgggtggactgactacaactgttcgtcgagcattaaaattaaggacgacaaaacgggcgcaacatctactgtcaattcacatgacttgtcctcaggatggaagttccactggcacatgtccccggttctattgttggtaacaacggtgtgcagttatttaatatgctaactccactgtaaaggaaatccatctggttcgtatatcctttccacgaaaaggatcggagagatgtagggctttctttaggttgtgttctcccaccacggaaaacaatggaaacagaaaacactgtaatgctttactgagccattgtttaactaggtaatgctgaggtgaggtaatgttctgtcatttctttgggaaaa

SEQ ID NO: 166 - DNA, 1937 bp, Zea mays
gctcctctcccaccaccgcccccgccgtcgcctgctgttccatgaaggactaatccgtcggtccacttctcagctatggcgcagctcgcggtgcggtcgctgctgctgtccctgctcctggtctcgccagttgtggcttcacctggtattgtgaagctcaactcgtcgtcgaccctcttcggcatcgagttcccgccgttcaacaccgccgtcgccgcgaccggctgcgacagcaagctggttgcagccgacgaggcgggggatgagcagaagcagccggcgagctcgtccccgtcgctgcagctgcgcatgaagcaccggtccgcggaggggggcaggacacggaaagagtcgttcttagataaggccgagaaggatgccgtccgcatcgagacgatgcaccggagggcggcgcgctccggcgtggcccggatgccggcgtcttcgtctccgcggcgggcgctgtcggagcggatggttgcgacggtggagtccggcgtggcggtcgggtccggcgagtacctgatcgacgtctacgtcggcacgccaccgcggcgtttccggatgatcatggacaccggcagcgacctcaactggctgcagtgcgcgccgtgcctggactgcttcgagcagcgtggcccggtgttcgaccccgccgcgtcctcctcctaccgcaacgtcacctgcggcgaccagcgctgcggcctcgtggcgccgcccgaggcgccgagggcgtgccgccgccccgcggaggactcctgtccgtactactactggtacggggaccagtccaacactaccggcgacctggccctggagtccttcacggtcaacctcacggccccgggcgcgtcccgccgtgtggacggcgtagtgttcgggtgcgggcaccgaaaccgcggcctcttccacggcgcggcggggctgctggggctcggccggggcccgctgtcgttcgcgtcccagctccgcgccgtgtacgggcacaccttctcgtactgcctggtggagcacggcagcgacgccggcagcaaggtggtgttcggggaggactacttggtgctggcgcatccgcagctcaagtacacggcgttcgcgcccacgtcgtcgccggcggacacattctattacgtgaagctcaagggcgtgctggtgggcggcgacctgctgaacatcagctcggacacgtgggacgtgggcaaggacgggtccggcggcacgatcatcgactccggcacgacgctgagctacttcgtggagccggcgtaccaggtgatccggcaagcgttcgtcgatctcatgagcaggctgtaccctctgatcccggacttcccggtgctgaacccgtgctacaacgtctctggcgtggagcgaccggaggtgccggagctgtcgctgctgttcgccgacggtgccgtgtgggacttccccgcggagaactacttcgtccggctggacccggacggcatcatgtgcctggcggtccggggcaccccgcgcaccggcatgtccatcatcggtaacttccagcagcagaacttccacgtcgtgtacgacctgcagaacaaccggctgggcttcgcgccgcggcggtgcgccgaggtgtagtgtatagccgccggcgaggcctcctgagactgagaggacgaacaattcgaactcagtcctcgcttgattgattggattgggaggcaaattgggtgtagaaatttttggttgggaaggacggtggcacgtacgcaagctctaatacatagttttttttgttgcatttatctccaaggagagaaggttagggatattttattaaggaccgtgcaggtgggttgtaacgggaaaatactgattttgttcccatgtacaatacccgtttcttcactcaaattttagaaattgtaagttgtagattaagaatgagagtgcacacaaaaaaaaaa

SEQ ID NO: 167 - DNA, 1830 bp, Zea mays
attcggctcgagcgccaaacggaccaagaatttccacgcagatttcaacagagatgatgggctcgcccgccggtgctggtgcactcgcccatgtctcgcgcgtcgcaccgccgaggacggcgccccgattcgtcctccttatttaggcaccgtcttttgtcccccccatccgttccgagccgaaccaaggcgccatgagctccccggccgtgcgccgcgtcgtactcctctcgtcactcctctgcgccggagcgctcggtttcttgccctgctcccatgccgccgcggtggcgcccggctacgtcgccgtctccgccgccagcttcgtgccgtcctcaacgtgcagctcccccgaccgagttccgccgcaccggcggaacggcacgtccgccgtgctgcggctgacgcacaggcacgggccgtgcgccccctcgcgggcgtcctcgctagcggccccgtcggtggctgacacgctgcgcgcggaccagcgccgggcggagtacatactgaggagggtgtcggggcgcgcgcctcagctgtgggactccaaggcggcggcggcggtggcgacggtgccggcgagctgggggtacgacatcggcacgctcaactacgtggtgacggcgagcctcggcacgccgggcgtggcgcagaccatggaggtggacaccggcagcgacctgtcgtgggtgcagtgcaagccgtgcgccgcggcgccgtcgtgctacagccagaaggacccgctcttcgaccccgcccagtcgtcgtcctacgccgccgtgccgtgcgggggccccgtgtgcgcggggctgggcatctacgccgcgtccgcctgctcggcggcgcagtgcgggtacgtggtcagctacggcgacgggtccaacaccacgggcgtgtacagctccgacacgctgaccctgtcggcgagcagcgcggtgcagggcttcttcttcggctgcgggcacgcgcagagcgggctgttcaacggcgtcgacgggctcctgggcctcggccgcgagcagccgtcgctcgtggagcagacggcgggcacctacggcggggtcttctcctactgcctcccgacgaagccgtccaccgcggggtacctcacgctgggcgtgggcgggccgtcgggcgccgcgccgggcttctccacgacgcagctgctgccgtcgccgaacgcgccgacctactacgtcgtcatgctgacggggatcagcgtcggcgggcagcagctcagcgtgcccgcgtcggcgttcgcgggcgggacggtggtggacaccggcacggtcgtcacccgcttgcccccgaccgcgtacgcggcgctgcggtccgcgttccgcagcggcatggcctcgtacgggtacccgacagcgccgtcgaacgggatcctggacacctgctacaacttcgccgggtacggcaccgtgacgctcccgaacgtggcgctcaccttcggcagcggcgcgaccgtcacgctgggcgccgacgggatcctgtcgttcgggtgcctcgcgttcgcacccagcggcagtgacggtggcatggccatcctcggcaacgtgcagcagcgctcgttcgaggtgcgcatcgacggcacctccgttggcttcaaacccagctcctgctaactcatggattaacagtcggcgacttgggatcactactagtagtagtatatgcacgtacgtagacgagagtgcagagatacatacaaagttactgtacatgatgatagtaaagataaacttgcaggagagcgtataccatacacagcacacagcagtagcggtggaagttctttcgttggtggaaaaaaaaaaaaaaagg

SEQ ID NO: 168 - DNA, 1050 bp, Glycine max
cagccatgttcttaaccagaagcgcgctttttcgcttttcaaagtctctcccttatgccccttcactctcccttaaaccctccatggtcaccttctcctctactcccaattcaggctggagaaatgcagcagaaggaggaagaagagacggaagaaccaattggacgtatgattctgccgaggcaagacgcgaggcagatgaaatgtctgagagtgccaaagaaacgatgaatgaaggctatgacagggccaaggatcaagcgcgggaagccaaagacagaacaaaggatttcgcacacgacgcaaaggagaagacaaatcagcctcaaagtcaccaggtatctacaattctgccactgctgacaacaaaaccggttccaaggtcggagagtacgcagattatggttctcagaaggcgaaagaaacaaaagatgcaacgaaggaaaaagctggagagtacacagattatgcttcgcagaaggcgaaggaaacgaaggacaagacaatggaaaaggctggagagtacactgattatgcttcgcagaaggcgaaggaaacgaaggacaagacaatggagaaggctggagagtacacagattatgcttcgcagaaggcgaaagaagccaaggacaagacaatggagaagggaggggaatataaagactatgctgcagagaaggctaaagaaggaaaagatgctactgtgaataagatgggagagtataaagattatacggcggagaaggctaaagaggggaaagatacgacgttggggaagcttggggagctgaaggactctgcggctgatgcggcgaagagggcagtgggttacttgagcggcaagacagaggaaaccaaagagaaagtctcggagacggcagaggcgacggctaataaggcggcggagatgaaggaggccaccagggagaaggctgccgggactgcggaggcggccaagaacaaggccgcagaggtaaaggacagagctgcagaaaccgcggaggcggccaagaacaagactgccgagactgctgaggcagcgaagcagaa

SEQ ID NO: 169 - DNA, 1378 bp, Glycine max
gtacttccttacaatcaaaaccaacaacaactatggcaagttatcaaaagcactacgatgatcagggtcgcaaggttgacgagtatggcaacgttgagaagcaaaccgacgaatacggcaaccctgttcatgctgctagtgtcacctatgtagccaccagaactgctgctggtggttacagtgatgacattaataagcaacatgataccaccaatgcctacggcgtagacactggtagacagcattctagtggtggctacgatggtgacactaataaacatcatggaactactggtggctataatgatgacaccaatagacatcatggaactaccggtgtctatggtatagacaccgataggcaacaacatgggactactggtggctatgccggtgacactggtaggcaacatgggaacatcggtggcccttactatggaaccaacaccgcagacaccggtactggtcccagaagtggaaccacgggcggcaccggttatggaggcactggtggcactgattatggaacaactggtggcactggttatggaagtggaactgggtatggagtcaacactgggggtgcgcacactgaagcaggatataggaaggaacatcgtcagcatgaccaatctcatggtgatcagaacgagaagaaagggattatggacaagattaaggagaagcttcctggaggacacagtgacaagtagatgcatcgtgcatcatgcatgcatgcatatatataatattgttgtctttgaataaatttgctgcatatgtacttacgtacgtacagtgtcttgtcatgtatgtggaggatatagtatatggttatagtttatgtagaagaataaaaaatgtatgcatgtagtaatgtaagggtcttatatatgtggctgaaatataaaccataataaaggcagagatgttgtgccaaaaaaaaaaaaaaaaaaaaaaaaaaaaaaaaaaaaaaaaaaaaaaaaaaaaaaaaaaaaaaaaaaaaaaaaaaaaaaaaaaaaaaaaaaaaaaaaaaaaaaaaaaaaaaaaaaaaaaagggggggccccccccttaagaattttcccccccggaaattaatttcggaccgggccctgggggggacccaattttcccttatgggggggctataaaaacttggggaaaaaaggggaaaaaatttttcccggggaaaaatgttttcccgtaaaaattccccaaaaaaaaaaaaccgaaaacaaaaaagggaaaaccccggggggcctaagggggggcccaacccaactaattgggttggcccaactggcccttttcaaggggaaaaactttgggccctcttctttaatgaatgcccaaccccggggaaaagcgttttccttt

SEQ ID NO: 170 - DNA, 839 bp, Zea mays
ccacgcgtccgcacgatcgagcacacaaccacgaagactcgtttattaggagaaaccacaaaccaccaagccgtgcaagcatcatggagtacggtcagcaggggcagcgcggccacggcgccacgggccatgtcgaccagtacggcaacccagtcgggggcgtcgagcacggcaccggcggcatgaggcacggcacgggaaccggcggcatgggccagctgggtgagcacggcggcgctggcatgggtggcgggcagttccagcctgcgagggaggagcacaagaccggcggcatcctgcatcgctccggcagctccagctccagctcgtcggaggacgacggcatgggcggaaggaggaagaagggaatcaaggagaagatcaaagagaagctgcccggaggccacaaggacgaccagcacgccacggcgacgaccggcggcgcctacgggcagcagggacacaccggcagcgcctacgggcagcagggacacaccggcggcgcctacgccaccggcaccgagggcaccggcgagaagaaaggcattatggacaagatcaaggagaagctgcccggacagcactgagcggcgcctatacacgtggctgtgctttgctggcgcgtcaaagccgtaatgttcagtgtttcatagataataagataaacccatgaataagtgtcctacccttgatcatgtgacagggacagggacagtttcctgtacttgtggggtgaatttgtacgtgtgatacggtaactgggtccgtgtactgtttatgctacgttttccatacttaaaagtacgtatatataaaaaaaaaaaaaaaaaaaaaaaaag

SEQ ID NO: 171 - DNA, 1341 bp, Zea mays
cactgaagaagccagtcaatagcgagttctactactagtagctagcctgctgatctgttctgttgtttagttcgcaaagccttctgtttcggcgaccatggaggatgagaggaacacccagcagcaccagggcggtgaggcccagcaggacgccgccgatcaggtggacgtgaaggatagggggctcctggacagccttctcggcaggaagaagcacgacgacgaccaggagaagaagaagcagacggatgagctggcgaccggcatggagaaggtcacggtgtccgagcccgagaagcacgggcacaaggaggaggagcacgaggtcgtcggcgagaagaaggagggccttctcgccaagctgcaccgcaccagttccagctccagctcgtcgagcgacgaggaagaggaggcgatcgatgagaacggcgagattatcaagaggaagaagaagaagatgggcctcaaggagaagctcaaggagaagctgccgggccacaaggacggccaccacacggccgcaccgtccccggcgcccgcgcccgtggagacgcatgcccaccaccaggaggaagcgcacaggccgcacgtcgtcccgaccccggccccgccgcctccaccgcacgtccaccagcacgaccacggcgtcgtcgtccaggacgacgtgaagaccgggaccccgccgcatgcaccggaggaggagaagaaaggcctgctggacaagatcaaggagaagctccccggtggccacaacaagaagcctgaagccgctgccgctgccgcaccggctccgcccgtccacgcgccggcgccggcgccgcaggcggagaacgtgagcagcccggatggcaaggagaagaagggcttgctgggcaagatcatggacaagatacccggctaccacaagagctcagctgaggaagcagaccacaaggcggacgccgccggcgagcacaggaccagctcctaaggtcgcagtcgcagcgcgtgtcctggccgtggccgggccttgggcgatcagaaggtagctagcgttggcatgtgggttcggttctggtttgcttttaccaaaagtttgtttcaaggtggatcgcctggtcaaggtccgtgtgctttttaaggtggatcgcgtgactggcagtgagtgttgctgcttgtgtaggacgtggtacgtacgggttttattttggttccaagtcaaaagtcacggtcggtctggatgttgtgtactgggtttgttgaattatgagcagctgcgcgttgtaattcggctgggctacctggatgcgttaataattgctttggtttctgcccaaaaaaaaaaaaaaaaaaaaaaaaaaa

SEQ ID NO: 172 - DNA, 2073 bp, Saccharomyces cerevisiae
gattgtgttacacgctctatcttctttctcacaccttccttcttctacttccggagtatagtctctagcttatccttgatggctctttttatgcaggcagaataattacagtgacgtatttgtggcttctttggcacaacgttttgttccacgatcacctcatatcaccgttaagttcttcatcgtccaattccggagttccccgtcagccgtgcgaccatgtggtatttcacccgaataattaagggaaaacagaaggagaattacgtatcttaaaggagctagactctttgcctcattgaggctttctatacatcgggtccccatgtatggtccgttccatagtcgaagcatccttaatttcctgtgacattacagtagtttcgccgtagagcctttcacgggaagaatatgttcagtggttccaggtatgggtttgaggatgttcttgtaaggtgtgtagatcccatcttttttagggatcacaaagggaaaataactacacagcatgtggtggtacagatgaggtcaatggcagttttgccttagttgtaagtaattaaccaatccttgtcgtgcttctcatgaatgtgtatgaatttatgttcatcagaatatccctctttaaccacagttcttgcgtaaagcatagtctggcttcctttagaaaaaggaaatgtggtaattctaggaccacgttttgggcttcgtcatttcttttcactcctccacttttatgacatttgatcgcaagttcctccatacatcatgcctagtaatcaaaacaaataacgcacaagggagtaaagggaaatggttagaaaagaccgaaatcctttttttggtctccgttacgtgcttgttaatcaggctcccttgaagcagtcaatatttcttggactataaaagcacattactatttcatcaaaaaaaggatacatacctaccctcaactcttaatatctactagcagcagagccaaacactaccgcataaaagctaagtacgaataacaattaagaaatgtccaatctattaaacaagtttgctgataagttgcacggcaacgatcatgatgaacgttacgaagacgacaatgacgaccagactagacaacagcgtcatgaaaaacatcaacagagggaattcaggaatcaaggatccaaggccgatccctacggcgaagaaaaccaagggaatttccctcaacgccagcagccacagtctaatctaggcggtaacacgcagtttggcggtaacgacttccagcaacaaactactgactacactgccggcactggtggtggcacttatacccaaacttaccgcgaaactaacactcaaggtcagttggacgacgatgaagacgatgacttcttgacttcgggccaacagcaaaaacaaggtcgtacaagaggtgctcaaagtaaccgctaccaatcctctaatatcggcagcggtagacgcgatctgtctgggtcaggaaacgatgaatatgatgatgatagtgggaaccaaggcgtctggtagatgcggtggtcgaagcttctattacatgcctgaggtgcgggtctcacccttgagcagcaagtgagaaattttaccctaatttcgtcttcttttttcttttttcttcatctggacctattattggtcatgatgccactttttacaaactatttcatatgtttaatctagtttatttagatctacagctgtcagtttatacgtttttattaatgtcagtttgatttgattagtagtgacctttttcgtcgaggtatgccgtttcacggacctccagatccaggtgtataacaatagaattatgggaaaacggggtgggaaggtcgttgtctaactcaaacctcctggaattagcgggtaaagtgtcgttattgtgctgggcaacaacttttttttacgatttctttttacctctcatctaggttagtgttagttgtaaaaacccgagcagattggtgccttttcaagtgcgttcttacaaccatacttttttattctagaacgtgtaagcaattactttctcaaaaaagcaaacgcaataaagat

SEQ ID NO: 173 - DNA, 1106 bp, Saccharomyces cerevisiae
aatatgcctgtaaaaactatgtaatatatcacaagtaacaacatttcatcaccattactaccattatgtagaaatttatgagcaaagacaaataagtaaagaaaaagacattgatataatataagagtatgctttcttcattttaatgtttggttgtgaattgaaagaataccattcgggcacgcaatagttatgaacttaaccgagctcaaataatttaaagataaaagataaaagataaaagataaaagacaaaagaaaattcatagcccatgttgaagtatcccagcgggaaatgttgctatccaacagaaagtaccaagccagtttcaaaaaggtacagaattaagtgatgctatccgtcccacaactaattttctccagcggaggaaatatacgcggagggggggaggaaaacctctcagtaagcaatgaagggatagataatgggggcgcgcctgcctagcttaggctaagaaactccttcgaaaacagggggctgcgagcgcagaagcgaacacttgtcatttgtataaaaggactatttataagtttgctttttgtcactctcttggccctaattacccatactattgtaacaattgttgtgtaaactcaattatacaaataaacgaacaatcaacagtaacaaaccgctcaagtgtacaaccaatcagaaaaaatgacgagaacaaacaagtggaccgaacgtgaaggaaaggctgatccaaagtacttttcgcacactggtaactacggtgaatctccaaatcacatcaagaagcaaggttccggcaagggtaattggggtaagccaggcgatgagattgatgacttaattgataatggtgaaatacccccagtgttcaagaaagatagaagaggctcaaatttgcaatcgcatgaacaaaagtttgaaaacgtccaaaaggaatgagggcgttttcaagataaaaaaaggttttttgatctctgaaggatagtggccttctccactgatttatatgcatctataggtatatacttgcatgcctacttcatgacttatgtaatacagttttcttacatccatttaatttacgttcgaagaagttttcaacatttgt

SEQ ID NO: 174 - DNA, 1042 bp, Saccharomyces cerevisiae
ggtacccctttaagacaactatctcttaaccttctgtatttacttgcatgttacgttgagtctcattggaggtttgcatcatatgtttaggtttttttggaaacgtggacggctcatagtgattggtaaatgggagttacgaataaacgtatcttaaagggagcggtatgtaaaatggatagatgatcatgaatacagtacgaggtgtaaagaatgatgggactgagagggcaattatcatccctcagaatcaacatcacaaacatatataaagctcccaattctgccccaaagttttgtcctacggcatttttcaatctttcgttatctgtgctctttactttagtagaaaggatataaaaaagtatagtcaagatgtctaacatgatgaataagttcgctgaaaaattacaaggtaacgatgattcccatcagaagggaaagaacgccaaatcctccaacaaggaaagggatgatatgaacatggacatgggtatgggtcatgatcagtcgaagggaatgaagatgggccatgatcaatctggaacaaagatgaacgctggcagaggaattgcgaacgattggaagacttacgaacatgaaaatatgtacgtttttggcgcattaaccaagtcctcttatttttttaatggtttatttatgaattgtttatgtttatgttctttatactcaaaatcaataagtgcttattttagcgaattttcttctacgaatatatataagtcatatctaagacttccatccgtgctttattacgtttgtatgatgcatacaatgatgccaaatcagcttgatgctgttggtattcagtcgtccgaaagcctgttgatgtgacactcaaatcttcggcatgtgtgaacggtggccgagcatagttcgtgaacatcatcacttaaaataagaactacactttacatcagcgtggaagataaaggttgttttaagctcaagggcgctggaggtgtagcgcttcggaggaaaataatattgaataacttcgctttttgttccaaattctaga

SEQ ID NO: 175 - DNA, 1446 bp, Saccharomyces cerevisiae
actgaaaatataattttactgacctacctacactgatttgtctcgaagtagatatgataccttgagcagcacgaggatattaaaaagtagggcaattctgcttttaacgtataagcaacaccaagtacacgtaatttattttgatgattcttctatattttttttttcttcattgttattttttcactatctttttcatccctccgcaaaaggacgcgatccttttttagcacgtgaacggtaataacgggtcctggacgatgtattagagtcacctaatcaccaagcgagccaatggcgactcacttgacttgcatgtttgcataacctatttagcgaaccctccaacttctgagcgcaccagcttaacttgtgcgctaagctgccttgcccgacatagtgccatcgctcattccacctcacacctgattaactaaaagttttaaaactacgggactgcgaaaaagtagagctacgttactgcagacctacaataattgcacacatcggcctgataacgaatgcttctaaaattctactgtgctactatcggctggtcgcgcccgacgggttcgctcagccgctctgcgccctcttactcttcagccattctgctgcggccgaagctataaaagtatgtcaatttggctttttccaaaatccccctctggctctttctcttctcaagacaagcattgaagagactcactagtaagcttaagatagtcctacacacaaccaccatgtctgctaacgattactacggcggaaccgccggcgagaagagccaatattcccgtccctccaacccgccaccttcatccgctcatcagaacaaaactcaggagcgtggatacccaccccaacaacagcagcagtactaccagcagcagcagcagcatcccggatactataaccaacaaggatacaatcagcaagggtacaatcagcaagggtacaatcagcagggctacaatcagcagggatataaccagcagggatataaccaacaaggccatcaacaaccagtctacgtccaacaacaaccaccccagaggggtaacgaaggttgtctggctgcatgtctggctgcattatgtatatgctgcaccatggatatgctattctaagagaacccgcaaaagtattcaagaatgaaaaaaaaaaaaagaataatctccccttctgttctttgcagttgcctttcttcccctcagtgttattttttttcacaaggagataaaaaaaaaaactttaacatgtcactttaagcatgtatgtaatacgtctattaattatatgtaacttttataactattttcatttctatgtgatccatttgcagttatgcaccttttttttttttccgaattgtgctatgtatatatcactagtaataatgtaccaaactatacaaacacgtaggatacagtaaaaaaaatttta

SEQ ID NO: 176 - DNA, 665 bp, Saccharomyces cerevisiae
cccacaaacacagaccagaagcactctagacggagagtaactagatgtacagcccctggaaaatcgttggtcaactttgaggttccggtcgtccccctcttgatctgaaaggtctttctctaaatctatattaaaacgtataaataggacggtgaattgcgttctacttcctcaattgcgtttgatcttatttaatctctctctatatatagaaaaaaaaaccatctgttattcgataatctcaaacaaacaactcaaaacaaaaaaaactaaatacaacaatgtctgacgcaggtagaaaaggattcggtgaaaaagcttctgaagctttgaagccagactctcaaaagtcatacgctgaacaaggtaaggaatacatcactgacaaggccgacaaggtcgctggtaaggttcaaccagaagacaacaagggtgtcttccaaggtgtccacgactctgccgaaaaaggcaaggataacgctgaaggtcaaggtgaatctttggcagaccaagctagagattacatgggagccgccaagtccaagttgaacgatgccgtcgaatatgtttccggtcgtgtccacggtgaagaagacccaaccaagaagtaaatctttcggaactctttgtagttacatgggtttttttctttgtgatgtgtgtga

SEQ ID NO: 177 - DNA, 1814 bp, Zea mays
ccacgcgtccgagtccttcttcgtaagccttcaaaccgacgaatttgagcaactgcacccagagcgcgatccattgccggggaagaagcaacttgttgcgagcctcctctatggcgagctccgaccatggttccaccaccgcccccaaggacgtgcctggcagctacggcctgccgctggtgggcgccgtgcgcgaccgcctcgacttctactacttccaggggcaggacaagtacttcgagtcccgcgtggagcgctacggctccaccgtggtgcgcatgaacgtgccgccgggccccttcatggcgcgcgacccgcgggtggtggcggtcctggacgccaagagcttccccgtgctcttcgacatggacaaggtggagaagaaggacctgttcacgggcacctacatgccgtccacctccctcaccggcggctaccgcgtctgctcgtacctggacccctccgagcccacccacaccaaggtgaagcagctgctcttctccctcctgctctcccgcaaggacgacgtgatccccaccttccgctccaacttctcctcgctcctcgccaccgtggaggcggagctggccaagggcggcaaggccgagttcaacaagctcaacgacgtcacctccttcgacttcatcggcgaggcctacttcggcgtgcgcccctcggcgaccgacctcggcaagggcgggccgaccaaggcggccaagtggctcatctggcagctccacccgctggtcacgctcggcctccccatggtcctggaggagccgctgctccacacgttccacctcccgcctttcctcgtcaagggcgactacagggcgctgtacaagtacttctccacggtggcgaagcaggcgctggacaccgccgagggcctgggcctgtcgcgcgaggaggcctgccacaacctcctcttcgccaccaccttcaacagctacggcggcctcaaggtgctgttcccgggcctgctggccaacgtggccagcggcggcgagaagctccacgagcggctggtggccgagatccgcggcgccgtggccgacgccggcggcaaggtcaccctcgcggcggtggagaggatggagctggccaagtcggtggtgtgggagtcgctgcgcctggacccgcccgtcaagttccagtacgggcacgccaagaaggacctgctggtggagagccacgacgcggtgttccaggtgaggaagggcgagatgctgttcggctaccagccgtgcgccaccaaggacccccgcgtgttcggcgacaccgccggggacttcgtgcccgaccgcttcctcggcgaggagggcagcaagctgctgcagtacgtgtactggtccaacggccgtgagaccgagaaccccagcgtcgacaacaagcagtgccccgggaagaacttcgtggtgctggtcggcaggctcctcctcgtcgagctcttcctccgctacgacacattcaccgccgaggtcggcaaggagctgctcggcaccagcgtcatcttcaccggtgtcacgaaagctacctccggtccgggcagcgagtaaaccgcccggccggcgcgcgtcgttggatatatgatgagtggacgtgacagagtgtcccattatttcttaatttcgtcattttcctccttccttctaataagacttctctctcaccctcggccccaccttcacgtgtgattggaggtgtttgtcgcttttgtaataattataatgcaggatggcatgttgcataaattgctccccaaaaaaaaatcttatctttcacaaaaaaaaaaaaaaaaaaaaaaaaaaggc

SEQ ID NO: 178 - DNA, 2419 bp, Zea mays
gaattcccgggtcgacccacgcgtccgcccacgcgtccggcatcaccacaccccgtctccaccccgtacaaatccaaaagagggcgaggagggaaacagatcggctggcggcaatcggtagccggcttggctggcacgatgggcggcgaggccgagggcggggagcggcggctggggcgggtgctgagctttgggatcccggacacggcgctggggctagtgatggggtacgtggaggatccctgggaccgcgacgccatctcgctggtgtgccgacactggtgccgcgtcgacgcgctcagccgcaagcacgtcacggtcgccatggcctactccacaacacccgagcgcctgttccggcgcttcccgtgcctcgagtcactcaagctcaaagcgaagccccgcgcgtccatgttcaacctcatctccgacgactggggcgggtctgcgtcgccttggatccgacagctctcggccaccttccacttcctcaagaagctccacctgcgcaggatgatagtatccaacgaagatatcaacatccttgtgcgtgccaaggcgcacatgctcgtcgcgctgaagctcgaccgctgctccggcttctccactccctccatcgcactcgtcgcccgttcctgcaggaaactggaaacacttttcctggaagaaagcacaattgatgagaaagaaaatgatgagtggatccgtgagcttgctacgagcaattctgttcttgagacactgaatttctttctaacagatctcagggcatccccagagtatcttaccctccttgtgcgcaactgtcaacgattgaaaactctgaagattagtgaatgtttcatgcccgatctggtcagtttgttccgaactgcacaaacactacaagagttcgctggtggttcctttgaagagcagggtcaacctgtggcaagtagaaattatgagaactactattttcctccttcactgcaccacttgagtttgctctacatgggaacaaatgatatgcaaatactgtttccatatgctactgcacttaagaagttagaccttcagtttacattcctttccacagaggatcattgtcagatagttcaacgctgctccaatctggaaaccttagaggtgagggatgtcataggggatcgtggactacaagttgttgcacagacctgcaagaaattgcataggctcagagtagagagaggagatgatgatcaaggaggtcttgaggatgaacaaggtaggatttcacaggtggggttgatggctatagcccaaggctgccctgagttgacatactgggcgatacatgtatcagacattacaaatgcagctttagaggcagttggtacatgcagcaaaaatcttaatgacttccgccttgtcctccttgatagagaagcacatataaccgaattgccactggacaatggggttcgtgctttgcttagaggttgcaccaaactacggaggtttgcattttatgtgagacctggggccctatctgatgttggtcttggctatgttggagaatttagtaagagtattcgttatatgttgcttggtaatgttggtgaatctgataatggaatcatacaattatcaaaaggctgcccaagcttgcaaaaactggaggtgaggggttgtctctttagtgagcatgctttagctttggctgcactacagcttaagtcactgaggtatctgtgggtacaaggattcaggtcatctccaactggaactgatattatggcaatggtacgccccttctggaacattgagtatattgttccagatcaagatgaaccttgcccagagcataagagacagattctggcatactactcccttgctggcaggaggacagattgtcctccatcagtaactctgctttacccggcattttgagtgtagatacttgctttttgccagactgaatctcatggtactaagttccattggtcccactatctgtgaagtaaatggtccctgttcttccaattgatgaggacatgcagacgttccagtgcaaagaaccccaaaggtaagctttaagcaggacggccagctctgaactgaggctagctgagaacaatcatgaatacctgaaggcagcacttatgtcagcttggcctagctgtccagtatgggcatgtaagctttaccatcttttgtagttttggagaaacaattttgcaataactacccttgtttagtgtatattatcgattttcgttcatatgctgttgtattgttgtattgaacaattatgtcaattaattagtctacactctacagtctaacttgctgtgattcgatgaatagtgtttatatcacccacaaaaaaaaaaaaaaaaaaaaaaaaaaaaaaaaaaaaaaaaaaaaaaaaaaaaaaaaaaaaaagggcggccgc

SEQ ID NO: 179 - DNA, 2345 bp, Zea mays
gcagagcagcgcaggcgccctgcacctccactctgcagctctgctccccctccctctctcccgctcctcctccttttccttctccagctcggccgcctcagcccgcgccgcgatgtcagaggaggacgaggaccagccgccggccaagcgacccagcccgtcgccgcccgcggaccaggtgctcgacaacgtgctcgagacggtgctccagttcctggacgccccgcgggacaggagcgccgcctccctcgtctgccgctcctggcacagcgccgagtccgccacccgcgagtccgtcgccgtccgcaacctcctcgccgtgtcggccacccgcaccgcgcgccgcttccccaacgcgcggagcctcctcctcaagggccgcccgcgcttcgccgacttcaacctcctcccgcacggatgggacgcctccgccttccgcccctgggccgccgccgtcgccgccggggccttccccgcgctcacctcgctctacctcaagcgcatccccgtcaccgacgccgacctggacctcctctcccgctccctcccggcgtcattccgtgacctcaccctgcacctttgcgacggcttcacctcgcgcgggctcgcgtccatcgcctcccattgcaggggcctgcgagtgctcgacgtggtggagtgcgacatggccgaggagcaggaggttgtggactgggtggccgcgtttccgcaggagccctctaacctcgagtcgctctccttcgagtgttacgagccgcctgtggccttcgcggcgctcgaggcgctcgtggagcggtccccgcgcctcagacgcctgggggtcaatctgcacgtctcgctcggccagctgtgccgcctcatggcgcacgcgccgcgcttgtcgcacctgggcaccgggtcgttccggccggcggatggcggcgaggaggggacaggattcggggaggttgtctctgcattcgtggccgctgggcgagcgcgcacgcttgtttccctctccggcttccgtgacctcgcgcaagagtacctgccgaccatcgccgtggtgtgcgcccacttgaagagccttgacttaagctactccgcggtcaccccgaatcagattctgatgttcattgggcaatgctacaaccttgagacactatgggtacttgactcggtgcgcgacgaagggctcgacgccgtgggaatttcctgcaagaagctccagtctcttcgtgtgctcccgttgaatgcacatgaggacgccgacgagttggtgtcagaggttggccttaccgccatctcacggggctgccctgctctccgttcgatactatatttttgccagaccatgaccaacgctgctgttgtggacatgtcgcggaactgcccggagctgaaggtattccggttatgtataatgggacggcaccagccggaccatgcgactggggagcctatggatgaaggattcggtgccatcgttcagaattgcagcaagcttaccaggctatccacgtccgggcaacttactgatcgggcatttgagtacattggcaggcatggcaagtccctgcggacgctctccgtagcatttgctggaaacagtgatgtggcgctgcaatacatcctccagggctgtccaaagctagagaagcttgagataagggactgccctttcggtgacgctggcctcttcgccgggatgcaccatttctacaacatgcggttcgtctggatgtcaggctgcaacctgaccctgcaagggtgcaaggaggtggctcaggtgctgccacggatggtggtggagttgataaatggccagtctgatgagaacgaaaggaatgaaagcgtggacatcttatacatgtatcggtcactcgatggtccaagggaggatgttccaccgttcgtgaagatcctgtgaagctgcgcttctgcggagatggctgggtatcgctatcagtgtagtattcaggctgctgcacttgatatgctggctgagtgcagatcatttaacggaatatatatgtaagttgttgagctgcagatgtggtacatttttatctcttagaaagatttcgaagcactgtactggagcggggcgggcgggggtatcatgtagtaggagttcatcagatgtggtacatttttatctagtaggagttcatcagtgtatccaaagcgttcacggcaggaggactaagtgcagcagagcaggcttcttcgagggggcctcatggctgcctcagttttgtttgctgctctggagggggctctggtttgaggaccatattttctgtgccggtgcaaccaccatgttttccttcaaattttcgaaatgaaacctgtcatatcagact

SEQ ID NO: 180 - DNA, 2178 bp, Zea mays
attcggctcgagaccacacctgcagaaatcacagcggcaggtgcagcaaaaatctccatgcccccgctcggctagatctccgacgagccggccccgcgctgtagcagattcgctccccgatcccgaccgatgggcggtgaggtgccggagccgcgccggctgagccgcgcgctcagcttcggctgcggcggcgtccccgaggaggcgctgcacctcgtgttcggctacatggacgacccgcgagaccgggaggcggcctcgctcgtgtgccgcctctggcaccgcatcgacgcgctctcgcgcaagcacgtcaccgtgggcttctgctacgccgtggagcccgcgcggctgctcgccaggttcccgcggctcgagtcgctcgcgctcaaggggaggccacgcgccgccatgtacgggctcatccccgaagactttggcgcctacgcggcgccctgggtcgccgagctcgccgcgccccttgactgcctcaaggcgctccacctgcgtcgcatgaccgtcaccgacgaggacatcgccgtgctcgtccacgcgcgcggccacatgctacaggcgctcaagctcgacaagtgctccggcttctcaacagacgccctccgcctcgtcgcgcgctcctgcaggtctctgagaaccttgttcctggaagaatgtataattgaggatgaagggagtgaatggctccatgaactcgctgtcaacaattctgttctggtgacactgaacttttacatgacagaactcaaagtggagcctgctgatctggagcttcttgcaaagaactgtaaatcattgatttctttgaagatgggtgactgtgatctttcagatctgattgggtttttccaaacctccaaagcattgcaagaattcgccggtggtgccttttttgaagttggagagtacaccaagtacgaaaaggtcattttcccacctaggctatgcttcttagggggtcttaccttcatgggtaaaaacgagatgccagttatctttccgtattccacaatgcttaagaaactggacttgcagttcactttcctcaccactgaagaccactgtcagcttattgctaaatgccccaacctaagtgttctcgaggtgaggaatgtgattggggatagaggactagaagttgttgctgctacatgcaagaagctacgaaggctcagaattgagcgtggcgacgatgatcctggccaagaagagcagggaggagtctctcagataggtttgacagccgtagccgttggctgccgcgaactagagtacatagctgcctatgtatctgatatcacaaatggggcgctggaatccattggcactttctgcaagaatctctatgatttccggcttgttctacttgacaaacagaagaagataacagacctgccacttgacaacggcgtccgtgccctactgaggaactgcgtcaaacttcggaggtttgccttctacctgagaccgggagggctttcagacgtaggcctcggttacattggactatacagtgggaacatccaatacatgctgctcggcaacgttggtgaatctgacaacggattgatccagtttgcaacgggatgcaccaacctgcggaagctcgagctgaggggctgctgcttcagcgagcgagctctggcagtggccgtgctccagatgccctcgctgaggtacatatgggtgcaggggtacagagcctctcgaacgggccaggacctcatgctcatggccaggccgtactggaacattgaattcgcgcctcccattcccgagagcgcttatcgggtgatggcagatggacagccttgtgttgacacccatgcccaggtccttgcgtattactcccttgctggaaggaggccggactgccctcagtggctggtgactttgcaccctgcgtcactgtaaatacgtcaagctgtcccgagtgtggtttttgtaccagctgcttgtgtaccgtaataaactctagtactgtagtggtggaggcgtagtgcaataaagttgcagttgttgcttgtactagtgaatctaatcctaggaggttgttgccctgtgctttcttttccccggaattgtatctttgctccactgtaaatatcagaaatggcctgtgctagatgagttgaataaaaaaaaaaaaaaaaaaaaaaaaaaagg

SEQ ID NO: 181 - DNA, 2743 bp, Zea mays
attcggctcgagctcctaacctgtcgagctgcccacagcccgtacctacctgcccccagtccccgccgccccgcctgcccgacccgcggcttatccaccacgtccaccgctgggctggatcgatcgggaccggggtcgcgccgccgccgctgccctccgcactcgcgggatcctgttcctaccatgcagcagcgctgcgcccttgcccgaccgcgccggcccgccgaaccgcgcgttccgctccccgacgatcactccctcgtcgccgtcttctccttcctcttcatccccacctaaatcaacctcctcgccgcgaaattctgctacaatttcttcatcttcccttgccgccgggagcggacggatcgccgcttcctcggccggcgggatgagccgggaggcgcagaaactcgactgcaccgccgccggcggcgggatcggggtcctgtcgctggacctgctgggccaggtgctggaacacctgcgggagccccgggaccgcaagacgtgccgcctcgtcagccgcgccttcgagcgcgccgaggccgcgcaccgccgcgcgcttcgggtgctccgacgcgagccgctcccgcgcctgctccgcgcgttcccggcgctcgagcggctcgacctctccgcctgcgcctcgctcgacgacgcctccctcgccgcggccgtcgccgacgccggcggggggctcgccggcctccgcagcgtgtgcctcgcgcgggccaatggtgtcggctggcgcggcctcgaggcgctcgtcgcggcctgccccaagctggcggccgtcgacctgtcgcactgcgtcagcgccggggaccgcgaggccgccgcgttggcggcggcgtccgagcttagggacctgaggctggacaaatgccttgccgtcaccgacatggggctcgccaaggtggctgttgggtgccccaagctggagaagctcagcctcaagtggtgccgtgagatctctgacattggaattgatctgttggccaagaagtgccctgagctccgcagcctcaacatatcctacctcaaggtgggcaatggatcccttggatcaatttcgtcacttgagaggcttgaggaattggcaatggtttgttgttcaggtatagatgacgaaggcttggaattgctgagcaaggggagcgattcgctgcagagtgttgatgtgtcaagatgtgatcatgtgacttccgaggggttagcttcactcatagatggtcgcaattttcttcagaagttatatgctgcagattgtttgcatgagataggacagcgttttctatccaagttggcaagactgaaggaaaccttgacgttgctgaaactcgacggtcttgaggtctcggactctcttcttcaagccattggtgaaagctgtaacaaattggttgagattgggcttagcaaatgcagtggtgttacagatggaggaatctcatctcttgtagctcggtgtagtgacctaagaacaattgatctcacatgctgcaatctcattaccaacaatgcgcttgattcaatagctgacaactgtaagatgcttgaatgtttgcggttggaatcatgctctttgataaatgagaagggactaaagcgaattgcaacttgttgccccaaccttaaggagatagacctcactgactgcggagtggatgacgcagcattgcagcacttggctaaatgctctgaattgcgaatattgaaattaggcctatgctcaagtatttctgacagaggcattgcatttatcagttctaattgtggaaagctcgtggagcttgatctctaccggtgcaactctattactgatgatggattggcagctttagcaaatggatgcaagaggattaagttactgaacttgtgttactgcaacaagatcactgatactggtttaggtcacttaggctccctggaggagctcacaaaccttgaactgaggtgcttggtccgcgttacaggcattgggatctcctcagttgcaatcggatgcaagaacctgatagagctggacttgaaacgatgctattcggttgatgacgctggactgtgggcccttgctcgttatgctttgaaccttagacagcttacgatttcgtactgccaagtcacggggttgggcctgtgccacctgctgagctccctgcgatgcctccaggacattaagatggtgcacctctcatgggtatcaatagaagggtttgagatggctctgcgagcagcctgcgggaggctgaagaagctgaagatgctctgcgggctgaagaccgtgctctcccctgagctcctccagatgctgcaggcttgtggctgccgaataagatgggtcaacaagcctcttgtctacaaggactagacagactcgtgttcctcattgtgtgtgcagtgtcagcatcagcatgtattgtcaagatcttgcaggtttgccctggctcacgttgtgagtccgcaataatcgttgggggcgtaagctcccgtccccaagatgtggttatggtgcctttggggcacttcttgcgccatttgtcactctctgctccggtgtatctgtgtatgcaaacggaggcaccggtaatgttcatgtgtatatagcgtgcagtagaatgatcccattttatgggattagttagtgtgtaattgttacctcatttcgcatgattcgaatcttgagatgaaagaatcataaggggtatgatcgatgcattgcattcaaaaaaaaaaaaaaagg

SEQ ID NO: 182 - DNA, 2082 bp, Glycine max
attcggctcgaggtagtagagcactgaattggatatgtgtctatcacctaatctaagtcatcgtgtggtggtggttttggtcggtggcaaagagagaagaaacaaagcctgttcttcttaccatgtcggatcatcttccgcgcgaagtgctaaccgaaatcctctcccggttaccggtcagatccctactgagattccggtcaacgtccaagtcatggaagtccttaatcgacagccagcacttgaactggcttcatctgactagatccctgaccttagcctccaacacgagcctcatcctccgtgtggactccgatctataccagaccaatttcccaaccctagaccctcccgtatcccttaaccaccctctcatgtgctacagcaacagcataaccctcctcggttcctgcaacggccttctctgtatatccaacgtcgccgacgacatcgccttttggaacccctccctccgccaacaccgtattcttccttacctccctgtcccccgccgccgtcaccccgacacgacgctctttgccgcccgcgtctgcggcttcggcttcgaccataaaactcgcgactacaagctcgtccgcatctcttatttcgtcgaccttcatgaccgctccttcgactcccaggtcaagctctacacgctccgcgccaacgcctggaagacacttcccagcttgccctacgcgctctgctgcgcccgtaccatgggcgtcttcgtcggaaactccctccactgggtcgtcacgcgcaaactcgaacccgaccaacccgatctcatcatcgccttcgatctcacccacgacatcttccgcgagctcccgcttcctgacaccggaggtgtcgacggcgggttcgagatcgacctggcgctgttaggtggttccctctgcatgaccgtgaactttcacaaaacgagaatcgacgtttgggtgatgagggagtataaccgtagagacagttggtgtaaggtgttcacgctcgaggagtcgcgtgagatgagatcgttgaaatgcgtgaggccgttgggctactcgagcgatgggaacaaggttctgttggaacacgacaggaagaggctgttttggtatgacctggaaaagaaagaggttgcccttgttaaaattcagggtttgcctaatttaaatgaagccatgatttgtttgggaaccctcgtaccaccatacttcttacctcgtcaaatttgtaggaagccgcgtgctttaggatgcgaacgtcccaggaagacgagggatgacttcctgtcgcagggtttcaaattgacattatgaggaagtctaagaagaagaagcaatggtacatgggggtagctgaaactggctcggcgggtttgttttgcagttgattcaagccaaagggaggttgaggaaaagtaagaaaatgttgcttccgttacaatgactgtaatgtatagttaaattaatactatcagctacatattttactttgggatgtgtgccacgtttgacgaactctgaaacaaacatgctcttattggttacttgctgagttatctgactctgatgatgaaattcgtggccctggttcacaggacgagttaaattgatcaagagcaggaacagagacaccgttttgcctgttaagatataagactctttccttgtacagtttttgcaccttttgttttcttagcgatttaggggcgaacaaagccccccaccaaagtgaaagaaagggctgcagacctgccattcagaatgttgaagaaggaaacaatgactgaagaacagataccaaatatacaaatgctgctttcctcacttattaacagtctccaattactaagatcccgtaagacactcgctttccgcaatagaaaaaaaatggcctatatggttttgtctaagcttggattgcctcagtggtttggttgtaaagaagtgtcatgtatgtacgtgtgttaatctggttgtaccagcaaactgtaattaaatttttgcagttaacttgacatgaaatattgttgtttttgtttattggtaggtggactttgcaaattgaaaaaaaaaaaaaaaaaaaaaaagg

SEQ ID NO: 183 - DNA, 2101 bp, Glycine max
acagagcgcagaaaataaaataggtgaaatgaatatcgatttcaattccgccactgaatttcgaaaccaaaaaaccattccaacgaagaagatgaacctcgaagaagagggttagttacttctgagtgagtgagtgagttagtggttcctctgaggaacggtgaggaccttcaatttctcaagttctcaaccgttcgttttctctttcgttcccctaaccgccgtggatgggacaatctgtttcctccgccgccgtcgctagccgtcgcgagagggaccaaggccaccgctccgtcaactcttccaagaccagattcaccgcctcggtttcgccgatggccggttattcctccggcgccgccgaagaaggcgaaaaccatcgcgtggaggccgttgccgatgaatccaccgactacatctccgatctcccgaacgagtgcctggcttcggtgtttcagtttctcagctccgccgatcggagccgctgttcgctcgtttgccggcggtggctccagatcgaaggacagagccgccacaggctttctctgaacgccgaactggatctgtttccggcgattccgtcgctgttctctcggttcgattcggtgacgaagctcgcgctgaagtgcgaccgcagatccgtgagcatacgcgacgacgcgctcgtgctgatctcgcagcggtgccctaacctcacgcgcctgaagcttcgcgcgtgtcgcgagctcaccgacgcaggaatggaagcgttcgcgaagaactgcaagggattgaagaagctctcgtgtggatcgtgcacgtttggatccaaaggcatgaacgcggtgctcgacaactgcgccgcgctggaggagctctccgtgaagcgcctccgtggaatcgctgacactgcagcggcggagccgatcggtcccggcgtggctgcggcgtcgctcaaaactgtttgcctgaaggagctatacaacggacagtgtttcggaacgctgattctcggcgcgaagaatctgaaaaccttgaagcttttccggtgctccggcgattgggaccggctctttcaattattggtggatcgagtcacgaaaattgttgaggttcacctcgaaaggcttcagattagcgacgttggattgcaagcgatagcgaattattcgagtttggagattttgcatcttgttaagacacctgaatgttctgatattggacttgttgctattgcagacaggtgcaagcttttgaggaagcttcatattgatggatggaaggcgaatcgaattggggacgaaggtttgatagctgttgcaaaaggttgccctaatttgcttgaattagtgctaattggggttaaccctactaaggcgagtttggaaatgttggcgtctaattgccagaatctcgagcggttggctttgtgtggaagtgattcggttggtgatcctgagatatcttgcattgctgcaaagtgtgtggctttgaagaaactgtgtattaagagttgtcccgtttccgatcaagggatggaggcattggggaatgggtgtccgaatttggtgaaagtgaaggttaagaagtgtaaaggggttacccctgagggtggtgattggttgaggaggactagagggtcagttgctgttaatttagatactggtgaggcagagcttcaggaagccagtgctagtgatggaggggcacaggacaatggtgtagagttccctcaaatgcctgcccaaatcgctgctgcatcgagcagcactcggtctagttcgtcgaggtttgcgcttatgtctgcgaggatttcagcggctgcattgaggagcactcggtctggttcgtcgaggttagggcttttgcctacgaggatttcagcggctagcacttttaggagatggtctggtggtagcactagtgcacgccatggttagggacagggccaaagcaaaacctgagtctttgaccatttttcattgtttttggttgtcgtatcatttgatttttatatttcttgtacttaaatttgaaatttatgccgtgtgatgtttattgcctttggaattgaagcttcacggttgcaattgacaatcgcatttttttcctttctaaaaaa

SEQ ID NO: 184 - DNA, 1291 bp, Zea mays
ggcctgccctgtcctgccttgttaagcaacacagcgagacatcacgagagctagagagagatggcggccacggtttcctccttcccggtggtgaacatggagaagctggagacagaggagagggccacggccatggaggtcatccgcgacggctgcgagaactggggcttcttcgagctgctgaaccacggcatctcgcacgagctgatggacgaggtggagcggctgaccaaggcgcactacgccaccttccgggaggccaagttccaggagttcgcggcccggacgctggaggccggcgagaagggcgccgacgtcaaggacgtggactgggagagcaccttcttcgtccgccacctcccggcctccaacctcgccgacctccccgacgtcgacgaccgctacaggcaggtgatggagcagttcgcatcggagatccggaagctgtcggagaggctgctggacctgctgtgcgagaacctcggcctggagcccgggtacctgaaggcggccttcgccgggtcggacggcccgacgttcggcaccaaggtgagcgcgtacccgccgtgcccgcgcccggacctcgtcgacggcctccgcgcgcacaccgacgccggcggcatcgtgctgctgttccaggacgaccaggtgagcggcctgcagctgctcaggggcggggagtgggtggacgtgccgcccatgcgccacgccatcgtcgccaacgtcggcgaccagctggaggtcatcaccaacgggcggtacaagagcgtcatgcaccgcgtgctcacgcgccccgacggcaaccgcatgtccgtcgcgtccttctacaacccgggcgccgacgccgtcatcttcccggcccccgcgctcgtcggcgccgccgaggaggaccgcgccgaggccgcgtacccgagcttcgtgttcgaggactacatgaacctgtacgtgcgccacaagttcgaggccaaggagcccaggttcgaggccatgaagtcggccatcgccaccgcgtgagcaaagactgacttccgctcccggcttccttcgtggcgtcaagccttgaggcttgaacgaacaacgtacgtccatgtgcttatagtggcacagttatcgcgtggaacggcctaatgtatttcggttgcctcagatcgatctatatgtgcgtatacattatgtactgaaaagtgtgtagcgtctggttaatgtacgagcagtgtgtatgtgaccaggacccggtgtgtagttgctactactaccatatccggtgaatgatcaaaccttttggtgtatt

SEQ ID NO: 185 - DNA, 1485 bp, Oryza sativa
gatggtgagccaagtggtcgccgaggagaagccgcagctgctgtccaagaaggccgggtgcaacagccacggccaggactcgtcctacttcctggggtggcaggagtacgagaaaaacccgttcgaccccgtctccaacccttccggcatcatccagatgggcctcgccgagaaccagctgtcgttcgacctgcttgaggagtggctggagaagaacccccacgcgctcggcctccggcgagagggcggcggcgcctccgtcttccgcgagctcgcgctgttccaggactaccacggcctcccggctttcaaaaatgcattggcgcggttcatgtcggagcagagagggtacaaggtggtgttcgaccccagcaacatcgtgctcaacgccggcgccacctcggctaacgaggcgctcatgttctgcctcgccgaccacggcgacgccttcttcatccccaccccatactacccagggttcgaccgcgacctcaagtggcgcaccggcgcggagatcgtacccgtgcactgcgcgagcgcgaacgggttccgggtgacgcgcgccgcgctggacgacgcgtaccgccgcgcgcagaagcgccggctgcgcgtcaagggggtgctgatcaccaacccgtccaacccgctcggcaccgcgtcgccgcgcgccgacctcgagacgatcgtcgacttcgtcgccgccaagggcatccacctcatcagcgacgagatctacgccggcacggcgttcgccgagccgcccgcgggcttcgtcagcgcgctcgaggtcgtggccgggcgcgacggcggcggcgctggcgtgtccgaccgcgtgcacgtcgtgtacagcctgtccaaggacctcggcctcccggggttccgcgtcggcgccatctactccgccaacgccgccgtcgtgtccgcggcgaccaagatgtccagcttcggcctcgtgtcgtcccagacgcagtacctcctcgcggcgctgctcggcgacagggacttcacccggagctacgtcgcggagaacaagcggcggatcaaggagcggcacgaccagctcgtggacgggctcagggagatcggcattgggtgcctgcccagcaacgccggcctcttctgctgggtggacatgagccacctgatgcggagccggtcgttcgccggcgagatggagctctggaagaaggtggtgttcgaggtcggcctcaacatctcccccgggtcgtcgtgccactgccgcgagcccggctggttccgcgtctgcttcgccaacatgtcggccaagaccctcgacgtcgccatgcagcgcctcaggtcgttcgtcgactccgccaccggcggcggcgacaacgccgccctccgccgcgccgccgtccccgtcaggagcgtcagctgcccgctcgccatcaagtgggcgctccgcctcaccccgtccatcgccgaccggaaggccgagagataatcgccaagaacaaaaccaca

SEQ ID NO: 186 - DNA, 2001 bp, Synechocystis sp. PCC 6803
ccatccttgggcaggattagtgttttggtgggcggccctagaaagacaggtacgggtggatggtcaagtggaaaaaattgatccggcagaatccgatgcctattttcagtcccgtccccggggttctcaattgggggcctgggcttctccccaaagtcggattgttggcgatcgccaggagttagaagacaatctagcccgttgggaaaaacaatacgaaaaccaatccattccccgccccccccactggggaggatttcgagtgattccccatcgcatcgaattttggcaaggccgccctagtcgtctccatgaccgtttgcaatttaatttgcttgatggtcaatggcacagacagaggttggcgccgtagaagttaaactagcccccattccattgcagtcttaaagttttgacgttttagtccataaagttgatcagagttgcgtatttataaacatttgaactttttatcgtcctttctctacacaaatttgaatcaagtattctccttagtgtgttttctgtcttagtcaaaattggtcttactgccgaattttcatcttccaacggcagccttctttgaagatttaggatagaatcataggattgttttgccgtcatagcccctaagataaatacatgcgtctagaaatttcatcgcctcaaacaaagcttccttaccccaaaactgaagaattaccatttaccctccaagagctcagaaacgctattccagcggattgttttgagccatcggtagtccggtccttgggctacttttttttggatgttggtttaattgccgggttttatgctctagcggcctaccttgattcctggttcttctatccgattttttggttaattcagggaaccctattctggtccctgtttgtggtgggccatgattgtggccatggctccttttccaaatccaaaacccttaataattggattggtcatctcagccacacgccaattttggtgccttaccatggctggcgtattagtcatcgtactcaccatgccaacacgggcaatatcgacaccgacgaaagttggtatccagtgtcggagcaaaaatataaccaaatggcctggtatgaaaaacttctacgtttttacttgcctctgatcgcctaccccatttatctatttcggcgatcgccaaaccggcaaggctcccatttcatgcccggcagtcccctattccgtcccggagaaaaagcagctgttctcaccagcacctttgcccttgcagcctttgtcggcttccttggctttttaacttggcaatttggctggctatttttgctgaaattttatgttgccccctacctcgtgtttgtggtgtggttagatttggtcacatttttacatcacactgaagacaatatcccttggtatcgtggtgatgactggtattttctcaaaggtgccctctccaccattgatcgggattacggcttcattaaccccattcaccatgacattggcacccacgtcgcccaccatattttctcgaatatgccccactacaagttacgccgggcgactgaagccatcaagcccattttaggggaatattatcgatattctgacgagccaatttggcaagctttttttaagtcctactgggcttgccattttgttcctaatcaaggttcaggggtctattaccaatccccatccaatggtggatatcaaaagaaaccttaattgatcctaattgaatcaaaccaacatcgggagggaaggcaatattagatggtattactcccttccgatcgccttatgagaagtatggaagaagttaaacaatcacactccaaaagatcagcattaaaccaacaacggtgctgtggtgaggcagaagattgaaaaaggattgtttacctaactgttgactgagaaaaatcgaccaaagtaccccggccaaaagcagcataccttgcaaaaaggcgatcgccgctggatccgccaccaacatcggtaaat

SEQ ID NO: 187 - DNA, 1801 bp, Saccharomyces cerevisiae
ttaacaatccaggctgaacaaaacaaggaataatgttacacaggcacggttctaagcagaagaacttcgagaatatcgctggaaaagttgtccacgaccttgcaggtctgcaattgctttctaacgacgttcaaaaatccgctgtccaaagtggtcatcaaggatcgaacaatatgagagatacttcgtctcagggcatggctaataagtattcagttccaaaaaagggactacctgctgatttgtcttaccaactgattcataatgaattaacacttgatggtaatccgcatttgaaccttgccagtttcgtgaacacttttaccactgatcaggcaaggaaattgattgatgaaaatttgaccaaaaatcttgctgacaatgatgaatatccgcaattaattgagctaactcagcgttgtatttctatgctagctcaattatggcacgctaatcccgatgaagaaccaataggctgtgccaccacaggttctagtgaggcaatcatgttgggtggactcgccatgaaaaaaagatgggaacacagaatgaagaatgctggtaaagatgcttccaagccgaacattataatgtcttctgcgtgccaagtggcattagagaagtttacgagatattttgaagtggaatgccgattggttccggtatcccacagaagccatcatatgcttgacccagagtcgttatgggattatgtagatgagaacactattggctgttttgtaattttaggaaccacctacactggccatttggaaaatgtagagaaagttgcagatgtcttgtcccaaattgaggccaagcatcctgattggagcaatactgatattccaatccatgcggatggcgcttcaggtgggtttattatcccatttggctttgaaaaagagcacatgaaagcttatggcatggaacgttgggggttcaaccatccgcgtgtggttagtatgaacactagtggtcataagtttggcttaaccactcccggtctgggttgggtgctatggagagatgaatccttactggctgatgaattgagattcaaactaaagtacctcggtggcgtggaagaaactttcggtttgaatttttcaagacctggatttcaagttgtccatcaatacttcaattttgtttctctaggccattcagggtatagaacacaattccaaaattctctatttgttgcaagagcgttttctttcgaattattgaattcgtcaaaattgcccggatgctttgaaattgttagcagtatccatgaaagcattgagaacgattccgcccctaagtcagttaaagactattgggaacacccccaggcttacaaaccaggtgtaccgctggtagccttcaaattgtccaagaaattccacgaagaatatccagaagtgccacaagcaatcctttcctctttactgagaggtaggggttggataataccaaattacccactaccaaaggcaacggatggatccgatgagaaggaggtattaagagtggttttcagatcggagatgaagttggatttagcacagttgttgatcgttgacatcgagagtatcttgacaaagttgattcatagttacgaaaaggtttgtcatcatatagaacttgcctctgagcaaactccagagcgcaagagttcgttcatctacgaaatgttgctggcattggcatctccacaagatgacatcccaacgccggatgaaatcgaaaagaaaaataagctaaaggaaacaacaacgagaaactatagaggaacatgttgagttgaaaaggt

SEQ ID NO: 188 - DNA, 1925 bp, Zea mays
ccacgcgtcctcggacgcgtgggtgtcgatggattacttggctgctgctgtacccgtgaccttggctctgggagtgggagctatcttgttggtcttacgatggacgtactgccgccgccgaacaagcgccgaagaagcaagactgcccccggggtcaaggggcctcctgttcctgggggagacgctccactacctggcagcgtcctccaccccgggggtattgccaccattcttccagcgacggttggagaggtatggccccatcttccggacgaacctggtcggggaggatctcgtcgtgtcgctggacgcggagctgaacgcgcacgtgctgaagcaggaggagcgcggcttccagatctggtacccgccctccttcatgcgcgtcttcggcgccgacaacatcaccgccaagctcggcgtgctccaccgccacatgaggaccctcgtgctccgcctcttcggccaccagaccgtccgctccgtgctgctgcacgacgtgcagcggagcgcgcgcgacgagctgcgctcatggctcggccgcccggacgtcgaggtcaggacggccacctccaggatgatatttggcgtcactgccaacaagctgatcagccatgacgacgcagcatctggaggcacgttgtggagatgcttccacgactggacttcggggctgctctcgtttccggtttccattcccggcacaaccttctacagatgcatgcagggacgtaagaaggttatgacgatgctgaaacagcagctcgtcgagcgtcgacggaacgcagcggagcgcgagacgacagaggatttcttcgatctcgtgatcgatgaactgaacaagccagaccctatgatggacgagagcaccgcgttggacttgctgttcaccatgttgtttgcgagccatgagacgacgtccatggtattaaccgtcatactcaagtatctgactgacaacccaaaagctttgcaagagctgacagaggagcacgaaagaatcctggaaagtagggccgatccaggctctgacctcacgtgggaggagtacaggtctatgaaattcacatctcatgttatacatgagtcgctaaggctcgcaaacatcgcactggccatgttcaggaaagcaaatcaggatgtgcacataaatgggtacacaattccaaaaggatcaaagatcatgatgtgtgcactagcatcgcacttgaatacggaggtctacgaggacccctcagtgttcaatccatggagatggaaggatattcctgaaccagtcggcacctctaaggactttatggccttcgggggtggtttgcgcctatgcgctggtgccgagttttccaagatgcagatggctatgttcctccattacttggtcacaaattacagctggaaacccgtcagcggtgggacaatgttattctatccaggactgcaatttccagaaggcttccacatccagcttcttccaaaaatcccaaacgtggttccataaaccctatgaagaaatatgaatacgaataatttaagcaaatattctaaatgtaccctggggaattgaagttcgataacgatgtggtacgggctgatttggtaaccatggatcacaggaggatgggagaggattgatggagaaattagttcatttctccctcaacctctttcaatcctcttatgatccacttatcaccaaatcaaccctaatgatagcaggtcgaattgtcggaacaaataatagtttcaccaaacagaaggggagtatgcatgtgtgtaactttttatagttataaataatagtagagtaaattcagctcgttgtgtaacaactatgcaggtgagtaaaaattggttcagcatattgtatatattatgcccagttcaatggaaaaaaaaactttgttgtcaaaaaaaaaaaaaaaaag

SEQ ID NO: 189 - DNA, 1915 bp, Zea mays
ccacgcgtccggaaagatttttcttccctcctccgacgccccagcccaccaacacactctataaagcagccctcagtcacacacagaacgcacaagcgcaagccgggcaagaaaactccgcaggccagtctgcgagttggatggccttcttcttggccctcgtgtgcatcctcatcttgctagccatcgcctcctacgtccagtacactcgctggcaaaaggggaaaggccgcttcggcggccatgggaggtctgctcccttgaagctgcctcctggctccatgggctggccttaccttggcgagaccctccagctttactcccaggaccccagcttcttcttcgcttccaaacagaagaggtacggcgagatcttcaagacgcaccttctgggttgcccgtgcgtgatgctggcgagcccggaggcggcgcggttcgtgctggtgacgcaggcgcacctgttcaagccgacctacccgcggagcaaggagcgcatgatcgggccgtcggctctcttcttccaccagggcgactaccacctccgcctccgcaagctcgtccagggcgcgctcggccccgacgcgctgcgcgcgctcgttcctgaggtggaggccgccgtgcggtccactctcgcttcctgggacgccggccacgtcagaagcacgttccacgccatgaagacgctgtcgtttgatgtgggcatcgtgacgatcttcggcggccggctggacgagcggcgcaaggcggagctgaggaagaattactccgtcgtggagaaggggtacaactccttccccaacagcctgccggggacgctccattacaaggcgatgcaggcgcggcggcggctgcacggcgtgctgtgcgacatcatgcgggagcgtcgtggccaggcccaggcggcgggcaccggcctgctgggctgcctgatgcggtcccggggcgacgacggcgcgccgctcctgagcgacgagcagatcgccgacaacgtcatcggcgtgctgttcgcggcgcaggacacgacggccagcgcgctcacctggatcgtcaagtacctccacgaccaccccaagctgctcgaggccgtccgggcggagcaggcggcggtccgcgaggccaccggcggcgggaggcagccgctggcgtgggcgcacacgaagagcatggcgctaacgcatagggtgattttggagagcttaaggatggcgagcatcatctcgttcacgttcagggaggccgtggccgacgtggagtacaaagggttccttatccccaaggggtggaaggtgatgccgctcttcaggaacatccaccacagcccggactacttccaggatccacacaagttcgacccttctagattccaggtggcgccgcgtccgagcacgttcctgccgtttgggcacggcgtgcacgcgtgccccgggaacgagctggccaagctcgagatgctcgtcctcatccaccacctggtcaccggctacaggtggcaaatcgttggatccagtgacgaggtcgagtacagcccgttccctgtgcccaagcacggcttgcctgtcagattatggagacaaaacaatccggtcgacagaaaggggcgtgagaccgacgacgatcatgtggagaggatatttatttagtttgactcttgagttaggcatgaatttaaccccaagctagctagagaagttttttttcccctttgaaattcttctttgctcgcctcttcctcctggatcaaattgcgttggaggagaagaaacggcagctttctctctttcgttttctttgcctgcttcaccgctacgataatggtgaaaatatgtaagctacgtggacatcaatgatccacagcatcgttgatatatataatatatagagaaaattctctgcaaaaaaaaaaaaaaaaaaaaag

SEQ ID NO: 190 - DNA, 1886 bp, Zea mays
ggcctcacccttttccctggtgttgcaagttgcaacacacagcgtccggcgagatcggcgatcagaaaccacgagcccacccaccatccggaacgcgcgcgcgatgtgtcccgtcagaggcggtggttgttcttggccagcgtccgtcgtcggctctgtcacggcggcgctgctcctcgccgccgtcatcgtgcggctcttcgtcccccgtgcctgttcttcaggaattatcaaggggcggcggcaggtaggtgctggtgctgccggaggagcacggctccctgccggctcgctcgggtggccgctcctcggcgagacgctggcgttcatccgggccgcgtactcgcctcgcccggagtccttcgtcgagaaacgccgcgtcttgtacgggaaggtgttcaagtcgcacctgtgggggtcgccggcggtggtgagctcggacccggaggtgagccgcgcggtgctgcaggccgacgcgtcggcgttcgttccatggtacccgcgatcgctcatggagctgatggggcaatcgtccatcctagtgctcggcggcggcctccagcgccgggtgcacggcctcgcgggcgccttcttcaagtcgccgcagctcaaggcgcaggtcaccctggacatgcagcgccgcgtcggccgcgccatggacatgtggggcaggcgccatcggagcatgggcgacgacgacagcggtggtatgcccgtgcgtgtgcagaacgaggccaagtcgattgtgttcgaaatcctagtgagggcgctgatagggttagaggaaggggacaagatgcagtacctcaggcaacagtttcaagaattcattgccggtttgatatcacttccggttaagcttccggggactcaactctatagatccctcaaggctaagaagaggatgacaaagttgataaaaacgatcatccaagagaagaggaagaagatgatgtcggaaggcgacgaggatctgcgtggtgggactcatccacgtgacatgatcgacgtcctgctaggcaacggcaacgacgagctctccgacgagctgatatctgacaacatgatcgacttcatgatccctgcagaggactccgtgcccgtgctcatcacgctggccgtcaagtacctcagcgaatgcccactggctctgcagcaactcgaggaggagaacatggagctcaagaggcagaaatcaggcgcgggagaaaccctagaatggacagactacatgtcgctcgccttcacacagcacgtgatcacggagacgctgcggatgggcaacatcatcaacgggatcatgcggaaggcggtgcgagacgtggaggtgagaggccacctggtcccgaagggctggcgcgtcctcgtctacttccgcgccgtccacctcgacgccgccgtccacgacgacccgcacgccttcaacccctggaggtggaaggagaggcccgacgtcgtggccatgagcggcttcaccccgttcggcggcggccagaggctgtgccctgggctcgacctggcaaggctcgaggcctccatctttctgcaccatctcgtcaccaatttcaggtgggtggcggaggaggacaccgtcgtcaacttccccacggtgcggctcaagcgagggatgccaatcgcagtgacgcccagaacctgctgaacgcaacgcaacttgccaggcaaaaccatactatacatttatactccgtaatcaactaaagaggtgtgagaaataatacagtacatgcaagcatgtaatggagggcgaaattaaaagttggcacggcaaaggcgccgatggtatgccaaaagttcagtttgcaaattatatagtttaattgctattacactaggggcacccatgtctgatgcctcgtttatgaaaa

SEQ ID NO: 191 - DNA, 1844 bp, Zea mays
ccacgcgtccgatctgtcactccccgacacgcgcacgagctccactccccactccgcacccaacccaaggcgccactgccatggacgcgggcggtccgccgccgctgttcctcctgggcgccgtgctggccgcggcgctggggtggctgctcgtggtctggcgggcggcggcggggcggcggcggtccgcgtcggcgcggctgccgccggggagcacggggctgccgctcatcggggagacgctgcggctcatcgcggcgtacaagtcgccgaacccggagccgttcatcgacgagcgcgtggcgcggcacggcagcggggtgttcacgacgcacgtgttcggcgagcgcaccgtgttctccgccgacccggccttcaaccgcctgctgctggccgcggagggccgcgccgtgagctgcagctacccgtcgtccatcgccacgctgctgggcccgcggtcgctgctgctcacctcgggccccgcgcacaagcgcctccactcgctcacgctgacccgcctcggccgcccggcctcgccgccgctgctggcgcacatcgaccgcctcgtcctcgccaccatgaggggctgggaccgccccggcgccggcgccatgcgcctcctcgacgaggccaagaagatcaccttcaacctcaccgtgtggcagctcgtcagcatcgagcctgggccgtggaccgagagcgtccggcgcgagtacgtgaagctcgtcgacggcttcttctccatccccttccccttcgcctccctcctcccgttcaccgtctacggccaggccctcaaggcgaggaagaaggtggccggagctcttcgggaggtggtaaggaagaggatggacgacaaggcggaggacgactgtggcgccagtaagaagaacggggagaagaaggacatggtggaggagctcctagaagcggagggcgggagcttctccgtggaggagatggtggacttctgcctgtccctgctggtggctgggtacgagaccacctccgtgctcatgacgctcgccgtcaagttcctcaccgagacacccaccgcactggcgcagctcaaggaagagcacgacagcatcagaggggtaaaaggcaaaggccaagctctggaatggagcgattacaagtcgatgccgtttacacaatgcgtgataagcgaaacgctgcgcgtggccaacctgatcagcggggtgttcaggcgtgcgaacaccgacatccacttcaaaggccacgtgatcccaaagggctgcaagatcttcgcgtcgttccgagccgtgcaccttagcctggaccactacgagaacgcccggaccttcgacccttggagatggcagcagggcaagagcaagctgcagagcgcggaaggggccagtctgttcacgccgttcggcggcgggccgcgcctgtgcccgggctacgagctcgcccgggtggtggtttccgtcttcctccaccacctcgtcacgcgctttagctgggaggaagccgaggaggacaggattgtcttcttccccaccacccggaccctcaagggataccccatcatcctacggcggcgaccggattgcgatgatctctgacctcatggctaggttccccccttatcttcttcggatcaaggctgaaggctaagcattagatagagtaaggtggatgtcgtcgtggctagtaggtgcatggtggtttctgccactcactcactcactcactctgttgtctgtttgttcctgttcctctctgttttctcttgctctgtaacctggacctggtacgagtcagcactcagcagccagcagcaaactcgcgttttgcttgtaaaaaaaaaaaaaaag

SEQ ID NO: 192 - DNA, 1843 bp, Zea mays
gcctctcctcctctcccctgccctcgcaaacgcacgcaccacagcatcgtccttcgttccattcccatccataccccctcgatcggccgggatgctgggtgtggggatggccgcggcggtgctgctcggggccgtggcgttggtgctcgcggacgccgctgcgaggagagcgcactggtggtacagggaggcggctgaggcggtgctggtcggcgccgtggctttggtggtggtggacgccgcggcgcggagggcgcacgggtggtacagggaagcggcgctgggctcggcgcggcgggcgcggctgccgccgggggagatggggtggcccttggtcggcggcatgtgggccttcctccgcgccttcaagtccggcaagcccgacgccttcatcgcctccttcgtccggcggttcggtcgcacgggcgtgtaccgaagcttcatgttcagcagcccgactgtgctggtgacgacggcggaggggtgcaagcaggtgctgatggacgacgacgcgttcgtgacggggtggcccaaggcgacggttgcgctggtcgggccgcggtcgttcgtggcgatgccgtacgacgagcaccggcgcatccgcaagctgactgccgcgcccatcaacggcttcgacgcgctgacggggtacctgcccttcatcgaccgcaccgtcacgtcgtcgctgcgcgcgtgggcggaccacggcggcagcgtcgagttcctgacggagctgcggcgcatgacgttcaagatcatcgtgcagatcttcctgggcggcgcggaccaggccaccacgcgcgcgctggagcgcagctacacggagctcaactacggcatgcgcgccatggccatcaacctgcccggcttcgcgtaccgcggggcgctgcgcgcgcgccgccgcctcgtggccgtgctgcagggcgtgctggacgagcgccgcgccgccagggccaagggggtctcgggcggaggagtggacatgatggaccggctgatcgaggcccaggacgagcgcgggcggcgcctggacgacgacgagatcatcgacgtgctcgtcatgtacctcaacgccggccacgagtcgtccggccacatcaccatgtgggccaccgtgttcctgcaggagaatccggacatgttcgcgagagcaaaggcggagcaggaggcgatcatgaggagtatcccgtcgtcgcagcaggggctgacgctcagggacttcaggaagatggagtacctgtcgcaggtgatcgacgagacgctgcggctcgtcaacatctccttcgtctccttccgtcaggccaccagagacgtcttcgtgaacggatacctcatccccaagggctggaaggttcagctctggtaccggagcgtgcacatggacccacaggtgtaccctgaccccaccaagttcgacccgtcgaggtgggagggccactcgccgagagccggcacgttcctggcgttcgggctgggcgccaggctctgccccggcaacgacctcgccaagctggagatttccgtcttcctccaccacttcctcctcggctacaagctggcgaggacgaaccctaggtgccgggtgaggtacctgccgcacccgaggccggtggacaactgcttggccaagatcaccagagtcggtagctagctgctagattgtgatggaagtacgaatgaaaaaaaagcccagcagaaaactctagcggctgggccggctggaaattatgggccgggccattgtggttgcccccccctgtctgtgcaaaaataaaacaagcagaaaggaataaaaaaaaggaaaagtattacttcgaaaaaaaaaaaaaaaaaaaaaaaaaaa

SEQ ID NO: 193 - DNA, 1795 bp, Zea mays
attcggctcgagcccatctcatctcttgctcctcgtccgtagttgcagttgcagtgtcctcggccgcctctagtcctagccgtttactccttcctttcaccgcatcaagcagagagcaagcgaggcaagagccatgggcgcctttctgctcttcgtctgtctcctggcgccggtcgtcgtgctcgcctgcgccgtccgcggcaggaagcggcgggcgtcctccgcggcggcgggcggcaaggcgctgccgctgccgcccgggtcgatggggtggccgtacgtgggcgagacgttccagctctactcgtccaagaaccccaacgtgttcttcgcccggaagcagaaccggtacgggccaatcttcaagacgcacatcctgggctgcccctgcgtgatggtgtccagcccggaggcggcgcgcttcgtgctcgtcacgcaggcccacctcttcaagcccaccttcccggcgagcaaggagcgcatgctggggccgcaggccatcttcttccagcagggcgactaccacgcccacctccgccgcctcgtctcccgggctttctcccccgaggccatccgcggctccgtgccggccatcgaggccatcgcgctgcgctcgctcgagtcctgggacggccgcctcgtcaacaccttccaagagatgaagctgtacgcgctgaatgtggcattgctgtccatcttcggcgaggaagagatgcggtacatagaggagctgaagcagtgctacctgaccctggagaaggggtacaactcgatgcccgtgaacctgccgggcaccctgttccacaaggccatgaaggcccgcaagcgcctgggcgccgtcgtggcccacatcatcgaggcccggcgcgagggcgagcggcagcgcgggagcgacctcctggcctccttcctggacgaccgcgaggcgctcaccgacgcccagatcgccgacaacgtgatcggcgtcatcttcgccgcccgcgacaccaccgccagcgtgctcacctggatggtcaagttcctcggcgaccaccccgccgtcctcaaggccgtcatcgaggagcagcaggagatcgcgcggtccaaaggctcctccggcgagcccctgacgtgggcggacaccaggcggatgcgcacgacgagccgtgtgatccaggagacgatgcgggtggcgtccatcctgtccttcaccttccgggaggccgtggaggacgtggagtaccaagggtacctgatccccaagggctggaaggtgatgcccctgttccggaacatccaccacagccccgaccacttcccctgcccggagaagttcgacccctcccgattcgaggttgctcccaagcccaacacgttcctgccgttcggcaacgggacccactcgtgcccgggcaacgagctcgccaagctggagatgctcgtgctcttccaccacctcgccaccaagtacaggtggtccacctccaagtccgagagcggcgtgcagttcggccccttcgcgctgccgctcaacggcctgcccatgaccttcgtccgcaaggactgatgagccgccgacagatgtgtggatcgtggacggagccacaccaaaaccacggcaggccgacggaaccaaaccaaagccaacaacaaacaggcggatggatatggtatggcggtatatgctagctagtactactataggagccgcgaaaaccgcttccgggatttggcgttgcggcggtcgccatcggacgggacggggacaggcatcaggcaagcatgggatgatcacagaggaaaaaaaaaaaaaaag

SEQ ID NO: 194 - DNA, 7001 bp, Oryza sativa
tactacagggcaccgcacagtgcagcggccagcagtgcagtacaccactgcagagtgcagacgaaggcaagcgtggctgcaaccgcaagcagcaaaagcaaaaccccggaagcttcccccaaaatctctctctccctctccccactataaatcctcccctctcgtcgatcgccatggctcccatgctctcgatcgcctcccgctcgccctcgccggcgttgattgcacctcacgcctccgcccgcgccaccggtcttcgtgctccgttcgccggcaaccgcattgtggggtgggggtggggggatcaaaccaaatcaggtacggatcgtaatcgcgcatcgatctgtgtcgtcctgttcctgcgcgtccgctccggcgagcccacgcaggcgccgcgggatccccctgctgcggtaggcggcggcggctgctacgtccggctgccggcgccgccgcgagaccgggacgcggttttggtaagcacgatccatttctttctcccccgaattccgacccgctcgtttggttgattggtttcgattcggtcgtgcggcctcgggtcacgtacatttacttctactacgagcaagcctaataatacagccgacttgttggttataaggttctgtgtagcattctctcagcctacccatataatagttagctccttacaattaatacagggctcacatgtctctctcgtagagtttcttggttcctgtgtctaagccggctgtaagtttatagcccgcttctcctctctctcctctcttttctcctccacctcaatatttaaccggcttatagtctactattatacttgctctactacgaccatagcagtacaagcgtgcagttttggagtttattaaactttaaagttggagtagttgtactactatccgaaacgtaattagtaagcgcaagtcaattctactatcggacaagtaattacgtttcggttagtagttttttaatatatctctcgtttaatgcgagtagcggcttataagacaaagacatgtgtacaagcggcgataaataactatagactatagagtatggaccttatatttctactagctaaataatcatgcttttatacggattaaaacaaattaaggtttttgggacaatttcattctagatgaaataagatagaatcatatgtagaaggattattttataacattaaagcatgtagagtaattggaagaaaacatgatggggtagtcggtaaataaaaaaaaacttggtgaggtggcaacattgctctcttttataaggagtatagattcttagcggcccaaaactaaagttaaaaatggaaaattacgaaaaccttaaattaattatatatctcatgggatttaaatttggttgctgcttataagccaacgagggtctaggaaccgataaaatttgtaaaaccaaagggcgataaataaatctcagggatacgaacacatatgcttcagccagtgcccggtggatagaaaggctatacataggaaagggaaaagagacttgcaaaaatactattgttctagtagaaagtttcatgttggtaattaatttaactttttttttgatcaaagggccttaaccctccatttccattaaaagaaatgtcacagtttacagcagaaaaaaaaaacagacttaatttaacatttgtctcagttcttcagcaattgaaagttgtttcgtctggagttgggataattttactagttttacaaaggattattctgtgggacttgaatatattaacttgcggttttgagtttgtgccgtgtgatgtcgattgaagtgtggattggtcctttctttcttgaatatgttgccatctgcttttgaaatgttggcactcttgacaaattgacaaagaaaatattaggcttgtttgctaatcatttcttattttcttgtagttgtatgtagtcgacggttccagaaaactgagtagctgacaggtgctgcctttttcttgttgcaggatttatttctcaaagactaccatttcagattactgaagttgggcgatctgcataactagcacggtgccacggtttttgagaagaagaacgagcaatggttcgacaggtacctggtttaagttctttctttcagctgtttgcctggacacttcattgcattgggtcgatgttctgggctgtcaagaactctgctgcctgaacaatgatgttttttttgtttatctagttagtttgcatgtgaaaatatcattagtttattcatatttatattgaatttttattagacatatttactgcatttctttagctttgctattacatttacttcatttgttgagcagatatgcataagctagattcttctatctaaaaatatgtataagctggacagcccccaaatacatagccttgagtagaaaacaatactatatctcaaaatataagattcatagtatcagctatgcctataccatacacatcaaattcactgtatcataaaaaacgagatttggagggagaggcgttcctccaacaattaaataagaaattgtgagcgtgttggggattgaacacgggattttggggttaaaaccacacatcccttgcgctgcattatcaagtgcatctcaaattcactgtatcatagtctacctgtaattgctgagcatttgcaaattagaaccttgaacataagtcaagtgttataattctttccttcagctgttggtattgttattgattttgttacctgaataacgatgcctttcattgtaactctccctttcctttttccagtatcacgtttgcttgttcactctacttctctgcttcatccctatcactgctttggcggaatccgatatcaagaatttatttgctctgaggaaagcaatcgctgttggaaaaggcttcctccacaactggtttgagctagaaactcctccatgcaactggtcaggtatatcatgcgtggggcttactgttgtggccatagacctgtcatctacgccactctacgtcgattttccatcacagatcattgcattccagtcactcgttcggctcaatgtaagcgggtgcgggttttccggtgagcttccagaagccatggtgaatctgcagcatctccagcacctagatttgagtgataatcagcttggtggccctctacctgcctcattatttgacttgaagatgctgaaagttatggtgcttgacaacaacatgttctctggacaactaagccctgccattgctcaccttcagcagctcaccgtgctatccatatccacgaattccttctctggaggcctccctccagagctaggcagtctgaagaacctggagtacctcgacattcacacaaatgcatttagtggatcaataccggcatctttcagtaatctatctcggctcttgtaccttgatgcaaacaataacaatctcaccggatcaatattcccgggaataagagcgttagtcaaccttgtcaagctcgatttatcgtcaaatggtttggtgggggcaatccccaaggagctttgtcaactgaaaaatctgcaaagtttaatcctatcagacaatgagttaactggaagcatcccagaagagattggtaatctgaagcagcttgaagtactcaatctcctcaaatgcaatctcatggacaccgtccctttgtcgatcggcaatctcgaaatcttggaagggctttatatatcattcaacagcttcagtggtgagcttccagcatctgttggtgagctacgcaatctgaggcagctgatggcgaagagtgcagggttcactgggagcataccgaaagaactcggcaattgcaagaagcttactactctagttctgtccggcaataacttcactggcactatacctgaagaacttgcagatttagttgccgttgtcttgtttgatgtggaaggaaacagactctcaggccacattcctgattggattcagaactggagtaatgtttcatctatatcgcttgcgcagaacatgttcgacggacctctaccgggtcttccattacatctggttagtttctctgcagaatccaaccggctgtcaggatctatccctgccaagatatgtcaaggcacctttctgcagatacttagattgaatgataacaatctgaccgggagtatcgatgagacatttaagggatgcaagaaccttactgagctaagcttgctagataaccatctccacggagagataccagaatacttagctttgctaccactggtgtcacttgatttgtcacataacaatttcacagggatgatccctgacaggttatgggaatcatcaaccatcttggacatctctctcagtgataaccagctaactggcatgatcacagagagcattggtaagctcttgagcttgcaatcgttgagcatcgacagaaactacttgcaaggacctctccctcgatcgatcggcgctctaaggaatctgacagcactgtctctcagtggcaacatgctatctgaggacattccaatacagctcttcaactgcagaaaccttgtcacattggacttgagctgtaacaatctgacagggcacatccccaaggccatatctcacttgacaaagctcaacaccttggtcctgtcccggaatcggctgtcaggcgctatcccttctgagctatgcgtggctttctcgcgcgagtcccattctgaattggagtacgtgcaacacattggattgattgatctgtcgcggaacagattgactggtcacatcccgagagcaatcaacaattgttctatactggtagagctacacctgcaagacaacttgttaagtggcactatacctgtggaacttgctgagctgagaaacataacaaccattgatctatcttccaatgcattggttggacctgtccttccatggcctgtaccattggcaagcctccaaggccttcttctgtctaacaacagactcagtggctccattccttctggcattggcaacattcttccccagatcacaatgctggacttatcgggtaacgcgcttaccggcactcttccattggatctactctgcaaagagagcctaaaccacctggatgtcagtgacaacaacatctctggacaaatcccattttcctgtcatgaggacaaagaatccccaatcccactgatcttcttcaatgcaagcagcaaccatttctcagggagcctggatgaatcgatctccaacttcacaaagctgacctatcttgatctccacaacaacagcctcactggaagattgccatcagcaatagcaagggtcacttctttgtactatcttgacctatcaagcaatgatttcagtggcaccatcccttgtggtatctgcggtatgtttggcctgaccttcgcaaacttctccggtaaccgcgacggtggcactttcaccttggcagattgtgctgctgaagaaggcggggtttgcgccgctaaccgtgtcgatcgaaagatgccggatcatccgttccatgtactggaagcaaccatttgttgcattgcaacggccattgtcattgtgctggtggtgatcctggtggtttatctgagacgacggaggaagatgttgagaaggaggcagtttgtccttgtccctgccggtgacaacgccatggctgaccatgagacaaccttgagtaacaatcttttggggaggaggaggatgaagaagagggagccaccgagcatcaacctcgcgacgttcgagcacgcgcctgtgagggtcaccgtggacgagatcatgagagccaccgggaatttcgacgggatgcacgtcgtcggcgacggcggcttcggcaccgtgtacagggcggagctccccggcggccggagggtcgccgtcaagaggctccacggcgtcggccgccggttccagggcggcgaacgcgagttccgcgccgagatggagaccgtcggcaaggtgaggcaccccaacctcgtccccctcctcggctactgcgccgccggcgacgagcggttcctcgtctacgagtacatggagcacggcagcctggaggaccggctgcgcggcggcggcggcgcggcgctcgggtggccggagcggctcacgatctgcggcggcgccgcccgcgggctcgcgttcctgcaccacggcttcgtgccgcacgtcatccaccgcgacgtcaagtccagcaacgtcctcctaggcgagggcctccagccgcgggtgtccgacttcggcctcgcgcggatcatcagcgcgtgcgagacccacgtcagcaccgtcctcgccggcacgctcggctacatcccgccggagtacgcgctggcgatgcggtgcaccgccaagggcgacgtgtacagcttcggcgtcgtcatgctggagctgctcacggggcggccgccgacgtggtcgtcggcggaggtgacggcggagggtgacgacgagcgcggcggcggcgggagcctcgtcgggtgggtgcggtggatggcggcgcgcgggcgtggcggcgaggtgttcgacgcttgcctgccggtgtccggcgcggagcgggagcagatggcgcgggtgctcgacgtcgcccgcgactgcaccgccgacgagccgtggaggaggccgaccatggcggaggtggccaggagggtgggggcgatcgaggcgatggagtacgggcctctggtggtggcagtgtccagtggcgagccgccggcgatgccatgatcttgctgctgctatactgtatactgtagtgcatcatgctcctttttgtgaattaaggtgttttgatctcatcttatatgcggacacagagatgcagcagaaactcaattttttaacaagttcatacctcacaggcatttcatcaaacacctgttatgcgtgcaaccaacccgctcattataacctcatctttttttttaatgcttatccttataagttaatatttaaaattttcaaccttaaatttgaatttcattttaggttttt

SEQ ID NO: 195 - DNA, 1558 bp, Glycine max
attcggctcgagccctaatccaccctttctgaacaaaaataaaaaaataaaaaaaaacccatcgatttcttggacctccatgacttctttgtctacccatcacacctatagccgaaagcaaaaatctctcggcctcctctgcaccaattttctgagtttgtacaacaaagaaggtgtgcgcctggtcggtctcgatgacgcagcttcgcggttaggtgtagaaagacgtcggatctacgacatcgttaatgttttagagagtgtcggtgtgctaaccagaaaagctaagaatcagtatacttggaaaggattttgtgcaattcctgctgccttacaagaacttaaggatgaaggtttgaaggagaatcctggatcatttgatgactccaatgacaatgcaaaagtgtctgatgatgaggaggaggaagaagaaacatttcctaatattaacattgggagtcagagtgagaaggaaaatcctgattacactgctactgtcaaatcctccaagaatgaaaacagaagggaaaaatctctggcattgcttactcagaattttgtcaagctttttgtctgctctaattttgaaatgatctcccttgacgaagctgcaaagttgttgcttggaaatgccaacaatagaacaaaagtcagacgtctatatgatattgcgaatgtgttatcctccatgaacctaatcgagaagacccatacaacaaacacaagaaaaccagcattcaggtggttgggtgtgaggggaaaaacatggggtggatcagttgacttggctcaaaattcaaatgtcaaagagtcacggaaaaggatgtttggaactgacattggaaacataagttttaaaaggaacaaagttgatttgtccatggatggccagaattctaaaatgcaaaatcaacacgaaaatattagtccacgagctcagttagagaaaatcatcataaaaaaagatgctaagcagacttcagagagctatcagtttggcccttttgctccagcttatgtgcccaaagttggaacctctgaaaataatagtgtgaaaaaggtgcatgactgggacagcctcgcacaggagcatcgtcctcaatatcaaaaccaaggttagagctttaaaagatctattttcccactacatggaagcatggaaatcttggtactctgaagctgctgggaaaaagtcaacgaaaactttataattgacttgtccaaagtcagtccagataattgtagcttttctagaaaataaatgatccattactgagtgtatgttccacatatgttggcatattctcaaaatgaaatgatccattactgaatgcatgttctccatgcgttactgtattctcaaaagaaaatgatccattgttgaatccatgttctccaggggttagcgtacagctaccctgtgctgatttattaaccgtcacatgtcatgttaaagatcagttaacagttcttatagattatttatcatgttttttataaaaaaaaaaaaaaaaaaaaaaaaaaaaaaaaaaaaaaaaaaaaaaaaaaaaaaaaaagg

SEQ ID NO: 196 - DNA, 3996 bp, Zea mays
cgtagcactgccctcttcctctctgtcctctcccctgctgccgccccctttcccaaatctggccgcacgacgcaccagccaccaaccgcacacaccccaaacttgaaggcacaacccgagcgctcgcccgcctcgcctctgcgccgcgtccggccgccggtagcgggccggtcacttaccgggagggagaggtgctttggttcctggatgagctgtgaaggaactgggagcaagaagaattgatgtttactccgcagggcaaaggatggaccggctggtcgacgccaactccggccaaccagcggagcggtggtggggctcctgctgcgtcggcgccccttggaaagggcaaaggaagggtcgccgagctcgagcaggagttgcatgaatatcagtacaatatggggcttcttttgattgaaaagaaagaatgggcagcaaaatttgaagaaatcagtgaagtgctgacacagaaagaggagatactgaagagggagcaggcggcacatctgaatgctatatcagagtatgaaaggcgggaggagaacatgcggaaagcactaggtgttgagaagcaatgtgtcgctgatcttgaaaaagccttgcgtgatatacgagcagagatagctgaggttaaatttacatctgagaaaaagataacagatgctcagtctcttgaggctagtttggaggaaaaatccttggagatcgagggaaaacttcatgctgcagatgccaaacttgcagaggcaaaccgcaagaagtctcaagctgaccgtgatttagaagaggcggaagctcgtcaacgtagactggagaaggagaaactgtattttgagacagagcggaaggcccgagaaaagcaacttaaggagcaggaggaatcactgcaggaatgggagaaaaagctgaaggaaagtcagaatagacttaatgagttgcagagatctataaatgagcgagaggagagagcaaataagaatgatcaacttttcaagataaaacaggacgaactggaggaggcacgaaggacagtggaggccgctaaagttactctgaaagtcaaagaggatgatattaacaaaagactaaatgaattacatttacaggaaaaggatgctgactcaaagcgcagtgcattggaagagcaggggaaaaaattggatgagagagaggcaaaggtcactaatagagaaaaggaggggctccagaagcttcttgaggatcatcaggtggagcttgaatccaaaagacgggattttgaattagaattagagagggaaaggaaatcttttgatcaaaatatgacacagaagcaagcggatttattgaaaagggagaaagatgttaaatctttggaggctaaactttctaaaagtgagcaggcattgaatgataagaagaaatcaatggaaaacttgcagaatgatcttgatgccaaatctaaggctctgaagagttgggatgaatcattgaaaaatgacgagaaaaggttactgaaagaaaagcagcaaatggatcatgaaagagaacaattggagacatacaaattggagcttgaaaagatcaaatcagcattagaagctgagaaggaaaaaatatcagaagagcagaataatctgaaactcacagcgcaagagaggcaggagcatagcttgttgatagcaaaacttaagaaggagattgaggaatacagaatgcgaagcaactccctatctgaggaaatggaggatttaaggaagcaacggcagaaatttgaagaagagtgggaacaactagacgaaaagagagccctccttgtagaggaggacaaaaggttgaacattgagaggatgaatttagaacggtggcgtgacaacgaagaaaaaaggttaaatgatatgaaactcaaaatggatgaagaatacaagcagcagctggagagtcttgagcgcaaggaaaaggctttgagtgatgatatgaagcacaagcaaatggaaaatgatgaatttctgaagggagaacgtgctgatgttcaacgtaaattgcaactcaaacggcatgaattggagatggagatggagcaaaaacaagccacgaaggagaaggaactggaagaaaaggaaaatgagttaaataagaaaatagattttgtggaaaataaactccgacatgcaattgagttgaatgagtccaagattgagaagttattattggagaaaagggaggtgcagatggaaagagaattactgctggaggaaagaaagaaaacggagactgacaaggcagatattagaagggatattgagagtctgcactcattgagcaagagtttgaaggaacgtcgagaggcatataacagggacaggagcagactcatcgaactatttgaaaagtacaaggcgtgcaaaaactgtgggatttctatttttgagggattggattctctgctgcttaaagacagtgctgaaattgagcatccaagtttggctgttgagggagatgatcatgccttgaccaccgatacatcaggtccagatacaggaacccttgttaattcaggtggtcgtttttctttgttacagaagtgttcaaggcttttcaagttctcccctagaaaaaagggtgagcagtcatcagaacaaccatcagagaggaatatatcttttggtgcaagactcgaggaagcaacacagagcgatggagattatgtgccaactcctgtctatgagatagcccacgattctttcaatgcagaggatgagctcccttctgacggtgaaaccagggagaatgaagagtctgaaaggcatgacatagctgataatgcccagatggagtcttctgttggtgtagcagataacagtatagatattctcggtactaagtcatttgatggtgctaacgacatggcagttgaagcaactattgtctctgttgatcaaaatggcgaggactctgtagttcctgctgaagcaggtgtagagcctgaaacatcagagcaaggtcggcgccagcaaaaccagagaggcagaagaaaaggtggtatgaaaagaacacggtctgttaatgctgtagttgaagatgctaagatgatacttggcgaggtttttgaggagaagactgatgatcagggagatacagtcaaggtgggtgctacacgaaagcggcggtttgctggagctacaataagtgaacaagatgaagaagggagcgaagcacattcagaaagtgtttcacttggagggcagcgccgtaagaggcggcaaactgctggggcagtgacagatgccccaggagaaagacgttacaatttgagacacagtagagctgcaaatgctggcgctgcaacagcccaagcagacaaaaaaaaaatcttcaaaagcaagaaataaacatacagtagaagcttctgctgatgacaccgaaggaacatcaaaggttgttgaggaacctgcccctgagagcaagagggtatctgaatctgcagactacgatgcatcccagttgcatgagttttcccaggttgaagttggtgatgcccatgctgtagacggtgagggtgctggtgaggaagatggtgatattttggatggccaagatgcactgcctgatgtgccaatgacaccttctggaagcgagtttggagcggaacaggaagatgaggacgatgatgattcagagaggcgaaaccaatcaatcagcaagaagctatggtcattcttcactacatgacttgctgaagaggtcgtcatgtaggttatttctagcttttgtggtttcgattcatgataccccattcttggaactgtaggtcgtgtgcttttggtgattatgtactagatctcccacttgattgtgcttctctcccgtgtaattgaaatatatttgtagtggacatagtttgatggcactcacagaagtagctgatgagatgtacaatggcgatgatggtatgccctgtaaggctgtaacaccagtagcttggtttgtaaaaaaaaaaaaaaaaaaaaaaaa

SEQ ID NO: 197 - DNA, 1984 bp, Oryza sativa
ctggatctatggagtacatcgagacagtcccactaaaccagtaaggatgggaatatggtgtttgtttgttctttatatgttgtctagcatccatggattctgttgttaggacccacattggtcatatgcttaagatgatacatttttgttctatgtttctcattacttttagcgactataaaatacaagctattctctcttcacagcaaaaaagaaaagcaccagaagaaagtgatgttgctgagtctagcgactgtatgattactagccctggatttgctgtcagtccaatgctcactccagtctctgggaaagctgttaagacttccaagtcaaagactaagaacaacaaagctgggcctcagacacctacatcaaatgttggttcaccacttaatcccccaactcctgttggtacatgccgttatgacagttcgttagggcttctcacaaagaagttcataaatttgctgaagcaggctccggatggcattctagatttgaataatgctgcagaaacactagaggttcaaaaacggcgtatatatgatattaccaatgtacttgaaggaatagggttgattgaaaagacactcaagaacagaatccgttggaagggcttggatgattcaggagtggaattagataatggtctttcagctttgcaggcagaagttgaaaatcttagtctgaaggagcaagcattagatgagcgcataagtgatatgcgtgaaaaactaagaggtttaactgaagatgaaaacaatcaaagatggctctatgtgacagaagatgatatcaagggattaccctgctttcagaatgaaacactaattgcaataaaagctcctcatggcactacacttgaagtcccagatcctgacgaggctggtgattatctccagagaagatatagaatcgtattaagaagtacaatgggcccaatagatgtctacttagttagtcaatttgatgagaaatttgaggacttgggtgggggtgcaacaccatcagggcatgcaaatgtaccaaaacatcaacctactgaagtcttcaatacaacaaatgctggggttgggcaatgtagcaactcagttgctgtggacaataatattcagcacagccagacgattcctcaggatcctagtgcttcacatgattttggaggaatgacaaggattatcccttcagatattgatactgatgctgattactggctcatatcagaaggggatgtcagcattactgatatgtggaaaacagcaccagatgtgcagtgggatgagagcctggatacggatgtcttcctatctgaagacgttagaacgccaagttcacacaatcagcagccatctgcagtgggcgggccacagatgcaggtctcagacatgcataaaccctaggatcacaggggttacagaagtgaaaagatgacatctggaattcctggagcggtgtttgtagtgaaaagtgaaagcatgacagcaaatgctcattgccaaattgtaaagagccgggtggtcttcatcagaatatctgcatcttctcgagacaccaagtccgtgcgagagatcaggatgacaccattccggattcacatctgctgtggaggctggtggcgtcaactaacttaccagcctgctgtttcagcaccctgcttcagtcgaacgggagtaaatcttgctgctgctttcgctgtgaagcctgctgcggtgctcattaaggcactgatatattttttgcattcaaaactaactagtcatcagcaaggaaacggtgggctttgctgtgctctgtcgagtattctttgaaaattctttgtacattgggaggtataagggcatgcagggctcgagttattggtttgacgggagcaatgagctgagttaatgatgtaaccgagccgtctttgtaaattgttccatgctcttcctcaaatacaatggatagactttcattttgaaaaaaaaaaaaaaaaaaaaaa

SEQ ID NO: 198 - DNA, 1184 bp, Zea mays
ccacgcgtccgcggacgcgtgggcggacgcgtgggttttcacttgacatcccccgtcccatagatcgccggcgatggctccggccgtttccgcggcggcgtcggcggcgatgaggcaggcactgcgggaccggcagatcctcgatgccgtgggcactggcgctgcggcgctctcgctggcaggctcttccttcatcgtgatctgctacctcctcttccgcgagctccgcaagttctccttcaagctcgtcttctacctagccgtctcggatatgttttgcagcttattcactatattgggggggccatcgaatgcattttactgctttgcacatgactacagtgcccatttcttctgtgtggcttcttttctatggacaaccaccatatcattcactctgcatcgcacagttgtaaaacacaaaactgatgttgaagaatttggatctattttccacttatatgtgtggggaacttcactatctaccactgtattacgttcgataggaagtgactatggaagaccaggcacctggtgctggattcagcagggaagcatggcaaaggtcctacatttaataaccttttatcttccactttggggtgccattttgtacaatgggtttacatactatgaagtaaaccgcatgctgaataatgcaacacagatggctgctggcataagtgatcgatcaaatcagtctgacattagggcagacaggaaggcatttaaccgatggggttattaccctctaattctaatcggttcatgggcttttgcaactatcaatcgtctttatgactttgccaatccagggcacaggatagtctggctctcctttcttgatgttgggttcgctggacttatgggcctattcaattccattgcttatgggctaaactcttctgtgcgccgagctatttcagagagaatcgacacgttcctacctgagagaataaaaaggagcctccctgctttgtcaaggctgaggagtcaacaggaaaatgaactcacttctcttatcgttgagggtaactgatatgtaatggattttccatgcacacgaagctttttttttttgtttatctgttcgttcatcaatctccaacaagggaatgcaacatcactgtaggagcagtgggttagtaacacgtcgaattggttcaaaaaaaaaaaaaaaaaag

SEQ ID NO: 199 - DNA, 1734 bp, Glycine max
attcggctcgaggaatgagtggcggaggagaagagggagcaactctggagttcactccgacgtgggttgtggccgccttttgcacagtcatcgtcgccatttccctcgccgctgagcgcctccttcattatggcggaaagtttctcaaagccaaggaccagaagccgctctacgaagctctccagaagatcaaagaagagctgatgcttttggggttcatttccctgcttttgacggttacacaaaacggcattaccaaaatctgcgttcgaccctctttgacgctccacatgctcccgtgtaatctccacgacgctccagcaaaccacgaatctcatttccagacatttttccctggaacagccaggcgccttctctctggggaacactccacccccgagtccgcctctaaaattggttattgctctcgcaagcacaaggtgcctttattatctgtggaagcacttcaccaccttcacatcttcatttttgtcctcgctgtcgtacacgtctccttttccgtgctcaccgttgtctttggaggcgccagaatacgtcagtggaaacactgggaagattctattgcaaaacagaactacgagactgaccgagttctcaaaccaaaggtcactcaggttcaccagcatgattttatcaggggtcgttttgctggttttggcaaagactctgctatagtcggttggttgctatcctttctaaagcaattttatggatctgtgacaaaatcagattatgtgacattgcgacatggtttcattatgacccactgcaggacaaatccgaagtttaattttcacaagtacatgattcgtgccctcgaagatgatttcaagcaagttgttggtataagttggtatctttggctctttgtggttatcttcttgttacttaatatcaatggttggcatacgtatttctggattgcttttattcctgtcattcttttacttgctgtgggcactaagctggagcacataataacccaactagctcatgaagtagctgagaagcatgctgccatagaaggtgatttagttgtgcagccatcagatgatcacttttggtttcaccggccccgtgttgtcctctttttgattcactttatccttttccaaaatgcttttgagatagcattttttttctggatatgggttacatatggatttgactcctgtataatgggacaagttcgatacattgttccaaggcttgttattggggtatttattcaggtactatgtagctacagcaccctgccactgtatgcaattgttacgcagatgggaactcactataagcgggcaatatttaatgatcatttgcaacaaaacattgttggttgggcacagaaggcgaagaagaggaaaggactaaaagctgatggcaatcctggccaaggaagttctcaggagagtgctaatacaggaatccagcttgggtcaattttcaagaaggcaactgctccaggagacagttcttctgcccccaaagctgacggaatcagctcagtgtagctatttaagtgaagatttacagtcttattttgtaaagttgctcacagattgcagttttctttatattattttctttgctaacataatgtagcattgtgggacatgtgtttgacttggtgtacgcataaggtcgaagtactatatgagtagatgctagtaatgctattgtcaaaaaaaaaaaaaaaaaaaaaaaaaaagg

SEQ ID NO: 200 - DNA, 1906 bp, Glycine max
gttttctccttcattctagtctagtctttttcttctttttttcccccatgtatagctccaagttcagaaagctgttttgttctgtgttgttttcatggctctgttttggaggtttggccatggcagcaggtgaaagtagcagcagctccagagacctagaccagacaccaacgtgggccgttgctgctgtctgtactgttttcatcttggtatccatagcactcgaaaagagtctccacaaagttgggacgtggcttggacaaaagaaaaagaaggctttgcttgaagctctggagaaggtcaaggctgagttgatgattttaggtttcatttcactgcttttgactttcgggcagagttacattgtcagaatatgtattcccgaaaagctggcagacaatatgttaccatgtccgtataaatataaggaggacaaaaaggcatcagatagtgaagaggaacatcgtaggaaacttttatcttatgaacgtagatatttagctgctgatactacctcgttcaaatgcagcagggagggacacgagccacttttatctgtcaatggattgcaccagttacacatcctcgtattcttcttagcagtcattcatgtgctttacagtgctattacaatgatgcttggaagactaaagatacgtggatggaaggcatgggaagcggagacttcaactcataattatgagttcgccaatgctgcttcaagatttagacttactcatgaaacatcattcgtgagagcccattccagttttttgactaggattcccatcttcttctacattcgctgcttctttaggcagttctataggtctgtaaataagactgactacctcactttgcgcaatgggtttatcactgtccacctggctcctggaagtaaatttaatttccaaaagtatatcaaaagatcattagaagatgacttcaaggtggtcgtgggagttagtcctatcctctgggcatcagttgtagtttaccttctcatcaatgttaatggatggcacaccgtactttgggcagccttaattcctgttgttataattttggctgttggaacaaaacttcaagccatattggcaaatatggctcttgaaatcacggaaagacatgcagttgtccaaggaatgcctcttgtccaaggctcagacaaatacttttggtttggtcagccacagttagttctacatcttatccattttgctttgttccagaatgcgttccaaataacatatatcttgtggatatggtattcttttgggttgagaaactgtttccgtactgactacaagcttgcagtagtaaaagtagctctagggattttgatgctatgcctctgcagctatatcacccttccattatatgctcttgtaactcagatgggttcaaggatgaaaacagcaatatttgacgagcaaacaaacaaggctctgaagaaatggcacatggctgcgaagaagaagcagggaggagcagtgacgctaggaaagtcgagtgcacgaatcatggatggaagccccattggtaattcttcaacagtgcactccactggccccacactacaccgtttcaaaactactggccactcaacccgctcctcatcaacagcgtacgaggatcaagatcaagatcatgaatatgaatccgatggtgttgagttgtctccgttggcgtcgcaaacaacaagcttcattgtaagagttgatcatggcgaccaacaacaagcagaacatagacaagatagtgagggagaaaccaacagtagtagtgaaggtgaattctcatttgtcaaacctgaccctgtggaaattagaaccaccacatagcatatgatcatatattcatctctattcttatacataaatctttacataaaaaaaaaaaaaaa

SEQ ID NO: 201 - DNA, 1537 bp, Oryza sativa
ggatcctgagatctagacgtgaacgtgcttggtgggaagagagaggctcaggcatgagagcatgcctctaaaataatgtccgtgcttacctgtgtgtttgataacatgggctcatcctgtagcagatctcattctttaagtgaggctgaaacaacaaaaaatgcaaaatctgcagacattgacaggcgaattttgcaagagacaaaagcagagcaacacatccacaagctcttacttcttggtgcgggagaatcagggaagtctacgatatttaaacagattaagctccttttccaaactggctttgatgaggcagaacttaggagctacacatcagttatccatgcaaacgtctatcagacaattaaaatactatatgaaggagcaaaagaactctcacaagtggaatcagattcctcaaagtatgttatatccccagataaccaggaaattggagaaaaactatcagatattgatggcaggttggattatccactgctgaacaaagaacttgtactcgatgtaaaaaggttatggcaagacccagccattcaggaaacttacttacgtggaagtattctgcaacttcctgattgtgcacaatacttcatggaaaatttggttcgattagccgaagcaggttatgtgccaacaaaggaggatgtgctttatgcaagagtacggacaaatggtgttgtacaaatacaatttagtcctgttggagaaaacaaaagaggtggagaggtatataggttgtatgatgtaggaggccagaggaatgagaggagaaagtggattcatctttttgaaggtgttaatgcggtaatcttttgtgctgccattagcgaatatgatcagatgctatttgaagatgagacaaaaaacagaatgatggagaccaaggaactctttgactgggttttaaagcaaagatgttttgagaaaacatcattcattctgtttctcaacaaatttgatatatgcgagaagaaaatacaaaaggttcctttaagtgtgtgcgagtggtttaaagactaccagcctattgcacctgggaaacaggaggttgaacatgcatatgagtttgtcaagaagaagtttgaagagctctacttccagagcagcaagcctgaccgtgtggaccgcgtcttcaaaatctacagaactacggccctagaccagaaacttgtaaagaagacattcaagttgattgatgagagcatgagacgctccagggaaggaacttgattcagagctaagactaggttgtaagtcacacagggaaggtaattaggacggcgagaggaacaaagtttcacactgtcacagctttatctgttgtaattcttttacacgtggaccattgattgaccttttggttcttactgtgggctgttcaggtctgtaccctattttttgttctctagttagccattgtgcaaattttccttgaatcagattctctacctgttgtctatgtgtgttatcttggtctgttaatttgcatagcccacttgttcattaaaaaaaaaaaaaa

SEQ ID NO: 202 - DNA, 1183 bp, Glycine max
cggctcgaggagaaagggcttttttgagtaataggattattatcagtgaaaagagttcccttttttctctgtaaataaaagggttgttgttattattattattgcctagtgtttgttttcagatctgtgtcgtattattaagcagaacaagcaagggtgcaaagtgggggtgtttttttcgctggatgagtggtagctgacactcacttatggcgtctgaaacggcgtcgtcggcggatgaagaaaccgttgttgttgtttcggctgctgcgggtgcaggaggaactgataagagaggcaagcaccggattcttgccgaactgaagcgtctcgaccaagaatccaagtttcttcaggaagaattggaagagcttgagaaaacagaaaatgtgtcgaccatatgcacagaattgctacaaaacatagacactaggcctgatccattactcccagaagtccatggacccgtaaatctcttatgggatagatggtttgaagggcctcaagatccacaggcatgtagatgttggatactttgatttgaagctgtgtcaattgccttgcgttgcaaataggatgccacatataactgcattaaagtgactctggagctgaagaaaatgtttgatgacatgttataccacgcacactaattctataatggatccttgcttttattacattagattctgttccgaatactgtttatgtgtaatcacattcatatactgcattcaactgagaagtatcattatttgtgcttgtaatcccaatccaactgttaatgcacctgaccttggtggactttcatgtgtgcacgagacgttagagacattttagcatcattcagccttgaaggtggtgtggcttttggaaaggcctttacaatgcaatggtttgacgagtcatcaactagtcctgaatgataacgagattttttgggcagagacctcttggggttgggagagcaaagaaagctcataatcccttgtttgagtcatttcacaattaaatgttatgataagattttgtaatcatgttacttctaagcctttttaagttttggtgttttatttaacaagccattactttttgcgtgccaaaaaaaaaaaaaaaaaaaaaaactaaaaaaaaaaaaaaaaaaaaaaaaaaaaaaaaaaaaaaaaaaaaaaaaaaaaaaaaa

SEQ ID NO: 203 - DNA, 1225 bp, Triticum sp.
cccacgcgtccgccaagagcgaactgagatcatcctaggaccaggcgcgaccacacaggacaagatgctgctgcttaatccggcgtccgaggcggcggcggcggcgctggacagcatccggcagcagctcctggaggagccaatggcgccggcgcggccggcgtactgccggagcgcgagcttcggcagcctggtggcggaccagtggagcgagtctctcccgttccggcccaacgacgccgacgacatggtcgtctacggtgccctccgcgacgccttctcctgcggctggctccccgacggctccttcgcggccgtcaagcccgagcccctgccctcccccgactcctacgacggctgctgcctcggcagcttcctcgcgtcgccgcccgggctggacgcgccgtgggcggaggaggccgaggtcgcagcgacggcgtcaagggggaagcacttcagaggcgtgaggcagcggccgtggggcaagttcgcggcggagatccgggacccagccaagaacggcgcgcgcgtgtggctcggcaccttcgacagcgccgaggacgccgctgtggcgtacgaccgcgccgcctaccgcatgcgcggctcccgcgcgctcctcaacttcccgctccgcatcggctcggagatcgccgcagccgcgggtcagaagcgtccgtctccccagccagcgagccccgactctcctcctccctcctccagcgcacccgggtcgtcgaagcggagaaagagaggcgaggccgcagcagagtccatgtccatggctctggtgccgcccccgccggtgcaggctccggtccagctgaccctcccagtccagccgtggctcgccaccggcgccgtccagcagctagtgagctgaagcggcgaaagcaacaagtgatcgttctcatgaccgatggccattagttcttccttcatggcttcatgtgttgagcccatggaggaacagagcatcaagatggcgtcaatggcgtaatgcgtcgctcgaagaaaccttgatcagttggaggcaattacgcgccacgccattgtgaaatttgtgtggctccgtgtgaaacttgtcgctagggttagtggcgttggcacagtagcaagtgggtgcagtggaatcccgaagctggtttgtaagaggtggtgagggtgcaggtgcaaaagttgcacagaccttctcctctccaatggagaatcttctttgttaaaaaaa

SEQ ID NO: 204 - DNA, 1690 bp, Sorghum bicolor
agagatagaggagcaatggctggttcgtcttcaatggacactgaagctgcaggccaacagctcaagcatggcagcggctacagcatcccggctactgctcatgcggtggacacagactcgtggcagcaggtgagcctgctgatggtgatcggcttcaactgcgcctacgtgctcagcttctccaacctcatgatggtgcccctgggctgggcatggggcgtcgcctgcctgctgctcgtcggcgccgccgcatggtacgccaactggctcctcgccggcctccatttcgtcgacggacagaggttcatccgctacagggacctcatgggcttcgtattcgggaggaacatgtactacatcacttggttcctgcagttcaccactctacttttgtgcaacatgggcttcattctactaggagcaagagcactcaaggcaatcaacagcgagtttacccacacccctgccaggctgcagtggttcgtcaccgcgacgggattcatctacttcgccttcgcctacttcgtgcccacgatttctgccatgaggaactggctcgccacgtcggccgcgctgacattagcttacgacgtcgctctgctggctatcctcatcagagatgggaaatcgaacaagcagaaggactacaacgtccatgggacccaagccgagaaggtgttcaacgcgttgggcgccgtcgccgccatcctcgtctgcaacacgtccgggctgctcccggagatacagtcgacggtgcgggagccggcggtgcgcggcatgcggcgggcgctgcttctgcagtacaccgccggcgccgcggggtactacggcatcagcgtggcggggtactgggcgtacgggtcggcggtgtcggagtacctccccaacgagctcggcgggccaaggtgggccgccgtgctcatcaacgccaccgccttcctgcagagcatcgtctcccaacacctgttcacggtgccgatccacgaggcgatggacacgcggctgcagcggctggacgagggcatgttctcccggtacaacctcacgcgacgcctctgcgcgcgggggctcgtcttcggcttcaacgtcttcgtcaccgcgctgttcccgttcatgggggacttcgtcaacctcgtcggctccttcgcgctcgtcccgctcaccttcacgttccctagcatggccatcctcaagatcaaagggaagagcggcgggagatgtaacagactttggcattgggggatcatcgttttctcctcggttctctgcgtcgctaccaccgccgccgccgttcgtctgatcttcaacaatgctaggatctaccacttcttcgctgacatgtagtaaggagtccaaaaaaaacacgattaggtgatattgccacttctcaattttttttttttgttttggtgaggaatgaaagggtcacctcatgtttggtaaggacgaccacatgcatgatcaataagcatcatgtagtcatcctatcgaaatttagaaatgagcttattgtggtggaccacctcctcaaaacaaagatctctgttcttaattaatgcgagcttaaagacaactcatgcctatatatatatatatatatatatatgctctcaagctcatgcctatatatatatatatatgtaatcgccctcaagtttattaatcaattattgtgtatttagttcaaaaa

SEQ ID NO: 205 - DNA, 1609 bp, Oryza sativa
cacacttcctcaaatcctccaacacctcgatccattcgcagtagctgcgaggtgtctgacatggcgtcggggcagaaggtggtgaagccgatggaggtgtcggtggaggccgggaacgccggggaggcggcgtggctggacgacgacgggcgggcgcggcggacgggcacgttctggacggcgagcgcgcacatcatcaccgccgtcatcggctccggcgtgctgtcgctggcgtgggcgatcgcgcagctgggctgggtggccggccccgccgtgatgctcctcttcgccttcgtcatctactacacctccaccctcctcgccgagtgctaccgcaccggcgaccctgccaccggcaagcgcaactacacctacatggacgccgtgcgcgccaacctcggcggcgccaaggtcaccttctgcggcgtcatccagtacgccaacctcgtcggcgtcgccatcggctacaccatcgcgtcgtccatcagcatgcgcgccatcaggagggccggctgcttccaccacaacggccatggtgacccgtgccgcagctccagcaacccttacatgatcctcttcggcgccgtgcagatcgtcttctcgcagatccctgacttcgaccagatttggtggctgtccatcgtcgccgccgtcatgtccttcacctactccggcatcggcctctccctcggcatcgtccagactatctccaatggcgggatccagggcagcctcaccggcatcagcatcggagtcggcgtcagctcgacgcagaaggtgtggcgcagcttgcaggcattcggcgacatcgccttcgcatactccttctccaacatcctcatcgagatccaagacacgatcaaggcgccgccgccgtcggaggcgaaggtgatgaagagcgcaacgaggctgagcgtggcgacgaccacggtgttctacatgctgtgcgggtgcatgggctacgcggcgttcggcgacgcggcgcccgacaacctcctcaccggcttcgggttctacgagcccttctggctgctcgacgtcgccaacgtcgccatcgtcgtgcacctcgtcggcgcctaccaggtgttcgtccagccaatcttcgccttcgtcgagcgctgggcctcccgccggtggccggacagcgcgttcatcgccaaggagctccgcgtggggcccttcgcgctcagcctcttccgcctgacgtggcgctcggcgttcgtctgcctcaccaccgtcgtcgccatgctcctccccttcttcggcaacgtggtgggtctcctcggcgccgtctccttctggccgctcaccgtctacttccccgtcgagatgtacatcgcgcagcgcggcgtgccacgtggcagcgcgaggtgggtctcactcaagacgctcagcgcgtgctgcctcgtcgtctccatcgccgccgccgcgggctccattgctgacgtcatcgacgcgctcaaggtgtacaggccgttcagcggatgattcttctgattctctcttgctgctttgagcagagcatccactggtaaaaagtggacagtaattttctttttttacagtctatggacgtagtacagtaaaaaagtgtgtacaactgtaaaaa

SEQ ID NO: 206 - DNA, 3480 bp, Zea mays
gcctgatctgcgcgtccctgtcctcggctcctgagcactcgcgtactcgctcgtcgcatctgcccacactaccactggccacaccgaaaccctagctgcgcacccaaatcgatcgatccagggacggcagcggcacgacgcgccaaaataggttcagaactagcgtcgcgacaaaatcggttcacgaccgccacggttggaccagctgcgccgtggccgtgcggctgtgcggccggcattggcgcgctgcgcgctgcttcaggccggtgtgccgcgcggctgggcgacgtgaaacggattcacatcgtaggagcagaacttgctggtcgaggtggaggcttgctgcgtgcagcaggacagggagtcagggacaacagattttagcaaagtatgagctgtgaactagtgttagaggaaagcacgaaggaaatagtggcataaaacttgatttgtctaaagataaattggtttcttaaaatggctcagcaaatggcttcagttcatttgaatgatacaacagttgttgatgccaagcccttgcgtacattgactcccatgttccctgcaccactagggcttcacacgttcactcctcagaactcaccttcagttgtttgtgtgaccccatttggaccatatggtggagggactgaattggggatgcctgctgttccaccaatgtttgcagcgcctgtacctgctgcaggagcagaacccagccagagacagccgcatacagctaatatgaacggaggagacactgaattggggatgcctgctgttccaccaatgtttgcagcgcctgcacctgctgcaggagcagaacccaaccagggacagccacatacagctaatatgaacggaactgcagtcaacagttcggtcacatctttgcaaactccttcagctgccacacaggaatctggtaagaggaagaggggcaggccaaagcgtgtgcctgatactactgtttcttcggctccttcagctcctctggctcctactatttctccagttccttcacttcctgtggttactccagttccttcagctcctcaggaattgaacactattgtttccctgacgccttcttcagacgccccacaagaatctggcaagaggaagaggggacggcccaaacgtatacaagacgttcctgtaatggttcctctgacctcgcaaggagatagcacatctgttattcagacacttccagggtccagtgtacatgaatctggtacgagaaggggacgtcccaaacgtttgcaggatagttcagatattgtcactccaattgactcaaaagatagtgagtcctctccccagccacctattgccgcacctgccgaaagtggtaagaggaagaggggacgtccaaagcgcattgatggttccgtgactccttcaagtcattctgttttttcaatagatgatgatgctgttgacacgatgaaacgtggacgacctaggaaaattgataccaaactgttacagtttccatctttattttcagatgatcctagacaaactgcagataatgtactcatgatgtttgacgccctgcgacgcagacttatgcagatggatgatgtgaaacaagctgcaaagcagcagcctaacttgaaagctgggagcatcatgaacaatgctgaacttcgtgtcaataaggacaagaggataggagaggttccaggtgttgaggttggtgatatgttctacttcagaattgagatgtgcttagtggggttgaatagtcagagcatggcagggatagattacatgtctgccaagttcggtaatgaggaggaccctgtagctattagtgttgtgtcagctggtgtatatgataacactggagatgatccagatgttctagtttatactggacatggcatgtcgggtaaggatgaccaaaaacttgagaggggtaatcttgcactagagaggagtttgcatagaggtaatccaatcagagtcattcgtagcgtaaaagacttgacttgtccaactggcaagatttacatatatgatggtctttacaagatcaaagaagcctgggtagagaaagggaaatctggtttcaatgtgtttaaacacaagttgcttagggaacctggccaacctgatggcattgcagtgtggaagaagactgaaaaatggagggaaaatccatcatctagagaccatgttatattacttgacatatcatatggtgtggaaaataaccctgtctgccttgtaaatgaggttgacgatgaaaagggccctagccgcttcacttatacaactaatttgacatatgggaattctctcagctcgatgagaaagatgcaaggttgcaaatgcataagtgtatgcctccctggtgataacaactgctcctgtacgcatcgaaatgctggtgaccttccttacagtgcttcaggcatacttgttagccgaatgcccgttttatacgagtgtggtgattcctgcacatgttcacaaaattgccggaaccgagttgtacagaaaggtacgcagatccgttttgaagtttttaagacaggagatcgtggttggggcctccgtagttgggatccaattcgagcaggcacatttatctgtgaatatgcaggtgaaatcattgacataaatagagtgaatggtgaagatgactacatatttgagacttctcctttagagcagaatttaagatggaactatgcaccggaattgctgggtgagcctagtctttctgactcaaatgaaacaccaaagcagctgcctatagtcatcagtgcaaaacgaaccggcaacatagctcgctttatgaaccacagctgctcacctaatgtgttttggcaaccagttctgtatgatcatggtgatgagggatatccacatattgcattctttgcaattaagcatattcctccaatgacagagcttacctatgattatggtcagaaccagcgtaatagtattcaaatgggaacccattctggttttcggaagtctaaaagttgcttatgttggtccccgaagtgtagaggttcctttggctaataaccagccctataaggaatatattggatcataatactccatttcaaagttacacctaagatatctgctggtcgacttttatattcagctcccaaaaatctgtcacaagtttgtgagagcaactgaattgtctttaccagcagaagcagcccgccatggtggcctgtatgaagcagcaggggtctcctatgtcctaggtgttccatgcaccatcgaataaatccacccctcttcatgttagaatgggaaacggggatgtgttttgcacaaattatctgtcatgcagtcgtcgtattaagttttcttgaactagtttgtagtcatcctcagagaatgcatgatgtgcactttgtagtaatatatgcaggttgttatcccacctaaaaaaaaaaaaaaaaaaaaaaaaaaaaaaaaaaaaaaaaaaaaaaaaaa

SEQ ID NO: 207 - DNA, 2537 bp, Zea mays
ggccgcgaattcgcccttcgcggatccgacactcgtttgctggctttgatgggcgagctggaaggacggggttcgggcttaggctccagtgcctgttcggtggtcgcggtgctgatggcgatgaatgaacactgtggcactggaattagtccagcacgaacccaagttccaccagagccacacgttttcactgctcccacgaaggcacaccgcacacagccgcggcctgcaggcgacggtgacggcggcggcggcgctccatcctccgccccttcccttactcgcgttcggcacgcaggcgacggtgacggcggcggcgctcaggatcgggctctcagcgacggcggcggcggttttccctcccggctctcgccagtcgcctcgcgttctcgcctccggtcctccgaacgccggccggtgaccctgctggatgacatgagcacactaaatacaatcctgatgaagatggcaggattagcttcctgctgagttttgtcctacaagattgcaaagggcagaatgtcagctagggattctaatcattcatataaatgttcggatgattctcaaatgccgtactacaataactcagcacctgtaggagaaaatggtaggatccatatggcagaaaacagtctaggacatcattactcatcctccgatattggatcacaaaggatcaacaattccaaccctcaagtatttgaagcacagtactgcactctggaatcatcctcagcaaatggtgtttatcctgcacaaagctccacatcttctcatagcatctcccctttaagtgggagccccctgtctcagcatgacagccactcagaccacacatatagttctcctccaagtgcttcctgtctaactgaggttgcaggtctcctgattaaacaaaaagaattagagaattccattgttggacctggactggacattagttctgactgctctcggagcttgttgcaagcccatgttccagtgagaccagacaactggagacaacttctgggaattaatggaggagacttgatgcaagtagtcatagcatgtggtaaggctgttgcagagaatgatgtctttgcaacagaactgttaatatctgagcttggtcacctggtatctgtatctggagatccaatgcaacgacttggagcctatatgcttgaaggaattgttgctagactttcttcctccggcagtatgctatataaatctttgaaatgtaaagaacctacaagctctgagctcatgtcatatatgcatctcctttacgagatctgcccattctacaagtttggttacatgtcagcaaatggtgccattgccgaggctattaagggcgagaactttgttcacataattgatttccaaattgctcaggggagccagtgggttactctgctacaggcccttgctgcaagacctggggggccaccatacattagaatcactggtatagatgactcaaattctgcttatgccagaggaggcgggcttgatatagttgggaggacgttgtgtgatgttgctaattcatgtggtcttccttttgagttcaatgccgttccagctgctagccatgaggttgagcttcagcatcttgctataagacatggggagattattgctgtgaattttgcctatcagctacatcatgttcctgacgaaagtgtaagtacagaaaatcatcgggataggattataagaatgatcaagagcatcaatcctagggttgttactctcgttgaacaggagtcaaatacaaacacagctccattcttcccaaggtacatggaaactctcaactactatacagccatgtttgagtcgatagatgttgctctcccaagggatgataggaggcggatgagcgcagaacaacactgtgttgcaagggatattgttaatttaatcgcatgcgagggtgctgaaagggttgagaggcacgagctgtttggaaaatggaagtcaagatttgcaatggctggatttagaccgtacccactgagttcagttgtgaacaacactatcaacacattgttgcatacctacaacagctactacaggcttgaggagagagatggtgtcctttaccttggatggaaaaacagagtattggttgtatcttcggcatggtgttgacatttcctctgcaggttccatcgcactttggcctccatctgacgtttctaaggcaccattatgcttgtctggtatactcagtatatgcttgtatgtaatttgcaaccataccttacccaatggttatcttaccaactagatcttcatggcaaggtgaagtgtcacttaaaatctagaagttgtaactgtcgtgttgacgctagatatagatagttctgctttggtttgacatatgcagatgtgctgtaatgctcaggggttatgctaggcaggcccaagagggtgcctgtttgttatctatcaggctactgtgttgccgcctgctttgtgtgtgcatatatatttggaatgctactgtcctttctcaaaaaaaaaaaaaaaaaaaaaag

SEQ ID NO: 208 - DNA, 964 bp, Zea mays
cggacgcgtgggtgccgttgaggcataccgcatacgtttctcccccattcctctccccactccgaaccctagccaccgtgctcacttcccaggtcgaacccgccgcggcgcgagtccacggcagtgcaggacctgatcctgcggtctaggccgcggcggtgagatggtgatggtgtcaggcggcggggggaacgcgtgggcgaaggagatgaccctccgccgcaggatagccagcatattcaacaagacgcaggaacacttccctactctgaaagactacaacgattatctggaagaagttgaggatatgactttcaacctgatcgaagggatagatgtcgaggagattgaagcaaaaattgcaagataccaacaggaaaatgcggagcagatatacttgtccagagctaaaagggcggaagatcttgcggcagcacttaaagcaagcaggatgaaccctgtaaaggccgaagcaaatgatacggctgctgggagttctcagggtattagtggcggggcaggagttcagggccagtatgcacctgccgctgttcttgggggagtggctcagcctcgccccacaggtatggcgccccaactaatcggcagtgggtcggatcctctgcaaggagacgacgaggagaccaggagactacgcgcagagcgagcagcacgggctggcggatggactgctgaattgagcaagagaagagcgctggaggaggcgtttagcgccatattcatctaggattagatcaaaaagcaacacatggcctggaggaaagccagcatacttaaaatggctgtcaaactacaaagcgttggatgatctgtgtcgtgattatctttgggacatggaattctcacaaattgtggtgaagcaccctttgtgtgcctttggttgcaaaaaaaaaaaaaaaaaaaaaaaaaaaaaaaaaaaaaaaaaaaaaaaaaaaaaaaaaaa

SEQ ID NO: 209 - DNA, 804 bp, Oryza sativa
gcaaacgtgtcgcccattctacaccgtctccatccatctcatctcgtcgtcttcccccccgcgagtccgcgaccccccgcgctataaaatccaaggccgcgatcgagatgcggaaatatcgagtcgccggattggtagccgccctgctcgtgctgcattcgctagccacgccgtccgctcaggccgaggcgcatcgcgcagggggagaaggggaggagaagatgtcgagcgacggagggccggtgcttggcggcgtcgagccggtggggaacgagaacgacctccacctcgtcgacctcgcccgcttcgccgtcaccgagcacaacaagaaggccaattctctgctggagttcgagaagcttgtgagtgtgaagcagcaagttgtcgctggcactttgtactatttcacaattgaggtgaaggaaggggatgccaagaagctctatgaagctaaggtctgggagaaaccatggatggacttcaaggagctccaggagttcaagcctgtcgatgccagtgcaaatgcctaaggcccatctcgtatcctatgtgtatcaagttatcaagaagatggggaataatatggtgtggatatagctattggacatgttaattatccacatgataatatggcttggatataaggatctcacacgataatatggcttggatatatagctattaaagattttacctatggcatatttcaatgtgtattagtactaagtaagaatgattgcaaggtgtattaactacaaatattgcaataaaagtccctgttactacaacttacaagtaaaaaaa

SEQ ID NO: 210 - DNA, 1038 bp, Oryza sativa
cgaagggaaagtttgggatgcgcgttgctgcgacgacgcggcccgcctcctcctccgccgccgctccgctccccctcttcctcctcctcgccgtcgccgccgccgccgccgccctgttcctcgtcggctccgcgtccctcgccatggccggccacgtcctcggcggcgcgcacgacgccccctccgccgccaacagcgtcgagaccgacgcgctcgcccgcttcgccgtcgacgagcacaacaagcgcgagaacgcgctgctggagttcgtgcgggtggtggaggcgaaggagcaggtggtggccggcacgctgcaccacctcacgctcgaggccctcgaggcggggaggaagaaggtgtacgaggccaaggtctgggtcaagccgtggctcgatttcaaggagctccaggagttccgcaacactggggatgcaaccaccttcaccaacgccgacctcggcgccaagaaaggtggacatgagcctgggtggcgtgatgttccagtacatgatcctgtagtcaaagatgctgcagaccatgctgtgaaatcaatccagcagaggtcaaactccctgtttccatatgaacttctcgagatcgttcgtgcaaaggcagaggttgttgaagacttcgtaaagtttgacattctgatgaaacttaagaggggaaacaaggaggagaagttcaaagccgaggtccacaagaaccttgaaggggcatttgtactgaaccagatgcaacaagagcatgatgaatcgagcagccagtgaaccttgccacattaagctgtagttatgtagtttgtgttcaataagaaaacagtgaacatgcacccttccgtttctatcgggacataggctggaacttgttcctaacatcgatgaaaagaagacactacactatccttttgttcctgttgctcttagtgtgataatacgatactggtcgtgtaacttctcaagggaaccgtgggtctatgccatacagcttgtgaatgtgaaatcctatgttgatacttctcaaaaaaaaaaaaaaaaa

SEQ ID NO: 211 - DNA, 756 bp, Sorghum bicolor
cgcgatctagaggagcaacaaccattcggcggtgcaagtgctactcctgctccttcccactagcggtagtgcccgtcgtctcgccgccgcctcctctccctccgggctcccgccgccggaccgcgtcgtcagcgatggccgaggcacacagcgggcggcgcgtggggatggtaggcgacgtccgggacgcgccggagggccacgagaacgacctcgaggccatcgagctcgcgcgcttcgccgtcgacgagcacaacagcaagaccaacgcgatgctggagttcgagaggctggtgaaggtgaggcaccaggtggtggccgggaccatgcaccacttcaccgtccaggtgaaggaggccggcggcggcaagaagctgtacgaggccaaggtgtgggagaaggtgtgggagaacttcaagcagctgcagagcttccagccggtcggggacgccgcggtcgcctgaggtagtgaaggtatcatcttccagtgccatgatgtgtttttcccctcgaggctcacaagcttttggctgggggctggagcacaagaatgaaagaatttagccgtcggacatggaatacatcccccactgggaaagtatatatgatatgatgaataaaccagcatcttaccacatgtattgtacgctgtatgaaatatcgactcctgtaatggaatgagctgtgctaagaaaaaaaaaaaaaaaaaaaaaaaaaaaaaaaaaaaaaaaaaaaaaaaaaaaaaaaaaaaaaaac

SEQ ID NO: 212 - DNA, 1505 bp, Zea mays
atcacctccgccgctctccaccatgaatcccatccaccagcacggcatcgtacccaatccttcgtgactgttgcctccgcgcatctccgggagcaatggaaggaggccgagatgtgttcttaggtgcggcggcaagggcgccgccgccgccgccgtcttgcccgtttcacggatccgctaccgccacccgctccggtggagcgcagatgctcagcttctcctccaatggcgtagcagggttgggtctgtgctcaggtgccagcaagatgcagggtgtgttgtcgagggtgaggaggcccttcactccgacgcagtggatggagctggagcaccaggccctgatctacaagcacttcgctgtgaatgcccctgtgccgtccagcttgctcctccctatcaaaagaagcctcaatccatggagcagccttggctccagctcattgggatgggcaccatttcgttccggctctgctgatgcagaaccaggaagatgccgccgcacagatggcaagaagtggcggtgctctagagatgctgtcggggaccaaaaatactgtgagcgacacataaaacgtggttgccaccgttcaagaaagcatgtggaaggccgaaaggcaacaccgaccactgcagatccaaccatggctgtttctggtggttcattgttgcacagccatgctgttgcttggcagcagcagggcaaaagctcagctgctaatgtgactgatccattctcactagggtccaacaggaatttgctggataagcagaatctaggtgaccagttctctgtatccacttccatggactcctttgacttctcatcatcacattcttccccaaaccaagccaaagttgcattttcaccggtggccatgcagcacgaacatgatcagctgtatcttgtgcatggagccggcagctcagcagaaaacgttaacaagtctcaggatggtcagctgctagtctcgagggaaacaattgacgacggacctctgggcgaggtgttcaagggcaagagttgccagtcagcatccgcagacatcttaactgaccattggacttcgactcgtgacttgcgtcctccaaccggagtcctacaaatgtctagcagcaacacagtgccagcagagaatcacacgagtaacagtagctatctcatggcgaggatggcgaattctcagaccgtcccaacactccactgagtgttcatcaggctggtctttgttgggaccacaaaataactgaagccatgttgatgtcctgagtttgctgatactaggttttcagtcgagtcttgtaactcctgttttagagctgttatatgttcacgtcatgtcgcctttcattttcggttcattcagatgggtgttctaataatttctttccttcttacctgtgaaggatttgagttccaatctgagacgtgggtttgttctaacttggaggtatttatgaatattaggcacttctgatttccattgaagcgagatttctttaaaaaa

SEQ ID NO: 213 - DNA, 2363 bp, Zea mays
cccacgcgtccgcgccaggcgcagatggaatgagcgaccgggctctgctccgccgctagcctgccgccgcaccgcgccgtcgatcgccgcgccatgaacggtccccgcggctaccccctttctccaccggcaccttacccccgtatggcgtgatccaatgatagcaccaagagcgcaccttcccctctccctgacggcgtcgtcctccccgcacggcggcgcgcgcacccgcaccaagaagaggaagaaaccatgtcccccaacctggacagcgccatcaagagccaggtgccggcgctgctcctgaggcgtctcttcggcgcgtcccggcgggacgaggccaagcagctccagcggaccccggcgccggtggggaggcggagggtgttcgtgcagacggagaccggctgcgtgctcggcatggacctggaccgcggggacaacgcgcacaccgtcaagcgccggctgcagctcgcgttcaacatgcccaccggcgggacctcgctcaccttcggcgatcgcgtcctggagaacgacctctccttcttacgcccggactcgccgctactgctcacccggaacagcatcaaccggagctgctccaccccgtgcctctgccccgtctccaaggacttcgagcacaaggactgcagcggactggttgagatgctcggctgctccagcagctgtgcccgggtgaagcgcctcgtggacgacgtggtgactgccatcaggagcggcgtggatccggtccccattagcagcggccttggtggctcgtactacttcaggaacgtcttgggcgacagggttgctattgtgaagccgacggacgaggagccctttgcgccaaacaatcccaaggggttcgtcgggagggcgctcggtcagccgggcctcaagagatctgtgcgagtgggagagacggggtttagggaggttgcggcgttcctgttggaccatgacaacttcgccaacgttcctgccacggctctggtgaagataacacactccattttcaacataaactgcccggtaaatggaggaaacctggcaccggctcatgaccagcaacagcaagttaacagcaagattgcttcgttccagcagttcatagcccatgacttcgacgccagcgaccatggcacgtcaagcttccctgtcgctgctgttcataggatcggcatactagatatccggattttcaacactgacaggcacgccggcaatgtgctggtgaggaagcttaacggtggcacaggccgctttggttgccagacagagctgttcccaattgatcatggcatgtgcttgccggagaacttggaggacccttacttcgagtggatccattgggctcaggcttctattccgttctctgaggaagagctcgagtacatcagaaatcttgatccaaggaaagatgtgcagatgctgcgccgggaacttccgatgatacgtgaggcctgcctacatgtactggccctgtgcacaatcttccttaaggaggctgcagctttcggactctgcttggccgagataggcgagatgatgaccagggagttcagagggatggaggaggaaccaagccagctggagcttatgtgtatggaggccaggaagagagtagcagagtgggagcccttctctgccacagctgaacatggagaagataccgatttccagttctcggtggatatgctaggagaatacagtgatgtagtgcgatcaccaaggttcaatggctcaggttccaaagtgtccagtttcagaagccctttgtctaagctcgtcgagagcgtcgacgagggcagtgatggccatgaagatcaaaacgagtctgatcgagtcttgtatgctggatggaatacatctagcgttcctagcaaagctatgggccatagtggcaatgcctcaaaaagtgcaatgaacaggagtgccgatgaacaacttccatcaagtatgtgttttgtcaggctgtcggatatgagtgcagatgagtgggatgtattcctcgaaaaattccaggagctgctgaaagagacactgcacgagagcgcaagggcagcagcaggtcaaaggatgaagcagcggctaggcacttcatgcaagttttgagcagggcaatagcgcatcagagaagaaaaaatatgcagtgctacttgtattgcttgcttatggagtgagtacaggatgaagatatcatcgtatgcggcaccttcaaccttgtgcaacgatctaggttgcagcagccatgtccagcaggtagataggaccacaagcatatgtagtgacggtgtggagaactgctacgcgtgtttattagctatatgtttacgaaggggaatgcttaataataaaaa

SEQ ID NO: 214 - DNA, 1505 bp, Zea mays
aggctgctgtctcacggctgcggctgcggcggttcgggctccagactccagggatggccgccggtgcgggaggcggcgaactggaggcgctggagggcgtgcgctccatcgtgctcaagccgtcggagtcgctcgacgagtcgcgtttcacgaggatcgccggcgccgacttcaacgacccggccatcggactccaggggctgctcgcctcgctcgcgtccaccgggttccaggcatccaacctcggcgacgccatcgacgtcgtcaaccagatgttagactggaggttgtcgcatgagaagcccagcgaggattgtgatgaagctgaacttgaccctaaatatagagcatctgtgaagtgcaagatatttctgggcttcacctcgaacctcgtgtcttctggcatccgggatataatccgttttctagctcagcatcacatggtggatgttattgttacaagtgctgggggtatagaggaggatctcattaaatgccttgcaccaacttacagaggcgatttttctttacctggagcactgctgcggtcaaaaggactgaaccggataggaaatctgttggtgcccaatgacaactattgcaagtttgagaactggatcatgccactcttcgaccagatgctacaggagcaatctactgagaatgtttggacaccgtcgaaggtgatagcgcgccttggcaaagaaataaatgatgaaagctcctatctttattgggcatacaagaataacatccctgtatactgcccagcattgactgatggatcacttggagacatgctgttctgtcatgcagttcgtaatcctggccttattattgacattgtacaagatatacggctgatgaatggggaagccatccatgcaacaccaaggaagacagggattatagttcttggtggaggccttccaaagcatcatatatgcaatgccaatatgttccgcaatggtgcagattatgctgtctatattaacacggctcaagagtttgatggtagcgattctggagcacaccccgatgaagcagtctcatggggcaagatcaagggttcagcaaaacctgtaaaggtgcattgcgatgcaagtatcgctttcccgcttcttgttgcagcaacatttgcacgtaaggttcataactccaaatgaacagactgaatcggattcggtggagtgaatgggcaacagaattttgttgaactctccaaatgaccttttggagcacgaggtctacttcacctgcacagggatcatgtgcaagttttttcggtgactcgcggcaaccacatgccatcattattcgatgttcacttgatgctgtactagctggttgatagcatttttgttacaactgataatttattgaaatacagacatacgattgttcatccgagtcgtctgcttacgaattttttgtagacgaaacatctgcttacgaaattgacaaatggcctgttttatgaacacattttttttcacctgaaaaaa

SEQ ID NO: 215 - DNA, 2385 bp, Zea mays
ccctcccctaccctttccttccccactcgcacttcccaaccctggatccaaatcccaagctatcccagaaccgaaaccgaggcgcgcaagccattattagctggctagctaggcctgtagctccgaaatcatgaagcgcgagtaccaagacgccggcgggagtggcggcgacatgggctcctccaaggacaagatgatggcggcggcggcgggagcaggggaacaggaggaggaggacgtggatgagctgctggccgcgctcgggtacaaggtgcgttcgtcggatatggcggacgtcgcgcagaagctggagcagctcgagatggccatggggatgggcggcgtgggcggcgccggcgctaccgctgatgacgggttcgtgtcgcacctcgccacggacaccgtgcactacaatccctccgacctgtcgtcctgggtcgagagcatgctgtccgagctcaacgcgcccccagcgccgctcccgcccgcgacgccggccccaaggctcgcgtccacatcgtccaccgtcacaagtggcgccgccgccggtgctggctacttcgatctcccgcccgccgtggactcgtccagcagtacctacgctctgaagccgatcccctcgccggtggcggcgccgtcggccgacccgtccacggactcggcgcgggagcccaagcggatgaggactggcggcggcagcacgtcgtcctcctcttcctcgtcgtcatccatggatggcggtcgcactaggagctccgtggtcgaagctgcgccgccggcgacgcaagcatccgcggcggccaacgggcccgcggtgccagtggtggtggtggacacgcaggaggccgggatccggctcgtgcacgcgctgctggcgtgcgcggaggccgtgcagcaggagaacttctctgcggcggaggcgctggtcaagcagatccccatgctggcctcgtcgcagggcggtgccatgcgcaaggtcgccgcctacttcggcgaggcgcttgcccgccgcgtgtatcgcttccgcccgccaccggacagctccctcctcgacgccgccttcgccgacctcttacacgcgcacttctacgagtcctgcccctacctgaagttcgcccacttcaccgcgaaccaggccatcctcgaggcctccgccggctgccgccgcgtccacgtcgtcgacttcggcatcaaacaggggatgcagtggccggctcttctccaggccctcgccctccgccctggcggccccccgtcgttccggctcaccggcgtcgggccgccgcagcccgacgagaccgacgccttgcagcaggtgggctggaaacttgcccagttcgcgcacaccatccgcgtggacttccagtaccgtggcctcgtcgcggccacgctcgccgacctggagccgttcatgctgcaaccggagggcgatgacacggatgacgagcccgaggtgatcgccgtgaactccgtgttcgagctgcaccggcttcttgcgcagcccggtgccctcgagaaggtcctgggcacggtgcgcgcggtgcggccgaggatcgtgaccgtggtcgagcaggaggccaaccacaactccggcacgttcctcgaccgcttcaccgagtcgctgcactactactccaccatgttcgattctctggagggcgccggcgccggctccggccagtccaccgacgcctccccggccgcggccggcggcacggaccaggtcatgtcggaggtgtacctcggccggcagatctgcaacgtggtggcgtgcgagggcgcggagcgcacggagcgccacgagacgctgggccagtggcgcagccgcctcggcggctccgggttcgcgcccgtgcacctgggctccaatgcctacaagcaggcgagcacgctgctggcgctcttcgccggcggcgacgggtacagggtggaggagaaggacgggtgcctgaccctggggtggcatacgcgcccgctcatcgccacctcggcgtggcgcgtcgccgccgccgccgctccgtgatcagggaggggtggttggggcttctggacgccgatcaaggcacacgtacgtcccctggcatggcgcaccctccctcgagctcgccggcacgggtgaagctagacgtcattgagcgctgaatcgcagttagcgaccgggccaaggttctcgccggcgtgatgagatggaacactttgactcccgcggccggatcggcctgtgttcgttcttgtttccgatctcccttctctttcccgttgcttcgatcccgtcaagtatggtagaccgtagcctattgttatgtttaaatgtcaattattatgtgtaattcctccaagcgccgatatccaataaggacgaaccggattttcgttaaaaaaaaa

SEQ ID NO: 216 - DNA, 2315 bp, Zea mays
cgtttccgcccgcgtcctcgcctcttctttcttcgcctcttctgcaccgcgctctcgctcgcccctccgccgcttggcctccaccctcccgctgccggctccgccgactggacttccgcccgtcgctggccgtcggcgcgcccgttcctcgcaggtgaattgttcaggctgaattgatcggtggaagctgtgcattgactatttttttaatctcagaatcaaagagagaaattgaactgggaggctgctaattgcgagagaagtgatgtctttcgttaggcaagcagacccatcagtgtcctgtgccgagaccacttacatccacaaatttgtgccaccaggaccagttttcccagcacagagatttgtctctggcaccgacttgcttcaccacgggcctcaaccatataatgctgagggctacaagcagtctggtttcaatggcacagcgcctcatgcatttcagagcttttacaatactgatagctatgctgaatctcactttaatgaagcaccatattctcctgcaatcttcgatatatctcagcagaactctcaatctttatcagacaaccaggcctctgatcttgtagagttcgatgaggatgagatgagagtaaagcttcaggagcttgagcatgctttacttgacgatggtgatgagatcttttttgacttgtcagggagcattaacgatgagtggaatgataacattaagacaaacaatgaatgggtcaataccatgaagaatattgtgagccccgactctccaaaagaggcatcacctgagtcaagcatctgctgtctcgacaacaatgttggagaagcgcggaacccgaaacagttgctttttgactgcgcagaagcgatatccgaaaatagcatcgatgaagcacagtcaatcatagcagaactacggcagaaggtggcaattcaaggagaaccttctcagagacttgcggcctatctcgtggagggccttgctgccacactacagtcttcaggaaagggcatctacagggccctgaggtgcaaggaggcccctactctgtaccagctttcagccatgcagatcctcttcgaaatctgcccatgcttcaggctaggcttcatggctgctaactatgctattctcgaagcctgcaaaggcgaagatgtcgtgcacatcattgactttgacatcaaccagggtagccagtacataactcttatccagttcctaaagaataacagtaacaagccacgccttttgaggataactggtgtcgatgatccagagtcagtgcacagagctgttggaggactgaatgttgttgggcagcgactagagaagcttgcagaggactgtgaggtacggtttgagttcagggcagtggctgctaacattgaagatttgacgcctggaatgctaggtcgccgtcccggagaggccctcattgttaactttgcattcctgctgcaccaccttcctgatgaaagtgtctcaattatgaaccaaagggatcggcttctccgtatggtgaagggtctccgaccaaaactagtgacgttggtggagcaggacgcaaatactaacaccaccccattcccttccaggttccgggaggtctatgactactattcggcactttttgattcactggatgccacccttccaagggaaagcccagatagaatgaacgtggagcgccagtgcctcgcacgggaaatcgtcaacatcttagcttgtgaaggtcctgaccgtgtggaaaggtatgaagtggctgggaaatggagagctagaatggcaatggcgggctttgtgtcgtccccatttaacagcggcgcgattgatggcataagatctctactgaaatcgtactgcgataagtacaggttcgagaaggtccaggacggtctccactttggctggggcgacaagacgctcgtcttctcttcggcgtggcaatagaagcttgcttgtactattgcctatctgagcactttccagcgtttttaggagcatctggggcaagggctgtaaagagatttctgtcgccgtattgttgacctaccatataagtacactcgtagctaaccttagcgtgctgcctgcctgtaggcttgtgacttgtgaggtctacggtttacctagtttcttagatgaaagtatgttgtgcattgtacacctactgaactacatgtagactgtagagtcgcgggtgtatttaattttgcccttcttttggaggggcagaatcacaatacgcgtgattggatacctggccgcgtgcgtctgggctctccacattccgttaaaaaaaaaaaaaaaaaaa

SEQ ID NO: 217 - DNA, 849 bp, Zea mays
ctcaagtgctcagtgctcaccgctctgcccctgcctcatcacacgcgcgcacggcgcacagataccttttctctcctctcccgtcccactctcctgggcaatcccggcccggcatggcgagcccgtcctcgtccccctcgcggaaggctctgagcaagatcgcctgcagccgcctgcagaaggagctcgcggagtggcaggtcaacccgcccgcgggcttcaagcacagggtcaccgacgacctccagaggtgggtcatcgatgtagcgggggcagcaggcacgctctacactggcgaaacctacaagttgcaggtggatttccccgagcattatccgatggaggcacctcaggttatatttctgcatccagcaccgatgcatccacacatttacagcaatggacacatctgtttagatatactgtatgactcgtggtccccagcgatgactgtcagttctatctgtatcagcatattatctatgctgtccagctcgccagaaaagcaacgcccagctgataatgatcgctatgtcaagaactgtcgcaatgggaggtctccgaaagagaccaggtggtggttccatgatgacaccgtgtgatcggtgttccgattattgttgtcctgtatgcatttagttgccagactatgggagatggacttatttcgaacgacccatttgaccagaaattaacatgctcttgtggtttgtagatgaatgtgcatcagcgtcaggcctgtactttctgattcttacaccgtcgatgatatatagaataatgtttgtatcttgtcaatttacggaacagacatgaaattcaatgcaggtcactggtttctgaaaaaaa

SEQ ID NO: 218 - DNA, 1131 bp, Zea mays
cacgcccgcagcgcctcgcctcggctgctctacctctatcccgcgacccgcgagatcggaatcgcggcgccccgccgccctcctccaaaatggcaccgtctctgctcggggggttcaccaagtcgttggccatgacggtgctctccgagatcggggacaagaccttcttcgccgccgcgattctggctatgcgccatcccaggaaactcgtattggcaggctgtttaactgcactaatagtcatgacagctctatcggcttctctaggttgggttgcaccaaatctgatttcacgtaaatggactcatcatttgaccactctattgttctttctatttggcatttggtcattgtgggaaggcttcaaggaagatggagattcggaagaattggctgaagttgaagcagagctggatgctgcctttaagagtaataaaggtgaatctaaaaataaatttaaggcgaatgatgatatgaagaaacagcaaagaccatttctcatgcagttcttctcaccaatttttctgaaggcattttctattacattctttggtgagtggggtgacaagagccagattgctacaattggcttggctgctgatgaaaacccgttcggtgttgtcctgggtggaatcatagcgcaagcactctgcactactgctgccgttcttggtggaaagagcctagcgtcccagatatctgagaagatggttgaactgtcaagcggagtgctcttcctgctcttcggtatcatgtccttactctctggaccagaaggagaattgtaatccctgcttgagcctttttcagctagctgattaacatggctttctcttcttagacctatcttatttcagtacatgaatgatggcaacgaaagccatccatccatggcgaacaggatggtgatttaacagtttagccgacacgctgtaaacatttcagtcgcccttcaaaaattactacatgttacagaagtctgtagcgattgtatatttgtattctgtcgtgcccagcacgtgaaattttgttatcgcaattacatgcgttaacaaagctttgttcgtgaacctattcaggcaattaatatggggcttatagcaggcctttgtctttaaaaaaaaaaaaaaa

SEQ ID NO: 219 - DNA, 1533 bp, Oryza sativa
ccaacgcaaaccgcatcgatcaactccttccccaagtcgaagcaaaatccctagcgatgtcgtcgccgccgcccgccgccgccgccgcgatggccgtcgacgacgccgacgacgaccagctcgcctccatgtccacggaggacatcgtcagggcaacccgcctcctcgacaacgagacccgcgtcctcaaggatgagctgcagcggacgaaccttgaggtggaatcctacaaggagaagatcaaggagaaccaggagaagatcaaactcaacaagcagctgccttaccttgtcggcaacatcgtcgagatattggaaatgaaccccgaggatgaggctgaagaggatggtgcgaacatcgatctggattcacaaaggaaaggaaaatgcgttgttttgaagacatccacaagacaaacaatattccttcctgtaatcgggcttgttgaccctgaaaagctcaagcctggggatttggttggagtcaacaaagacagctacttgatactagacacgctaccttcagaatatgattcacgggttaaggcaatggaggtagatgaaaagcctacagaggattacaatgacattggtggccttgagaaacagattcaagagcttgttgaagcaatagtattgcccatgactcacaaggaccggtttcagaagttgggaattcgccccccgaaaggtgttcttttgtacggaccacctggcactggaaagaccctaatggctcgtgcatgtgctgcccaaactaacgccacatttctgaaacttgctggtccacagcttgtccagatgttcatcggtgatggtgcaaagcttgtccgtgatgcctttcagcttgcaaaggagaaatccccctgcatcatttttattgatgaaattgacgcaattggaacaaagcgttttgatagtgaagttagtggtgacagagaagtgcagcgcacaatgttggagttgctgaatcagctagatggattcagtagtgacgagaggataaaggtgatagctgcaactaatcgcgcggacattcttgatcctgctttgatgaggtctggtaggctggaccgaaaaattgagttccctcatccatccgaagaagcacgagctagaattttgcaaatccattcaagaaaaatgaatgtaaaccctgatgtcaactttgaagagttggcacgatctacggacgacttcaatggtgcacaactgaaggccgtttgtgtagaagcaggcatgcttgccctacgccgagatgctacagaggtgacacacgaggatttcaatgaagggatcatacaagtgcaagccaaaaagaagtccagtttaaattattacgcttaattcttccgagagagttattaggcctaaggaaacgctccgtccaaaattgtttgtttgtaacactaccgttttatatatttgtgtggttcaagatgtgattgtacgaaacatgtcttgcgctgttccttctctgcttgatatatactgatagaagttgactcgtcccttgcgtagaaaaaaaaaaaaa

SEQ ID NO: 220 - DNA, 1126 bp, Oryza sativa
aaaacctcgcaaaaccctcggccctcacccgccgccgccgccgtcgcctccaccggtaaacggcagcatgagtcggcaccctgaagtgaagtgggctcagaggattgacaaggtttacataactgtacaattagctgatgctaaggatgctaaggtcaatctggaaccagaaggtgtattctctttctctgctacagctggaactgatgggaacttatacgaatcaaagctagagttgaacgacaaagtaaatgttgaggagagcaaaataagtgtaggtgttaggtccatattctgtattgtagaaaaagctgaggccaaatggtggaagaagcttgttcgagatgatcaaaaggcaccacactttgtgaaagttgactgggacaaatgggttgatgaagatgatgatggtgctgatgtcaacgtggatggaatggacttttcgaattttggtggcatgggtggaatgggtggaatgggcggaatgggtgatatgatgggtggcatgggtggtatgggtggcatgggtggcatggctgagatgatgggtggcatgggtggtatgggcggtatgggtggcatgggtggcatggatgagttcgaggacgagagtgacgatgaagaagaagtgtctaaacctcaagacgcagagaaggctgctgaagccggaaaatcccaggagtcggacgctaaagccgagacaagttagagcaatcgaaggcccctctacataattcctttctctgttgcatcccgtcttttatggatctggtgaactgaagaaaacattttacgttatgacggtagggatgggtgctcccttgtagaacgatgctatgaaactggagctccaactgagtacgcaaaccattcttggattgtttttcttaatgcgctttgatgcttcatcgctctgcaatcatatattaagctttggatgctttaatctgcttttgtgagatactgctgtgcccgtgctagagtccactgagcatgcaacaattcatgtgatctgacgatgcttgtgctagacgagtgaggcagtagcactgttagttcccaagcttgttttgaaaggatgcatagtgaatccctatttatttgtttaaaaaaaaaaaaaaaaaaa

SEQ ID NO: 221 - DNA, 870 bp, Zea mays
ttctcgtttcaccgtgcgccacaagcacacaactagggcgaccgccgccgacctacggccagctgtgcccatgtcttcgtcgggccctttgctggcgacgggaacccaccacaccggccgccaacctgaggttttgtgggctcagcgctccgagaagattttcttgactatctcattgccagatgcgaaagatgttgtgttaaagaccgatcctaagggcctctttaacttctctgctgttgtccatggggaaccttttagcttcactttggagctttttgattcaatactgtcagagggaagtaaaacgaagacaaagatgggcctgcgaaacataatctgctcaatccagaaagaaaagaaaggttggtggaagcgcttgctaaagtcagaggaaaagcatccatacatcaaagttgactggaacaaatggtgcgatgaggatgaagagtctgagttctctggggattcagatggtggctttgatgaggcaaatgaaggagatgaaagtgatgatgatgatgggatgctttatctccccgaccttgaaaagctaaggggcaagtgatctggctgcttcggtgaagggagtagggttgatgtaacaagttaccgttgacgtgacagagtaggcttatcatcgacgtagttggggtcttacttgctgagcatctgcgacggcttgagacttttaggcatgtcttctatctccgaagcactctttcggtctttcctgatcagtgagctagcgctctgaaaacgtagcgatgagctgtcccattttcgactaactatttagtgccagtgaatggcctaattctacaactatcacgatgtgcctatatgttaggggattatggattcaaaaaa

SEQ ID NO: 222 - DNA, 870 bp, Oryza sativa
cggacgcgtgggaaaaaaaaccctaatccatccactccaaatcgccacgcaggaagggaggaaaggaccaccagccaccgcgcgcgcccaaatcgtcgcagctgcttccccgaggagaagaacatgagtcgccacccgagcactaagtgggcgcagaggtccgacaaggtgttcttgacgatcgagctgcccgatgccagggatgtgaagctcaacctgaagcctgagggccagttcatcttctcggcgaagggccctgccgacgacaccccttatgagcttgatcttgagctctttgatgctgtgaatgttgaggagagcaaggcagctgttgcggcaaggtccatatgctatcttatcaagaaagcagagagcaagtggtggcctaggctgctgaagaaggaaggcaagccacctgtgttcctcaaggttgattgggataagtggcaagatgaggatgatgaagacattgggcttggtgacttcggtgatatggacttctcgaagctgggcatgggaggtcctgatgatgatcttgaggacgatgacgaagatgacacggctgacagtgctaacaaagatgatgaagacattaaggcagaggggagcggggaacaggaagctgctggtgaagcgaagccgtgaaatacctgagagttttagaacgctatgcttgacttgtttgtgacgctgccaggtcttaagatttttttggtgtaaactctggagagtggatcactgccactaaagtaaagtagtagttatggtttagtagctccattttgttaaaaaactttgtgcattgcacactgttctgttatgtgaatcgccatatttgcatcaaccattgcaaagctatccagccaaaaa

SEQ ID NO: 223 - DNA, 845 bp, Zea mays
ggcagtcttcccccaagacgtctaaaccccaatccctaaatccccgacgcagaccacacgacgcgcacctccgttcacgaggcggaagcatgagtcgccacccgatcactaagtgggcacagaggtccgacagggtgttcttgacgatagagctgcccgacgcccaggatgtgaagctgaacttgaagcctgaaggccatttcaacttctcagctaagggctcagatgacttgcgctatgagtttgacattgagctgtttgatgctgtgaatgtggaggagagcaaagcagctattgccccaaggaccatatgctacctgataaagaaagctaagagcgggtggtggccaaggctgctgaagcaggagggcaaaccacctgtgttcttgaaggttgattgggacaaatggcaggacgaggatgatgaagacgctggatttaatgactttggtggtatggacttctcgaaactggacataggaggtgctgatgacgacgatattggggatgatgaagatgatgtggttgaaagtgctaacaaagatgaagaaggaggtaagacagaagagagcaaggaggaggaagcagctcctgcggctgcagaggaagtgaagccatgaagaatcatttgactttgctccgcgccatgggtgtccacggtatctagctaggctagacgttcccttggatttttggtgtaaaatctggaggtcgaaccactcactgcctattgaagtaaaggatacaaaaacagttgtgctgtcttagtttttggctgaaccctgtgaactgctgctacaatatttggtcagagtttatatgcatccatcatgcgacgcaaaaaa

SEQ ID NO: 224 - DNA, 1271 bp, Oryza sativa
gcagtgcaggtgtcgctggccatggcgaggaggagcagcagcagagcgtgcgcggccatggcgacggccgccgtctttgcgctgctggccgcgacggcgacggcgtcggggctcgtacgggtggagcacccggccaagagcgacgggtcgctgagcctgctcgtcgtcggcgactggggccggaagggcacgtacaaccaatccagggtcgccgagcagatggggaaggttggggagaagctaaatatagacttcgtcatatccaccggtgacaatttctacgaggatggactcactggcgtcgatgaccaggcgtttgaggaatcgtttaccgatatctacacggcaaagagcttgcagaagccatggtacctggtgctgggaaatcatgactacaggggtgatgtgctagcacagcttagcccagtcttgcgaaagatcgaccagcgattcatttgcatgaggtcgttcattgttaatgcagagattgtggatttcttctttatcgacacaactccatttcagctgaaatattggactcgccctaaagaccatcattatgactggagaggagtggcacctcgacaaaaatacataactaatctacttaaggatatggatgaggcaatgaagaaatcaacagcgaagtggaagattgctgttgggcatcataccattaggagcgtcagtgaccatggtgacaccaaggagcttctgcaacttctacttccagttctgaaggtcaatggcatcgacttctacatcaatgggcacgaccactgcctggaacacattagcagcagagacagtcctatccaatacttcacaagtggaggtggttcaaaagcatggagaggagtcttgcagccaaattctgataagctccagttcttttacgatggacaagggttcatgtccctccagataaaccaggaccaagctgacttcatattttatgatgtttctgggaacatcttgtacaagtggagcaagagcaaagcaaactacctccagccctccacctatatcactgaagcatgaggcagatgcaaaaccacaaaacggagaattagcttggctaagatatttgtatcaaatttgaatgcattattgtggcacgcaagggaagaggaccggaaaggaaataggaaagtatttaagcatggcatgtgattgatctactaaagaaatttgagacaaggccgagaccatcctactagactaggaaaagagatgttcagtatggtatccattagatctgattcaaaaaa

SEQ ID NO: 225 - DNA, 1441 bp, Zea mays
cccacgcgtccgctcgtacgccgtcgcttcctgcggtacgtactctctgtccgcagcgttcctccagctagtagcagtagcagctagctagctagctagcaactggccatcggggctgctagcagcgtacgtacgtggcgcgatggctcctccagctcatgataggctccgccgcctggtgctgctcctcgtcgttgccaccgccgcggcggctttgcttctggcgccgacgacggcggatgctgcgctgccgcgggtgcagcacacgcccaccaaggccgacgggtcgctcgccatcctcgtcgtcggcgactggggccgccgtggacagttcaaccagaccttggttgcccagcagatgggcgtggtggggcagaagctggacatcgacttcgtcatctccaccggcgacaacatctacgacgacggcatcgccaacactagcgaccccctcttcaaggaatcgttctccaatatctacactgccaacagccttcagaagccttggtacctggtccttggtaaccatgactacacgggaaacgcgctcgcgcagctcgaccctgccattcgcaaagtggatagccggtacaccgccattgccaagtccttcattgtcaactcaggggttgcggattttttcctcgtcgacacaacgccgttcattgtccactactggaacaacaccaagttcgattggagaggcgtcgctcctcgagacacctacatcgcgaatctcctcaaggacttgaagtgtgcactgacagcgtccaaggctccctggaagatcgtcgtgggtcaccaccccatcagcagcgcctgcgggcatgggaacaacactgagctcgaggagttgcttctcccggtcctcaggacacacggggttgacatgtacttgaatggccatgaccactgcctgcagcgcgtcagcagcagagacagtcgtcttcagctactaaccagcggcggcgggtccaaggcatgggctggcaagttcaagcccaccctcgacaaggtggagttcctctacgacggccaggggttcatgtcgatgcgcctgagcaggacggaggcccgcctcgcgttcttcgacgtcgctggcagcgtcctgcactgctggaccatgcatgcccaaaaattaaagacgacgacgacgacgactgctgctgctgctgcagccgggcactaaagctttgctggatcggagttattaatgttcgttgctgcctcgcggcggtacgatgagttgatgatgcaattaattatttggttttgtcgtcttttcgtgcgtgagagggaagcaataataattatttgctgctgcttccgttgtgtgcacatgcatgtgagggtgtcaagtatgttcagcctcttgcaagataaaatctctcgtcttctatggaataaactgggaaaagagttttttttggtaaaaaaaaaa

SEQ ID NO: 226 - DNA, 1078 bp, Oryza sativa
gccaagacgacgacgacttgggaattcatttgcatcggcaacgacgatgaagctcgccgtggtcgccgtcgcggcgctcctcctcgccgccggcgtcgcctccgccgatgaattcgacttcttctacctcgtccagcagtggcctggctcgttctgcgacacgcaggctgggtgctgcttcccggacaccggcaagccggcggcggagttcggcatccacggcctgtggcccaactacgccaagtgccgtcccgccgccggcgccgtcgccgacgacgacgacggcgtggtggagatggtggtcgacggcggcgccgccgtcgagcgccaccaccggcggcggcagaagtgctggccggagtactgcgacgacggcaacaagctgcggccgtgggagatcaaggacctcgtggcggagctcgatgcgaactggccgacgctgtcgtgcaagggcggcaagagcttcgagttctggagctacgagtggaagaagcacggcacctgctcgggcatgggccagcacggctacttcgcggcggcgctggagctcaagaagcggcacgacctcgccgccgtcctcgccggcgccggcatcgtcccctccgacgacgagagctactccctcggcagcatccgcgacgccatcgccgccgccacgggcgcggtgcccaacctcgagtgcaaccgcgacgccgccggcgagacgcagctgttccaggtgtaccagtgcgtcgaccgctccgggaagaagctcgtcgactgccaactcccgatgcagggcaagtgccgcgacaaggtcaagctgcccacgttctagctagctagctcccccgtcgccatcgtcgccggcgagagctcgccgtcgccggcatggcggcgcgccggcggctggctggtcttggatgtctgatggatgtcacgtgcgtttgcgttgttgcgtggtgcggttttcagattacgagagattcgaggatttgtccagttggattgctacatgtgtacgttacatttggcactatctgctgacttgctgaacagttgaataataacatatcaagttttaccagttgaaaaaaaa

SEQ ID NO: 227 - DNA, 1145 bp, Zea mays
ttctaggagttgtactgagctgagctgccggaggcagaataggagaggcaggcgatgacgatggcgacgaaggcggcgtgcgtgctggcggtgtgggtgctcgtcgcctcgggcctgtgcgacctgggctcagcgcgcgcgcccctgggcagcaagccgcagcgggagttcgactacttcgcgctctccctccagtggcccggcaccatctgcgcctccacccgccactgctgcgccaccaacggctgctgccgctcggagccgctccagacgttcacgatccacgggctatggccggactacgacgacgggacctggccgtcgtgctgccgccgcacccaattcgagatggacaagatattgccactgaaggaggtgcttgacaagtactggccgtccctctactgctccaaatctggaacatgcttcagcggcaagggactcttctgggctcacgagtgggagaaacatggaacctgctctgcccctgtggttcaggatgaattacagtatttcacccttgcccttgacctctactccaagtataacgttacggaaatgctgtcaagtggagggatacaggtttcaaatggtaaggaatatgcactgagcgatgtcatcgataccatcaaacatgcttttgggggatcgccacaaattgtttgcaagaggggttcaatcgaagaacttaggttatgcttcgacaaagaattgaagcctcgtgattgccttaccacttctttggcgaatggaagtgtatcaaaaagcaagcactgcccgcggtacatcaccttgccaacatatgatccccttgtgcttgccaattcaactgtagagatcatgacacagttcgatgaatttgatgtgcctgcagctctttatacagcttaaaatgcaattgttgcaatagcagaaggtgctcgcgtgagcacctagaaccaggcacatttatcctgggatattcaatcatttgtacatgtacacttgaaagagaactgacatcttttcaacctgaaaatttataagctttatgtaaccgtgaaggtcggatattgcacatgtaattcgctaaatcaaaactgtatcttgaggtagaattttcaagtagtaataatagagatataagaaacttatcgcccaaaaaa

SEQ ID NO: 228 - DNA, 951 bp, Zea mays
cgtccacgttccatatggcttcctgcaggatggcactcctccttggcttgctgctgctagtagtagcttcgcccgcgatcgctgatgacgactccggtatctactaccagctggctcttatgtggccaggagcatactgcgagcagaccagcgctgggtgctgcaagccgaccaccggcgtctcgccggcgcgcgacttctacataacgggcttcaccgtccttaacgcgaccaccgacgctgcagtgacgggatgcagcaacaaagttccttacgaccctaacctgattaccggcatccaaggcctgaatcagtactggagcaacatcaggtgccccagcaacaacgggcagagcagctggaagaacgcctggaagaaggccggcgcctgctccggcctcagcgagaaagactacttcgagactgccctctccttccgtagccggatcaacccactcgttcgcctcaaagccaaaggtatcgagccggacttcgggctctacggcctcaaggcgatcaccaaggtcttcaagagcggcatcaacgcgacgccggtgatccagtgcagcaagggccccttcgacaagtacatgctgttccagctctacttctgcgcggcggggaacggcacgttcatcgactgccccgcgccgcagcagtacacctgctccaaggagatcctcttccaccccttcaagaagtggatgctcaagcagcagctcaaccaggacgacgaccctttccagctgcctggcgtcgccatggacaactgatacaccgtaccgtcgtctctgtttgcgtttctgtcaagtgtgcatggaataatactgtaactgtgtttcctgccgggcaatgcactgtgatatgatgcccaacgaataaatgtcgcttttatttttattcgacttcccccctgtaccgtgtggaaataaacctattataagcaaaaaa

SEQ ID NO: 229 - DNA, 976 bp, Zea mays
tcgatccctgcgctgcaagcaacaaagttctactctgtccacccgtccatctagctctcaagaaccaacccgtaccagcgctatccggccggccatggcggcggcgcgccggctctccctgcccctcgtcctgctggtcgtcctggccgtcgccgggcgcgcggcggcgcaggactacgacttcttctacctcgtgctgcagtggccgggggcctactgcgacaccaagcagagctgctgctaccccaagtccggcaagccggcggcggacttcgggatccacggcctctggcccaaccgcgacgacggcacgtacccgcagaactgcagccccgacaacgccttcaacccgtcgaaggtgagcgacctaatgagcagcctccgcgccaagtggccgacgctggcgtgcccgtccaacgacgggctgcgcttctggggccacgagtgggagaagcacggcacctgcgcagccgacgtcttcgacgagcacggctacttccaggccgcgctgcgcctccgcgaccagctgggagtcctcggcgcgctcacctccgccggcgtcaagcccgacggcggctactacacgctgagccagatcaagggcgccatccgccagggcaccggcttcgagccctacgtggagtgcaaccgcgacgaggccggcaacagccagctctaccagctctacttctgcgtcgacgccgccggcgacagcttcgtcgactgccccgtcctccccagcggcaggccctgtggcaaccggatcgagttcccggctttctaagctaactcactcttcacgtcagttgctgcaatatactgctagtccttttgcttgcattctatgcaagaggataatggaatgttcattccccattcttcatttttttttgcaaataaaaggagggcgatcggtgttccatatttattatgttgatcataacatgacattcagagaacaaaaaaaaaaaaaaaa

SEQ ID NO: 230 - DNA, 988 bp, Zea mays
ccaggccatcaggttatcgagaaagctctcgtctcttccatttctaggctagcctaggtctggaccagttaggcacgcaagtatcaatcgattcataagaggaggaggccattgagggagccaagtagaaggcagtcacggcaaaccacgtatcttgttgttagaaagctggtgagcaactttgtcaagcctcaagagctcatggaagatggcagtgctccaagacggtctactccacccgcccgcagaagcagatctgctgagttccacaatttttcagaaaggaggagaagggataagatcaacgagaagctgaaagcattacaggagcttcttccaaactgcaacaagaccgacaaagtttcgatgctagacgaagcaatcgactacctaaaatcacttcagctacagcttcagatgctggtcatggggaagggaatgtcaccagtggttccacttgagctgcagcaatacatgcattacatcacggctgaccctgcgcagttgcctccgttgcgcccctccggccagcagcaccggcaatttcagataactcaagccaatccccagagacaatctaacgtcgagtcggatttcttgagccagatgcagaacttgcactcttctgagccgcctcagaactttctcaggccaccgaaattgcaactttatacaccggaacagaggggtggcctacccagcacgagccacaacactggatggatttctgggagttcctcgtataacttcatggagtgatgtgctcctaatgacaaaatttgacacggcaagcgtgcaggcgtgcagccttgtactggcaagagattattcagtttgggacctgcagcatggttcacctgagagaattccatgaatgtgtagtactagttaactagctagctagttgtgttattaaataaaacgttgtgattgtgatgctgctcaaaaaaaaaaaaaaaaaaaaaaaaaaaaaaaaaaaaaaaaaaaa

SEQ ID NO: 231 - DNA, 949 bp, Zea mays
cccagttgcccccaaaccccagccaccagctaccaatggcggccaccgcgatggaccatgacggcggcgacgacgtggtcacaccaggggagcttctcggaaactcattaaccctcgcggccggacgtggcgcctacgccgacggtcgctctgtgcgcgcgtcggtcaccgggcgccgccgcatcgtgccgcccgcacctgcctccgacgaccagagatccacggtggaggtggtggggcacaaggcccatggagctgtgccgcagccgggaagcgtcgtcatcgcccgagtaacaaaggttatggctagaatggcctctgcagatatcatgtgtgttgactcaaaggctatcagagaaaagttcactggcatgataaggcagcaagatgttcgtgcaactgaaattgacaaggtggatatgtaccaatcatatcgtcctggggacattgttaaagctatggttctttctcttggtgatgcaagggcatattacctttccactgcgaaaaatgaacttggagtcgtttcagcacaaagcatagctggtggtacattggttccaatcagttggactgagatgcaatgtgatttgaccggtcaaattgagcaaaggaaagttgcaaaggtggaatagatgtgctgtggccctcctgataaatggtaaacatgtggtggcggtatacaaattgtggaccagtgacaccaggtccttgggcggactacccaattctgcgacgtccaacttcattacagctgcattgagcatgggtttttaaaaccctggctgaatttaactagacatgaatcgtagccatgggtcctgtaacccaaccttgggatctgaatcatagccatgggttctgtaacccagtaaccttgcccttgtgatttgttactctgtgagctaatgacattgcagttttccaccttgtgatttctaaaaaaaaa

SEQ ID NO: 232 - DNA, 1311 bp, Zea mays
cgacgcgcccaaagctcacgccggacctgctcctctccgacggcggcatcggcttcgtgctccgctactttcccaaggcgttcaagccccgcccccgcccaggccacgaggtggacgacctcgccaacctcatcaagctctacgcggactggcactcccgcctgatcccctactactccttcgaacagttcgtgcgcaaactcgagaaattgggtgccggcaaccgcgtcagggacgatggtgggcctctctgaaggggagaaacacttcatccgcggcggcattgcacaagacgttcgcactgatggacgtaggcggctgcagttccggtccctctccgtccaaaccggagtcattccacaggcgaatggctcagcgcgtgttaggttgggggccactgaaataatcgctagtgtcaaggctgaactaggaaaaccaagcattcttcaccctgacaaaggaaaagttgctatttttgtcgactgtagtccaaccgctgagcctctgtttgagggtagaggctctgaagaattgtctgctgagctctctgtttccctgcaaagatgcttgttgggtggtaaaagcggtgctggtgctgcaattgatctgtcatccctaattgttgttgatggaaaggtctgctgggatctgtacattgatgggcttgtggtcagttctgatggtaatttgctagatgcgctagctgttgcgataaaggttgctttgagtgatacaggtataccaaaagttaatgtttctgttagtgctgcatctgatgaggaacctgaagttgatgtaagtgatgaggaatttctgcagtttgacacatccggtgtgcctgttattattacattaaccaaggtgggtcggcactacatcgttgatgccacctcagaggaagaatcccagatgagttctgcagtgtcggtgtcagtcaacaggcatggccagatatgcgggcttaccaagaggggaggggcagggctggatccaagcgtcatcttcgacatgatatctgtcgccaagcatgtgagccagcagttcatctccctcttggattcagagattgccgccgccgaagctgaagaagaggctcagtgattgatgaaaaggaaaaaggactggttgcgtaaatgctcgtgtgttccaacttcaaccaaatgctgtagaaatcttcaggaacactctatatttacaaagtcattttgctctctatatttacaaagtcattttgctctctatatttacaaagcatgaatgaagatacccaagaacactcccgcacctaaaaaaaaaaaaaaaaaaaaaaaa

SEQ ID NO: 233 - DNA, 1172 bp, Oryza sativa
agcattcgcatccacgagaccactcgaacccgacccgcctcgccgccgccgccaccgaagtaatcccttaattggtcaaaatgtctcgggaggagaatgtctacatggccaagctggccgagcaggctgaaaggtatgaggagatggttgagtacatggagaaggttgcaaagactgtagatgtggaagagctcactgttgaggagcgcaacctcttgtctgttgcttacaagaatgtgattggtgcccgccgtgcctcctggcgtattgtctcatccattgaacagaaggaggagggtcgtggcaatgaggaacatgttactctgatcaaggagtaccgtggcaagattgaagctgagctgagcaagatttgcgatggtatcctgaagttgcttgactcacaccttgtgccctcatctactgctgcagaatctaaggtgttttacctcaagatgaagggtgattaccacaggtaccttgcggaatttaagactggtgccgagagaaaggaagctgctgagagcacaatggtggcttacaaggctgctcaggatattgctctggcggatcttgctcccacccatcccataaggcttggactggcacttaacttctctgtgttctactacgagattctaaactctccagacaaggcttgcaaccttgctaagcaggcgtttgacgaagccatctccgagttggataccctcggggaggagtcttacaaggacagcactttgatcatgcagctcctgagggacaacttgaccctctggacctctgacctcacggaggacggtggtgatgaggtgaaagaagcctccaagggcgacgccggcgagggccagtaaaatgggaagatcgatcgatcgatggctccgcatgttattggagaccatcgatttagatgcctcatgctgctgtcaccatgatggatggattcttctcctgttctactagaatgtttttcttcctgtccccccttcctctctcttctctggtttttactagggtggtagcggtcgaattagttcttcccattgctttgcatttggtgctagtggtccgtctgggctgattgttttcctctggatatgactctcgtgtgtgttgtctccagatagtgttttattgagcaatatttaaagttgtcgtccacctcaaaaaaaaaa

SEQ ID NO: 234 - DNA, 1004 bp, Oryza sativa
gaaaaatgtcgcctgctgaggcatcgcgtgaggagaatgtgtacatggcaaagcttgccgagcaggctgagcgttacgaggaaatggtcgaattcatggagaaggtggcaaagaccactgatgttggtgagctcaccgttgaggagcggaacctgctttctgtggcttacaagaacgtgattggtgctcggagggcatcgtggaggatcatctcttctattgagcagaaggaggagagccgtgggaatgaggcatatgttgcatcaattaaggagtaccgtagcaggattgaaactgagctcagcaagatctgtgatggtatccttaagcttctggattcccaccttgtcccatctgccactgctgcagagtccaaggtgttctacctgaaaatgaagggtgactaccacaggtaccttgctgagtttaagtcaggagctgagaggaaggaagcagctgagaacactcttgtggcatacaagtctgcccaggatattgcactcgctgacctgcctacaactcacccgataaggcttggacttgcactgaacttctcagtgttctactatgagatactgaactcaccagaccgtgcttgcaaccttgcaaagcaggcgttcgacgatgctattgctgaactggacactcttggcgaggagtcttacaaggacagcaccttgatcatgcaacttcttcgtgacaatctgactctctggacctctgacaatgcggaggatggtggtgacgagatcaaggaagcagcgaagcctgaaggagagggccactaatctgtcctgaagtctatttctgagtccatttactcagctacctgctgtattactggatcataagatgtactaggatcaattgctatgtggaatcataagattagggctgcgtatgtcaaaatgtgtcgagctgaagtacccagtggacacagtttatgtgcactacattgcttccgtgacttatttactagttaattagcaactttcaaccaaaaa

SEQ ID NO: 235 - DNA, 964 bp, Oryza sativa
gcggcttctcccttctcttctctctctcgcatcgcctactcgttcgttttccctcgaggaggagcagaggcggcggcggcggcggcggagcggacatggctgaggtggaggcagcgccgattgcggcggcggagaccccggaggtggcggcggcggagggagcggcggcggcgaaggcgccgcacaagctgcataggcagtgggcgttctggtacgacatccagtccaagcccaagcccggcgccgcgtgggggacctcgctccgcaaggcctacaccttcgacaccgtcgaggagttctggggcttgtatgatcagattttccgtccaagcaaggtgacagtaaatgctgattttcatttattcaaggctggtgtagaaccaaagtgggaagacccagagtgtgcaaatgggggcaaatggactgtgccatgtagcaggaagaccacccttgagaacatgtggcttgaaacgctgatggctctgattggagagcagtttgatgaaagtgaggaaatttgtggagttgttgctagtgtccgccagagaggagacaagcttgcattgtggactaggactgccagcaatgaagccgttcaggtaaacattggcaagaaatggaaggagattgttgactacaatgataagatggtctacagcttccatgatgacgccaagagggagaaaccaagcagaggtggacggtacaacgtgtaagtcaccgcaaaacgttgcagcttggatagtggccatcgagtggtgtgccgataccggcgcctgttctttacagcctcagctagtgttgttgtccgaggcaatttttccgacctattgtgttgctttcctctctgatagcttatggtaaaagatacaaagatgttgaggagtttgtacgccacttaattttgctcgtaacatacattgacaatcaagaggagccatggcattgcgatctaaaaaaaaaa

SEQ ID NO: 236 - DNA, 961 bp, Oryza sativa
gctaattaaggcgcaacacagaaaccctcaccgccgcccgcatccatggcggaggagcacgagacgaggccgccgtccgccggaaggccgccgtcgtccggccgcggcagggccgacgacgctgacgagagggaggagggggagatcgccgacgacgactccggccacgcgccgccgcaggccaaccccgccgcgccgcacccgctcgagcacgcctggaccttctggttcgacaacccgcagggaaagtccaagcaggcaacctggggaagctccatccgccccatccacaccttctccaccgtcgaggacttctggagcctttataacaatatccatcacccaagcaagttggttgtgggagctgacttccattgctttaagaataaaatcgagccaaaatgggaagatcctatctgtgctaatggaggtaaatggaccttcagctgtggcagaggaaagtccgacacaatgtggttgcatactttattggcaatgattggcgaacaattcgattatggggatgaaatttgtggagcagttgttagtgtgcgtggcaagcaggaaagaatagctatctggactaaaaatgctgccaatgaagctgctcagataagcattgggaagcagtggaaagaatttctggattacaaggactcgattgggttcattgttcatgacgatgcaaaaaagatggacaaaggtctcaagaaccgctacacagtttgatctgagcactcctgtccagatatccaagagagtagtatatccacatgtaggatgggttttcttcgatgctttagtgtttgtcattcgcttgtagcgagcgcttgaaggctataatattgccgtgaactgtttaaacttgaaacgtaatataatgacgtatcagaggtgtctctgtactctataaatcagtccagttcttccttaaaaaaaaaaaaaaaaaaaaaaaaaaaaa

SEQ ID NO: 237 - DNA, 949 bp, Sorghum bicolor
cgcaaacctctctccctcgtctggtatcgtctctcccacacccaaaaaaaaccctcgaaaagcggcggcggcgcgacatggcggaggtcgaggttccagctgctgcggtcgcgacgacgatccctgaggcggcggaggctaccgagggcggagccgctgcggaggcgaagggtccgcacaagctgcacaggcagtggaccttctggtacgacatccagtcgaagcccaagcccggcgctgcgtggggcacctccctcaaaaaggcctacaccttcgacaccgtcgaggagttttggagcttgtatgatcagatttttcgtccaagcaagttgtctgggaatgctgattttcatctgttcaaggctggagtagagccaaaatgggaagacccagagtgtgcaaatggtggcaaatggactgtcccatgcaacagaaaggcaacctttgagaacatgtggcttgaaacgttgatggctcttattggggagcagtttgatgaaacagaggacatttgtggaattgttgctagtgtccgtgcaagaggagataagctcgcattatggactaggactgccagcaacgaagctgtccaggtgaacattggcaagaaatggaaggatgtcatcgactacaatgacaagatcacctacactttccatgacgactccagaagagagaagccgagcaggggcggacggtacaccgtgtaagctgcacatcaacaaggttgcttggactggatagcgggcggagtggaattttctgctgagatcagcaccaactttcatttgataagccttggcttacctgaggcaattttcgcacctattgtgatgttattttgctttcagatagcttatgtagtacaagaaagagaggttggagacattgacgattttgtatgcaactgaatttctatctgaatctgccccgattcaactgcaaaaaa

SEQ ID NO: 238 - DNA, 890 bp, Sorghum bicolor
ctgccgccatggccgacgagatcgacacgaggccggcctccgcgggctcccggggccgccccgcgcacgctacggaggacgacgacagggaggagggagagatcgccgacgacacccccgcgcccgccctccccgtcacgcacccgctcgagcactcatggaccttctggttcgacaacccgcagggcaagaacaagcaggccgcctgggggagctccatccgacccatccacaccttctccaccgtcgaggacttctggggcctttacaataatattcatcaccctagcaagttggtcattggagctgacttccattgcttcaagaacaagattgaaccaaaatgggaagaccctatttgtgctaatggcggtaaatggaccatcagctgtggaagagggaaatctgacacactgtggctgcacactctgttggctatgattggcgaacaattcgactatggtgatgaaatttgtggagcagtcgtcagcgtgcgtggcaagcaggaaagaatagctatctggacaaaaaatgctgctaatgaagctgctcagataagcatcgggaagcagtggaaggaattcctggattacaaggactccattggattcattgttcatgacgatgcaaagaaggcggacaagggaccaaggaaccgatacacggtttgatcctgttgctggaaatctcagagtgtagcatgcgcacgtgtagggtggttctatccgaatctaatgcagacatgcagtagcaccttgcagagtttagactctagtgttgaaggttctctatttgctgaggagttgcttaagcataatctaacatgttgaatgtatttcctgtatgttccataaacataatctaacactcgggtgttgtttcgtcaaaaa

SEQ ID NO: 239 - DNA, 1267 bp, Oryza sativa
caccctcccggcggccggagcggcgcgacttcccatctaacatattgcttccggcagccgccgccggacaccatggctgactctccgagcccacgcctggacgaggaggacgccttcggccgcgacttcaactcgtccccttcgcccacagccccacccgcccgctccggcgagaagaggccgttcggcgatctggacgacgatgacgaggacgttttcgcttccaagaagggaaagacaaaggtggaagaaagtgcgccaggtgctgccacgggaatgattctgtctcttcgcgagagtttgcagaactgtaaagataatcttgcgtcatgtcaggtggaacgggaggctgccaaatcagaagttcaaaagtggcattcagcatttcagaacattccagctgtacctgctggaaccaatccagatcctgtttcggttgtttcttatctcaataacctgaagtcgtcggaagaatcattgaaggagcagctggagaaagctaagaaaagagaggcggctttcattgtaacatttgcgaaacgtgaacaagaaattgcagaactgaagtctgcagttagggatttgaaaactcaattaaggccaccatcgatgcagacaaggagattattgcttgatccagcaatccacgaggaatttacacgattaaagaatcttgtggaggagaaggagaaaaagatcaaggaactacaggacaatgttgctgctgtcaattttactccatccagtaaacatgggaaaatgctaatggccaagtgtagaacattgcaagaggaaaatgaagagattggggcgatggcttctgaaggaaaaatccatgaacttggaatgaaaattgcagttttgaagactcggaacaatgaactcaggaatcagttcaatgagctgtataaacacatggatggtctaacaaatgacgttgaaagatcaaatgaaatggtggccattcttcaagatgagttagaaacaaaagatgtagagctgagaagattgaaggagatgcttgcccagaaagaagcaactgatgagaacaaaatacctcaagaaaatgacgtcgctggagatgatatagttgctgccgccgagagtcagccaataaaagtagaaacataagctacgccttcagcagtcatttctagagtagcttgcgttctcaacattcttattattttttgtatcatgtatcagaagtgtttacttgtgtaatttatctaatgtcgtttattctaaaaaaaaaaaaaaaaaaaaa

SEQ ID NO: 240 - DNA, 2396 bp, Zea mays
aacaattcgcccttactactatagggctcgagcggccgcccgggcaggtgccaccactaccagcctgcccgtgccgtgcccacgccccactgcacagcgcaccatccgcgcctcttctcttctcttctcctccccaaggccaagccccagccccagctaccgcgccccctcctgtctgttccaattccaccagcgtcggcctagctacctggccgtcccctctccgagtacggtcggaagcctcagctgaaggatctggacgacgggacaggttctgtttggtcttcataaagtagagcactagctagaagacatattcacacgcatcagctatcaaattgcaagcttagaattgacctcaaagttgggacatgcttgtcttaccagaagcaactgatagcttggagttgtagtccgtccggactgtctgctggaccagtatggctgacactccaacttcccgcatggtgcacccctttggcgacgtcccaaggcagactcccaagcaattcctgtattctggcaacccgcagcacctctgccatccgtaccagtcagctccggacacccatgtcgtgccgcagcgctgttacaccgtgaggtctcagtctcactcgccaaataatgctggttctcaagaccatgagactcacaagcagtacacgctggagtcctcggcggcttccggttgttcaaggcatggttctccctccagccaaagcgtccatgccgggagtggcagccctgtgtctcacgacgacagccactccggctccacgaacggccatggatcacctgtgagcgcgtcgtgtgtcaccggcgaggaccctactgatctcaagcagaaactgaaggatcttgaggctgtaatgctggggacgtctgagactgaccccgagatagtcaacagtctcgagatctccgcggcaaaccaactctcgttggagcccgaggagtgggagcacatggtgagcatgcccagagggaacctgaaggagctgctgattgcctgcgctagggcagtggaacgtaacaacagctacgccattgatctgatgatcccagagctgaggaagatggtttcggtgtccggcgagccgcttgagaggctgggagcctacatggtggaaggtcttgttgccaggctcgcggcctccggcagctcaatctacaaggctttgaagtgtaaggagcccaggagctctgatctcctctcctacatgcacttcctgtatgaggcctgcccctacttcaagttcggctacatgtcagccaacggcgcgatcgcggaggccatcaagggagaggacaggatccatatcatcgacttccacatcgcgcaaggggctcagtgggtctctctcctccaagcccttgcagccaggcctggcgggccaccgttcgtgagggtcaccggcattgatgattcagtctcagcttacgctcgaggcggcggtctggagttggttggcaggaggttgacacatattgctggcctctacaaggtgccctttcagttcgacgcagtcgctatctcaggcagtgaggtggaggaggagcatctaggcgtcgtcccaggcgaagccgtcgccgtcaacttcacccttgagctgcaccacatccccgacgagaccgtgagcacggcgaaccaccgggaccggatcctgaggctggtgaagggcctgtcgcccaaggtgctcacgctggtggagcaggagtccaacaccaacacggcccccttcgcgcagcggttcgcagagacgctggactactacacggccatcttcgagtccatcgacctggcgctgccgagggacgacagggagcggatcaacatcgagcagcactgcctggcccgggagatcgtgaacctggtggcctgcgagggcgaggagcgggtggagcggcacgaggtgttcggcaagtggaaggcgcggctgatgatggccgggttcagcccgtccccgctcagcgcgctggtgaacgccaccatcaagacgctgctgcagagctactcgccggactacaagctcgccgagagggacggcgtgctctacctcggctggaagaacaggcccctgatcgtctcatcggcatggcactagtgttgacttcagagaatgttgacctgatggagaatgtttcttgtaaccttcgaagtacctcttagtggtttagatatgtttggctggtcactggaactatctataggaagcctatggtgatagatactgagttgtagtagaacacatatagcctaaatgcctaatgctgtgatggcagtcactaccagcctagcctagaacaggttgatgatgtgtagtagtaagtttgggtatatgtttcagttaatcagtttaaaaaaaaaaaaaaaaaaaaaaaaaaaaaaaaaaaaa

SEQ ID NO: 241 - DNA, 2035 bp, Zea mays
ccacgcgtccgcgaactgagcaagcttttcgacagagaacgtatccctgaacgtgttgtgcatgcacggggagccagtgccaagggtttctttgaggtcactcatgttttctccccccttctcgccttctccttctcccccctagtctagaggcgttgctccccaatcccttcggcccgcccgctcgacgtgatcccaccggcagccatggatccatacaagcaccgcccgtctagtgggagcaactccagcttctggaccaccaactccggcgcccccgtctggaacaacaactctgccctcaccgtcggacagcgaggtccaatcctccttgaggattatcatctaatcgaaaagcttgctcagttcgacagagaacgtatccctgaacgtgttgtgcatgcacggggagccagtgccaagggtttctttgaggtcactcatgatgtctctcaccttacatgtgctgattttctccgtgctcctggggtccagacacctgttattgtccgtttctctacagttgtgcatgagcgtggaagccctgagaccttgagggatccacgtggttttgctgtcaagttctacaccagagagggtaactttgacctcgtgggtaacaacatgcctgtgtttttcatacgagatgggatgaaattccctgacatggtccacgctttcaagccgaatccaaagaccaatttgcaggagaactggagaatagtagatttcttctctcaccacccagagagcctacacatgttcaccttcctctttgacgatgttggcatcccactcaactacaggcacatggagggctttggtgtcaatacctacaccttgatcaacagggatggaaagcctcaccttgtgaaattccattggaagcctacttgtggtgtgaaatgcttgctcgacaatgaagctgtgactgttggaggcacctgccacagccatgcgacgaaggatctatatgattccatcgcagctgggaattaccctgaatggaagctctacatccagactattgatcttgaccatgaggataagtttgactttgacccgctcgatgtcaccaagacctggcctgaggatatcatcccgctgcagcccgttggacggatggtcctgaacaagaacgtcgacaacttctttgcagagaatgaacagattgctttctgcccagcgattattgttcctggaattcactattctgatgataagctgctccagacgagaatcttctcctatgctgatacccagaggcaccgccttggtccaaactatctgatgcttcctgtgaatgcaccaaaatgtgcccaccacaataaccaccatgatgggttcatgaacttcatgcacagggacgaagaggtgaactacttcccttcgaggtttgatcccgcccgtcacgcggagaaggtccccattcctccccgtgttctaacaggctgtcgtgagaagtgcatcattcagaaggagaacaacttcaagcaggctggcgagagatatcgttccttcgaccctgcaaggcaagaccggttcatccagcgatgggttgacgcactgacagaccctcgcgtgacccatgaacaccgtaccatttggatctcctactggtcccagtgcgacgccgctcttggccagaagctggcttctaggctgaacctgaagccgagcatgtaagatcgacgaggaagaaagcaggcaccggtggccaaggatgcaacgcaacatggagcgtgtgatgtttacaccaatataattgaataaacaggggatgtgcgcgtcgttgtacttatgctgatgctgatggtcggtggtcgattatatatactggaacttctggtgtatgctcttctcttctggggagacgtaatgtaacgaagaagaatgtgtcattgtggcctgtggtacaaaccctgctgtgtatgggcctgtctataagaaacagcgatgagctgtgacgttatgtttctgacagtttatttactaatgagcacatctttaatttactagaaaaaaaaaaaaaaag

SEQ ID NO: 242 - DNA, 2164 bp, Zea mays
ccacgcgtccgctagctagctgaatcacaatggatcctaccaagttccgtccgtccagtagccacgacacgacggtgacgacgacgaacgctggcgctcctgtgtggaacgacaacgaggcgctgactgtggggcctcgcggtcccatcctgctggaggactaccacctgatcgagaaggtggcgcacttcgcgcgcgagcgcatcccggagcgcgtggtgcacgcgcgcggcgcctcggccaagggcttcttcgagtgcacccacgacgtgacgtcgctgacgtgcgccgacttcctgcgcgcgcccggcgtgcggacgcccgtgatcgtgcgcttctcgacggtgatccacgagcgggggtccccggagacgatccgcgacccgcgcgggttcgccgtgaagttctacacccgcgagggcaactgggacctgctgggcaacaacttccccgtcttcttcatccgcgacggcatcaagttccccgacgtgatccacgcgttcaagcccaacccgcggtcgcacgtgcaggagtactggcgggtgttcgacttcctgtcgcacctccccgagagcctgcacaccttcttcttcctcttcgacgacgtgggcgtgccgtccgactaccgccacatggaagggttcggcgtgaacacgtacacgttcgtgagcgcggcggggaaggcgcagtacgtgaagttccactggaagccgacgtgcggcgtgcggtgcatcctgacggacgaggaggcggcgctggtcgggggacggaaccacagccacgcgacgcaggacctgtacgactccatcgcggcggggagcttcccggagtggacgctgtacgtgcaggtgatggacccggacacggaggagcagtacgacttcgacccgctggacgacaccaagacgtggccggaggacctgctgccgctcaggcccgtggggaggctggtgctggacaggaacgtggacaacttcttcaacgagaacgagcagctggcgttcgggccggggctggtggtgccagggatctactactcggacgacaagatgctgcagtgccgggtgttcgcctacgccgacacgcagcgctacaggctgggaccaaactacctgatgctgcccgtcaacgcgccgcgctgcgcgcaccacaacaaccactacgacggcgccatgaacttcatgcaccgcgacgaggaggtggactactacccgtccaggcacgcgccgctgcggcaggcggcgccgcccacgccactgccgcccaggccagtcgccgggaggagggagaaggccaccatacgcaagcccaacgacttcaagcagccaggggagaggtaccgctcctgggacgccgaccgacaggaccgattcgtgaggcgattcgccgactcgctcggacacccaaaggtcagccaggagctcaggtccatctggatagacctcctcgccaagtgcgacgcgtcgctggggatgaagattgccacccggctcaacatgaagccaaacatgtgatgcttctgctgaataataatgaagacacgcatgcatgtcgtcgtcaggaacaagagaaataatacaagaccagcacgcatgggcatactctatattatagatggccaaaaagcacgaggcccgtgagcccggcacgaagcccgctttttgggcccggtccgagcacggcacggtagaataagcgggcgggcttgaacaggaaactaggcacggcgggctagcccggcacggcctgtttacctctaagcccgttaaacccgtttttttttacactaaaacgtgcttaccggcccgtttagcccgcttttcggcccgttatttcgtgctaaacgggccggcccggcccgtttaggcccgctgcgggccgggcttggacagaaacttaagcccgctggctcagcaggcccggcccggttttggccgggcttcaccggcccgtttggccatctctactctatatatatgtatagcccgtgcccgtgtccgcatttgtaccaatacaagccaagcctagtcaagtggatgtgtattattgttgcgctatcacatacatgtacccctgctacctgaagatggatgtgtatcgagttatcaaattaaggcaccagcagcaaacgctatatatatattgcataaaaaaaaaaaaaaag

SEQ ID NO: 243 - DNA, 1294 bp, Zea mays
ccacgcgtccgcaactggaggccaatagaatcgctcgcttgcgttatcttgttcgcctcgtcagttgttgtttcctcccttcccatcccccactgctcagcagtcagtcagcactcgccacccacacgcctccgctccgcccacggttccactccaactctccgatctccaggaatccgcggctgaggcgccggcgatggcggctcccatggtcgacgccgaatacctgcgccaggtcgacagggcgcgccgccacctccgcgccctcatctccaacaagggatgcgccccgatcatgctccgcctcgcatggcatgatgctggaacttatgacctgaagacaaaaactggtggtgcaaatggttcgattagatatgaagaagagtacactcatggttcaaatgctggtttaaagattgctatcgatctccttgagcctatcaaagcaaagaatccaaagataacatatgcagacctgtatcagcttgctggagtggttgcagtcgaagtgactggggggccaactgttgaatttattcctggcagacgtgattcgtcggtgtgcccccgtgaagggcgtctgccagatgctaagaaaggtgcaccacatctgagggacatcttttatcggatgggcttatcggacaaagatattgtagctctatcagggggacatactctgggaagggctcaccctgagaggtctggattcgatggtgcctggacaaaggagcctcttaagtttgataactcatactttcttgagctgttgaatgaggaatctgagggacttttaaagctcccaactgacaaggcactgttatcagatcctgaatttaggcgctatgtggagctctatgcaaaggatgaagatgcgttcttcaaagattatgctgaatcacacaagaaactctctgagcttggcttcacgcctcgcagcacagcaccatccaaatcagatcttccaaccgccgccgtgcttgcacagagtgcctttggggtagcagttgctgcagccgtagttatcgctggctacttgtacgaggcttccaagaaggccaagtagagggcgaagttcttctccacatggctttgctttagtaagtctgaagatcgaataacaggaccatatctgaagatcgaataacggatcatataaatgagttactcggaaaatgttctgaaatccttacgaacagaacgttgccttcatgtttacactgtactcatgagtcacagtgatatggagatggcatagcctactattggaagtaaaaaaaaaaaaaaaaaaaag

SEQ ID NO: 244 - DNA, 1595 bp, Zea mays
gcgtgagatcgaggagaagaaggcaagcaggcagagaaagagagagagagagagagatggatgaggagtacgacgtgatcgtgttggggacggggctcaaggagtgcatcatcagcggcctcctctccgtcgatggcctcaaggtccttcacatggacaggaatgactactacggaggagaatcttcgtccctgaatctaaccaagctctggaacaggttcaagggcaacgacagccctcccgagcacctgggcgtcagcaaagagtacaacgtcgacatggtgcccaagttcatgatggcaaacggcgcgctggtccgcgtcctgatccgcaccagcgtgaccaagtatctcaacttcaaggctgttgacgggagctttgtgtacaacaatggcaagatccacaaagtcccggcaaccgacgtggaggccctcaagtcgaacctgatgggcctgttcgagaagcggcgcgcccggaagttcttcatatacgtgcaggactacgaggaggacgaccccaagtcccacgagggcctggacctcaacaaggtcaccaccagggaagtcatctccaaatacggattggaggatgatacggtggactttatcgggcatgcgctagcacttcaccgggacgacagctaccttgacgagcctgcaatcgacactgtcaagaggatgaagctctatgcagaatcactcgcacgctttcaaggagggtccccttacatctaccctctatacggtctgggagagctccctcaggcctttgcccgcctgagcgctgtttacggtggcacgtacatgctgaacaagccagaatgcaaggtcgagtttgatgagagtggaaaagcgtatggagtcacttctgaaggggagaccgccaagtgcaagaagatcgtctgcgatccttcgtatttgccagacaaggtgaagaaggttggaagggtggcccgcgcgatatgcatcatgaagcatcctatcccggacaccaaggactcgcactccgtgcagatcatcctccccaagaagcagctaaagcgcaaatccgacatgtacgtgttctgctgctcctacgcccacaacgtcgcgcccaaaggcaagttcatcgccttcgtctccaccgaggccgagaccgacaagcctgagatcgagctcaagcccgggatcgacctgcttggccctgtagaggagaccttcttcgacatctacgacagatatgaacccgtcaacaaccctgacgacgactgctgtttcctcacaaatagctatgactccaccacccattttgagacgacggtcaaggatgtgctcgccttgtacaacaagatcactggaaaggagcttgatctctcagtcgatttgaacgcggctagtgctactgagcaagaagctgcttgaacaccccggcggcctctttttttgcagctctacacaatagctatttcttcgattttttttttaaaatgttccatagatggataagtttattgatgaaatccattattgtatgttttttggagttccgtttttgtcacatgcatgtaatgaacaacggtggcaatcatctataaaggttccattattcgctcgcga

SEQ ID NO: 245 - DNA, 1675 bp, Glycine max
gaaaccctaaaccccgttttcggtgagatcgagatcgatcgaacatggatgaggagtacgatgtgatcgtgttgggcacgggtctcaaggagtgcattctcagcggtcttctctccgtcgatggcctcaaggttctgcatatggataggaacgactattacggaggagaatccacttcgctcaatcttattcagtttgaactgcgaaatgatgattttctctgtcctcctcttcagctttggaagagattcaggggagatgacaagcctcctccacatttgggcgctagcagggactacaacatcgatatgaaccccaagtttattatggctaatggcaatttggtgcgggttctcatacataccgatgttactaagtatctctatttcaaagctgtggatgggagctatgtgtttaataaaggaaaggttcataaggtgcctgcaaacgacatggaggccttgaagtccccacttatggggctatttgaaaaacgccgggcacgcaagtttttcatttatgtgcaaaactacaacgagagcgatcccaagacccacgaggggatggacttgacaagagtgtctactaaagagttgatagcaaaatacggccttgatgataacactatagacttcattggtcatgctttggcgcttcatagcgatgatcgctacttggctgagccagcactggacaccgtgaagagaatgaagttatatgcagagtctcttgcacgctttcaaggagggtcaccttacatatatcctttgtatggtttaggagagcttccccaggcatttgcacggcttagtgctgtttatggtggaacatatatgttgaataagcctgagtgcaaggtagaatttgatgaggaaggaaaggttgttggtgttacatctgaaggggaaactgcaaagtgtaaaaaagttgtttgtgatccatcatatttgcctggcaaggtgaggaaggttgctagggttgcaagggcgatagccatcatgagccacccaatccccagcactgatgattcccattcggtgcaaattattttaccacagaaacagttgggtcggaagtcagacatgtacctattttgttgttcgtatactcacaatgttgctccaaagggaaaatttattgcatttgtatcaaccgaggcagagacagatcagccggcaattgaactgaaacctggaattgaccttctaggacctgttgatgagatattttttgatatctatgacagatatgaaccagtcaacgaacccactttggacaactgctttatatcaacaagttatgatgctactactcactttgagtcgactgtggatgacgttctcaacatgtatacattgataactggaaaggttattgacctcagtgtggatcttagtgctgctagtgctgcagaagagtaaagaaaactcggtgatgatctgttgctgatgggttccgtgatgatggacttgacaacgaatgttattaacgttttataataaatattttctttttttaaaacaagatttgtgtggctggggaactttttcccgtccagaagctctgttgtgtgttcacatacattgccttctgcagtggttttagtttggtaatgtagtgttattttcatattgttaaatgttaattgcacgtctctccaaccatttcaaaaaaa

SEQ ID NO: 246 - DNA, 1696 bp, Zea mays
cggacgcgtgggcgcggcgccggcgcgtcgggtcgtgcccatcacgttgtctccactccgtcgcctctcctctcctctccgtccctgcgccacgcgggggagattaaagcgaagcgcctccccgctcacctctcctctcgtcgtgcgttggatcaaagtatcaaaccaatctcccctcgccgtccggccggcgtgcgcgcggggcctctttttttggagccttgcgccgcggcccgttcctcctgtccgaaataatccgcctcgacgtgttcgcctccccctccccctccctctctcccctcccctcgcgactcgtctcgtgcgtgactgcgtgctcgctctccttttcgctgcgctcatctcggtatctgtgccagcgctcgcctctccccgccggcccgccctccttcctttccttgtctagccgaaggccgaagccactgcgcgcgcgtgcgtgcgacgatgtcgtcggcggtggaggccatctcctgccccaaggtcgacgtccccgccggcccggagccgggggagccggccaaggaagcggcgccgcccgcggagcactgcgacacggcgcccaacggcaagtgcgcgccgcgttgtcacggggaggaggaggaggaggaggaggacgaggaggacgaggagaaggcccccaaggccatcgacctcggtcccatggtcagcatcaaggagcagctcgagaaggacaaggacgacgagagcctgcggcgatggaaggagcagctcctcggcggcgtggacttgaactccgtgggagagacgctggagccggacgtgaagataatgagcctgtccatcctgtcgcccgggcggcccgacatcgtgctgccgctgccggtggagcccaacggcaagggcgtgtggttcaccctcaaggaaggctccccgtaccggctcaagttcaccttctccgtcagcaacaacatcgtctccggcctccgctacaccaacaccgtctggaagacggggctcaaagttgacagagccaaggagatgctcggcacgttcagcccccagctggagccctacacgtacgtgacgccggaggacaccaccccgtcgggaatgtttgcccgggggtcctactctgccaggaccaagttcctcgacgacgaccgcaagtgctacctggagatcaactacaccttcgacatccgccgggagtggccgtcgacgagctgaccatccttccctccctccatcggtggcctgagcagaccagtcgtttcgttctgtgttcttccttttctatgttgcctcgtcctgtcctgtcactaggttttttgtttgttcaccgtcagcttgttcgctgcggcttgctgcggctgcaatccggctgcggctgcggcttctacagtatttttctctctatggattgcagctgcagcagtccaaacagctgcaacagtgtcggcttgtagccagccgaacacgccccgtgttgctgcgtgcgtgacgcacggtgcgtctatgtgccctttcccatgcgccagttgtctgctgtgttgacaccgttactagacagtgcaaatgtcaggtcggtctaccggactgtgcgtgcgtcagcgtgttcaacttgtcgatcagggtctcgttttttccgaaccgcctgttgagttaagacttcagagcaatgaagctgcgttctgcgtagtaaaaaaaaaaaaaaaaa

SEQ ID NO: 247 - DNA, 660 bp, Zea mays
tagagcgccgccatggctcaggtaaggggcagtgctcgtggcactggcagtggcagcagcgccgccgcgctggcgctggtcctcctgtgcgcgctcctccgcggcgagttcgccgagtcggcggtgtacacggtcggcgaccgcggcgggtggagcttcaacaccgctagctggcccaacggcaagcgtttccgcgccggcgacgtcctcgtgttcaggtacgacgccagggcgcacaacgtggtgcccgtgagcgcggcggggtacagctcgtgcagcgcgcccgagggcgccagggcgctcgccaccgggaacgaccgcgtcacgctgaggcgcggcgccaactacttcatctgcagcttcccaggccactgccaggccggcatgaaggtcgccgtcaccgccgcctaggcactgcagggcggccaatcagccggcggagagcgccgcgctcacggagtaaagcacgtagctaattagacggtgctgccttgctgttcaataatatcgtctgtcgtcgcgtacttcataacctgcgcggcgtgttagtagttgtttggtggtgtttggcgactggcactacagagaagtgtcagatcgagtgatgtacttgctaccaacaataaaggtatacacggtttgtgtgttcacttgaaaaaa

SEQ ID NO: 248 - DNA, 724 bp, Zea mays
ccgatctgcatttcactcgttccacaccgtcgttggccggcccatagctctccccctcctggttagtgtagtgagcgcagcgacgagtgcaacggtgagagtaccgagatggctgagggaagaggcagtgcaagggccatcggcgccatggcgttcgccgttgcctgctgctactgctgcgtcgccatcgccgacgcagccaccacctactacgtcggggacagcaacggctggtccttcagcagccccagctggcccaacggcaagcacttccgcgccggagacactctcgtgttcaggtacatcccctggatccacaacgtggtggccgtggacgaggacgggtacaacggctgcacgacgccgccggggtcgcggacctacacgtccggcgccgacagcgtgacgctcgccaggggggacaacttcttcatctgcacccggttcggccactgcaacctcggcatgaagctcgtcgtctatgccgcgtgatctgtcagagctagcgactggtggtggtattgttgactgggtgcgctcaatgatcggctgtgcttgctctcgagcgaactggtctgtttgatttgtgctatttcgtgtaggctcagtcagtcgcttggttctaatccgtaacggcttctactacttttacaatgttgttgtaacaatacaaacatccagctttaattgaagctaacggatatcgcatgtttgaacaaaaaaa

SEQ ID NO: 249 - DNA, 863 bp, Glycine max
ggacacaatcaatcccattattaaagggataagccttcaaccttgcaacacaacactacaacctaaggtctgcactacgagaatgtctcagggaagaggcagtgcatctttacctattgtggtcactgtggtttcactactgtgccttttggttcttttggaacgtgctgatgcagcaacttacaccgttggaggacctgggggatggaccttcaacactaatgcttggcccaaaggaaaaagattcagagctggtgatatcctaatcttcaattatgattcaacgacccacaatgtggttgctgtggacagaagtggatacaacagctgcaaaacgccagggggtgctaaagtgttcagttcagggaaggaccaaatcaaactagcaagagggcagaactacttcatatgcaactaccctggtcactgcgaatctgggatgaaagttgccattaatgcagtgtgatggtgcttaatacttcttgagttgaagtgaaaattaagttaatggtcaattagctagcattagtaaatgttagtgtgtgctcatgtatgtactttttttatatgaagctgttatatatatttattaatcactatagttttgtgaagcaaagtgggagtgagctggcttggtagatcaattgttcctatgtttggtatgtgttgtgtagtgggagtataaaaatggtccattagtcacgggctcttcttattagacattggatctacatattttgaagttattgaaagtctcagagccaattatctgtatctgtgtgtcggtgtcacagtgtatggttctattactgattttgtttgcttcaataaattaaatttcctaaaaaaaaaaaaaaaaaaaa

SEQ ID NO: 250 - DNA, 1075 bp, Zea mays
gcattcatcactttcctgactcacctcactcgatcatcctccagtcttgtcgtcgcctgctagcttgaatattacgccagcatctcgccaggaaaatggcgggcactactccgcgccgcttgctcctggtcatcgtccccctcgtcgccgtcgtgccggcgtccgcaaaagactacatggtcggcgactcgtccgggtggaagtccggagtggactacgctgcctgggccaagggcaagccgttcgccatcggcgacacgctctgtacgtgccaaataaagctcgtcgtcagattcagatacgtacagtacagtagccgccaatgctgtgtccatgcatgcatcatgttctcgtatataatgtcagtggcacgttcgttcgatcgtccgcgtgtatatctcagtatctcgtgaaggagaaatccagtgaccccgcgcggcctgccggttcttgcgttgcagcgttccagtacagctcggcgcactcggtgctggaggtgagcgaggcggaccacggcgcgtgctcggcgagcaacccgctgcggtcgcaccagggccagagcaccaccatcccgctcaccaaggccggcacccgctacttcatctgcggcgcccccggccactgcgcctcgggcatgaaggtcgccatcaccgtctccggcggcggcggcggcggcagcagcagcgccgacaacaccgcgactccgtcgggtccctccgtgcgggcgatgaacacgaagccggcgttcggtctccggtccggtggcgcgacgacgacggacgagtcggactccagcgcggctggcagcggcgcccgcctcgcgatgggcctgctgttcggggccgcgggcctcgctgcaataatgggctgaattgaggacccgctagggaaaaggcagtgcggtttcacgaatttcctatttagtttcctgcgttctctgcttgcgtccccgagtcgcgaggctgagtgttcggccgtgcatatttttcgtatacttttgctgtgtttttttggggctattcgttgttcaatactgttgtttcagaataaaatttcatccttgaccattcaaaaa

SEQ ID NO: 251 - DNA, 1003 bp, Zea mays
ccacgcgtccgctgcaagctcatccgtctctgtcgatcagcaagaggccggggtcagaggaatggcggcgacgtcgcggctggcgctggccctcctgctggccgccttggtggcggcgtggcagctgccggcggcggcggtggcggccaactacacggtgggcgacgagaaggggtggaacccggacgtggactacacggcgtgggtgaagaagcacaagccgttctacaagggagactggctcatcttcgagtaccagaacgggcggtcggacgtggtgcaggtggacgaggtcggctacgacaactgcgacaaggccaacgcgctgagcagctacagcaagggccacacctacgccttccagctcaaggacgccaaggactactacttcatctgcagctacggctactgctacaacggcatgaagctccacgtcacagcaaagtcatcatcctcatcctcctcttcctcgtccggatctgactcctcctcctcctcctctgacgacgactcttcctccccctcgccgcccgccaagaagtccaaggccaagaccagcgccgcgccgccaccgtcactcctcgctgccacgcccatggctgccgccgccgccgccgccgctgctctgctcctcaacaggatgctctgatctggtctggtctggtctgctctgcgtatgtagtcacgtcacgtggctccagatcttgcttgggcgctgatgagctacactacactacactagtttttttcttctgcttttagtttttttccccctcaccacttgagattggggaggcatcttctgcttctagcttgcttgctgcttcttgaattgcgtgactgttattggttggttcttgcttccattattttgcctttttctttctttctttcttgcttccagcttgttgttgatgcagttttttttttcaagagacaagattagtataatgtcaagtgtgaatgaagagctctatttatttatcaaaaaaaaaaaaaaaag

SEQ ID NO: 252 - DNA, 1264 bp, Zea mays
acttggcgggcgaaaggcgaaaccgacgtgctcccgggcgggcggcgacagcggcatggagcgagagcggcaggcagtggcgaggaacaggaaggtggtgctgcgcgggtacatcgaccgcgcgcccagggaggaagacatggagctcgtcgacggcggcgccgtggagctgcgcgtccccgagggcggcggcggccccgcggtgctggtgaagaacctctacctatcctgcgacccttacatgcgcggcaggatgcgggacttccgcaactcctacatcccgcccttcaaacctggatcacctattgaagggtttggcgtggggagggtggtcgactccactcatccaggattcagtgctggtgacgttgtttccgggatgactggatgggaggactacagtctgatcaccaagcctgaacagctcaggaagatccagcaaagcgacataccactctcctatcatctgggccttcttggcatgcctggctttacagcttatgttggattctatgagatctgttcaccaaagaaaggggagtttgtttttgtttctgctgcatcgggagcagttgggcaaattgttggtcaacttgcgaagctccatggttgctatgttgttggaagcgctgggacagatcagaaggttgagctcttaaaggaaaaattcggatttgatgcggctttcaattataaggaagagcctgacttgactgctgccctgaaaaggcacttccctgaaggcatagacatctacttcgagaacgtaggcgggccgatgcttgatgctgtactactcaacatgcgagtacatggccgcattgcggtatgtggcatggtttcccagcacggggtgactgctcctgccggaatccacaacctgttctccttgataagcaagaggatagagatgaaggggttcatccagagcgattacgtgcacctgttcccgcagttcgtcgatgacatcaccaggcattacagagacgggaagatcgtgtatgtggaagacatgagcgttgggctggagagtgggccggcttccttcgtcggtctgttcagcggtaaaaatgttggcaagcaggtcgtctgtgtgtcgcgggattgaaaggcctggattttgttccctactggccagtacccttaaataaaatcaggaaaacattattttcaactccgagaaggaccccactagccagtaccacggtcgtaaatctcaaggtcatgtttattttttctcctgtattaaaaaaaaaaaaaaaaa

SEQ ID NO: 253 - DNA, 1323 bp, Glycine max
attcggctcgagattactccctatattaacccaacaatgcaaaacaacacactgaactctcttcactgaaacgacacacacaaaaaaaagctttagtttaggatgacccaagtgaggaacaagcaagtggttctaagagattatgtcaccggattccctaaagaatccgacatgaacattgttgaaggcaccataatattgaaggttccagaaggttccaatgatgtccttctaaaaaatctctacttgtcatgtgatccatacatgcgactcctcatggccaaggaccgttctttcggagatggctccttcacccttgcctctccattgaaaggatatggtgtgtctcaagtgctggaatctggacgtccagattacaagaaaggtgatttagtgtgggggattactaaatgggaagagtatagcttggtcccctcatctctcatacatttcaaaattgagcacactgatgtcccactttcctactacactggaattcttggtatgccaggaatgactgcttatgctggtttctttgaggtaggttctcccaaaaaaggagacactgttttcgtttcagctgcctctggtgctgttggtcaacttgttggccaatttgctaagttgactggttgttatgttgttggaagtgctggaagtaaagagaaggtggatctgctgaagaataaattaggatttgatgaagcttttaactacaaagaagagccagacctcaatgcagctttgaaaaggtactttccagaaggcattgacatttactttgagaatgttgggggcaagacacttgatgcagtactcccaaacatgaaatttcatggccgcatacctgtctgtggaatgatctcgcagtacaatcttactcagttcgatggtgtaacaaatttggcaaatctcatatttaagcgggttaaaatggaaggttttattgcaactgatttctatcatttatatccaaaattcttggagtttgtcctgcctcatatcagagaagggaaggttgtgtatgtggaagacattgctgagggccttgagaagggccctgcagccttggttggcctctataccggtcgcaatgttggtaaacaagtggttgttgttactcacgagtaaaattatataaatatattgttattctctaagctttaattccgaattttcaattttctgttggatattgaaccttgcttttatggtttatgcagtcattcttctattttgttgatagaaattactacattagtgacattttgtgataaataaaacctctaatatatgctaatttgttaaaaaaaaaaaaaaagg

SEQ ID NO: 254 - DNA, 1216 bp, Zea mays
ccccgatggcgacgacggcgacgaaccggcgggtgatcctcaaggagtacgtggagggatatcctcgcgaggagcacatggagctgctccagggcgccgaggttcccctccgcctgacgggcgccgagccggccgggtccgtcctcgtcaggaacctctacctctcctgcgacccctacatgcggcccaagatgtcgcgcccgctgcgggagtcctacacggccgccttcgtcccgggcgacaccatcacaggctacggcgtcgcgcgcgtggtcgactcctccgacccgcgcctcgcgcccggggacctcgtctggggcatcaccggctgggaggactacagcgtcgtgacgccgcccgccaccaggctcctctccaagatctcccaccacggggtcggggagggggcgggcgtgccgctgtcctactacaccggcatcctcggcatgccggggctcaccgcgtacgtgggcttccacgagatctgcgcgccgaagaagggcgagaccgtgttcgtgtccgccgcgtccggcgccgtcggccagctggtgggccagttcgccaggctcgccggctgccacgtcgtcggcagcgccgggtcccgggagaaggtggagctgctcaagaccaggttcggcttccacgacgccttcaactacaaggaggagcccgacctcggcgccgcgctcaagcgctgcttccccgacggcatcgacatctacttcgagaacgtcggcggcgccatgctcgacgccgtcctgctcaacatgcgcgtgcacggacggatcgccgtctgcgggctcatctcgcagtacaacctggcggacggggagaaggacgccgtgcgcaacctcgccgccgtcatctccaagcgcctccgcctgcaggggttcatcgagcccgaccacaagcacctctacccgcagtacgaggcgtgggtgctgccgtacatcagggacggcacgctcgcctacgtcgaggacgtcgccgaggggctcgagagcgcgcccaaggcgctcataggactcttccacggtcgcaacgtcggaaagcagctcgtccgcgtcgccgacgacgagtgagacgcgcctcacttcgattggaccagacgatccatgtgtcactgttgctatgtttcgattccccattttcattttaataattaattgtgccaatggatgcttttgttcggaaaaaaaaaaaaaaaaaaaaaaaa

SEQ ID NO: 255 - DNA, 1165 bp, Zea mays
ccacgcgtccgctttaacgcccgaaacgaacacctgaaactacaacatggcggatctgatcaaggcagtcgatatccgaggcggtaaaggcgagcgagatgccctcttcatcaaccctcagacgccaaagccctcgcctactgaaggacaggccctcgtccgtgtcaaagcctttggcataaaccgcatggatatagtccagcgacgcggcttttacccgcttccgcctcaagcccccgcaacgctgggcgtcgagttcagcggcaccatcgagtcccttgggcctggtgaccacggtgcctttaagcaaggtgacgaagtctttgggcttgcctacggtggcgcctacgccgagtaccttgccgtcagcacacgcatgttgctgcacaagccgtcgtccatggactttgtgacatgcgctggcatcccggaaacctggatcacggcgacacaggcactgcaccttgtgcttggcttcaccaaaggtaagtcgatcttgtggcatgctggtgcctcgggcgtgtctattgctggcatccagctgtcaaagattgccggtgcatcccaggtctttgccacggccgggtcccaggaaaagtgcgactttattacctcgaagctcggagccaccgcggccttcaactacaagacgcaggactgggcggaggagatcaagaaacacaccgacggtaacggcgtcgactatatcgtggactttgttggtgcaagctacttccagcagaaccagacggccgctgcacgggacggacgtatcgtcctcctgggtacgctgggtggtgtcaagatccccgaagccgacatctcgcagatcctgtacaagaggctccgaatcgagggcagcacgctgaggagccgggacgaggagtaccagggaaagcttcgtgaccgcctcgaagagtatctcccagactttgagtcgggcaagttgaagatccttgtggacaaggttctgccatgggaggagatccaggaggctcacaagcacatggaagaggccaagaatctgggcaagatcatatgtactatctcgtaggtaccatccataactcgaaaataggagacaactcttgacgacgccacgcttgtgttcgtcaaagcaaagaaatccatcgctttcctcaaaaaaaaaaaaaaaaaaaaaaag

SEQ ID NO: 256 - DNA, 3950 bp, Emericella nidulans
gaattcttgaggagctagccgagtacggcactagcgctgtttccccgggatccgctggttccggagcgtgcgcggtgcctggtacaagggtagtttgcaactccggggtggtgatcatacgatatacccgttatgatttagattcagccaatattggtaagtcctttcggcagagcgctcgtctctatcgccgatcatctttgtgtgcggatggtcgtcgtgcagtactctgtaccccgttctactctagtgtcgcggcggacacggaagctagtaattccgttccgaaggcgatctcggagcccggtcagcgagtcaccgagtcacctgcaaatgcaatgcggcggccatgatccgttcacatcgccctcgtgcctgctgaaatgagtccgctgaacggcgtcgctcgttcctttccgcggcccttccaggccgtgaccaggcggccttttcgagttgtccagccggccatcgcctgtccgtccaacagccggtcgtttaaccattctcgatcattacgatcaacggggtctcagtcccccgctccatccccacgcgactcctcgaatcccgcgctgtccttcccttgcctcgacgcccaggaggccaagtccgctcttctttccgcgcgatctcttggttcaggccctgaaccctcctataccgccggccaccacgaacgattccattccgacgaaccgctgctccttgattggggcggtttgcttccagaatttgatatcgcatatgagacatggggccagctgaacgagaagaaggataatgtcattctgctgcataccggtctgtctgcatctagccatgcgcacagcaccgaagcgaacccgaagcccggctggtgggagaaattcataggtcctgggaagacgctagatacggacaagtactttgtgatctgcaccaatgtccttggagggtgctacggtagcacggggccctcgacggtggacccgtcggatgggaagaagtatgctacgcggtttcccatcctgacaattgaagatatggtgcgagcgcagttccgccttttggaccatcttggggttcggaaactctacgcgtccgtcggctccagcatgggtggtatgcagagtcttgcagccggtgttctgttcccagagcgagtgggcaagattgtgtcgattagcggttgtgctcgaagccatccgtacagcattgctatgcgccatacccagcggcaggtgttgatgatggatccaaattgggctcgaggtttctactacgattcgatcccacctcattcaggcatgaagctcgctcgcgagattgccaccgtcacgtaccgcagcggaccagaatgggagaaacgctttggtcggaaacgggctgatccgagcaaacagcctgcgctttgccccgactttctcatcgagacgtatctcgaccacgccggtgaaaaattctgcttggaatacgatgccaacagcctgctctacatctccaaggcgatggatctgtttgacctagggttgactcagcaactcgcgacgaagaagcagagggcggaggcccaggcgaagattagcagcggaacaaacactgtcaatgatgcgtcgtgcagccttacacttcctgaacagccataccaggagcagccatctgcctcgacatccgccgagcagtctgcttccgcttcagagaccgggtcggctccgaacgatcttgttgccgggcttgcgccgctgaaagaccatcaggtgctggtaatcggagtcgcaagcgacattctcttcccggcgtggcaacagcgcgagatcgcggagactctgattcaagcagggaacaagaccgtggagcatattgagctgggcaacgacgtgtctctctttggtcatgacacattcctccttgatgtcagaacgtcggaggcgcagttcgcaagttccgtactagtcggctcgcacataattgtacaatagaggtcaatgataacgaagcgtatttttcagtggactccaggagagtcgttatattttcgcaggcaagacgatgtcttaattgcttattcccggttacaatgactggggtgcgctggtgtcttcccagcggaatatatactgtggcgctaatgacaaacaaaacatttctaagccgatattgcctccgacatgaactcgaccttgacgttaaatcatacggacagaaaagaatactatctggctcaatcagtggattactgcatccagcttcactgtgaagagcagatcaagtgtcctcttatcagtcgctagcggcaggctcactttggcggttctcattctttagaggtttaaccatatagaataaccgtgaaggttgtacccaagagcagaaagggacctttgtcctcccatattcggtgcaacatcattaatatatcaatcgcaatggaaatggatttgctttgtgcgactgagtttgttgcttacattctgttgcttacaatatacctccgtacattacatggmccaattgatcactgggtwgagsggtcctccgtacattacatggaccaatgatcactggtgarcgggtgtcasctcgcggcggctgtttttccaccttcacctccccgatgcctcttcgtctaaataccgattacccttcctatcttgtgttttcgtcttcgagttactgatggagttggacaggtgaaaaggaaccgaatgaaacatattacactggcgcatgactggcgatatgacgttcacacacgattcctacactattgcgtggatatgcgccttaccgatagagttggcggcggcaaagatattcctkggacgaagttcmtcctcgacttcatcaaccaaaatcggatctcaatgtctacactcttkggagtattggcggccataatatagtggtggtctgtctccctgcggtgtctatgggacaacttcggctactgcgcggtggcatacttgaagtctacctacccgaatatccagttcgccttgacggtcggcatcggcggcggggtcccattaggaaaacctgatatacgtctgggcgatattgtggtcagcaagccatctgataccttcggcggcgtcattcagtatgattatggcaaaacggtgggcaatggacacttttaccatacaggatcgctcaacaagcctccgccgatactgctcaagacgatcgcccagatggagagtgattatatgctcggcaaaatctcactttgcaatatcatggccagcagcctgcataaagaggaagtgcagacacagtttccgagaccatcaaaagatcagctcttcaatcaacttacgaaccacgttgggaacaagtccgactgctcggcttgtgatacgagcgagctagtggatcgccctgaacgcacgacagaagagcctcaggtccactatggtctaatcgcttctggaaatcaggtaatgaaagatgcgagaacacgcgactctatcgctcaaggccggaacattctgtgttttgagatggaagctgcaggactcatggatgaaatcccgtcgcttgtaatacgaggcatctgtgactactgcgactcccataaacataaggagtggcagggtacgcagcatttgttgccgctgcctatgcaaaggcttgctcacattaattccgatacatggcaagggtgctgttcgaaatggagtcaaagaggatccgmattggatggtcccctttcgaaagaacccgggatttgttggtcgrraaggaaaatcagcaaaatcgatggattgatccaggagatccatggacctttaaaaatcagcaatctgcggactaggcagacgttggaaagacccagattgctcttgaactagcttatcgcacgcgcgaacatattctggatcccatgtacgacctatgcgagtattgaacaagcttgcgtgaatatagcccaacttgttggaatgcagggattaaagccaggggaa

SEQ ID NO: 257 - DNA, 2001 bp, Synechocystis PCC6803
cattctcttcatctgttgttccgattcccgggtggaccccaatttaatcacccaatcggaagtgggcgacctgtttgttattcgcaacgctggcaatattattcccccctatggagcagccaacggtggggaaggggcagccatggaatatgccctagtggcgctggaaattaatcagatcatcgtctgtggccattcccactgcggagccatgaaaggtctgctcaaactcaactctctccaggaaaaacttcctctggtgtacgattggctcaaacatacggaagccacccgccgtctagttctagacaattacagccatctggaaggggaagatttgattgaagttgctgtggcagaaaatattctcacccaactcaaaaacctccagacctatcccgccatccattcccggttacatcggggagacctttccctccacggctggatttatcgcattgaagagggtgaagtactggcctacgacggtgtactccatgattttgtcgccccccaaagtcgcatcaatgccctggagccggaggatgagtacgctctccatcccaactcacccctgatttcctacgatgcgtttaaggttcccggcaaggaacgtcctggtcgtgagaaagcaacagaatccccagctccccaactgtctcctttacctggttttggccatttgcccagggaacaggcggagcgcatttatcgaggctcccgttagactgggttaaaccccattgcaacctttgtcggataaacgcaaacaatgccaattttaggtaggaattgaccggatgctgaattcactaattgctgactttaggattatttttgagcgagatcccgctgcccgcaattggttagaggtgctgttttgttatcctggcttgcaagctttactaatacatagattttctcatcgtctttatactctcgggctacctttctttcctcgcctaatgtcccaccttgcccgctttttcaccggcattgaaatccatccaggggcccagattggccagggcgtgttcattgaccatggcatgggggtagtgatcggtgaaacggcgatcgtgggggactattctttgatttaccaaggggtaactctggggggcacaggaaaagaaagtggcaagcgtcacccgaccctgggggaaaatgtggtggtgggagctggtgctaaggtattgggtaacattgccatcggtgataatgtccgcattggggcggggtcagtggtgttacgggacgtgccagcagattttacggtggtgggggtgccagggcgcatggtgcatccttccggggaaagggttaatcctttggaacatggtaagttaccagattcggagggcaaagtaattcgcctattattagaaagaattgaattactagagcaacaggtggccaccttacaacagcaacaatcggaacaggcctgggaatcggattatcgctcctgctctgaaactgaccgggaaccggtgctctgtcgccttggcgatcgcgaaattgaagaatttttggggggcaccctctgatattctcccggtagccataactgggatgggatgtggaggggcataggaggtgactatttgttggttcacttaggaattttggacagaactttggtggttaaccacacactgtcgccaaacttgccccattttgctccgagggaattttctggggttggtgttgcgggaaaagccttggcgatcgcctttttttgtcctcaatttttggccggatgttttttcctgtttaataaaatctttctaattgtcttaagatgtgaacgcaaggccgtcctcaagggcggggtttcagacccattttttcgatgaataaccaacaactttggcaacgttatcaagattggctttattaccatggtggcctcgatttttacctggatgtgagccgcatgggatttagtgatgctttggtagaagatttgcaacccaagtttgccaaagcttttcaaga

SEQ ID NO: 258 - DNA, 701 bp, Synechocystis PCC6803
tatttcaatactcaccaagttttaagcaaacagcaatgacagaggtattaagggtaggacagccggcaccggatttcaccgccacggcgatcgtcgatcaaagcttccagaccgtcaaattaagcacctaccgtggtaagtacctggtgctgtttttctatcccctagatttcacctttgtctgtcccacggaaatcattgcctttagcgatcgccatagcgaatttactgccctagatacggaagttgtgggcatctccgtagacagcgaattttcacacctggcctggattcagaccgaacggaaaatggggggcatcggcaacattaactatcccctagtgtcagatctcaaaaaagaaattagccaagcctataatgtcctcgaacccgatgcaggcattgccctgcggggactattcattattgaccgggaaggcatcttacaatacgccaccgtcaacaatctctcctttggccggagtgtggacgaaactctgagggtactaaaagccattcgccatgtgcaatctcaccccaacgaagtttgcccagtggattggcaggaaggagacaaaaccatgatccccgacccggaaaaggctaagacctacttcgagacagtggcggaaccttaggtttgcccagccaaaaatgccgaccctaaatggataattttgactactaggctgactggtgag

SEQ ID NO: 259 - DNA, 1001 bp, Saccharomyces cerevisiae
ttgttttttgctacttacattgtttatcttgaaatatccaaagtgaacactattactgttttttgctcaagaatatattagccttacaagaacgtaaaaaaccaatcatggtagcagaagttcaaaaacaagccccaccatttaagaaaaccgccgtagtcgacggtatcttcgaggaaatttcactggaaaagtataaaggtaagtacgttgttctagcttttgtcccattggctttttcatttgtctgtccaactgagattgttgcgttttccgatgccgccaagaaattcgaagatcagggcgcccaagttttatttgcctccaccgactctgaatattccttactggcatggaccaaccttcccagaaaagacggtggattaggtccagttaaagttcctttgcttgctgataagaatcattccttatccagagactatggcgttttgattgaaaaagaaggtatagctttaagaggtttgttcataatcgacccgaagggaatcattagacatatcactatcaatgatttatctgttggcagaaacgtcaatgaagctttgagattagtcgaaggtttccagtggactgacaaaaatggtacagttttgccatgcaactggaccccaggagccgccaccatcaaacctgacgttaaagattccaaggagtatttcaaaaatgccaataattaatcttcgcacgataacgctaggccctattaaataattaaaaatacatcaccctatatatgataagaaagatggttttgtattattatgaaattgacttgaaagaatagtgtaacaaaagaaaaagaaactgtaattgaagaatgatatgcatttctatgtgtatattaacttaatcatctttatatccagaagacgcaaatgaccattcgacgtatttttcccatgcaggtttgttttcgtataatctgcctgcaagatccaaataacttcctactgttaacgaatccattgagtatggtttct

SEQ ID NO: 260 - DNA, 1581 bp, Saccharomyces cerevisiae
gattgtttaactatctcgccatatttagtgagggaagcgcgaactgtcgttgattgtttatgtgtttattttatgtttatcgttcttagagggtggcgcgcactgtgcgcgcatatgtgggccatacgcagacatatataaagaactaagaaaaggtgaaatgggactctacgatggcgctaatggtaaggtctcttttctatttgcctaattcagatacaatatataattgccaacctcaaagaagaagaattatgggcatattgaccttctccggtttccctcccgcgctctcgtatccgtctgcatttgacctcgagcaagcgctccactatgtctatatgtttaccagtaaaacttcttaacgtttgtgatattttttgaacttcaaccacattcagtatgcgtgtgtatataaagatattcctgatagcactatgtttatctttatacaatatacaaaaggtcacccaggacgagcagcgcggctatttttctatcattccgtgaatagcgaccaacggtcggcggctatttttttttttgcaattttttcgggatgggttccccggcaaaagctagccccggagatttttaattacgtaaagaaacaaggggccggatgttgctgctattggtatataaagagagaaggagagatatagaaaattgtgcttctagattctcgcagtaggatgagataaatttcaaagaagcaggaagcaaaggatgtttagtagaatttgtagcgctcaattaaagaggacggcatggacccttcctaagcaggctcacttgcaatcacagacgattaaaacatttgccacagcacctattctgtgcaaacaattcaaacaaagtgatcaaccaagactaagaataaactctgatgctcctaactttgatgctgacacaacggttggtaaaatcaatttttacgactacttgggcgactcttggggggtcttgttttctcacccagcagatttcacccctgtctgcaccaccgaagtcagcgcattcgccaaattgaagccggaattcgacaagagaaatgttaaattgatcgggctttcagtggaagatgttgagtcccacgaaaaatggattcaagacatcaaggaaatagcaaaggttaaaaatgttggtttcccaataattggtgacacttttagaaacgtggcattcctatatgatatggtagatgccgaaggattcaaaaatatcaatgatgggtcactgaagaccgtgaggtctgttttcgtcatcgatcccaagaagaagattagactgatttttacctacccttccaccgtcggaagaaacacttctgaagtgttaagggtaatcgacgccttgcaattgactgacaaggagggcgtagtaactccaattaattggcagccagctgacgatgtcattattcctccctctgtctccaatgatgaggcgaaggctaaatttggtcaatttaatgaaattaaaccctatttaagattcaccaagtcgaaataagctttgaaataaacgactttactatatacaggtatatgaagtatctctaactaaaacttttatcta

SEQ ID NO: 261 - DNA, 1572 bp, Saccharomyces cerevisiae
ctgatatgagcgtgcgtgtgagtgactttacacttgtctatccacgtcctgaagttgttcgtgttctttggatattcgtgttcaagctaataatgagcctttaaggtaatacaatttataaaccaccaccttggcctcgatctattgcgcttatgttgtctattagtaatcaagaaaagaaccctaaatcatcggcgtcccctgtggggctctcggaaaaaccggtcctgacgtcactgaaaagatttcggcacatggtcatgggaccagagaaaaattaatccgacatgtggaatatttccttccgttaaggtagtgagcgcggattttttctgatttgtaattatacggggagctctggccaaaaaggtcagtatttggtgatgaagttgaatatcatcttttgattttcttctgtatcattctttttctttttccacaccccttccggacggtattcacatattgttgagaggttaaatgaaaaataaaggggtggaaaattaaggacgagatgtaagggaaaagcataaacgaaacattatataaaggagcacaatttcctctcccttgccaattgtgcatataccgtttctttataacgaaatttcaacaaaccagaacaacacaagtactaccaataaccacaacaaaacatgtctgacttagttaacaagaaattcccagctggcgactacaaattccaatacattgctatcagccaaagtgatgctgacagtgaatcttgtaagatgccacaaacagttgaatggtccaaattaatttctgaaaacaagaaggttatcattaccggtgctccagctgctttctccccaacctgtactgtcagccatattccaggttacatcaactacttggatgaattagttaaggaaaaggaagttgaccaagtgatcgttgttactgttgacaacccgttcgctaaccaagcgtgggctaagagtttaggtgttaaggacaccacacacatcaagtttgcctccgacccaggctgtgctttcaccaaatccattggtttcgaattagccgtcggtgacggtgtttactggagtggtagatgggccatggttgttgaaaacggtatcgttacttacgctgccaaggaaaccaacccaggtaccgatgtgaccgtttcctcagtcgaaagtgtcttggctcatttgtagatgctatgtaatagacaataaaaccatgtttatataaaaaaaattcaaaatagaaaacgattctgtacaaggagtattttttttttgttctagtgtgtttatattatccttggctaagaggcactgcgtatacttcaaggtacccctgtgttttgaaaaaaaacaacagtaaaataggaactccgcgaggttcaggaacctgaaacaaaatcaataaaaacattatatgcgtttcgaacaaaattaaagaaaaagaataaatatagattaaaaaaaaaaagaagaaattaaaagaatttctactaaatcccaattgttatatatttgttaaatgccaaaaaagtttataaaaaatttagaatgtataaataataataaactaagt

SEQ ID NO: 262 - DNA, 1129 bp, Glycine max
cgcgtttggctttagcatttagcattttctctctctctctctccacgctgttactttatcatataacctgactcaccccacccaatcctattcccatcccatttgaacctctccttctcgcagagtgagcgagcaagcgaatatcccaatcccacaccaatggcatgctcagccacctctgcttccctcttctccgcaaacccaacacccctcttctctcccaaaccctctctctccctccaccttaaccctctccccacgcgcccttctccctccctcacgcgcccttctctctccctcacgcgcccttctcactctcgccgctccttcgttgtcaaagcctcctccagcgagcttccgctggttggtaacaccgcaccggatttcgaagcagaggctgtgtttgaccaggagtttatcaacgtgaaactatctgattacattgggaagaaatatgttgtgctcttcttctacccgttggacttcacctttgtctgccccacagaaatcactgctttcagtgaccgacatgcagagttcgaggcactaaatactgagatattgggtgtttcagttgacagtgtgttctcgcaccttgcatggatccaaacagatagaaagtcaggtggccttggtgacttgaactatcctttgatttctgatgtcaccaaatccatatcgaaatcttatggtgttctcattcctgatcagggaattgcattgagaggattgttcattattgacaaggaaggggttattcagcattctaccattaacaacttggcaattggtagaagtgttgacgagacaaagagaactctccaggccttacagtatgtgcaggagaacccagatgaagtttgccctgctgggtggaagcctggggagaagtccatgaaaccagaccctaaacttagcaaagactactttgcagcggtgtagctaggataatagttaagagtggctatctgcatctgtatcaatcagtgaattgcaaaagggtcttgttttttttaatgttttgtaagtccttaaattttgagccgcagggtttggtaatatgcgtgctggtgtactggattttgaagtgtactatgtattaatttgcaatttctgttcattaaaaaaa

SEQ ID NO: 263 - DNA, 996 bp, Glycine max
atcctctctgtatctttggttcagcagccattagcgatttcccttatctctctccatcttaactccaagcacaagaatcatcttcccatttcgtttctgaccaatggcttccctcactgtcccaaaccattgtgttcccactttgcttcgcactcactctctcaactacccatcttcccaaaacctcccacttccttccgcgccatcaaattctcaattttttggcctcaagctatctcattcttccttttccacaattccctcttcttcttcttcactcaaaggctccattttcgccaaggtgactaaaggttcaaagccaccgaattttacgctaaaagatcagaacgggaagaatgttagcctctccaacttcaaaggaaaaccagtagttgtgtatttctaccctgctgatgagacccctggctgtaccaaacaggcttgcgctttcagggattcatatgagaagttcaagaaagcaggagcggtggttgttgggataagtggtgatgatgctgcctctcacaaggcatttgccagcaagtacaaacttccatttactttgttgagtgatgagggtaacaaggtgaggaaagaatggggagtgccaggtgatttctttggatcattgcctggaagagagacttatgttcttgacaaaaatggggtggttcagctcgtctacaacaatcagttccaaccagaaaagcatattggtgagaccctgaaaatacttcagagtctttgagacattctgattcttttgttggctatcttagctggcctgattcagagtcagacaagtatgtaactatgaattgtaagtttgtaaccactgtaattatgtagctgattttggagcctttgatcacattcacatgggggtgatgatatgtattctcctatagagagcaaacatttataacctctccggatggaataatgccttcatttgccacaaatacaatcagattatatctgtatcttttgcaaaaa

SEQ ID NO: 264 - DNA, 972 bp, Zea mays
aagcgcttcgcaagcacaggcagtgatcggcaaccaaatccggacagtcttgagctctctcagtctcagcatttcagttcccagattcacatagccccagccccacaagtagcgaaatggcagctgctccgttcgcgattgccggccggctctcccccgttgcgcgcctcccggtccgcgcctggaggccggcgcacgggtttgcgtcgtccgggagagcccgctcgctcgccgtggcgtccgcggcgcaggagaacagggacaacagtgtcgacgtacaggttagccagaacggcggcaacaggcagcagggcaacgccgtgcagcgccgcccgcgccgcgcgacagcgctcgacatctccccatccccgttcgggttagttgatccgatgtcgccgatgcggacgatgcggcagatgctggacacgatggacaggctgttcgacgacgccgtggggttccccatggggacacggaggtccccggcgaccaccggcgacgtacgcctgccgtgggacatcgtggaggacgagaaggaggtgaagatgcggatcgacatgccgggcctcgcgcgcgacgaggtgaaggtgatggtggaggacgacacgctggtcatccgaggggagcacaagaaggaggagggcgcggagggcggcagcggtggcgacggcgacgggtggtggaagcagcgcagcgtgagctcctacgacatgcggctggcgctgccggatgagtgcgacaagagcaaggtgcgggccgagctcaagaacggcgtgctcctcgtcaccgtgcccaagaccgaggtggagcgcaaggtcatcgacgtgcaggtccagtagacaaactgagctgtcacgacgggtctttgtgtagcactagcgtgggttgggctcttcgcgccgaccgtatcagtactcgtgacccaacgtgtggaataatgtgaataaataaacgcttcaattctgctattcc

SEQ ID NO: 265 - DNA, 943 bp, Zea mays
ccacgcgtccgacactgggtaggaagagcgcagaaaaaggaagcagcagctttgatcgggtggagtttcttgctcactgatcgtcgagtgaagcctttgtggtccgtgacgatgtcgaggagagccgcagcgttgttgctcgcgtgcctcgtcgccgtgacagcggcggcgctggcggacggcgcgctgctcccgtggttcggcgacggccggcgcgggctcgacgaggcagcggtgaccgacgtgggcctcctggcggccgacccgttccggatcctggagcacgtccccttcggcttcgaccgggacgacgtggccatggtctccatggcgcgcgtggactggcgcgagacccccgacgcgcacgagatcgtggtcgacgtgcccgggatgcgcagggaggacctcaggatcgaggtcgaggacaacagggtgctgcgcgtcagcggcgagcggcggcgcgctgaggagcgcaagggcgaccactggcaccgcgaggagcgctcctacggcaggttctggcgccggttccgcctccccgagaacgccgacctcgactccgtcgccgccagcctcgacagcggcgtcctcaccgtgcgattcaggaagctggcgcccgagcagatcaagggcccgcgcgtcgtcgggatcgccggaggagacggtggcgccgaggcgaaggagagcatcggaactggcgccggagatggtcatcagaccaagaaggtggagctctgaacagtgaggtgggaattgggatgactcaatgacggagatggctctgcgcgtgtgcgtagttttactagtttatgtgttcgcgtttttcttttttgtgacagcgtatatgcacttgtatggagtggaagtgtgccatgttttactgaggaataaaaacctacagtactagtgtactaaaaaaaaaaaaaaaaaaaaaaaaaaaaag

SEQ ID NO: 266 - DNA, 937 bp, Zea mays
cggacgcgtgggtaaacgtcgaccattatgggaccttacagcaccgccgtcgccgtaagcgcatcgccggtcctgcaggcttcctcactcttgacgcgagcccgtggttcttggaggcccacggtggcggcgttgcggctttctgcttccgtgaaatgccgtcggcgggcactcaccgtgacctgtgcgctcccggagaaagaacggccggcggcattcaacatcccgcccactgctctgctgtgccccgtgcccccgccggacggcaaggaacggtgggacatcaaggaggaagatgaccgcgtcacgctgtggctccaggtgccagggctgtcggcgagcgacatcgaggtgaccaccagcgaggacgtcctcgagatcaaacgcagggtcgtcgccccacagcagccggcgcccgtggacgcgcacggcgtcggcgcgttccacatccggctgctgttgaccaaggagtacgacggcagcaacgtcacggccgatctcaaggccggcatgctggaggtcaccgtccacaagaacccgcaacgccccggcgaacgcgccgtgatgatgggggcgaccaagcccccgcccgagccccgtcaaaacgaggagagcagtaccaaccaaaggtcctcgaccgcaagaaaggaaaccggaacccccatggggagacaaaatccaaatggagtctagctggttgagggctcggaccctgctttgaataagcttctcatttctagctgcggatggactcaaaccagcaatcgccttctgttatatcaattgcctggagagagcttacgctgcttgtagtatcatgtgtgtttccttaaaaaaacccttctttgtttctttatttattatgagggtttttttttggtgtgcggtcacacagagtgaaaacaattccattttctaagcaaaaaaaaaaaaaaaa

SEQ ID NO: 267 - DNA, 862 bp, Zea mays
ccacgcgtccggaatcacacaacagcagctcaaaaaacccaacacacctcaacaagcagagcaaagacccgggattcgccggcgcggtagcgagagcgagagatggacgggaggatgttcggtctcgagacccccctgatggtggcgctgcagcaccttctggacgtgcccgacggcgacgccggcgcgggcggcgacaaggcgagtggtgccgcggcgggcggcgggcccacgcgcacctacgtccgcgacgcgcgcgccatggcggccaccccggccgacgtcaaggagctcccgggcgcgtacgcgttcgtggtggacatgccggggctgggcacgggcgacatcagggtgcaggtggaggacgagcgggtgctggtgatcagcggcgagcggcgccgggaggagcgcgaggacgccaagtacctgcgcatggagcggcggatgggcaagttcatgcgcaagttcgtgctgccggacaacgccgacatggacaagatctcggcggtgtgcagggacggcgtgctcaccgtgaccgtcgagaagctgcccccgcccgagcccaagaaacccaagaccatcgaggtcaaggtcgcctgaggtgggactaggtcgaccgatcgtggctctgaagatgtgggagcagtgccagcgagttgtgaggacctctacctgtgtggaatgtggcgaggaataatcgtagtctgtagtgggggtgcttctggtgtgcgtgtttgcttccttcggtcgcggtgtctgtctaccaattcctatctgatgtatcggcttcggtttcgtatgaaccatgccggatgctttcagtaaaaaaaaaaaaaaaaaaaaaaaaaaaaaaaaaaaaaag

SEQ ID NO: 268 - DNA, 958 bp, Zea mays
attcggctcgaggagagaagtccagacgattcagcgaccgctcttgacgaagctataaaagcgtcaccccacaaggccacaactcgtcccaacccaatcccaatccagagcgaagatcgcgatcagagcaggagcaggcaacgcgcaccgaaatcttccaatccacaagactcgctacttcgcagttggcagactcgcccgcagcgagccgctagcaaccaagcagaaatgtcgctggtgaggcgcggcagcgtgttcgacccattctccgtggacctcttcgaccccttcgacagcgtgttccgctccatcgtgccgtcgtcgtcgtcggcggcggcggcctccgagaccgccgccttcgccagcgcccgcatcgactggaaggagacgcccgaggcgcacgtgttcaaggccgacctccccggcgtgaagaaggaggaggtgaaggtggaggtggaggacggcaacgtgctgctcatcagcgggcagcgcagcagggagaaggaggacaagggcgacaagtggcaccgcgtggagcgcagcagcggccagttcgtgcggcgcttccgcctccccgagaacgccaagaccgaggaggtgagggccgcgctggagaacggcgtgctcacggtcaccgtgcccaaggccgaggtcaagaagcctgaggttaagagcatccagatctccggctgaagaagacatggacgcgaggtgaatggtcgcgtcgcgttcgcgtcgcggcgtcgggtcttgggtttcagcgacgcgactcgtgtgtgtggtactgtggttgctctgctttggtatgtctggtgtgtacgtgtgctgttcagtgtttcgtggtcatcgtctgtacattgtgctgttcggtgagctccccgactcagtgtgttgtgttctgcgagtgaataaataaaaacaaaccagctgtcgtctcgtgtaaaaaaaaaaaaaaagg

SEQ ID NO: 269 - DNA, 904 bp, Zea mays
cttgctgatcacagctagtagggagcgagagttaccttgaaatcaaggcagtacgtacgagtacgatcgacaatgtcgacggtcacttcttgcacctttctgagcctcgggtccccagtgcggccggcagtctcctccgcgagaccggcggcggcggcggtggcttcccgacggaggccccggtccctttctgtgtgctgcgaggccggccggaaaggggatcacaacccaaagacggatctgcatccatttaacatccctgccttcgttctggtgcacccggtggcaccacgtgaggaacggtggcagctggaggaggacgccgacaaggtgaacctgtggttcgaggtgcctgggcagtccaaggatgacctcaccgtggagatcgacgaagacgtgctcgtcatcaagaagaggaaggagctggtgggccagcggagccctgctggcggtggcgtcgcagagtacggctcgcagtcccagcagcagagcaggaggggcaccgcagatggcaaggagctgccggcggcacagcagggccaggccggcgaggtggtctatgcccggatgctcctcccggcggggtacagcagggatggcgtgcaggccgagctcaagtccggcgtgctcagggtcactgtcgtcaaggtcacggagcgagcgcgcaggaagatcgacgtccccattcaagtcaagtagatatgcgtgtatgtgtatgcacattcgtcctgcgcacgtgtcagcaggggtgctttatttacatctgtctcatgtccaacatgcagactacagcggtcgatctcaccacgtactcgatcgcgtcgactacacatgttcatgggctttgtgttcccatgtactcatcaatcaataaaatgagcatatgtgttctccgccaaaaaaa

SEQ ID NO: 270 - DNA, 3598 bp, Saccharomyces cerevisiae
cttccgagacgttgcatcaaaggccaagacatggcattagtcacccttgttgcaacgatagacgcatactacggacccctcaaacctccctacctgcccgtcgctatcgcattaattttctttttttccactatttttccggcccgccacacctccgactacaagacgccacatctacgttttgtcacacaaaatccaggacaatagccgtctgcaaggcaccaaggttttcagcagttgcttgttgctgctgcctgttaatcacatcaaacccactgcaagggcagtcgatgggtctgtaaacgccttagcaatcgttgttgaagaaagagagctcttatcatcatggggtgcccatcatttttctttttttttcaaattttgggctattcaatgaattgtttcgactatatatggacaatcatcggaagctgtgtattcttggtaaaaagttttcgactgtgtggcagaaaataaccgcaacaattatataacgtcacagaacacatgagtaccatttatagggagagcgactcgttggagtcggagccctcgccaacgccaacaaccattcctatccagatcaatatggaagaggaaaagaaagatgctttcgttaagaatattgacgaggacgtcaataatctcactgcgactactgatgaggaggaccgcgatccggaaagccaaaaattcgacaggcattccatacaggaggaaggtctcgtttggaagggcgaccctacatacttgcccaattctccatatcctgaagtgagatcggcggtgtccatcgaggatgaccccaccatccgcctcaaccactggagaacgtggttcttgaccacggtgtttgtggtagttttcgccggtgttaatcaatttttttccctgagatatccatcgctagagatcaacttccttgttgcacaagttgtttgctacccaattggtaggatactggctctcttgcccgactggaagtgttctaaagtgccatttttcgatttaaacccgggcccatttaccaaaaaggaacacgccgtggtcacaattgccgtggcgcttacttcctctactgcatacgctatgtacattttgaacgcccagggaagcttttacaacatgaaacttaatgtcggatatcagttcttgttggtttggacatctcaaatgattggttatggtgctgcaggtcttaccagaagatgggtcgtcaaccctgcaagctctatctggcctcagactttaatttcagtgtccttgtttgattcgttgcactcgagaaaagttgaaaagacagtcgcaaatggttggacgatgccccgttacaggttcttcttaatcgtccttatcggatcgttcatctggtattgggtacctggattcctctttaccggtctgtcctatttcaacgttatcctatgggggtcgaagacaagacacaatttcatcgctaacacaatctttggtactcaaagtggtctcggtgcgttgccaattacatttgactacacccaggtttcccaagccatgtccggctctgttttcgccacaccattctacgtctccgccaacacctatgcatcagtgttgatattcttcgtcatagtgctgccatgtctttattttacgaatacctggtatgccaaatacatgcccgtcatttcaggttctacttatgacaacactcaaaacaaatacaacgtaacaaagattcttaacgaggattattccattaatcttgagaaatataaggaatactcaccggtattcgttccattttcctatcttttgtcgtatgctttaaattttgccgctgttatcgccgtttttgtccactgcatcttataccacggtaaagatattgtcgccaagtttaaagaccgtaaaaatggtggcactgacattcacatgagaatctactccaagaactataaggattgtcccgattggtggtatttacttttgcagattgtcatgatcggtttaggatttgtagcagtgtgctgtttcgatactaagttcccagcttgggcatttgttattgcaatattaatttcccttgtaaatttcatcccgcaaggtatcttggaagcaatgactaaccaacacgtaggtttgaatattatcacagaattgatctgcggttatatgctgcctttaagaccaatggcaaacttattattcaagctatacggatttattgtcatgagacaaggcttgaatttgagtagagatttgaaattagccatgtacatgaaggtttcccctcgtttgatctttgccgttcaaatctatgccactatcatatcaggcatggttaacgttggtgtccaggaatggatgatgcataatatcgatggcttatgtaccaccgatcaaccaaatggcttcacttgtgctaatggtcgcacggttttcaatgcttccattatctggtctttgccaaagtatcttttctcatcagggcgcatttataatccgctgatgtggttcttcttgattggtttgctattcccactagccgtttatgctgttcaatggaaattccctaaatttaaatttgctaagcacattcatactcctgtatttttcacaggcccaggtaatattccaccaagcacaccttataactactcattattttttgcaatgtcattctgcctaaacttgataagaaaaagatggagagcttggttcaataagtacaatttcgtcatgggggccggtgttgaagcaggtgtggcaatctccgtcgtcatcatcttcttgtgtgtacagtacccaggtggtaagctcagctggtggggaaacaacgtttggaaaagaacgtatgataatgattataaaaaattttataccttaaagaaaggtgagacatttggttatgataaatggtggtaatcatgaaaacataataataaacctgcagaggttcatatcaagttttaattcaaaatttggcacacgtaatagcaaactttagttcatattctgtaatattaagaaattattttcttttctgtcatcctttcatattgcttaacttgaaatactttatctcaacgtttaattatactgttaataatgatatttctatattttagagcacattttggtcgaaacattcaaagcgacccctgcaatatttagcggaggcatctcatccgccttatttttgtaaattaacgatctttagcgcatgccaagtgttcgataacaaattccgactttaagaaaaaacgggcacgagcatacaataaaaaaacttttaaaatttatacctccttgaggtgttctattttatgatagatccgtatttcagataccaaatgttatatacacttttttaagcttggatttttttctgaatacacggaccttacaaatgctataaaaaaaaaaaagattctgtaacttgtaaaattaagggccctaaagggccatatccacctcacatttcactgtgatataagtaggatattttgacttcaatacttaaatttacaagccaaatattttattatgacttcaaaaaaaaaaaggcttctagcattcagaaataatgctgactgtgaaaacaactataactaca

SEQ ID NO: 271 - DNA, 2025 bp, Zea mays
cggacgcgtgggctctcctctgctaggcacttgtcacaggaaggccccctcgtgttcgcgtcctcttgccttcacacccgggacgggagttccttgctagggggagagcttcccttgctcgtgtcctcactcacgcactcacagactcactcattcaccgacggtcccagtggactgaggtgagacttcggtcggagccggccggacggaacatacaggatggccgccgcgccgccgcccaaggccgacgagctccagccgttcccgcccaaggagcagctgcccggcgtcgccttctgcatcaccagccccccgccatggccggaggccatcttgctagggttccagcatttcgtcgtcatgctgggcaccaccgtcatcatacccagcgcgctcgttcctcagatgggaggcggaaatgaagagaaggctcgggtggttcagaccatactgttcgttgctggcataaacaccctgttccagacgttattcgggacgcgccttccggtcgtgatgggcggctcgtacgtcttcgtcgggccgaccatctcgatcgtcttggctggacggtacagcaacgaagcagaccctcacgagggcgctctcctcgttgcgtcgacgattcagatcatacttgggttcagtggcctctggcgcaacgttgtcaaattactgagtccgctggcagctgttcctctggtatcactggtcgggttcgggctctacgagcttggctttccaggggtagcgaaatgcgtcgaagttggcctcccagaactgctcctgttggttgtgttttctcagtatctgcctcaggttctggacttcggcaagtccgtcttcagccggttcagcgttctcttcaccgtcgccatcgtgtggctgtacgcctacatcctcaccatcggcggcgcttacaagaactctccgcccaagacgcaggtgcattgccgcgttgatcggtcgggccttatttcaggagcaccttggataagtgttccctatccctttcagtggggtgctccgacgtttgacgccggagaagctttcgctatgatgatgacttcgttcattgctcttgtagagtcaactggcgccttcatcggtgcttcgagatatgcgagtgcaactatgattcctccatcgattatcagtcggggcgtgggatggcagggcattggtctgttgctcgattcatttttcgggacagcgaacgggacatcggtttcagtagagaatattggactgcttgcgttgacacgcattggcagccggagagtggtgcagatatctgcaggcttcatgattttcttctctgtccttggaaaatttggagctttgtttgcgtcgattccgctgcccgtatttgccggcatgtactgtctcttcttcgcatatgttggtggcgttggcctgagcctccttcagttctgcaacctaaacagctttaggaccaagttcatcatggggttcgctttcttcatgggcctatcggttcctcagtacttcaacgagtacacagccgttgcaagctatggtccggtgcacactggcgccagatggttcaatgacatgatcaacgtgccattcacgtcgaagccgttcgtcgctgggttggtagcctatatcctggacaacaccctccaggtaaaggagagcgcggtgcggaaggacaggggcaaccactggtgggagaagttcaggagcttcaagaaagacgcgaggagccaagagttctactcgctgccgttcaatctgaacaagttcttcccgtcggtctgatctcaaatggcgccgccgctgaatcaattctggaagcaacccttgttcatatgggcgttaatgaggaacataattctgctggtctggccagtggaagcttctgtgtctccattgttggtcaattttgtgtgttttcggacgagatgggagtaattgaactgtagaaattattacgattgaagtatatcgcgttctttttgtaatctaaaaaaaaaaaaaaaaaaaaaaaaaaaaaaaaaaaaa

SEQ ID NO: 272 - DNA, 2071 bp, Zea mays
ccacgcgtccggaaagggaaggcgaggaggaggatggccggaggaggggcggcgacgccgccgaagcaggaggagctgcagccacacccggtgaaggaccagcttcccagcgtgtcctactgcatcacaagcccaccgccctggcctgaggctgtcatccttggattccagcactacattgtgatgctgggcacatccgtcatcataccaagtgctcttgttccccagatgggaggaggaaacgaggagaaggcccgggtgattcagacgctgctgttcgttgccggcatcaacaccctatgccagtcattctttgggactcgcctcccagcggtgatgggtggatcctacaccatcgtcgcacccaccatttccatcatcatggccggccgttacagcaacgaagcagaccctcgtgagaaattcttgcggaccatgcgaggaacacaaggcgctctcatcatcgcgtcgacaattcagatcgtgcttggtttcagtggcctttggcgcaatgtcgttaaattgctgagcccattgtctgctgtacctctggtttcgctagctggatttgggctatatgagctaggttttccaggggttgctaagtgtgtggaaattgggcttccggaaatcatcctaatgctcatattttctcagtacttacctcatgctgtccatgcggcaaagcctgtgttcgaccggttttctgtgattttcacaattgcgattgtatggctgtatgcgtacattctcacggttagcggtgcctacaagaatgcccgaacaaagacacaactccattgccgagttgaccgctctggacttgttggtggagctccttggattagtgtcccatatcctttccaatggggggccccaacatttgatgctggtgaatcatttgcaatgatggtggccgcatttgttgctcttgttgagtcatctggggccttcattgctgtgtcaagatatgcaagtgcgactatgatacctccttcagttcttggtcgtggcattggttggcagggcatcggtactttactgggtgcgttttttgggacagctaatggaactgcagtgtcagttgagaatgctggtctgcttgctttgacacatgttggcagccggagagtagtccagatatctgcaggcttcatgatcttcttctctgtccttgggaaattcggggcgatctttgcttcaatcccactgccgatattcgctgccctgtattgcattctctttgcatacattggtgcttgtggcctgagcttccttcagttctgcaacctgaacagcttcaggaccaagttcatcatggggttctccttgttcatgggcctgtcagtaccccaatacttcaacgagtacacgtccgtggctggctatggccccgtgcacaccggcgcccgatggttcaacgacatgatcaacgtgcccttctcgtcgaagccgttcgtggctgtgctggtggccttcttactggacaacacgatccaggtgcgtgacagcggcgtgaggagggacaggggctaccactggtgggacaagttccggagcttcaagacggacagccgcagcgaggagttctactcgctgcccttcaacctcaacaagtttttcccttccgtctgatcctgcagggtctgcacactcttcctcgcagccgcagtagctcgggctggagtcaggcaagaaatgatcctatgcagatgatgctggagcatggactgatggcgttttgtacattcaggggtgaactgaactgtgcaggttgcaggggatagtgctctgggtagcatcagtattccctagtaaccgaaattgaaaaggccgcctgttaaacttctgcaaacactagcatgattacgtctcctagtgctactgttgtttagattggaaaacatggaactcaacggtaagcatagatttaccttgaagcaacccttttcttttgcttagaaagaatttgtgttggggatttttttttcaccatgtaagaactgagagcacttagattacaagggagggtgaataggtgatcctgcaaaaaaaaaaaaaaaaaaaaaag

SEQ ID NO: 273 - DNA, 2255 bp, Zea mays
gcaaggcaagtagccgctgcgcggtgctgccacctgacctgactgccgtcccggtccccggtccatccgaacgccgttacggggccgcccaccgcgacggaacggaaaggtgcggtcaacccaccccgtcccagtcccatcaccgccgggggccgggtggataaacaaacccagcggccccggccccctgtccgcctcattcccttccttcctttgctcctcccctgcctcgcctctctcccctctcctcgcctccagctcctgctcggcccgctcgcgtccagctgcgcgcgcgcctgcggtggccgtgaaggacagcccgagggacgcgccgggtgcactgatctgggggccgcgtgtccccggtggtggggcgaggcggcgccggcttccaggaatgggcagcttgtagtggctgtttcttttgcatatgcgctttctattgttgttgtcatttcaaaggaggccatagtctcctggattttgtatgccttgttatctggaattggtgaccatagatgtcatttcgtagcatagtccgtgatgttagggatggcttcggcagcttgtcaaggagaagctttgaggtgaccctcgcaagcatttatggccttactgggcatcacaaagggaagacccagagctcatcacatgtgctcgacgactcaccttccataattcgtgaaagtcgatgggcgaatctacctcctgaactcatccgtgatatcatacggagactggaggctgatgagagcacctggccagcgcggaagcacgtcgtttgcttcgcagctgtttgtaggacatggagagaaatgtgtaaagagattgtgttgagcccggagttttgtggcaagctcaccttccctgtgtctctaaaacagcctggtcctcgagatggaaatacaatggtccagtgttttataaagaggaataagtcaaaatccacttaccatctctacctgtgccttagcaatgttgttacttcagaaagtgggaaattcctcttatcagctaaacgacaccgcaaaaccacatgcaccgagtacactatatcaatggattctggcaacatctcaagatcaaaaagaacctacattggaaaaataaggtctaacttccttggcacaagatttttaatttatgatacacaaccgccctataatggggctgtagttcctcctgccggaaggacaagcaggaggttcaactccacaaaagtctctccaaagctgccttcagtcagttacaacatcgcacaggtatcgtatgagttaaatgtccttggcacgagaggtcctaggcggatgcgttgcatcatgcactccatacctgcatcatcagtggagccaggtggcacagtgcctggacagccagagcagattgtacctcgagccctggaggattcattccgcagcacggcttccttctcgcagtcgttccgtagcactgcctcattctccaagtccatcatggactcatccatggatttcaatagcgctcgcttctctgacatcgctggcagcagcgctcgcttcacgggcgttcctggtagcagcgctcgcttcgcgggcgttcctggcagcagcgctcgcttctcgggcattgctggcgccagactggacaacgacgaggagagtgaaaccaaggagaggccactggtgcttcgtaataagccgcctaggtggcacgaacagctgcagtgttggtgcctcaacttccgtggccgtgtgacaattgcctcggtgaagaacttccagctgatcgccgcggctaccccgccaccggcaggtgcgccaaccccctctcagcctgccccgtcagatcccgacaaggtgattctccagtttggcaaagtggcaagggatatgttcacgatggactatcgctaccctctctcggctttccaggcctttgccatttgtctgagtagctttgatacaaagttagcctgtgaataaatggagaagaacaaaggtaaaggagaacatcaggttgcttgcattaggccatcagtgtacctctttccatctggctctcgtgttgccttggttgtatttgtgcttaatgtagccatgaatttggtggcccatatatggacgcatgtgttgttgttggccctctcccttagaagtgattaaaagttgcatttggaccacatgttacccgatctgtaatatacttgcagtggcatcgcatgccgcgtgataacaaagttcccgttcgtgattggacttgtatggttaaaaaaaaaa

SEQ ID NO: 274 - DNA, 1562 bp, Zea mays
attcggctcgaggtgggattgtgggaagatgcctcgggatggcgcgcaggcggcgccgccaccggagcgcggcgagatggacgaggtggtagaggcggacccggatacggaggcggaggatcaggaggagaggtgggcgaggctgctgccggagctgctctccgacgtggtgcggcgcgtcgaggcgtccggcggcgagcggtggccggcgcggaaggacgtcgtctcctgcgcctgcgtgtgccgccggtggcgggaggccgccgtctccgtcgtgcgtccgccggcggagtccggcaagatcaccttcccctcctcgctcaagcaggtcgattgcatggcttcccttatatggcgtcatcagcggttttgatacgtaccggccattcagatatttaggatatagtttgagaagtttcctggccaattcagtgtcgtagtgttttttatttgacatctgtgtacctaaatcttacaccatttctcaaaacacagccagggccaagggagagaccaatgcagtgctttatcaagaggaataagaacaactctacattctacctctaccttggcttcacaagttcacctgtggataaagggaagtttctcatggctgctagaagatttaggcgtggtccccataccgagtacattatatctcttgatgcagaagacttatcacaagggagcaatgcatacatggggaaactgagatctgatttctgggggacaaacttcaaaatatatgatagcaagccaccatatgatggtgctaaagcatcaagtagtcgatctagtcgtcgtttcggaagcagaaggattagtccccaggtatcggctggcaattatgaagttggacaggtttcatacaaatacaacttgctcaaatccagaggccccaggagaatgtattgcactctcgaatgcccttcagcccaagagacttgggaaaactcactcaagacaaagttcaggcgccccctgggccccacaactttacgaaataaagcaccccgctggcatgagcacctgcaatgctggtgcttaaacttccatgggcgggtaacagttgcatcagtcaagaatttccagcttgtggctgctgccgaccccagtgagcctactaccaacgtggatgatgaaacggttctgctgcagtttggtaaggtcgatagcgatatgttcacaatggattaccggcaaccactctccgcgtttcaagcatttgccatcagcctcagcagctttgggaccaagctagcctgtgaatagcgatgcagtttgatgctcttcgtgtggctatatggtttgtgttggtggttgcttgcttgtttcttgttgttacgatgtgatccgttcttcgttttagttgagtatttatgtactatttgtaccacaagagatgtaataaactattgtattgtcaaacggatttgttcaaggaaattatgtgtaatgaacttttgctctagttccatgcaaaagacatttcaatgtacatctgttcatggtgaaaaaaaaaaaaaaaaaaaaaaaaaaaaaaaaaaaaaaaaaaaaaaaag

SEQ ID NO: 275 - DNA, 1695 bp, Glycine max
attcggctcgagcactatttaccccattttctctaaatccaaacaggccccaaaagaaagagagggaaaattctcttccatggcctcttcacgccctgccaatgtgggaatccttgccatggacatctacttccctcccacctgcgtcacccaggatgctttggagggtcatgatggggtgagcaaagggaaatatactattgggcttggacaggattgcatggccttctgctctgaggttgaagatgttatctcaatgagcttgacggtagttacttcacttcttgaaaaatttaatgttgatccaaagcaaattggacatttggcggttgggagtgaaactgttattgacaaaagcaaatcaattaagaccttcctgatgcaagtttttgaggcaagtggtaatactgacattgaaggtgttgattcaactaatgcatgctatggaggaacggctgctttgttcaactgtgtgaattgggtggagagtagctcatgggatggacgttatggacttgttgtttgtacagacactgcggtatatgctgaaggacctgctcgtcccactggaggagctgctgcaattgccatgcttgtagggccagatgctcctattgcttttgaaagcaaactcagaggcagtcacatgtctcatgcatatgatttttacaagccaaaccttgctagcgaatatccaattgttgatggaaaactctcacagacctgttatctcatggcacttgattcctgttaccggctttactgtgagaaatttgaaaaattggaggggaggcctttttcaatgtcagattctgattattttgtgtttcattctccatataacaagcttgtgcagaaaagttttggccgactatacttcaatgacttcttgagaaatgccagttttgttgatgaagttgccagggaaacccttgcaccatatgcatccttatctggtgatgagagttatcaaagtcgtgatcttgaaaaggcaaaccagcaagctgcaaaacatctatatgatgcaaaggtgcagcccagcacactaatcccaaagcaagttggtaacatgtacactgcatctctttatgcagcatttgcatctcttcttcacaataagaacagttcgttggtaggtaaacgggtagttatgttttcatatggaagtggtttaacagctacaatgttctccttccagcttcaagagggtcaacatccgtttaacttgtcaaacattgtaacagtgatgaatgtttcggacaagttgaagcagagagttgagattcctcctgaaaagttcgttgaaacattgaagatcatggaacaccgttatgggggtaaggactttgtgacaagcaaggactgtagctacttaactccaggcaccttctatctcaccaatgttgattccatgtacaggagattttatgccaagaaggactaggttattggttagttgatgatcgctgatatattcaaatatggagttaaaatgtattttcttatggttcacctgtatttgatcccataaggttgtgtatcaaaatgtttataagatgtttcatttttttgtggtgatcaggttgtaaccaaaataagaataagtttatttgcgaattggcaattgtttttaaatgcactaataatccaaatatattagtagtttcttcttgagtgcaaaaaaaaaaaaaaagg

SEQ ID NO: 276 - DNA, 2262 bp, Saccharomyces cerevisiae
aagcttcgtatatacaatagaaaaattttccatacaatattacataatactatagagtaatcatacccacaatctccatggctgcggtatcgtgtcgaaaatgaaccgggctattaattatacgagtgtgttgaaagtaggctccattcggcctcatcgggcggaactgtttgggtgcctcgccaattttcgtagccaaattactataaaaggtgcagcatgaaactctcaactaaactttgttggtgtggtattaaaggaagacttaggccgcaaaagcaacaacaattacacaatacaaacttgcaaatgactgaactaaaaaaacaaaagaccgctgaacaaaaaaccagacctcaaaatgtcggtattaaaggtatccaaatttacatcccaactcaatgtgtcaaccaatctgagctagagaaatttgatggcgtttctcaaggtaaatacacaattggtctgggccaaaccaacatgtcttttgtcaatgacagagaagatatctactcgatgtccctaactgttttgtctaagttgatcaagagttacaacatcgacaccaacaaaattggtagattagaagtcggtactgaaactctgattgacaagtccaagtctgtcaagtctgtcttgatgcaattgtttggtgaaaacactgacgtcgaaggtattgacacgcttaatgcctgttacggtggtaccaacgcgttgttcaactctttgaactggattgaatctaacgcatgggatggtagagacgccattgtagtttgcggtgatattgccatctacgataagggtgccgcaagaccaaccggtggtgccggtactgttgctatgtggatcggtcctgatgctccaattgtatttgactctgtaagagcttcttacatggaacacgcctacgatttttacaagccagatttcaccagcgaatatccttacgtcgatggtcatttttcattaacttgttacgtcaaggctcttgatcaagtttacaagagttattccaagaaggctatttctaaagggttggttagcgatcccgctggttcggatgctttgaacgttttgaaatatttcgactacaacgttttccatgttccaacctgtaaattggtcacaaaatcatacggtagattactatataacgatttcagagccaatcctcaattgttcccagaagttgacgccgaattagctactcgcgattatgacgaatctttaaccgataagaacattgaaaaaacttttgttaatgttgctaagccattccacaaagagagagttgcccaatctttgattgttccaacaaacacaggtaacatgtacaccgcatctgtttatgccgcctttgcatctctattaaactatgttggatctgacgacttacaaggcaagcgtgttggtttattttcttacggttccggtttagctgcatctctatattcttgcaaaattgttggtgacgtccaacatattatcaaggaattagatattactaacaaattagccaagagaatcaccgaaactccaaaggattacgaagctgccatcgaattgagagaaaatgcccatttgaagaagaacttcaaacctcaaggttccattgagcatttgcaaagtggtgtttactacttgaccaacatcgatgacaaatttagaagatcttacgatgttaaaaaataatcttcccccatcgattgcatcttgctgaacccccttcataaatgctttatttttttggcagcctgctttttttagctctcatttaatagagtagttttttaatctatatactaggaaaactctttatttaataacaatgatatatatatatattttttttataaagaattgtatatctatatttataacacaataaatctaatctcaacttttttctttaaagttaagcccaaccgattttttttctcattcataaccccgacgtgttttccatgtattcagacaatgctaatgttaaaggtggaatatcagccaatttatgtagaaccagtggcctgatgcgttgacaaaatgcggaaccagcaccatcatccgtgtcgttggataaaaggcacaaaaacgtacaggccactttagaaacatctgagagttcttgagggaatttgacctctggtatgctgttttgtcttgcaggtgtaatttccttagagtcattcaaaaatttggattttagtgccgaaatgggtacctgggattctctttccccgtctgcaatacccaaagctt

SEQ ID NO: 277 - DNA, 2181 bp, Zea mays
ccatcctaatacgactactatagggctcgagcggccgcccgggcaggtacacaaacgctagagagagagagagagagctggtggccggtgggacgtccgtggtggtggtggagttggatcggctgtgcttgttcctcgcttcttgctggatcagaggaggtcatgatcaactaatgcctattcatttattatggacttgcaccagttgttaaagtacagattaactggtgctaacgtctactacgaatttcctacagagaacaacttagcaaacactccttggccagctagtccactgaagtctgagttcagcagctcatcatacactcctctttcatcccagcttgagtgtgataatttgtctgcgctcagcaatactccagataaccagagctccacagaaaccatttcagcacaaccaatatcaccactggaagtagacagctcattcaaacaggcagctatccttcgggagaacacccaagtgagacctgatccattgtacacaacatcaaggcataatatgcaacacgctttacgagaaatagagactgttctgatggcacctgatgctgatgatgcagccactagcaccaagcatgaaattgaggaacataaacctgctcagctgatgaggcagcggtcaaggacatggagtcatgaatctaggcagccatcaccaggagttgtacggacacaacttgcatctggataccccacagcaagctatgagttccgcccagagaaacggctaagggagttaagggaggatccgcagagcatggtgaagcagctattaaccaagtgtgctgaagcattaagtgaggagaggatagaggagttccttaaccttgttcagcaagctcgtggagttgtatcaattactggggagccaatccagcggttaggtgcttacctccttgagggtttggttgctagacatgcaaactcaggtacaaacatatatcgtgccctgaagtgccgtgagccagagagtaatgaactcttgtcttacatgaagattctgtataacatctgtccgtactcgaagtttgggtatatggctgccaatggggcaattgcagaggcattaagaaatgaggacaggatccatattattgatttccagattgcccaagggacacagtggataacactgatacaagcgctagctgcaaggcccgggggtccaccacacgtgcggatcactggaatagatgacccagtgtcagagtatgcccgtggtgaaggtctggaccttgtagggaagatgttgaaaagcatgtctgaggaattcaggatacctttggagtttacccctctgcccggtatttacgcaactcaagttacaaaagaaatgctggacattaggtcaggcgaagcacttgctgtcaacttcactctgcagctgcaccacaccccggacgagagcgtggacgtgaacaacccacgggacgggctactccggatggtgaaaggcctgtctccgaaggtgaccacgcttgtggagcaggagtcgcacaccaacacgaccccgttcttgatgcggttcaccgagaccttggactactattcggccatgttcgagtcaatcgacacgaacctgccacgggacaacaaggagcggatcaacgtggagcagcactgtcttgccaaggacatcgtgaacatcatcgcctgcgaggggaaggaccgggtggagcgtcacgagctcctgggcaaatggcggtcgaggctgaccatggccgggttcagaccatacccgttgagctcgtacgtgaactcggtgatcaggaagctccttgcctgctactcggacaagtacaccctggaagagaaggatggcgcgatgctgctcggctggaagaacaggaagttgatatctgcttctgcttggcactgacagtaacgttttcagaagaccggaagtacacgtcaactcttacatatatgtatgtatgtatgtataatgaattacctggtctgctttccgcaaaaaaggacgccctttgttgtacatgtacatgatgctgtacccttagttttcctgaagtgcagaccagagaagagaatattgacattagattgtagctgctaagctgtatggtaattacagtttttcttttgctctcatgtattcacccctgtcatggacttcaaaaaaaaaaaaaaaaaaaaaag

SEQ ID NO: 278 - DNA, 1961 bp, Zea mays
ttcgcccttctactctgggctcagcggccgcccgggcaggtgccaaaagtccggaccacagctcgcgccgcccgccgcgccttgcccagacgtgcgctcccttctcccgcgccgtcgcctctgccctggccgacccgctgggcccagtgtgcgcagccctcccgggttaaggcggaggtgcttggggacccgctcccatggcgagcgccggcatcagcggcagcggggacgacgatgcaggagggaagctcttggcggatcgctaccagaagggcgaggtcctcggcgagggcacgtacggagtcgtcttcaaggccttcgacaccaagactggaaatacagtcgcggtaaagagaatctgggtagggaaggacaagaaggaaggtgttaacttcaccacattgagggaaattagactacttaaggagctgaaaggtcctaatattatagagctgattgattgtttcccttacaaggaaaatttgcaccttgtatttgagtttatggaaactgatctggaagctctcataaaagataagaacataatactgtctccagctgacacaaaatcatatctccagatgctgttaaaaggtctatcgttctgtcataagaaatgggtgatacacagggatatgaagccaaataatttactcattggtgccgatgggcagctcaagcttgctgactttggtctggcccggatgtttgggagtccaggaaggaacttcactcaccaggtctttgcacgttggtaccgggcaccagaattattatttggttcgaagcagtatggatctggggtggatatttgggccgctggatgtatttttgctgaactgcttactcgcagagcctttctccagggttctagtgacattgatcaacttgggaagattttcgcagcacttgggaccccaaaatcttctcaatggcctgacatggtttatcttcctgattatgttgaataccaatatgttgctgcaccaccgctacgtacattgcttccgatggccagtgatgatgctttggatcttttgtcaaaaatgcttacgtatgatccaaaagcaagaatcagtgctcagcaggctctagagcacaggtacttttcatcgttacctgctccaacaagaccatcacagcttctaaggtcacggtggaaaggagatcaagggaataacaagatgcccgatctgaacctgcagcatggccctctggtgctctctccgccaagaaagctacgtagggtgatagcgcatgaatggatggaaggtatgcacagggcagataaagtggacgagcatccttctgggatgaggcacaccgatgacatgcccagtcagaagagttctagaattccaatgtcagttgatgttggagctgtgtttggcacacgacctgcacctaggccaacattgaacagtgcggacaagtctcgtttaaaacggaaacttgatatggatccagagtttggatttgcggagtaaaagaaactttgttaacatgcaccattcttttcttactgagatgttggtttcgaaaatattctttgggagatatttccacagttcactcagaaaagaggatttgcattgaagccacaaaactgcaccgaaggattctgacacaatcaactgggctgttaccgacatcggctcacgaagaggaaaacaaaggagaggccattctaatttatcctgagtcgcatggggcattatagctaaccgattccgtaaagaaggctcttagaaacagcatgctctatgccatgcgagtggagagtgttatgtggaattgggggcatagaaacgctcgctccagttagaaatgtgtgtttgtgctaaatgtgatctactagtcctccattctccgtggtttcaatttccttcaattcttgtacggacacttaggtttgagcattcttcactcagtcactttacgtataaaaaaaaaaaaaaaaa

SEQ ID NO: 279 - DNA, 3154 bp, Zea mays
ctcgtccaatgagcgggacggggggcggtgagactagagagtggtggtgttcgagcagctgaaatgcacccgcgaggggctgagctccagcgagggccagcagcgtctcgagatctttggccccaacaggctcgaggagaagaaggagagcaaggtcctcaagttccttgggttcatgtggaacccgctgtcatgggtcatggagatggctgccatcatggctattgcactcgccaacggtggtggcaagcccccggactggcaggacttcgtcggtatcatcgtgctcttggttatcaactccaccatctccttcattgaggagaacaatgccggcaacgccgccgccgcactcatggccaaccttgctcccaaaaccaaggttctgagagatggccgatggggcgagcaagaggctgcaatcttggttcctggtgacatcatcagcatcaagcttggcgatatcgtccctgccgacgctcgtctcctcgagggtgatgcactcaaggttgaccagtctgcgcttactggagaatccctcccggttaccaagggcccaggggacgaagtcttctcgggttccacttgtaagcagggtgagatcgaggccgtggtcattgccaccggagtgcacaccttcttcggcaaggccgctcatcttgtggacagcaccaaccaggtcggacacttccagcaggtgctgacagcaatcggtaacttctgcatctgctccattggggtcggcatcctcgtcgagatcatcgtcatgttcccaatccagcaccggaagtaccgcagcggaatcgagaacctgttggtcctcttgatcggtggtatcccaatcgccatgcctaccgtgctttcagttaccatggccattggttcgcacaagctgtcacagcagggtgccatcactaagaggatgactgccattgaggagatggctggtatggacgtgctttgcagtgacaaaaccggcacactcaccctcaacaagcttagcgtcgataagaacctcgtcgaggtgttctgcaaaggcgtcgacaaagaccatgtgttgctgttggctgcaagggcttcaaggactgagaaccaggacgctatcgatgccgccatggttggcatgcttgctgatcctaaggaggccagggctggtataagggaaatccacttcttgcccttcaaccctgttgataagaggactgctctgacgtacattgatgccgatggcaactggcaccgtgtcagcaagggtgctcctgaacagattcttgacctgtgccactgcaaggaggatctgaggcggaaggtgcactctattatcgacaagtatgccgagcgtggtcttcgttcgcttgctgttgccagacaggaagtacctgagaaaaacaaggagtcccctggtggaccatggcagttcgttggtctgttgcccctgtttgatccgcctaggcatgacagcgctgagacaattcgcaaggctcttgttcttggtgttaacgtcaagatgatcacgggtgatcagcttgctattggtaaggagactggaaggaggcttggcatgggtaccaacatgtatccatcctctgcgctgctcggccaaaacaaggatgctacgcttgaagcgcttcctgtagatgagctcattgagaaggccgatggttttgccggagtcttccctgaacacaagtacgagatcgtgaagagactgcaggagaagaagcacatcgttggtatgactggagatggtgtcaacgatgccccggctcttaagaaggctgacatcggtattgctgttgcggatgctactgacgctgcgaggagtgcttccgatattgtccttactgagccaggtcttagcgtcattatcagcgccgtcctcaccagcagatgcatcttccagaggatgaagaactacaccatctatgcagtttccatcacaatccgtatagtgctcggatttatgctcattgcgttgatctggcaatacgatttctctcccttcatggttcttatcattgccattctcaatgacggtactatcatgaccatctctaaggacagagttaagccatctccgttgcccgacagttggaagctgaaggagatctttgctacgggcatcgtgcttggaagctaccttgctctgatgactgtcattttcttctgggctatgcacaagaccgacttcttctcggacaaattcggtgtgaggtcgatcagggacagcgagcatgagatgatgtccgccctgtacctccaagtcagtatcgtgagccaggctctgatcttcgtcacccgttcccgtagctggtccttcgtggagcgccctggtctgctcctggtcaccgcgttcctgctcgctcaacttgttgccaccttcctcgctgtctacgccaactggggcttcgccaggatcaagggtatcggctggggctgggcaggtgtggtctggctctacagcatcgtcttctacttccccctggacctgctcaagttcttcatccgcttcgtgctcagcggcagggcatgggacaacctcctcgagaacaagaccgccttcaccaccaagaaggactacgggcgggaagagagggaggcgcagtgggccaccgcgcagaggacgctgcacgggctccagccgccggaggcttcctccaacacgctgttcaacgacaagagcagctaccgcgagctgtccgagatcgccgagcaggccaagagacgagctgagatcgcgaggctgagggagctcaacaccctcaagggccacgtggagtcggtggtcaagctcaagggcctggacatcgacaccatccagcagaactacacggtgtgagagcccctctgctgcgatgtcgacgacaacacctttgctgcccgacgggagccatctgattacagataaaaattttcctagctgtaaagctctctataccaccagatactgccatatgatggtatggttgggtacccgtctttctagggagtttcttttctctctctcttttcttattgttatgtttttcaatagtggagtgtgcgcgtgttgtaatcgtttttacctgcgttttcctctaactagccggtgatctcgcgggaagcgaggtgaagaaataatgcaactaaaattctctgccaaaaaaaaaaaaaa

SEQ ID NO: 280 - DNA, 2253 bp, Zea mays
ccacgcgtccgggggattccacatcgtaaccactgaagacgaggcggcggacgagacggagagcagaaccgcgcagcgaagcagcagcggcgacaagccctcgcgtcggtagaggcgccgtccgccgtccgccccctcaactccggtagccgctggccgctgcaggtcgagtcccgtcgagccgactcgcgcttcccgatctgggtggccgcggcgccggcatggcgcggttcgaggtgaacggcaagtcggtgcaaggcgtggacttgctgcggcggcgccactggccgtcgcgcctcgacttctggcccttccttgcactctatgcgctctggctgctgcttgctgtcccggcgctcgacttcactgacgctctcatcatccttgccgcgctctccgctgctcacattctcaccttcctcttcaccgcctggttcgtcgatttccgtgccttcgtcgggtactctaaggtcaaggatatccatgccgctaacacgtgtaaggtgactcctgctaagttctcggggtcaaaggagattgtacctctgcacaaacagaaaaatgtggcctcaacttcagctgcaggtgagacagaggagatttactttgattttcggaagcagaggttcatctactcggctgagaaagataactttttaaaactccggtacccaacgaaggaattgatcggtcattatggcaagggcactggttatggaactgaggccaagattagcaccgcagtggacaagtggggcagaaatgtattcgaatatccacagcccacatttcagaaattaatgaaggagcaaatcatggaaccattttttgttttccaggttttttgtgttgctctatggtgcctggatgcgtattggtactacagtttgtttacacttttcatgcttttcctgtttgagtctactatggcaaagaataggctgaagacattgactgagctaagacgtgtgaaagttgatagccagattgtgttgacctatagatgtgggaaatgggttaaagtccctggaactgaactactaccaggagatattgtgtcaataggccgctcaactagtggtgaagatagatctgtaccagcagatatgctattgttagctgggtctgcaatagtaaatgaagctattcttacaggagaatctactccacagtggaaggtttcaattgctggacgtggtcctgatgatatgctatctataaggcgagataagaaccatatcctatttggtggcactaaagtattgcaacacactgcagataagtctgtaaatcttcgatcacctgatggtggctgtctagcttttgtattgaggactggatttgagactagccaagggaaattgatgaggactatcttattttcaactgagagggttactgcaaataacaaagaaagtggcctgtttatactctttttgcttttctttgcaatcattgcgtccggttatgtgcttgtgaagggattagaggacccaacaaggagcagatataaacttttattgagctgttcgttgattattacttctgtgataccaccggaattgccaatggagctctccatagcagtcaatacatctttaattgcattggctcggcatggtattttctgcacagagccattcagaataccatttgctgggaaggttgacatatgctgctttgataagacagggactctgacatcagatgatatggaatttcaaggtattgttacatcggaaggtgatgacttaatatctgatgcaaataagctgcctctccgaactcaagaagtgctttccagttgccatgcactggtatttgttgacaacaagctggttggcgatcccctagaaaaggctgctataaagggcatagactggatctacacatctgatgagaaggccatgtccaaaaagcctggtggtcaacctgttcaaattgtgcacagataccattttgcttctcacttgaagagaatgtctgttatcgtccgtattcagcagaaattttacgctttcattaagggtgcaccagagaccatccaagagaaattagttgatttacctgctgcatatgtggagacatataagaaatacacacggcaaggttctcgggtcttggctcttgcatataaattgcttcctgagatgcctgtaagtttctgttgatattaatcatgtttgcctatagcctttcttatctagtattctgttattcttttgtcaaaaaaaaaaaaaaaaaaaaaaaaag

SEQ ID NO: 281 - DNA, 4406 bp, Saccharomyces cerevisiae
tttgccagaaaacccaaatctgtttattgccactaagttgaagaaacatataatcaacaattgttggcaattctaaggggaatagtgcaacaagaagccagtaacgccaaatagaggttagcgccaagcaataatttactggtaggttctttcattccctgattttaccatgaatgacgacagagaaacccccccaaagaggaaacctggggaggacgacacgcttttcgatattgacttcttagacgacacgacttctcattctggatcccgttcaaaggtcaccaactcacatgcgaacggatattatataccaccaagtcatgtacttcccgaagagactatcgacttagacgctgatgatgataacattgaaaatgatgtccatgaaaatctatttatgagcaataaccatgacgaccaaacgtcttggaatgccaatagattcgactcagatgcatatcaaccacaatccctacgagcagtcaagcctcccggtttatttgctaggtttggtaatggtctcaaaaatgcctttacgttcaaacggaagaaagggcccgaaagtttcgaaatgaatcattacaatgcggtgactaataacgaattagacgataattatctagactcgaggaataagttcaacattaaaattcttttcaaccggtacattttaagaaagaacgttggcgacgcagagggcaatggtgaaccaagagtcatccacatcaacgattctctcgctaattcctccttcggttatagtgacaaccatatatctaccaccaagtataattttgcgacctttctgcctaaatttttgttccaagaattttccaaatacgctaatctgttttttttatgtacatctgccattcaacaggtgcctcacgtctcgccaactaatagatacaccacaattggtactttattagtggttttgattgtttctgccatgaaggaatgtatcgaagatatcaagagagctaattctgataaagaattaaataattcgacagcagaaatattttcagaagcacatgatgactttgttgagaaacgatggattgatattcgtgtaggtgacataattagagtaaaatcagaggaacctattcctgctgataccataattttgtcatcttcggaaccggagggtctttgctacattgaaactgccaacttggatggtgaaacaaatttgaaaatcaaacagtcgagagtagaaactgccaaatttatagacgttaaaactttgaagaacatgaacggaaaagttgtttccgaacagccgaactctagcttgtatacttatgaaggtacaatgactttaaatgatcgtcaaataccgttatctcctgaccaaatgattttaagaggtgcaactttaagaaatactgcatggatatttggtttagttatcttcactggtcatgaaactaagttattgcgtaatgctactgcaaccccaattaaaagaaccgcggttgagaaaattatcaacagacagattattcgattgttcacagttttaatcgtgctaattttaatttcttcaattggtaatgttattatgtctactgcagatgccaaacatttatcgtacctttacctggagggtaccaacaaggctggcttattcttcaaagactttttaacattttggattctattttcgaatctagttcctatttctctatttgtcaccgttgaattaatcaaatattatcaggcttttatgataggttcagatctagatttgtactacgaaaaaactgataccccaactgtggttcgtacatcctctttggttgaagaacttggtcaaatagaatatatattcagtgacaagacaggaactttaacaagaaatattatggaatttaaatcctgctctattgcaggccattgctatattgataaaatacctgaagataaaacggccactgttgaagatgggattgaagttggttatagaaaatttgacgatttgaagaaaaagttaaatgatccctctgatgaggattcacctattatcaatgacttcttaacattactggctacctgtcatactgtcattccagaatttcaaagcgatggatctattaaatatcaagcagcctctccagatgaaggtgccctcgttcaaggtggtgcagatttagggtataagtttatcatccgtaaaggaaactctgtaactgttttattggaggaaactggcgaggaaaaagagtatcaactacttaacatttgtgaatttaattccaccaggaagagaatgagcgctatatttagatttccggatggttcgataaagttattctgtaaaggtgctgatactgtcattctggaaagattggatgatgaagctaatcaatatgtagaagctacaatgagacatttagaagattatgcatctgagggtttgcggacgttgtgtttggcgatgagagatatctctgaaggagaatatgaagaatggaatagcatttataatgaggctgccacaacattagataacagagccgagaagctagacgaagccgcaaatctaatcgagaaaaatctaatattaattggtgcaactgctattgaagataagttacaggacggtgttccagaaactatccacacattacaagaagcgggtattaaaatttgggttttaactggtgacagacaggaaactgctattaacattggtatgagttgccgtttattgagtgaagacatgaatttgttgatcatcaacgaggaaaccagagatgatactgagagaaatttgttagagaagattaacgctctaaacgagcatcaattgtcaacacatgatatgaaatccttagcgctcgtcattgatgggaagtcattaggctttgccttggaaccagaattagaagattatttgctaactgtggcgaagctttgtaaagcggttatatgttgccgtgtatctccactacagaaagccttggttgttaaaatggtaaaaagaaagtcgtcttcactactgctagccattgcgagtggtgccaacgatgttagtatgatacaggcagctcatgttggtgtcggtattagtggtatggaaggtatgcaagcggctcgttcagctgatatagctcttggccaatttaaatttttaaaaaaactattacttgtccatggctcctggtcttatcaaagaatttctgtcgcaattttgtactctttttacaagaatacagcattatacatgacgcagttttggtacgtttttgccaatgccttttcaggtcaatccattatggaatcatggacaatgagtttctacaacttattcttcactgtttggcccccttttgtcattggtgtatttgatcaatttgttagtagtagattacttgagcggtacccacaattgtacaaattaggacagaagggtcaatttttctctgtttacatcttctggggatggattattaatggctttttccattctgcaatagtatttattggcaccatattgatttacagatatgggtttgccttaaatatgcacggcgaactagctgatcattggtcttggggtgtaactgtctacactacaagtgtcattattgttttgggaaaggctgctttggtaactaatcaatggacgaaattcaccttaattgccattcctggttccctcttattttggttaatattcttcccaatttatgcttctatatttcctcatgctaacatctcaagagagtattatggtgtggttaaacacacgtatggatccggtgtattttggttaactttgatcgttttaccaatttttgcactggtaagagattttctatggaagtactataaaagaatgtatgaaccagaaacgtatcatgttattcaagaaatgcagaaatacaatatcagcgactctaggccgcacgttcagcaatttcaaaatgccatcaggaaggtgaggcaagtgcaaagaatgaaaaaacaaagaggatttgccttttcacaggctgaagagggtgggcaagaaaaaattgtcagaatgtatgatactactcaaaagagaggtaagtacggtgaattacaagatgcttcggcgaacccctttaatgacaataatggactgggaagtaacgactttgaaagtgcagaaccgttcattgaaaatccatttgctgatggtaatcaaaattcaaatagattcagttcttcgagagatgatatttcatttgatatatgaggcacagaaacaaagagcagaagacaaaaaatacaaaaataaaaataagataaaaagaaaagtcattattaccattactgaaatatgtacatttaccataaaatatatccgttatatagaagttataatataagcctacactttgttatcggttttcattcctctgggg

SEQ ID NO: 282 - DNA, 4601 bp, Schizosaccharomyces pombe
tatctttgctttttctgcgcatatcatttgcattgttaatatcttgtaaatatcaatggcccgagatgtagataataagcaaaatgctaaaaggatatcacgagatgaagacgaggatgaatttgccggagaatcgatggttggtagaacgttagacaatccttttctgggtgaagatgaattcgaagatatttttggctctgaaagccaatatatatcttcttcaggccaaaattctaccaatccattccttgctgatacaagaatagagaatagtcctttaggaagtgaaagtaaggccaaccaacttaataagcaaggtacaaacgtaaatcacattgagatacctttgcgcgattttaatgaccctacacaacctgaatctttcctaccacctcctaagaatacatttacttcgcgtataaaaaaaataaagaacttatttaaaaaagagaagaaacaggttaagccagaagatcttggtcctcgacagatcattttaaatgattattcagcaaaccatttcttacacaacgctgtgtcaacttgtaaatacagcgctttcacatttttaccaaaattcctaaaggaacaattctcaaaatatgcaaatctatttttccttttcacggctgttgtgcagcaaattcctggaatcacaccagttaatcgttatacaacgattggccccatgttaattgtactttcagtttctggtattaaagaaatcatggaggatataaagcgcaaaaaacaagatcaagaattgaatgaatcgccttgctacgttttacaggggactggttttgttgagaaacaatggaaggatgtagttgttggtgacattgttaaaatcgtttctgaaacttttttccctgctgacttagtacttttatcatcatctgagccagagggactatgctatattgagactgcaaatttggatggcgaaactaatttaaaaattaagcaagctctcccagaaacagcaggtcttctaaaaccagtagagcttggtcagctatcaggagaagttaaatcggagcaaccgaataataatttatatacttttgatgccactttgaagcttcttcccagtgatcgagaacttccattatctcccgatcagttattgcttcgtggtgctcagcttcgtaatacgccttgggtgtatggcattgttgtatttactggtcatgaatctaaacttatgaagaacactacagaaacacccattaaacgaacttccgtcgagaagcaagtgaactcacagattctgtttttattatgcatctttgtgtttctttgttttgcctcttcacttggagctctcattcatcgttcggtttatggatcagctttatcttatgttaaatatacttccaacagggccggcatgtttttcaaagggttgctgactttctggattctctactcaaatcttgtgccaatttctttgttcgttacttttgagttagtccgatatatacaggcacagctaatcagcagtgaccttgatatgtacaatgaggaaactgatactccagctgcatgccgcacatcttctctagttgaagaattgggtcaggttggatatatttttagcgacaaaacaggtacattgacgagaaatcaaatggaatttcgtcaatgcactatagccggtgttgcatatgctgatgttattcctgaagatcgtcagtttacctcagaagaccttgattctgatatgtacatatacgattttgatacgcttaaagaaaatctcaaacatagtgaaaatgcaagccttatacatcagttcttactagttctttctatttgccatacggttatcccagagtatgatgaatccactaattcaattaaatatcaagcttcttcaccggatgaaggtgccttagtgaaaggtgctgcatccattggttataagtttctagcgaggaaaccgcatttagtgactgtaagtatttttggaaaagatgaaagttatgaactattacatatttgcgaatttaattctactcgcaaaaggatgtcaatagtttttcgttgtcctgatggaaaaattcgtttatacgttaaaggtgctgacacagtcattatggaaaggttagcatccgataacccgtacttacaaactacgattcatcatcttgaagattatgctaccgtgggtttacgtacgctttgtattgctatgcgggaagtcccggaagacgaatatcaaaggtggtcaacagtgtttgaaactgcagcctctagtctggttgaccgtgctcagaagcttatggatgctgctgaagaaattgaaaaggatttaatcttgctgggagctaccgctatagaagatagactgcaagatggagttcctgatactatctcaactttacaaacagctggaataaaaatctgggttctgaccggtgatcgacaagagaccgcaattaatattggcatgagttgcaagttgattgatgaagacatgggtttagttatagtgaacgaagaaacgaaagaggctactgctgaaagcgtaatggctaagttatcttctatatatcgaaacgaagctaccactggaaatgttgaatcaatggctttggttatagatggggtttcacttacttatgcattagattttagcctagaacgccgattctttgaactggcttctttatgccgtgccgtgatatgttgtcgtgtctcacctttacagaaggctttgatcgttaagatggttaaaagaaatacaggtgaagtgctattagctattggagatggcgctaatgatgtgccgatgattcaagctgcccatgttggggttggaatcagcggtatggaagggttacaagcagttcgaagctctgatttttcaatttcccaattttgctatttaaaaaaattgttacttgttcacggatcttggtgttatcagcgtctcagcaaacttattttgtactcgttttacaaaaacattgctctctacatgactcagttttggtacgctttttgcaatgcattttccggccaggtaatttttgagtcttggtctatttcactgtataatgtgctttttactgttcttccaccggtggtaataggtatatttgatcagtttgtaagcgctggtcaactttttcagtatccgcaactttatcaattaggtcaaagaagtgaattttttaacttaaaaaggttttggtcttggataacaaatgggttttatcattcacttcttctatttctttgttccattgctgtgttttactatgatggtcctaataaggatggtctcgcgtcaggtcattgggtgtggggtactacactttacgctgcaatactagctactgttttaggtaaggctgccttaattagtaatcattggactcaatacactgtaattgctaccctcggatctttcttgctatggatagtgtttatgcccatttatgctgttgcagcacccgctatcggattttcaaaggagtactacggaataattccacatctttacgggaatctaaaattttgggcttccctacttgttttgccaacaatagcactgatgcgtgactttgtgtggaaatattcatccagaatgtattatcctgaggagtatcattacgttcaagaaattcagaaatataatgtcacagactatagacctcgtattgtcgggtttcataaagctatcaggaaaataagacagatgcagagaatgcgtaaacagagagggtatgctttttctcaaggtgaagaggaccagtcaaggattttagatgcatatgatactacacatactcgtggagcatacggtgaaatgcgttagatacgtatttttctctattattttatattacattcgcttttggtttctagatctcagatttcgatgagttttacgatgttaagttgttttagtttatcactcgtttagaattattatgttattcatcctattaatcgattaacaagacgttttttctgtattactgtaagaatttcttaaagcataaagacgcattggtaccaccaaatccaaagctgtttgacaaagcaacattaatgcggctctctttagccacattcggcacataatcgcactgaaactgctgaggaatatcagagtattcgaaatttaacgtagggggtaagacgccctatacagttttgttagcaatagaaagtttgagtagaataaaataccttttggacagtcaagaccgtatagacagattcgattgcacctgctgctcctaaaagatggccaatagagcctttgctactagatacaggaaatgcctcaggattccggttcacatcacaaagtaacctagtaatcgctatgctttctgctacatctccaagcttggttgaagttgcatgagcattgatataatccaattgacttgcagaaagaccagcttgttttaaggaacgcttcatagcatagtaagcagcatccccatttggatttggagctgtaatatgatatgaatcagatgccaaaccataaccgactatttcagcatatatatgagcatttcgatttttggcatgctccaattcctcaaggactaaggcagcggagccttctc

SEQ ID NO: 283 - DNA, 6501 bp, Oryza sativa
ccggtggtggcccactagccctgctcgctccggcttccccgactccatggcttccgggcgcccgctgctcgacgcctcgccgcggccgacgcagcagccgccggcgtcatcgctgctcccgccgccgcagccggagccgcccctccgagccgaccgcctcgcgttctccctcgaggtgcccgaccccttccgccgggagcccgacccgtcgtcggccgcgtcgcagcggggggaggaggaggggggcggcgaggaggagtcccgcgcggttgttgtcggggagccctcgtcttcggaggcggcggcggggttcgccgggaacggcgtacggacggcgaagtactcggtgctgacgttcctgccgcggaacctgttcgagcagttccggcggctgtcgtacgtctacttcctcgccatcaccgtgctcaaccagctcccccaggtcgccgtcttcggccgcggcgcctccgtgctcccgctcgccttcgtcctcttcgtcaccgccgtcaaggacgcctacgaggacctccgccgccaccgctccgaccgccaggagaacaaccgcctcgccagggtcctcctggcgccgcccgccgcgggggagttcgcgcccaagaaatggaagcacatccgcgtcggggacgtcgtccgcgtcgcctccagcgagacgctccctgccgacatggtgctcctcgccaccagcgacccctccggcgtcgcgcacgtccagaccgtcaatcttgacggggagaccaacctcaagacgaggtatgctaagcaggagacgcaactgaggttctcgcaggacggtggaatcggcggtgtccttcattgtgagcggccaaacaggaacatctatggatttcaggcgaatttggagattgatggcaagcgtgtctcgctagggccatcgaacattgtgctccgtggatgtgagctcaagaataccacctgggcgataggggttgttgtgtatgctggaaaggagaccaaggtcatgcttaatagctccggggcgccgtcgaaacggagccggttggagacacagttgaaccgggagactgtcatactgtccattatgctcattgggatgtgcacgaccgcaagtgtgctcgcggggatttggatactgaatcaccgtggggatttggaattcacccagttctttagggagaaggattacacgacagggaagaactacaattactatggcatggggatgcagatattcattacattcctcatggcggtgattgtatatcaggtcatcattccgatctctttgtatatatcaatggagttggtacggcttgggcaggcatatttcatgggtgctgacagagatttgtatgatgagtcatcaaggtcaaagttccaatgcagggccctgaatataaacgaggatctaggacagattaaatatgtattttctgataagacagggacgctgacagagaacaagatggagttccagtgtgcatcaattcggggggttgattactgttctggcaaagattcatgcggatactcagttgtaggtacgatgtctttaatgtatatttctggttttcatgttgaactttcctagtatggctgcttattttctggttttggacagtcgatgatctcctatggacacccaagatggcagtcaagattgatcatcggcttttgaagttactgaggggtggtggcacagatgaggaaacaaagcttgtcctcgaattcttccttgctcttgctgcatgtaataccattgtgccacttgtcctagatactcgtgattctaagcaaaagttgattgattatcagggtgagtcccctgatgagcaggcactagtgtatgctgcggcatcttatggcattgtgcttgttgagcgaacatctggttatgtggtgattgatgtccttggtgacagacagaggtaaggtagtctttcatcatttgctttatggacatgctaattttcaactctgcatgagtgtgttttcaataataattagtggcattatgcaatttagctaataccaattttggtgtatcaacatcattatgtgactaggagtggatgtctgctacagtgctagtgtgctacctgatccatgatgtttacatctctggaaaattatacctacaaaactttattcaactgcaatgtcatatagtcatcaacagttggtagcataacttattcaataacgattttcacaagtgttttatgcactttgctttatggtgtttagtgacgtcattcttttgtcttatcttattggtttgctggtgtgaatgctaactttgagttgtatcttgctagttatcttcctattcctattcttagcatacagttaatatttattcaaaataaaaataataatttggaatattttgggatgcaacgtgccaactccaaatgatttgtggcattaccccacatgagcgaaatttcagtacttagtttatcaggcttacctcttggagatatgttacaactctccaagtgcatgtcttgacttttccttgtgtttatagacatgcttgcatatcctattatagtaagctagtttgtggagccaatactgtaatatattggttgaatatatttgatgaatggagctctttttattggttaatcaccaactgtagagagttaaatgtgtttgctgtaagtccatgtcaaacacctgggctataggcaaaaccaagttaattatcactttgaacccagttattgtgatgagcacatatctgcactagggccataaatttgtaaggagctgcattgaacaggctggcatttataaacaaagcaaatttaggatgtgcatatggatttgcagctgaatttctggataatttggataaaaccatatcatttttcaccaaaccaaatgtttatctaacatttttaataacactattccaaaaggcattcttagttacctcatatgtacgaagtacgctagctttgtttataaatgcccgctttgttactacattgactactctgctccattctttcagttcgttgttctttatgtgtaaattttattttcaatatcttgtttacaagaatggcttatagttccaatttatcttctggtatgggatgtgcagatttgatatattaggacttcatgagtttgatagtgatcgtaagaggatgtctgtcatagttggctgccccgataagactgttaagctatatgtgaaaggtgcggacagttcattgtttggaattaccaaaaattcattagatctggacattgttcgtgctacagaggcacacctccacaaatattcatcgtttggtctaagaactctcgttattggcatgcgtgaattgagtcaacctgagtttgaggagtggcaattggcatatgaaaatgctagcacgtcagtacttggaaggggaaatttactccgatcagttgcggccaatatagagaacaatatccgcatattgggggctactgggatagaagataagcttcaagatggggttccagaaacaatagaatctcttcgacaagcagacataaaggtttggattttaacaggagataagcaggagacagcaatttctattggctactcttgtaaactgctgaccaatgacatgacacaaattgtgataaacaacaactcaaaggagtcttgtaagaggagtctcgaggaagcacatgcaacgattaagaagctcagaattgcttcaactggcacacagagtccagaattagcatcagaatctgctggtgtaactcttgcgttaattgtagatggtaacagcctggtttacatacttgagacagagttgcaagaagaggtactcatctaaatatgattcttttttttcatttcctttcatccttggtataaaatcatagttgatgcatggactttcttcttttgtttgtgtagcttttcaaagtggcaagagaatgtagtgttgtattgtgttgtcgggtggccccgttacaaaaggcagggatagttgcacttatcaaaaaccgaacagatgacatgaccttagcaattggtgatggtattattccctcctggttctgctattatggcatataatattctgtgagaaccaatttatgtacatgtgatatatgctaattaatcttttgttgttcaggtgcaaatgatgtttcaatgattcaaatggctgatgttggtgttggcatcagtggtcaagaaggacggcaggctgtaatggcatcagattttgcgatgggccaattcagattcttggtccctcttctattagttcatggccattggaattatcaaagaatgtcatatatgatcctctacaacttttacaagaatgcgacatttgtcttggttcttttctggtaagagcccttttgcattgaagttttcacactttgaaaaaaaaaactgtttttatgtagaaaattatctaaacgttactgtggaaacccccatgttagtaagacctagtgaaaagaagtggactctatttatgttcagttgaattaccaaagttgttgctttcttaatttttgcaatattcagagacattgtctccaaaatataacacttaattttgtgatctcaggtatgtactttatacagcattcactctgacaactgctatcacagaatggagtagccttttgtatactgtgctatatacatcccttccaacaattgttgttggtattcttgacaaggatcttagtaaggaaacactactagcttatccaaagctatatggatctggccaaagggatgagaagtataatgtaaatttgtttgtcctcaatatgctcgaagcgctatggcaaagtctggttgttttctacatgccatattttgcatatagacaaagtacgatagatatgtctagtctgggagatctatgggcacttgcccctgtcattgttgtaaatatgctactagccatggacatctttcggtggaattggatcgtacatgcttttgtgtggggaacaatagcagcaacaaccatttgcctctttgtgatcgactccatttggtttcttcctggatatgggtaagtacttcatttccagctttcttttatttataggcgaaccctcttttttttaaaatgttttggtgctaaaaatgtagtaaccaacctgatgtttggaactggcaatggctttttaaattctttcctgcaaggcattttgtaaatttcataactgtaaatttctgaaatatgtgttaatatcagttatcctaggaagtaaaatgacttttgagcttatgcaactgttatgggaggagctcctgagtactcttttcgtactcgtaaaggaagtcgtttaggataatgtttaagtcaaaccttgggaatataaatcatgaataactctcaagtcgttgagtttgaaaatgtaaaaattatataaatagatttgtcttgaaaaatactttcataaaagtatacatatatcacttttcaataaatatttttatagaaacaagaagtcaaagttgtgttacgacttcctttatgagtacggagggagtatgtggtctctattttctcatttgtagtattttgtgttgccttgttgctgttcacgttaatccttgtagagttcttttattcctaggaggatattgagaagtagagatatattcaagtggtaactatgatttattgagagggataagtgttcagattaagatatatagaaaattaacatagatgctgctacctctcaatatctcctatgtaaaagggataaaagttgtcctgatacatagttagattaaatgcctctttctttgcaagcatgtttgtgctacatccatcatgtaatgcgagcaccatgatcatgttttcttgaatggatctcctaaagtgaaataggagttctttttgcaatttcttgattgattgcatactgactcaatataactatttcagggccatctttcatataatggggacaggtttgttttggttactgctgcttatcattgttgttgcagcaatggtaccacattttgtaatcaaggcctttacagagtattttacccccagtgatattcaagttgcccgagagatagaaaaattcgagaatgtaaatcaggtgaaccgttcagaagttccaatgacacgtctgcatgacccaaggagatagctatagaaaattctcctttatagaaatttctttttttttctgttgtttttcgcctctttggtgtgtatacgagtaaattcatttagcactaaggtgataggtttagcctccaagatgtatgtatgtaggcatgtgttcatctaacatttactgaaaaggaaatataaattgtttgatgtatgcaagtttctcatccttgtgtcgaccagcacaactgtaaggtgaagagtgttatatacctatattacctcttactctatcactacgatgatcctgtcctattgcataagctgatttatctttgtatttttagtttcttagcttcagtttattcatgctatctgtcac

SEQ ID NO: 284 - DNA, 1522 bp, Oryza sativa
cccacgcgtccgcgtactacggaaacttgtacactatcaagctcagcaactgcctgcccctctctttccctcgccattaagttttctcgtccggcggcgtcacccctgcgaattaactaactagctaggccggccatggagacggtggccgcggccagctacacccgcggggcggcgacgcgctcgccagcgtgctgcgccgccatgtccttctcgcagtcctacaggcccaaggccgctagaccgccgagcacgttctacggcgagtcgctgcgggttaacacggcgaggtcgctgccgtctgggaggcagtccaaggcggcgagccgggcggcgctcagcacccggtgcgagatcggggacagcctggaggagttcctgaccaaggcgacgccggataagaacctcatcaggctgctcatctgcatgggggaggcgatgaggacgatctcgttcaaggtcaggacggcgtcgtgcggcggcaccgcctgcgtcaactccttcggtgacgagcagctcgccgtcgatatgctcgccgacaagctcctcttcgaggctctggaatactctcatgtctgcaagtatgcgtgctccgaggaagtcccggagctgcaagacatgggtggaccagtcgatggtggtttcagtgtagcattcgaccctcttgatgggtccagcattgtcgacacgaacttcacagttggaaccatatttggtgtctggcctggtgacaagctgacaggcgtcaccggtggagaccaagttgctgctgccatgggcatctatggccctcgcactacttacattatcgctctcaaagattgtcctggaactcatgaattccttcttcttgatgaaggaaaatggcagcatgtcaaggacaccacaaccattggagaggggaaaatgttctctcctggtaacctgagggctacatttgataatcctgaatatgacaagctcatcaactactatgtcaaggagaagtacacattgcgttacactggaggaatggttcctgatgtcaaccagatcatagttaaggagaagggcatcttcaccaacgtgacgtctccgacagccaaggccaagctgaggctcctgttcgaggtggcgccgttgggtttcttgatagagaaagccggcgggtacagcagcgacggcaaacagtcggtgctggacaaggtgatcaacaacctcgacgagcggactcaagtggcctacggttccaagaacgagatcatccggttcgaggagactctctacggctcgtcgaggctcaccgccggcgccaccgtgggcgccgccgcctaatcttttgctgcaacgcgagcccagtgtctctgcaggcctcaaaaacgctgaaactgcagtcgttttagactcccatcctgtaatgcagattgggttgtagttgaagtgggacttgaaactgcaaagttatactcctttttgcaaggtacccgtttttttccccttttggtgtaaacagttgcatataaaggtaaattcgcattaaaaa

SEQ ID NO: 285 - DNA, 1440 bp, Oryza sativa
gtcagttcccgcgccgtgtgaccaatactcaacacttaaaccgcgcgctttttagccgacccgagcagccggagagtgaggcgaggcgaagcgaagggaagagcgcgaggcagagtaagcagacgagaagaacagcgcgcggcgcggtagctgaggagagtggtgcggagatggatcacgaggcggacgcgtaccggacggacctgatgacgatcacgcggtacgtgctgaacgagcagagccgcaacccggaggcacgcggcgacctcaccatcctcctctcccacatcgtgcttggctgcaagttcgtcgcctccgccgtcaacaaggccgggctcgccaagctcatcgggctggccggcgagaccaacgttcagggagaggagcagaagaagctggacgtgctgtccaacgaggtgttcgtcaaggctctcgtcagcagcggccgcacctgcgttcttgtctccgaggaggacgaggaagcgacgttcgtggaccctgcgctgcgtgggaagtattgcgtgtgctttgatccactcgacggctcctccaacatcgactgtggcgtctccatcggaacgatctttgggatctacatgatcaaagataaggagaatgtgactcttgaggacgtgttacagcctggaaaaaacatggttgctgctggatactgcatgtacggcagttcctgcacgcttgttctgagtactggaaatggtgtcaatggcttcacacttgatccatctctcggggagttcatattaactcatccagacatcaagataccaaagaaagggaagatttattcagtgaatgaagggaatgcgaaaaattgggacgagcctaccgcaaagtttgtggagaagtgcaagttccctaaggatggttcatcacctaaatccttgagatacattggaagtatggttgctgatgtccaccgtacgttgctatatggaggagtatttttgtaccctgcagacaagaagagcccaaatggaaaactccgtgttctgtatgaagttttccccatgtcattcctgatggagcaggctggaggccagtctttcacaggcaaagaacgggctcttgacctcgttcctaccaagattcacgagagatccccaatatttcttggaagcttcgaagatgtggaggagatcaaagggttgtacgctgcacaggcgaagtaagctcggtttgatcgatctggcaccatcaaggcgtgcgaatggactccctggccttactgtaacatgcatgattcgtcaggcacttcttttattcgtcttactgtacgtttgtaaaattcagtgtaatagtgttgaggcctggaacagcttcatgagcaactaaggccttttctactattatttacaaaatacatacaccgtgcatctctagcagctaaagcactaatacaacaagtcactaaggcaaaaa

SEQ ID NO: 286 - DNA, 1201 bp, Triticum sp.
ttctagagcagcaatggagaccgtcgcggctgccggctacgcccgcggggccgccacgcgctccccggcgtgctgcgccgccatgtccttctcgcagtcctacaggcccaaggctgccaggccggcgacctcgttctacggcgagtcgctgcgggcgaacacggcgaggacgtcgttcccggcggggaggcagtccaaggcggcgagccgggcggcgctcaccacccggtgcgcgatcggcgacagcctggaggagttcttgaccaaggcgacgccggacaagaacctcatcaggctgctgatctgcatgggggaggcgatgaggacgatcgccttcaaggtccggaccgcgtcctgcggcggcacggcctgcgtcaactccttcggcgacgagcagctcgccgtcgacatgctcgccgacaagctcctcttcgaggcgttggagtactcccatgtgtgcaagtacgcgtgctctgaggaagtccccgagctgcaggacatgggtggcccggtcgaaggcggattcagtgtggcgttcgacccccttgacggctccagcatcgtggacaccaacttcaccgtgggaaccatcttcggcgtctggcccggcgacaagctgaccggcgtcaccggcggtgaccaggttgctgccgccatgggcatctacggccctcgcaccaccttcgtagttgccctcaaggactgccccgggacacacgaattccttctcctcgacgaaggtaaatggcagcatgtcaaggacaccacgagcatcggagaagggaagatgttctcccttggcaatctgagggccacgttcgacaaccctgattatgacaagcttgtcaactactatgtgaaggagaagtacactctgcgttacaccggaggaatggtccctgatgtcaaccagatcatcgtgaaggagaagggcatcttcacgaacgtgacgtcgccgacggcgaaggcgaagctgcggctgctgttcgaggtggcgccgctggggttcttgatagagaaggccggcgggcacagcagcgacggcaagcagtcggtgctggacaaggtgatctccgtcctggacgagcggacccaggtggcctacggctccaagaacgagatcatccgcttcgaggagaccctctacggctcctccagactcgccgccagcgccaccgtcggcgccaccgcctaataatct

SEQ ID NO: 287 - DNA, 1301 bp, Chlorella sorokiniana
gtgacgaccacaaaagaattccctctatataagaaggcattcattcccatttgaaggatcatcagatactgaaccaatccttctagacgatgcaggccaccgctgtcgccaccgccgcccctgcggcccgcgtcgccaccactggcaaggccgccaccggcgtcaaggccgccccccgcgtggccgtgcgcgccgccggcgccagcgccagcagcagctttgccaccggcgcccgcctgagcgccaaggccagccgcaccgccgcccgccgcgccgccgtggccgcccaggccaagatcggcgacacgctggaggagttcctgctggaggccacccccgaccccaagctgcgccagctcatgatgtccatgtccgaggccatccgcaccatcgcctacaaggtgcgcaccgcctcgtccggcggcaccgcctccgtcaactcgttcggcgatgagcagctggccgtcgacctgctggccgacaagctgctgttcgaggccctcaagtactctggctgctgcaagctggcgtgctctgaggaggtgcctgagcccctggacctgggcggcgagggcttctccgtggcatttgaccccctggacggctcctccatcgtggacaccaacttctctgtgggcaccatctttggcgtgtggcccggcgacaagctgaccggcatcacgggccgccagcaggccgccgccggcatgggcatctacggcccccgcaccgtcttctgcatcgccctcaaggacgcccccggctgccacgagttcctgctgcaggacgatggcaagtggctgcacgtgaaggagaccgagaccatcggcgagggcaagatgttctcccccggcaacctgcgcgccacctttgacaaccccgcgtacgagaagctgatcgcctactacatcggcgagaagtacacgctgcgctacaccggcggcatggtgcccgacgtgttccagatcatcgtgaaggagaagggcgtgttcaccaacgtcatctccccctccaccaaggccaagctgcgcctgctgttcgaggtggcgcccctggccctgctggttgagaaggcaggcggcgcctcctcctgcgacggcctgtgcgtgagcggcctggacgtggaggtcaagcagcacgaccagcgcacccagatctgctatggctccaagggcgaggtgcggcggtttgaggagtacatgtacggcaactccccccgcttctccgaggtcaccgcctaagcggctggtcatcgcctgagcggctcagtgctgctgactatgcagccggcggctgactat

SEQ ID NO: 288 - DNA, 1585 bp, Glycine max
attcggctcgagtctgtctctttgctccatttcagtgctctgtcttctcccccaccaccgcactctctcagatattatcatttcatatcacacattcacatcctatcatcatcgacaacacgctatccccattgcttcttctcttctccctctctcgtttcctacttgacggcgccgtttcgttctccagaagatgcttctgagtacttcgcgctgcaactagacatgatgagttcaagtttcaagacatgggctgtgggatttgcacttggaaatgaaggagaggcaacgttggagagctgaagaggatgctttattacgttcttatgtcaaacagtatggtcctagggaatggaatcttgtgtctcagcgcatgaacacatatcttaacagggatgctaagtcgtgcttggagaggtggaagaactacctcaagcctggcatcaaaaaaggctctcttactgaagaagagcagcgccttgtcatccaccttcaagcaaaatatggaaacaaatggaagaaaatcgctgctgaagtcccagggcgcactgctaagcggttaggcaagtggtgggaagtcttcaaagagaagcagcagagagagaaaaaggagatcaatagaattgccgacccaattaacaatagtaagtacgagcacatactcgagagttttgcagagaaactagttaaggaacgcccttcaccatcatttgtcatggctgcttccgatggggcatttctgctcactgatacaccagcacctgcatcttccttgcgtccttcttggctttccaattctagtagtgctgcagccatcggcccaagttccctttctgtgaaactaagtctttcttcctcaacggtggccacacctccattttcatggttgccacccgagagaggaccagacaatgctccttttgttttggggaatgtatcagcgcttcatggagctattccaactctaagtgatagcatgcatatgtctcagatggtggagcactgtaaagagttgggagaggggcatcgtgctttggccacgcacaagaaggaggcagcttggaggttaagtcgggtggagttacagttggagtcagagaaggccaaccgaagaagggagaagattgaagaatttgaagcaaagattaaagctcttcaggaagaggagaaagctgctttaggtagaattgaagcagaatacagagaacagttagctgcattgaggagagatgctgaaaacaaggagcaaaagttggcagaacaatgggatgcaaagcatttacggtttactaggttactagagcaattaggatgcagagcagggctccttgagccaaatgcaagatgaagatatattttggcaaaatggatattggtgctcttctgactaaaattatatgcagtttgtgatcttggtatatttttattttagacgtgtatgaatttcctatctattcatacaacttgagtaacttccgttaacagttgaattacctgcatatggtatcacatccgagtttataaacttagttatattcctgaaaaaaaaaaaaaaaaaaaaaaaaaaaaaaaaaaaaaaaaaaag

SEQ ID NO: 289 - DNA, 1494 bp, Glycine max
ctcggtttccactttctctctgtttaagaactcaccacttcttcaacttggtgccgttgtttcatggaccagaactacgcctcatagctcctttctcatttcacacacacaaagaaccttgagacatcatgaagattccaagttccaagcaactggttgtgggatttgcacttggaaatgaaggataggcaacgttggagagctgaagaggatgctttactacgcgcatatgtcaaacagtatggtcctagggaatggaatctggtgtctcagcgcatgaacacacctcttaacagggatgccaagtcatgcttagaaaggtggaagaactacctcaagcccggcattaagaaaggatctcttacagaggaagagcagcgtctagtcatcaaccttcaagcaacacacggcaacaagtggaagaaaattgcagcacaagtccctggtcgcacagcaaagaggttagggaagtggtgggaagtgttcaaagagaagcagcaaagggaaacaaaggggaataactgcaccattgacccaattaacgatagcaagtacgagcatatccttgagagttttgcagagaagctagtgaaagaaaggccttcaacatcaacatcaacatcatttgttatggctacttccaacagttcttttctgcatgctgatgcaccggctcctgcaccagccttgcttccgtcttggctttccaattccaatggcactgcacctgtgaggccaccctccccttctgtgactcttagtctttctccctcgacggtggcagcgcctcctccatggatgcagccccccgtcagaggacaggacaatgctagtcctcttgttttggggaatgtggcgcctcacggggctgttctagcatttggtgagaacatggtgatgtctgagctagtggagtgctgcaaggagttggatgaagtgcatcatgctttggccgggcataagaaggaggcagcatggcggttaagcagggtggagctgcagttggagtctgagaaggccgggcgaaggagggagaagatggaggaaatcgaagcgaaaatcaaagctctgagggaggagcaaacggctgcattggatagaattgaagcagaatatagggagcagttggcagggctgagaagagatgctgaaagcaaggagcaaaagttggctgaacaatgggctgcaaaacacttgcgacttactaagtttctagaacaggtagggtgcagatcaaggctcactgaaccaaatggaagatagagtgacatcaatcattcacaaattgggaaaatctagtttgcttttacttattattatgtcttgaatttatatgatatgaactttatagtcatagtagttttgttcctgtcatttttctaaaatatgttgttacatatggttattgatatcatccctatcttttcatacaacttgaggacttgcattagcggttgagttatgtttaaatataacatcctttatgaaaaaaaa

SEQ ID NO: 290 - DNA, 1547 bp, Zea mays
gagagaatctaaagtgaccggacgctgtccttccttgctgatcggcgacacggtccatccctccctcgctcgctagggttccttttcgtccatggatcagagcttcgggaatctcggggccggagctgggagcagcagcgggggctccaactccaaggcggcggcagccgccgtgtcctcctcgtctttcctgcagctgccgctgtcgacggcgtcccccgcgtactacggcgcgccgctcgcgctcctgcaccacgccgccgcggccccgtcgtcgtcgcagcagcaccagcagcagcagcaccaccaccactacgccaggcacggcgccgagatgtcggcagcggaggccgaggccatcaaggccaagatcgtggcgcacccgcagtactcggcgctcctcgccgcctacctcgactgccagaaagtgggcgcgccgccggacgtgctggagaggctgacggccatggcggcaaagctggacgcgcgcccgccgggccgccacgagccgcgcgacccggagctggaccagttcatggaggcgtactgtaacatgctcgtcaagtaccgggaggagctcacccggccgatcgacgaggccatggagttcctcaagcgggtggaggcgcagctcgactgcatctccggcggcggcggctcctcctcagcgcgcctctcgctcgccgatggtaaatcagaaggtgttggctcttctgaagatgacatggacccgaatggtcgcgagaacgatccgccggagattgacccacgagcggaggacaaggagctcaagtaccagctgctgaagaagtacagtggctacctgagcagcctcaggcaggagttttccaagaagaagaagaaagggaagctcccaaaggaggccaggcagaaactcctccactggtgggagctgcactacaagtggccgtacccttcagagacggagaagattgcgctcgcagaatcaacgggcctagaccagaagcagatcaacaactggttcatcaaccagaggaaacggcactggaagccatcggaggacatgcctttcgtgatgatggaaggcttccacccgcagaacgccgctgctctgtacatggacgggccgttcatggccgacggcatgtatcgcctcggttcatgaactacacacttccatggacgactgtgggggcctatccaatcgtcggaccgtgggagtatatttcagtgttgcggtgcaaggacattgttgtggaatttttgttgctgattgccaaggggtgggtcggtcgatgtagcgtctatgcatggcttgtagttctcctgtaatgttgttgttaatttccgcttggcggcttgtaatctaggtgtatctctggaacttgaatcctgggtgattaatccggcaagcagctgcctgtttgtatgattgtatggttcgggttggtggaacatgatgcatgctaaggcgtggcctgtctggatcaaaaaaaaagaagatgtcttttgtaccagtggaatgattggaacttcagattgctgaacaaaaaaaaaaaaaaaaa

SEQ ID NO: 291 - DNA, 1214 bp, Glycine max
attcggctcgaggtggcagcataaccagaaaaaggttccagaaattctggtaaggaacgaagcaaagcaaacgcagcgtttcgtttcgtgtcgctgctggttatggatggaatgtacggagtgccggcggagtacgccgacaaggctctcatgacgccggagaatctgattttcccgccggactaccaccacgacttcctcgccgccggccggattccgctgttcggatccgacgagttcttctcctcctccgccggaattcaccggcagcaggaagatgacgtggcagccaccactgtcatgaaggccaaaatcgcctctcaccctcactaccctcgcctcctccaagcttacatcgagtgtcagaaggttggggcgcctccggaaatcgcgcgcttgttggaggaaatccggcgagaaaatgacccgtgcaagagcgacgccgtttcttcttccacgtgctttggagccgatcccgagcttgacgaattcatggaagcctactgcgacatgttggtgaagtataaatccgacttggctcgcccttttgatgaagcaaccactttcctcaacaagatcgaaatgcagctcagccatctctgcactggtgcttccgtttccaacgtttctgatgatgggggtgtgtcttcggacgaagatttgagtaccggagatggtgatgctcaagatggccaattaaagggtgaagatcgtgagctcaaggataggcttttacgaaagtttgggagtcacatcggtactttgaaactcgagttttcaaagaagaaaaagaagggtaagcttccaaaggaagcaagacaagcattgcttcaatggtggaatgttcactacaaatggccttaccctacggaagctgataagattgaactggctaagtcaacagggctggaccagaagcaaattaacaattggtttattaaccaaagaaaacgtcattggaaaccatcagagaatatgcagttttctatgatggaaaattttaacggacggatccttgctgatgaatgaatgaggtgcatgtacatgatattttcaaatgtatatcccgattaattattgcttgtattttcttttttgtaaattctaaattaaaagcagattactgacagtaaaatgcttattactttcccatgaaggaaaagggaaatgatcataatagtattcttgataaataactactgacattgtgaatt

SEQ ID NO: 292 - DNA, 1334 bp, Glycine max
gaattcccgggtcgacccacgcgtccgtacggctgcgagagacgacagaaggggagaattagatatacatattttatttatttgcttaggatattgtcctaaaacttacttgcttggaccccagtagttgagttgaggaagtgatggaagcagtttacaggttgaaacctcttttggatgtggttagagttgggaacgctaccacttctgagatgcgtcttgactcaacggctaattgttacctgcagctagaagctcctcaacctcaagagaataataatgtaaccgactcatcatcagatatgtcggatcggataatcaagatccagatcgccaatcaccctctttatccagatttactctctgcatatattgaatgccaaaaggttggagcaccgccagaactggcatgccttcttgaagaaataggccgagaaagccaccgcatgaatgctcgccgtgagataggggagggccctgaacttgaccacttcatggaaacattctgccaagttcttcatagatacaaggaggagttgtccaggcccttcaacgaagcgactttgtttttgggtgacatggaatcacaactcagcaacctttgtaatgaaacactaacaaagtcatcggataacaacaaccgctccgacgaggtagctagtggggcatcagaagaggaattaagttgtggggagatggaagcatttgaagataatgtatcttcagtaacttgtccaagtgatcaaaggcttaaagagatgctccttcgcaaatacagtggccattttagcggtttgagaaaggaatttctgaaacgaagaaaaaagggtaagctaccaaaggatgcaaggatggcactcatgggctggtggaacacccatcatagatggccttatcctacggaggaggagaaagtgaagttatcagaaattactggtctggatcaaaagcagatcaataattggttcatcaatcagagaaaacggcattggaaacctaccgaggacatgcgatttgccgtcatggacggattaagaggcggcggtggcggcggcataggagggcctatgttgttttagctctggaagtgctcctcaacgatctgaacttgtacccttcgtaattgcaggagcaatgtatgtgcattgcattcctgttacacgtgatatatatactaaattttagagactgaactgttgtttagctaatatacttgtcaaagttgtagttatagtagtgtaatgcgccattgttatgcagtattcctgaatctttgattatattataacaatgtcgtgctgaaaaaaaaaaaaaaaaaaaaaaaaagcggccgc

SEQ ID NO: 293 - DNA, 1723 bp, Glycine max
gaagcttcggtttctctctctctctctttctctttctcttagggttttcactttcaccaatttctccttctcttccgatctacgcccaaaggtatcacctcgcgtgcattcgttcctaatcctttcaaactctccgttctcccatctttaacttgtttaagctgctacgtttaattgaattcgccgtttccaaattgtcttttcatttctttcttttgttctgcaattagacattgctagggttctggagtactggattagctcattaaggattgagtactccatctatcttctgtcttcatggataaagacaaatctctaggtttgccacctccgtctggacgttattctggttactcgtccaccggaagtgttttcaacgtgaaatctgaaccgtccccgtcgtcgtcaaccacgttgtatccgccattggctccgggaactaccagttccgagtctagccattttggacatggattgtccacggattctagtggttttagtcatgatattagcagaatgcctgataatcccccgagaaatagaggtcataggcgtgctcattcggagattctcactttaccggatgatattagtttcgacagtgaccttggtgttgttggaggtggtgatggtccttccttctccgatgatgccgaggaggacttgctgtccatgtaccttgatatggataagttcaattcatcgtcggcaacgtccacgtttcaaatggttgagccgtctaatgctgtgggagcatcggcttcaacaccggcgtcaggggcacccacctcttctaccgagaatgttgttattgggactaatgaaaggcccagagttagacaccagcatagtcaatccatggacggctcaaccaccatcaagcctgagatgctggtttcaggttcagaagacatgtctgcggctgattccaaaaaagcaatgtcagctgccaagcttgctgaacttgccttgattgaccccaaacgtgcaaaaaggatatgggcaaataggcagtctgctgcaaggtcaaaagagagaaagatgcgatacattgctgagcttgaaaggaaggtgcaaacattgcaaacggaagcaacatctttgtctgcacaattaactctcttgcagagagatacaaatggcttaaattctgagaacaatgaactgaagctgcggttgcaaaccatggagcaacaagttcacttgcaagatgcattaaacgatgcattaaaagaggaaattcagcatttgaaaatattgactgggcaagctatgccacctaatggaggacctatgatgaactttgcttcttttggaggggggcagcaattctatcccaataatcatgccatgcacacccttttagctgcacaacagtttcaacagcttcaaattcaccctcaaaagcagcagcagcatcagtttcagcagcttcagcaacagcagcgggaacagcaccaacaatcaattgacttgaaaatgagagaagctacacctactccatgccccaaagacaatgcctcatcagatgtaaatccttctggggccaaggactgttgagagttgagactgctcattgtcttctctatttgctttatagattttcctttgtcttgtgtcctagtgtgtttagcctttgttatattttttcattcttaaacagtacaaatggtcctagttagagattgagtataatacatttgcatctttgttattatgt

SEQ ID NO: 294 - DNA, 1523 bp, Glycine max
attcggctcgaggtttcttctgcagctatggcgattcaagatcaaaatggatttttcagatcacagggtggtcctccagaaggaggtggtgtatctttgagttctgggcattctgtcacacatattcaacttaatgaccagttttcttgtgggaatgactatgctctgaaggtaaggaagccgtatactatcactaaacagagagagcgatggacagatgaagaacataagaagttccttgaagctttaaagctgtatggacgggcttggcgacgtattgaagaacatgttggcacaaagactgctgttcagattcgaagtcatgctcagaagtttttttctaaggttcttcacgatcctactgggaacaatacaaacacagtggagtcaattgaaattcctcctccaagaccgaaacgaaagccgatgcatccttaccctcgtaaactagttgagaccccaaataaggaaatttcgatcccagaacaacctatgaagtctaattctctgaagtcgtcagactttgatcaagaaaaccaatctccaaaatcagtattatcaggagttggttcagacagccttggctcctctgattcagacacaccaaatggaagtttgtcgcccatgtcatccattagtggcttccatacaagcagttttacacgtgccaaacccaaaacaacaacatctgaggaagaagctgggatggacactgattcaactcatgatgagaaacctcttatgaaattcaagcttcctccaaatggatgtgtttccatcaaagaagacaacacagcagaagaatcttccggtcggactttcaaactctttggaatgactctatttgtaacagacacctgcaaaccatctccaacaatcgaggaatgctaaagatacctctaaacattcgcgcgcaacgcctttcctcctccatggaggatggcaaattggaacttgttggacactctagagcaagtgaaacatcagcaatatccaagctaaaggtgagagtggaacctgaagcatgtgggaaagggtttgtgccatataaaagatgcatatctgttgtgacagctgatgatagagaagagcaatgtatccatctttccttgtagcttataccccactggatttttccttcaaaaagtgttccctttgtcatgatgagctgtaatggttgttttggttgctgctggatgtgagttggtatgatataggaaggaaaaaggggtggctgaaaattttgatatttccgttgaattgcactgcactgcacattctccagctgttcaaatccgtaaacttgccttttctatttttttgacttccaagtttcaacacattctccgcgggtccaagccgtgtctgtgcgcggcacttaggagctgtgtccgtgcttcctagtttaactgtgaataactgtgaattatatctagtgccttttttttaaaaaaaaaaaaaactttttatgctccctaagagtatgcaaagtgtaagtcacgtactaaaaaaaaaaaaaaagg

SEQ ID NO: 295 - DNA, 1656 bp, Oryza sativa
gcgtcgagctgcctagctatcgagatcttcgtacgtaaatacgtctccctcgtctccggcgagccaccggcttgggcgtacgtgagagatggcgccgccgtcagccatgaacacgtcgagggcggaggagaaggccatcgacgactggctccccatcacctcctcccgcaacgccaagtggtggtactccgctttccacaacgtcaccgccatggtcggcgccggcgtcctcagcctccccttcgccatgtccgagctcggctggggtcctggggtggcggcgatgatcatgtcgtgggtgatcacgctgtacacgctgtggcagatggtggagatgcacgagtgcgtgccggggcggcggttcgaccggtaccacgagctcgggcagcacgcgttcggggacaagctggggctgtggatcgtggtgccgcagcagctcatcgtcgaggtcggcgtctgcatcgtctacatggtcaccggcggcaagtcgctcaagaagttccacgacctcgtcgcgccgccctccgcgccgcccatccggacctcctacttcatcgtcatcttcggctgcctccacctcgtcctctcccagctccccaacttcaactccatcaccggcgtctccctcgccgccgccgtcatgtcgctcagctactccaccatcgcctgggccgcctcgctccaccaccacaaccacaacaatggcgccgccgccggaggcgtggactactcgctgacggcggcgacgccggcggggaggacgttcaacttcctgagcgcgctgggggacgtggcgttcgcgtacgcggggcacaacgtggtgctggagatccaggcaacgatcccgtcgacgccggagcggccgtccaaggggccgatgtggcgcggcgtcgtgctggcctacggcgtggtggccgtctgctacctccccgtggcgttcgcggggtactacgtgttcggcaacgccgtggacgacaacgtgctcatcacgctggagcggccggcgtggctgatcgccgccgccaacatattcgtcgtcgtgcacgtcgtcggcagctaccagatctacgccatgccggtgttcgacatgctcgagaccttcctcgtcaagaagctccgcttcaaacccggcatgcctctccgcctcatcgcccgatcactctacgtcttgttcaccatgttcgttgccatcgccgtccctttctttggtggattgctaggcttctttggtggctttgcgtttgctccaacgacctacttcttgccatgcattatgtggctgtcgatcatgaagccaaagaggtttggcttgtcctggtgcatcaactggttctgcatcatcatcggcgttcttctgtcggtgttcgcaccaatcggaggtctccgctcgatcatcgtgaatgcccagagttacaagttcttctcgtgagtgattaattgagaggtgttttaccattcaattaagtgtgttcttaattaattaggggattgttttagataatgcacagagttctatttaattagatgaaagagaaattcgtgtgtccctaaaaaaaaaaaaaaaaaaaaaaaaaaaaaaaaaaaaaaaaaaaaaaaaaaaaaaaaaaaaaaaaaaaaaaaaaaaaaaaaaaaaaaaaaaaaaaaaaaaaaaaaaaa

SEQ ID NO: 296 - DNA, 1671 bp, Zea mays
ctcggcagcaggacccgccgccgcctcctctccatctctttctctctctctcgccatatcgattccattggggacgcaagcaccgccccagacccagagcttctcttctcaaaagatgcaggagcaggacgtggacgatggcggcggcaggacgacccagcagcaggagaagtcgatcgacgactggctccctatcaactcctccaggaaggccaagtggtggtactccgccttccacaatgtcaccgccatggtcggcgccggcgtgctcggcctcccctacgccatgtccgagcttggctggggccctggcatcgcggtgatgatcctgtcgtggataatcaccctatacacgctatggcagatggtggagatgcacgagatggtgcctgggaagcggttcgaccggtaccacgagctcgggcagcacgtcttcggcgacaggctgggcctctggatcgtggtgccgcagcagctggcagtagaggtgagcctgaacatcatctacatggtcaccggcggccagtccctcaagaagttccacgacgtcatctgcgacggcggcaggtgcggcggcgacttgaagctctcctacttcatcatgatcttcgcctccgtccacctggtcctctcccagctccccaacttcaactccatctccgccgtgtcgctcgccgccgccgtcatgtcgctcagttactccaccattgcgtggggcgcgtcgctgcacagagggaggagagaggacgtggactaccacctgcgcgccacgaccaccccagggaaggtgttcggcttcctgggaggcctaggggacgtggcgttcgcctactcggggcacaacgtggtgctggagatccaggccaccatcccgtccacgccggacaagccgtccaagaaggccatgtggaagggcgcctttgtcgcctacgtcgtcgtcgccatctgctacttccccgtcacgttcgtcgggtactgggccttcggcagcggcgtcgacgagaacatcctcatcacgctctccaagcccaagtggctcattgccctcgccaacatgatggtcgtcgtccatgtcattggcagttaccaggtttatgccatgccggtgtttgacatgatagagacggtgctggtcaagaaaatgaggttcgctccgagcctcacgctccgtcttattgcccggagcgtctatgttgcgttcacaatgtttctaggcatcactttccccttcttcggtggattgctcagtttcttcggcggattagccttcgcaccgacaacttattttcttccctgcatcatgtggctcaaggtttacaagcccaaacggttcggcctttcatggttcatcaactggatctgcatcgttattggagtgctgctgttgattctgggtccgataggagggctccggcagatcattttgtcagccaccacatacaaattctaccagtaaaatcgatcaactggagtcgtatggcgtggctgttttgttagcattacatttcttagggtggattggcttttaatgtacacgagcgagtgagattgatgctagtagctcctaggagtatatatatttctatcatccacagagcttaatgtatcttgtagttgggacaaaaaaaaaaaaaaaaaaaaaaaaaaaaaaaaaaaaaaaaaaaaaaaaaa

SEQ ID NO: 297 - DNA, 2071 bp, Oryza sativa
cactcctctcccctccccacgcaaccgccttcctccgccgccgccgacgccgacgccgacgccgaccccttctcccaatctgcggattccagcgggggtcccccccccctcccaccggcggcgcccggtggtcgtggtcgtgggggaggggagtcaacgaacgagccgagccgcccgcttgccggagctctctatctatctctctatctctatctctatccctccagattccctcctccatcgaatctctgatatttggagggagcgactcgacgcagcatcgcatcgtaaggaaggtcccctccactgtcgatggatcagcaccagctcgacgaggagaaccagagagccgcgctcttccactcctctgccccatcttcctctttgggagctgacggggaggaggagagggagactgtgccgctgctgtcctgcaagatggccgacgataaatctgacactgtccaggtctccgaggatacggcgcaccagattagcattgatccctggtatcaagttggattcattctgacaaccggggtgaatagtgcatatgttctgggatattctgcatcaatcatggtccctttaggctggattggtgggacatgtggcttgattctagctgctgcaatatccatgtatgcaaatgctcttcttgctcaccttcatgaagttggtggcaaacgccatatcagatacagagatcttgctgggcacatatatggtagaaaaatgtattcgcttacatgggctctgcaatatgttaatctattcatgatcaacactggccttatcattttagctggtcaagccctgaaggcaatatatgtattatttagggacgatggagttctaaagctaccctactgcatagcattatctgggtttgtctgtgctctttttgcctttggaatcccttatctgtctgctctcaggatttggttgggattatcaacagttttcagtctcatctatataatgatagcatttgtcatgtcgcttagagatgggattaccacacctgcaaaggattatactattcctggatcacattcagatagaatcttcactacgataggtgctgtagcaaaccttgtgttcgcttacaacactggaatgctcccagaaattcaagcaaccataaggcctcctgtggtcaagaatatggagaaggctctatggttccagttcactgttggttcgttgcctctttatgctgtcacctttatggggtattgggcgtacgggtcctcaacatcaagctatctactgaatagtgtgaagggaccaatttggataaaaactgtggcaaatttatcggcgtttcttcagactgtcatagcattacatatatttgcaagcccaatgtacgaattcttggacacaagattcggcagtggacatggtggtccttttgcaatccacaacataatgttcagagtgggtgtcagaggaggctacctgaccgtcaacaccttggtggccgcgatgctccccttccttggcgacttcatgagcctgacgggtgcactcagcacctttcccctgacattcgttcttgcaaatcacatgtacctcacggtgaagcagaacaagatgtccatcttcaggaaatgctggcactggctgaacgttgttggcttcagctgcttgtccgtcgcagctgcggttgctgcggtgaggctaatcacggtcgactacagtacataccatttgtttgctgatatgtgaggctggaaagtgcaagcatgcagccctggatcagctgtaaattcgtcctcttcttttttatttttttggttaggggatgcatgtaggtcgatagaatgatggagattgcaataaataatttggctaaaatgttgtccagatttggttgtttgaggtgcaagatgtttgcctcaaaacgtaccgctatggttcactttttaagaactgtactgctacctctgtttgcggagatttttgtctgcaggcatgcaggatgaatattattcaaaaaaaaaaaaaaaaaaaaaaaaaaaaaaaaaaaaaaaaaaaaaaaaaaaaaaaaaaaaaaaaaaaaaaa

SEQ ID NO: 298 - DNA, 1840 bp, Zea mays
gcaagaagctgtccctccctccctcccctgtgcttctgctagctaggtgcctgcggaggagagatagggatacgatggccggcggtggcatcgtgaacacgggcggtggcaaggactaccccggcaagctcaccctcttcgtgttgctcacctgcatcgtcgccgccaccggcggtctcatcttcggatatgacatcggtatctcaggcggcgtgacgtccatgaacccgttcctggagaagttcttcccggaggtgtaccggaagaagcaggaggccaagacgaaccagtactgcaagtacgacaaccagctgctgcagaccttcacctcctccctctacctggccgcgctggtcgcctccttcttcgccgccaccgtcacccgcgccgtcggccgcaagtggtccatgctcgtcggcggcctcaccttcctcgtcggagccgccctcaacggcgccgcccagaacatcgccatgctcatcatcggacgcatccttctcggcgtcggcgtcggcttcgcaaatcagtccgtgcctgtgtacctgtcggagatggcgccggcgcgtctccggggcatgctcaacatcggcttccagctgatgatcaccatcggcatcctggcggcggagctcatcaactacggcaccaacaagatcaaggccgggtacgggtggcgcgtgagcctggcgctggcggcggtgccggcggccatcatcaccctgggctccctcttcctcccggacacccccaactcgctgctggagcggggccacccggaggaggcacgccgcatgctccgccgcatccgcggcacggacgacatcggcgaggagtacgcggacctggtggcggccagcgaggaggcccgccaggtgcgccacccgtggcggaacatcctgcgccgccggtaccgcgcgcagctcaccatggccgtcgcgatccccttcttccagcagctcacggggatcaacgtcatcatgttctacgcgcccgtgctgttcgacacgctgggattcaagaacgacgcctccctcatgtcctccgtcatcacgggcctcgtcaacgtcttcgccaccgtcgtgtccatcgtcaccgtcgaccgcgtcggccgccgcaagctgttcctccagggcggcgcgcagatgatcgtgtgccagctcatcgtgggcacgctcatcgccgccaagttcgggaccagcggcacgggggacatcgccaagggctacgccgcggtcgtcgtggtcttcatctgcgcctacgtcgccggcttcgcctggtcgtgggggcccctgggctggctcgtgccgtccgagatcttcccgctggagatccgcccggcggggcagagcatcaacgtctccgtcaacatgttcttcaccttctgcatcgcgcaggccttcctcaccatgctctgccacttcaagttcggcctcttctacttcttcgccggctgggtcgtcatcatgaccgtcttcatcgccttcttcctgcccgagaccaagaacgtgcccatcgaggagatggtgcttgtctggaagtcacactggttctggaaaaggttcatcgccgacgaggacgtgcacgtcggcattggcaacaaccacccggccaaaaacggcagcgacaccaagggggccgacgcgtgaacgtgatctcaacatctatattccatctacagtcacaactgaaatgtacatttaggcttccattgttccatcaactagtagctacatgtcctcctagtaaagtaccagtgtttgtttgtgtaatgtttgttacgcccattaaattcttcttggattggatgaaaaaaaaaaaaaaaaaaaaaaaaaaaaaaaaa

SEQ ID NO: 299 - DNA, 1923 bp, Glycine max
gtttccctgtctctgttctcttcaccattctctttcttctttgtttcaagtttcaacaacccagattcactctctctctcgtaattttctctcttattgaggctagaaaaagagagcaaaaaaactaaaaaatgcctgcggtcggaggtataaacaccggagggggcaaggagtaccctggaagcctcactctatttgtgacggtaacatgtatagttgcagccatgggtggtttaatcttcggttacgatatcggaatttcaggtggagtgacgtccatggatccgtttctgctcaagttttttccgtcagtgttccggaagaaaaactccgacaaaacggtgaaccagtactgccaatacgacagccagacactgacgatgttcacgtcgtccttgtacctcgccgctttgctgtcgtcgttggttgccgccaccgtcacgcgtaaattcggccggaaactctccatgcttttcggaggcttgcttttcctcgtcggtgccctcatcaacggtttcgcccaacacgtttggatgttaatcgtgggtcggatcttgctcgggttcggtatcggcttcgccaatcagtctgtgccactctacctatctgaaatggctccatacaaatatagaggagcattgaacattggctttcagttgtccatcactgttggtatccttgtggccaatgtgttgaactatttctttgctaaaatcaaaggtggttggggatggaggttgagtttgggaggtgctatggtccctgcccttataatcacagtaggatcactagtccttccagacactcccaattccatgattgaaaggggtgatcgcgagaaggccaaggctcagcttcagagaattcgcggcatcgacaatgttgatgaagagttcaatgaccttgtggcagcaagtgaatcctctagccaagtggagcacccttggaggaacttgttgcaaagaaagtacagaccccacctcaccatggcagtgttgattccattcttccagcaactcactggaatcaatgtcatcatgttttacgcgccggtcctgttcagctccatcgggtttaaggatgatgctgctctaatgtcagctgtgatcaccggcgttgttaatgttgtcgcaacttgtgtctcaatttatggtgttgacaagtggggtaggagagcccttttccttgaaggtggagtccaaatgctcatttgccaggctgtagttgcagctgcaattggagcaaagtttggaactgatgggaacccaggtgatttgccaaagtggtatgcaattgttgtggttctcttcatttgcatttatgtatcagcatttgcctggtcatggggtcccctaggttggttggtgcctagtgagatctttcccttggagattcgttcagctgctcagagtatcaatgtgtcggtgaacatgcttttcactttcttgattgcacaagtcttcttgacaatgctttgccacatgaagttcggcttgttcctcttctttgccttcttcgtgttgatcatgacattcttcgtctacttcttcttgcccgaaacaaagggcattccaattgaagaaatggggcaggtttggcaggcacaccccttctggtccagattcgtggagcatgatgattatggcaatggtgttgagatgggaaagggagctattaaagaagtgtagttagtcctcgtcttggtttatttttctcaatgactagcgttttagcttttgttggtaaatcatactattggtttcaatgtattgaattgttcctaaaaattaaaaagggttatttttcttatgtatcccctgcttcttcatatgaagcaagtttacaggatacttttctatattaatccaattgcacaaattgttatgcctttgaaaaaaaaaaaaaaaaaaaaaaaaaaaaaaa

SEQ ID NO: 300 - DNA, 1883 bp, Zea mays
gcgcgcgctagcctagctgctcctgcctggttcgccgtagcccgtagcccgtagcacaacaacaacaaaaaaaatctccgcggcgcggggggaggtggtctgttcaccttggggagcagcggcgggccgtcggccgagaaatgcccggtggcgccttcctcctcaacggcagcggcggcggcatggcggactacggcggcggcctcaccgtccccgtcgtcgtgacctgcctcatggcggcctccggcggcctcatcttcggctacgacattggcatctcaggaggtgtgtcggagatggaggatttcctgaacaagttcttccccgggttgctcaagaggacggcgcgcgccaacaaggacgtgtactgcatttacaacaaccaggcgctgacggccttcacgtcgtcgctgtacgcgttcggcatggtggggacgctgctggcgagccgcgtgacccggcggctggggcggcaggccgtcatgctgatcggcggcggcctgttcttggccggcgccctcgtcaacgccgccgcggccaacatcgccatgctcatcgtcgggaggatgctgctcggcctggggctcggcttctccggccaggccacgccggtgtacctcgccgaggtgtcgcccccgcgctggcgcggcggcttcatctcggccttccccctcttcatcagcgtcgggtacctggtggccaacctcatcaactacggcacctcgcggatcccgggctggggctggcgcctctcgctcggcctcgcctccgtcccggccgccgtcatggtggtcggcgccgcgttcatcccggacacccccagcagcctcgtcctgcgcgggaagcacgacgacgcccgcgccgcgctccagcgggtgcgcggcaagggcgtggacatcggccccgagttcgcggacatcctcgccgcggcggagaacgaccgccggaacgaggagggcgcgttccgccggatcctgcgccgggagtaccggccctacctggtgatggccgtggcgttcccggtgttcctcaacctcacaggggtggccgtcaccgccttcttctcgccgatactgttccggaccgtcggcttcgagagcgacgccgcgctcatgggcgccgtcatcctgggcctcatgaacatcggcggcatcctcgcgtcgggcttcgccatggaccgctacggccggaagctgctcttcatgatcggtggcgcgctcatgttcacgtgccaggtggcgatggcgagcataatcggatcacacctcggcaacgggagcaagatgcccaaggggtacgcggtgacggtgctggtggtggcgctgatcttctcggcgagcttcagctggtcgtggggcgcgctgtactggaccatccccggcgagatataccccgtggaggtgcggtcggcggggcagggcgcggccgtggcgctcaacctggggctcaacttcttgcaggcgcagttcttcctggccatgctgtgctgcttcaagtacggcaccttcctcttctacgcgtcgtggctggttgtcatgaccgccttcgccgtggcgttcgtgccggagaccaagggcgtgccgctcgagtccatggctcacgtcttcgcgcgccactggtactggggcaggttcgtcaaggaccaccagaagttgggcgaagagtccacctagctaagctaataattcggaatcagcgaacgacgtaccctactaccagtagcagattattgataagggagtcaaacacatattgcgtgtgtgtgtcttttaaagtgttcgtttagaatggcttgagaagctcatccgtgtagtaaatttggagacttcgaaatataataaatatgttcgtagttggcaagctaaaaaaaaaaaaaaaaaaaa

SEQ ID NO: 301 - DNA, 2127 bp, Glycine max
attcggctcgagatttcaccaatttctattttcataactttctctgcagtctcttcacctttatgttaatgatattatgtgtttagagagaaagagaacaagcatagttgagcttgattgtgttcttcaacattagaacaagaaaagaaagacaacaacatggaaggaggaggagtagaagttgatgcctctgctttcagagaatgcttgtctctgtcatggaaaaatccttacgttcttcgccttgctttttctgctggaattggtggccttctctttggctatgacactggagtcatatctggggctattttatatatcagagatgatttcaaagcagtggataggaagacttggcttcaggaagccatagtgagtatggctcttgctggagcaatcgtaggagctgcagttggtgggtggattaacgatcgatttggaaggagaaaagctattcttcttgcagacacactcttctttattggctctgctgtcatggctgccgctaccaatccatctattctcattgttggtcgagttttcgttggccttggtgttggaatggcctcaatggcatctcccttatacatctctgaagcttctccaactagagttcgaggtgctttagttagtctcaatggctttctcataactggaggacaattcctctcctacctcatcaacttggccttcacaaaagcaccaggaacatggagatggatgttaggagcagcagtagtaccagccctgatacaaatcgtattaatgatgatgctgccagaatcaccgcgttggctgttccgaaagggaagagaagaagagggtaaagaaattctaaggaagatttatccaccccaggaagttgaagcagaaattaatactttgagggaatcagttgaaatagaaatcaaggaagcagaggccacagataacatcagcatagtcaaaatgctgaaaactaaaactgtgagaagaggtttgtatgcaggaatgggccttcaaattttccaacagtttgtggggatcaacactgtgatgtactacagtcctaccatagttcagttagctggttttgcatccaaccgaacagcacttcttctgtcactagtcacatctggtctcaatgcatttggttctattttgagtatatacttcatagacagaacagggaggaaaaagcttgtgttgttcagtttgtgtggtgttgtgttctcccttgttgttctaaccgttgtgttccatcagagtacaactcactccccaatggttagtgcactcgaaacctctcacttcaataacacttgcccggattaccattcagctgcgaaccctggtggatgggattgcatgaagtgcctgaaggcttctccaaattgtggcttctgtgcttctggagccaataagctcttacctggggcatgtttgatctccaatgacaccacaaaagatcagtgccatgaagaagatagactatggtacaccgtggggtgtcctagtaaatttggatggcttgcaatagtagggcttgcactctacatcatattcttctcacctgggatgggaactgtgccatgggttgtcaactctgagatttatcccctaagatatcgaggaatatgtggaggaatggcatccacatccaattgggtctcaaatcttattgttgctcagtccttcctatcattgacacaagctattgggacctcatggacatttatgatatttatattcatcaccatagctgccattatctttgttattattttcgtgcccgaaaccaaaggacttccaatggaagaagtggagaagatgttggaaggaagagatctcaacttcaagttttggcagagaagttctcactgtggagaagaagtaccaccacaaaagactcaatcaaattaagtctattgtgttgcatcatttgtaatattggagtattaactaaagaagtataggtaataaaatcgtagaatgtagctattagattctaagtatatacaataaaatcgtagaatgtagctattagattctaagtatatacaatatcttgtttgtgtgaatttttttcttatcaacaaatattattttgttaattttgttacaaattaaaaaaaaaaaaaaaaaagg

SEQ ID NO: 302 - DNA, 1931 bp, Zea mays
cgcatttcgaaatccccaaacggaagcatcgccactcttccgaacctgaacaatcaccaccgttattaagaagatgatgcgctgcgctgcaacgggcggcgggtgcgtcgcttcgtggagcggcgatcggagattgccggcggtcaacccctgcagcgtgcggatgccgacgggcaacgatgggtggtgcgccggcctgaggtcgcgggcggcggatctcgccggcctcgagatggccaacctgcgcggcggcgtcggggggctcttccgcgcgagcccgcgctacgggcgcttgcaagccacggcggcagttgaccctgaagatattccattggagaaggttcaagttaaatcctcaggacatgttctgccatatgttggcgttgcttgtttgggggctattctgtttggttaccatcttggtgtggtcaatggcgcacttgaatatctcgcgaaggatcttgggattgctgaaaatgctgtcttgcaggggtgggtggttagcacatccttggctggtgcaacactaggttcttttactgggggttctttggcagataaatttgggcggacaagaacattcatcctggatgcagtcccacttgctctaggtgcattcttgagtgcaacagctcaagatatccgcacaatgattattggccgattgcttgctggaattggtatcggggtctcatctgctcttgtacccctttacatatctgagatctcaccaactgaaattcgtggaacacttggtaccgttaatcaactttttatttgcattggaattcttgcagctttgttagctggattgcctctggcaggaaatcctgcctggtggaggacaatgtttggaattgctgtagttccatccattctgctggctgtaggaatggccttttcgcctgaaagccctcgttggctattccagcaaggaaaggttactcaagcagaattagctgtaaaaagactgtatggaaaagaaatggttaccgaaattatgtttgatctgagagctagtggccaaagttcttcggagtccgaagccggctggtttgatcttttcagcaagcgttactggaaagttgtgagtgtgggggcagcactgtttttgttccagcagcttgctggtataaacgctgttgtatattactctacatcggtgttccgtagtgcaggcattgcatctgatgttgctgctagtgctcttgttggagcagccaatgtttttggtactatggttgcatcttctctaatggacaaacaaggaaggaaaagccttctgataacaagcttttctggaatgggtgcttcaatgctactcctagcattgtccttcacctggaaagctctggcaccttattctggtactcttgctgttgttggcactgttctgtacgtgctgtcatttgctctaggagcgggccctgttccagcgctacttcttcctgaaatatttgcctcgagaataagggccaaggctgtcgcattatctctaggcatgcactgggtatctaactttttcattggcctgtacttcctgagtgtcgtgagcaagtttgggatcagcaacgtgtatctgggatttgcatcagtatgtgcccttgcagttctgtacatagctgggaatgtggtcgagaccaaggggagatcacttgaagagattgaaagggagctaagtgtagcagaatgatgtacttttgctagtcatgctgtggcgccgttttggttatcgagaatgcaaccaagcgctcaaccgagcatccttggacctggagactctttctagtttcatgtagttttagaaataagcgaacggcaagagtaccaatcttaggtgacttggtgtgggttgtgtctgaaataagtgaattggattgtagaatttcagaaataagtgaattggattgtagaatttaaaaaaaaaaaaa

SEQ ID NO: 303 - DNA, 2051 bp, Zea mays
catcgacatcctctcacctccctcgcactccattggatttgggggagctcggggggcgcgggccactgatgatccccggaacgagcaccgatccgtggcgaggaaactccaccgggtagccggcccgggagcgcggggcacggcgatggcgggcgccggggcagcggccaatggcggcaggaacaagtacgcggttctcgatcggagcgaggagcgacagacggacgctaggacggagcggcggaggaggccgttggcgcccgagagcgagagggggagaagggagcggttcgtgtacgcctgcgcggtcttcgcctccctcaacgccgtcctgctcggctacgatgttggcgtaatgagtggcgcgatcatctacatgcagaaagacctccacataaccgagtttcagcaagaaatcctagtaggctgtctgagcgtggtctcactcttgggaagcctatcaggggggcgaacatctgacgcaattggcagaaaatggacaatgggcctcggtgcaattgtgttccagataggcgcgaccatcatgacgtttgctccatcattcactgtgcttatgatagggaggctccttgctggggttggcattggctttggtgccatggtatctggagtgtacattgctgagatctcccccgcaggtgcccgagggacgctcacatcccttcctgagatctgcatcaattttgggatccttcttggctacgtttccaattatgccttctcaggcctttctgagcacatcaattggaggattatgcttggtgtcggtatcctcccatcagtcttcattggctttgcgcttttcgtgatcccggagtcccctaggtggttgatgatggagaagagagtttcagaagcaagggcagtgctgctgcagattagcgagtctgaagctgaagctgaagaacggctggctgagatcgaggaagccgcaggtctgatgaaatcaatgaaatctgaggacaaagaagtgtggagggaacttttgaacccgtctcccgccgtccgtcggatgctgtacgctggttgcggtattcagttgttccaacagatcacaggaattgatgctactgtctattacagcccaacaattttcaaagatgctggcatcaagtctgatcaggagcttctcgctgcaactgttgctgtgggtttcactaagacagtgttcatcttggttgcaattttcctaattgatagagttggacggaagccacttctttatgtgagcaccattggcatgaccatctgcttatttctcttgggggttgcacttacactgcaaaaccatgcggtggggcttatgtctccacgtgttggtatcgacctagcaattttcgcagtttgtggcaacgtggcattcttttcaattggcatgggaccaatatgttgggtcttgtcctcagaggtatttcctttaagattacgagctcaagggtcagcgcttggtcaagtaggtggtagagtgagcagtggtttggtttccatgtcattcctttctatggcccgtgctatatcagtggcaggaatgttcttcgtctttgctgcaatatccactatctctgtactgtttgtgtacttttgtgtgccagaaacaaaagggaaaacactggagcagatcgaaatgatgtttgaaagtggggacgaatggggaggaggtgaaattgagcttgaggatacacagcatttaataccgagtatcaagaagtctgtgcctcttggttgatatttgtagcatcaataaaattcttattagctccatgtttcaatgacgagccaaccaaaccagctggattctgaactttggtttcgagtgatctggccacactgagccacgaccgatctgataaaagataagcttgatagacataggtgcaacgtagaagattaattgtgatgttagttcaaaatgtcaatgattttactgggaggcggtctgtaatgtatgatcttacatctcttgtaccttcttacatctctcgtacctcccagcggaagaatatactcgcagaaaagttttctaaaaaaaa

SEQ ID NO: 304 - DNA, 1768 bp, Glycine max
ttgctttctaattattcgtgttgtcagtgtctctttgaggccattttgctagctatttaataatggcaattgagaagcatgaggatgttgagagtggatatttgcacgagcccttcattcaaccagaggatgctgctgctgcttgtaaagaaaatggatcagataagagtgtgaaaaatggatccattggaatggttttgcttagcacacttgttgctgtttgtggttctttcacatttggaacttgtgtgggctattcagcacccactcaagcggctatcagggcagatcttaatctctctcttgctgagttttccatgtttggttcattagtgaccattggtgcaatgcttggagctataaccagcggcaggattacagatttcattggccgcaaaggggcaatgaggatttcaacaggattttgcattacaggatggatagctgtcttcttctctaagggttcttactcccttgacttcggaagatttttcacaggttacggcattggagttatctcatacgtggttcctgtatatatagcagaaatagcacccaaaaatcttcgaggaggactagcaacaacaaatcagcttttgattgttactggagggtcagtctcattcttattaggaagtgttataaattggagagaacttgcattagcggggctagtgccttgcatttgcttgctggttggtttgtgctttatccctgagtcccccagatggctggctaaggttggccgtgaaaaagaatttcaactagctttaagtagacttcggggtaaagatgctgatatttctgatgaagctgctgaaattctggattatattgaaactcttcaaagtcttcctaagactaagctgttggatttgttccaaagcaaatatgtgcactctgtagttattggggtcggcttaatggcatgtcaacaatctgttggaattaatggcataggattctacacagctgagatttttgtagcagctggactttcttcaggaaaagctggtaccatagcatatgcttgtatacagattccatttacattattgggagccattttgatggacaagtctggaagaagacctcttgtaatggtttccgcagctgggacattcttaggttgctttgttgctgcctttgctttctttctcaaggaccaaagcttattgcctgagtgggtacctatattagcatttgctggcgttctgatctacatagcagcattttcaattgggctcggatcagttccatgggtgataatgtctgagatatttcccatacatttgaaggggactgctggaagcttggtggttttggtggcttggctaggagcttgggtagtttcatatactttcaactttcttatgagctggagttctcctggtacattgtttttgtatgctggatgttccctcttaactattctatttgtagcaaaattagtcccagaaaccaaaggaaaaactttggaagagatccaggcttgtattagttcatagagataaaagatcaaaaacgcactgcaggacccagtcaaaccattaccaccatttttcaaattcttttacatccatttaggaccgtcaaggcataaaataacataatgttgccatatcgatccatttttgttgttgtataataataataataataataataatgtatcattagcttatttgataagaaaaaaaaaaaaaaaaaaaaaaaaaaaaaaaaaaaaaaaaaaaaaaaaaaaaaaaaaaaaaaaaaaaaaaaaaaa

SEQ ID NO: 305 - DNA, 1680 bp, Glycine max
ttgagagcgagaaaccacgtttctctcttgaggttaattattattattattgagtattgagcatggaggcgccatctctcaccaaacccaacgacccaacaaaaccttccaacacttccagcacccttagtctggagggggggccgggcgaagcgagcccactccgaaaaatgtttgcggtggcgtccatcgccgccggcatacagttcgggtgggctctgcagctgtctctcttaaccccctacgttcagctcttaggagtcccccacgcggcggcctccttcatctggctctgtgggcccatctcggggctggtggtgcagcccattgtgggctactacagcgaccactgcacctctcgcttcggccgaaggcgccccttcatcctcggaggcgccttagccgtcgccatcgccgtgttcctcatcggctacgcggccgacataggacactccgctggcgacgacataactaaaaaaacccgaccccgtgcagttggggtcttcgtcataggattctggatcctagacgtggccaacaacatgctccagggaccctgccgcgcctttttagctgacctcgctgccggcgaccagcaaaaaacgagaatcgccaacggtttcttctcgttcttcatggccgtcggcaacgtgcttgggtatgctgcagggtcctacagcggtctccacaagatcttccccttcacggagaccaaggcctgtgacgtcttctgcgcaaacttaaaaagctgtttctttttctcgatcctactgcttctctttttagcaactgttgctctgctctacgttaaggacaagcaagttgaagcaattcctctggatgatgccactcaaccctcttgtttctttcagcttttcggtgctctgaaagagctcaagagaccgatgtggatgctgatgctggtcacagctgtgaactgggtggggtggtttccttacttccttttcgacactgactggatgggtcgtgaggtctacggtggaactgctggggaggacgcgtacgcgaagggagtgcgcgtgggatcgttagggctgatggtaaacgccgtcgtgttgggcttcatgtcgttggcggtggagccgttggggaagatggttgggggagtgaagaggctttgggcgattgtgaactttattctcgcgattgggttcggaatgacggtggtgatcaccaaggtggcggagcaccagcgccggatgaaccccgccgccgtgggccacccctccgagggggtggtggttgggtccatggttttctttggggttcttggagttccccttgcgattactttcagtgtcccttttgctctagcatcaatatactgcagcgcttcaggagcaggacaaggtttatctttgggagttctcaatcttgcaattgtggtaccacagatggtggtgtctgcattaagtggtccttgggattccttgtttggtggtggcaacttgccggctttcatggtgggtgctgcggcagccgcgttgagcgccataatggcgattgtcttgctgccaactccaaagccagctgatgaggccaaggcttcaagcatgatggcagggggctttcactagttaatggagttttgcatgtttcagttttgtcccctgctttaatagaaaaaaaaaaaaaaaaaaaaaaaaaaaaaaaaaaaaa

SEQ ID NO: 306 - DNA, 1831 bp, Zea mays
ccacgcgtccgaaggtctcctccctcggtctccctcgggctaggctagctagctaggttaccactctggtacaacatggctggtgatggcatggaggtatctgccagcgggggtggcggcggcaacaagcagccgcagatcagccttttggggctgttcctcgcctgcatggtcgccggcggcgtgcagtacggatgggcgctgcagctctcccttctcaccccctacgtccagacactggggattcctcatgctcttacatcagtcatgtggctctgtggacctattgctggcttacttgtacaaccctgcgtcggcctctatagtgacaaatgcacttctaagcttgggagacggaggccattcatctttacaggatgcatcatcatctgtatatctgtgatagtcatcggtttctcctcagacatcggttacgctctcggtgacacgacggaagactgcaatgtttacacggggaagcggctgcacgcggccttgttcttcgtgatgggattctggctgctggacttttccaacaacacggtgcagggccccgcacgcgcgctgatggcggacctcgcaggcagccacggacccagcacggcgaacgccatcttcgtgtcgtggatggcgatcgggaacatcctgggctactcgtcggggtccaccgacaagtggcacacctggttcccgttcctgcagacgagggcatgctgcgaggcgtgcgccaacctcaaggccgccttcctggtgtcggtggtgttcctgggcctgtccacggtggtgaccatgatcttcgcccgcgaggtgccgctggacccggcggcggcggcgaagcaggacgaggccggggagtcgtcgggcccgttcgccgttttcaagggcatgaagaacatgccccccggcatgccgcaggtgctcatcgtcacgggcctcacctggctctcctggttccccttcatcctcttcgacaccgactggatgggccgcgagatgtaccacggcaggcccgacggcagccccgaggaggtggccaggttccaggagggcgtccggcagggcgccttcggcctgctcctcaactccgtcgtcctcggagccagctccttcctcatcgagcccatgtgccgcaagctcaccgccaaggtcgtgtgggtcatgagcagcttcctcgtctgcgtcgccatggccttggtcaccgtcctcagctcctggtcgctcggcgacatcgggggcaacgtgcaggacgccgccgccgtggataagggcctcaagaccaccgcgctcgccatcttcgtcttcctcggcttcccattcgcggtcctatgcagcgttccgttcgccgtgacggcacagctggcggcggccaagggcggcgggcaggggctgtgcacgggggtcctcaacatctccatcgtggtgccacagatggtcatcgccattggctctgggccgtgggacgagctgttcggcaagggcaacatcccggcgttcggccttgccgccgtcttcgccttcaccgctgccgtcgcagggatcatcatgctgccaaagcagcccaagaccagcttccggtccgtctccatgggaggaggccattgatgatcacaactctaggatgcatggtccactgtggttcacgattcttttacctttgggagttggacggccaggtgtttgttctcaaggccgcttccgaggcctaaaccggtgggtttatttctaggccggatcatgacgaacaatctgtttcgctgggttgtaaaggaaaagttttacacgaacacacaacgtgtcggctatttaacttttggaaaaaaaaaaaaaaaag

SEQ ID NO: 307 - DNA, 1996 bp, Zea mays
ccacgcgtccgcccacgcgtccgatacgtacgtgaagaaccaacaggagggccgggctctcgctcgccgcgcgcacccccctctctctatctctcccgccgccgttgatctatcaccgggccgccggtccgtgactgtcgccagcggctgctggttgttgcttggttgcgtcgccgcgggagccgtgtgacccgggcgcaatgccgggagccgtgatcgtgcaccaccacacgaggtacaagacgtaccccggcgaggtcaccggcatcgccatcttctcgtgcttcatcgcctccgtcgccggctgcatcttcggctatgacatcggcctcacatccgggctgacgtcgacggagccgttcctggtcaagttcttcccctccatctacgaggagatgaagaggcaggtggtcgtcaaccagtactgcaagttcgacagccaggtcctgacgctgttcagctcctccctcttcctcgccgcgacggtggccaccttcttcgccggcccgatgacccgcgccttcgggcgcaagtggaccctgttcgccgccgcgtccgcgtacgtggtcggcgcgtgcatcggcggcgtgtccgtgaacttcccgatgctgctcacgggccgcgtcctcgttggctccggcgtcggcatctccatccaggcggccccgctctacatctccgaggtggcgccggcgcagcagcgcgggatgctcaacatcctgttccagctcatgatcacggtgggcatcctgacggcgaacatgaccaactacctggcgtccaaggtctcgggcggctggggctggcgcatccccgtgacgttcggcgccatcccggccgccgtcatcgcgctgggcgcgctcgccatcccggacaccccggcgtcgctcgtcgagcgcggggacacggccacggcgcgcaagacgctgtcccagatccggggcgtcggcgacgtgcgcgaggagttcgacgacctggccgccgcgagcgaggacgccaaggccgtgcagtgcccctggcgggagctcttcttcggcggcaagtacaagccccagctcacgttcgcgctgctcatccccttcttccagcagctcaccggcatcaacgtcatcatgttctacgcgccggtgctcttcaagacagtcggcttcaagcagaacgccaccctcgtgtcctccgtcatcaccggcctcgtcaacgtcttctccaccttcgtcgccatcgccaccgccgacaagatcggacgccgcgcgctcttcctgcagggcggcacgcagatgatcatctcccagatccttgtggggacgttcatcgggctgcagttcggcatgagcgggacgggcgacatctcggagcagtacgccatgtgcatcgtgctgttcgtgtgcgtgtacgtggccggcttcgcgtggtcgtgggggcccatggggtggctggtccccagcgagatctacccgctggccgtgcggtcggcggcgatgagcgtcacggtggccgtcaacatgttcttcacggccttcatcgggcagatcttcctcacgctgctctgccacctccgcttcggcctcttctacttcttcggcgcctgggtgctgctcatgacactcttcatcgccatgctgctcccggagaccaagagcgtgcccgttgaggagatggcgcacgtctggaagaagcactggttctggcgcaagttcgtcatcgacaccggcaacgacgcccgcaacgccgagatgaggaagaggatagcgctagagatgagctgatcatcgtcgtccatgcatgcagtctccatcgcccatgcatcatatatatgcagtaggcaggcaggcagatgaaggaaattacgtacacaagcgccaactaaaactaaacccaagtcaattacttcatatatcactcaatagctgctagaacatatatgaatggttgttgtagactgatcgtaatcccagatagttatgatatacatctttcattttaaaaaaaaaaaaaa

SEQ ID NO: 308 - DNA, 2211 bp, Zea mays
ccacgcgtccgcccacgcgtccgccgttcctcgtcgtctcgtgttgtttctcgcgttgccattgccccagctgtccgcccgcgcccgcggcaatggcaggcggcgtggtggtgaacgcggccgggggcaagacgtaccccggccgcatgacgccgttcgtgttcttcacctgcctggtggcgtcatcgggcggcctcatcttcgggtacgacatcggcatctccggcggtgtcacgtccatggcgtcgttcctcaaggagttcttcccttccgtgtacgccaaggcggcggcgaacaaggacacgaaccagtactgcaagttcgacagccagctgctgacgctgttcacgtcgtcgctgtacctggcggcgctggcgacgtcgttcgtggcggcgtccgtgacgcgggtgttcgggcgcaagtggtccatgttctgcggcggggtgaccttcctggccgggtcggcgctaaacggcgccgccaccgacgtgatgatgctcatcatgggccgcatcctgctgggcgtgggcgtcggcttcgccaaccagtcggtgccgctgtacctgtcggagatggcgccggcgaagctgcgcggcatgctcaacatcgggttccagctgatgaccaccatcggcatcctggcggcgaacctgatcaacttctggacggcgggcatcgagggcgggtggggctggcgcatcgggctggggctcgcgggcgtgccggcgctcatcatcaccctgggcgcgctggtgctccccgacacgcccaactcccttatcgcccgcgggttcaacgacgacgccaaggcggtgctggtgaagatccgcggcacggacgacgtgcaggacgagtacgacgacatggtggcggcgagcgaggaggcgaacgccatcgagcacccgtggcgcaacatcctggagcgcaggtaccggccgcagctgacggtggcagcgctgatccccttcttccagcagctgacgggcatcaacgtgatcatgttctacgcgccggtgctgttcctgaccatcggcttcggcgacgacgcgtcgctgatggcggccgtcatcacggggctggtcaacatgttcgccaccgtggtgtccatcgtgtgcgtggaccgcctgggccggcgcgcgctgttcctgcagggcggcacgcagatgttcgtctcccagatcgtggtgggcacgctgatcgcgctccagttcggcaccgccggcgtgggcgagatgtcccgctccaacgcctggctgctggtgctcttcatctgcctctacgtcgccgggttcgcctggtcgtgggggccgctgggctggctcgtcccctcggaggtgttcgcgctggaggtccggtcggcggggcagagcatcgccgtgtgcgtcaacatgctgctcaccttcatcatcggccaggccttcctcagcatgctgtgctcgctcaagttcgggctcttctacttcttcgccgggtggatgttcatcatgaccaccttcatcgccctcttcctgccggagaccaagggggtgcccatcgaggagatgaacctcgtctggagccgccactggttctggggcaagtacgtcaacgtcgacacacaacacggcggcgccagcccgagatccaacggcgtctgatctgagcaagctgcagcaacacctcggcacctgacctggccatgcatgcacacgtatactataatctaacaacgtagctgacctgggcaaattgccagcctgacaggggccagggtgctcgaatgtctcactctcaccgccgactaactttccatcaaaattgattcttgttcatactccatagcatgcacagattgattgaactgctacttgagattcttgtcattgttattagagagagagacagagacagaacgattggcatagcatgcagaattgtttggaagaagctagcaaagcagttccttgtttgtatcctctgtaccagaagatgagtttgatctaggattaatccctgcaaggcaaggtaaagtaaattcatgttgtactcaaaactaacttctcccatatctgtacgtcgtataaaacaaatccctgcaatgtgcaaagattgtcccgcgtagtgattttttcgtctccagcaagatctcaaacaagccccaaatctaagtgtaacatgtttgcattcgaattaaaaaattgaatcccttattgtgaaaaaaaaaaaaaaaag

SEQ ID NO: 309 - DNA, 1709 bp, Glycine max
gcctcacaaaagcaaagatcaaacaaaccaaggacgagaacacgatgttgcttgaacttgcacttggtttattggttttggctctgtttctgcacttgcgtcccacacccactgcaaaatcaaaagcacttcgccatctcccaaacccaccaagcccaaagcctcgtcttcccttcataggacaccttcatctcttaaaagacaaacttctccactacgcactcatcgacctctccaaaaaacatggtcccttattctctctctactttggctccatgccaaccgttgttgcctccacaccagaattgttcaagctcttcctccaaacgcacgaggcaacttccttcaacacaaggttccaaacctcagccataagacgcctcacctatgatagctcagtggccatggttcccttcggaccttactggaagttcgtgaggaagctcatcatgaacgaccttctcaacgccaccactgtaaacaagttgaggcctttgaggacccaacagatccgcaagttccttagggttatggcccaaggcgcagaggcacagaagccccttgacttgaccgaggagcttctgaaatggaccaacagcaccatctccatgatgatgctcggcgaggctgaggagatcagagacatcgctcgcgaggttcttaagatctttggcgaatacagcctcactgacttcatctggccattgaagcatctcaaggttggaaagtatgagaagaggatcgacgacatcttgaacaagttcgaccctgtcgttgaaagggtcatcaagaagcgccgtgagatcgtgaggaggagaaagaacggagaggttgttgagggtgaggtcagcggggttttccttgacactttgcttgaattcgctgaggatgagaccatggagatcaaaatcaccaaggaccacatcaagggtcttgttgtcgactttttctcggcaggaacagactccacagcggtggcaacagagtgggcattggcagaactcatcaacaatcctaaggtgttggaaaaggctcgtgaggaggtctacagtgttgtgggaaaggacagacttgtggacgaagttgacactcaaaaccttccttacattagagcaatcgtgaaggagacattccgcatgcacccgccactcccagtggtcaaaagaaagtgcacagaagagtgtgagattaatggatatgtgatcccagagggagcattgattctcttcaatgtatggcaagtaggaagagaccccaaatactgggacagaccatcggagttccgtcctgagaggttcctagagacaggggctgaaggggaagcagggcctcttgatcttaggggacaacattttcaacttctcccatttgggtctgggaggagaatgtgccctggagtcaatctggctacttcgggaatggcaacacttcttgcatctcttattcagtgcttcgacttgcaagtgctgggtccacaaggacagatattgaagggtggtgacgccaaagttagcatggaagagagagccggcctcactgttccaagggcacatagtcttgtctgtgttccacttgcaaggatcggcgttgcatctaaactcctttcttaattaagatcatcgtcatcatcatcatatgtaatatttactttttgtgtgttgataatcatcatttcaataaggtctcattcatctaaaaaaaaataaaaa

SEQ ID NO: 310 - DNA, 1485 bp, Glycine max
attcggctcgagaacatttttgatcttccttcctctgaaacaagaaccaaaatggagaattcgaccgaagaatcccatctccgatcggaaaactccgtcacttacgagtccccttaccctatctacggcatgtcattctccccctcccacccccaccgcctcgccctcggcagcttcatcgaagaatacaacaaccgcgtcgacatcctctctttccaccctgacaccctttcggtaactccccacccttctctctccttcgaccacccttaccctcccaccaaactcatgttccacccccgcaaaccctccccttcctcttcctccgacctcctcgccacctccggcgactacctccgcctctgggagatccgtgataactccgtggatgccgtctccctcttcaacaacagcaagaccagcgagttctgcgcccccttaacctctttcgactggaacgacatcgaccccaaccgcatcgccacctccagcatcgacaccacctgcaccatctgggacatcgaacgcaccctcgtcgaaacccaactcatcgctcacgacaaggaggtttacgacatcgcctggggagaggccagagtcttcgcctccgtctccgccgacggctccgttagaatcttcgaccttcgcgacaaggagcactccaccatcatctacgagagcccccaccctgacacccctttgctccgcttggcttggaacaaacaggacctgaggtacatggccaccattttaatggacagtaataaagttgtgattttggatattaggtctcccactacccctgttgcggagttagagaggcaccgtgggagtgtgaacgccattgcttgggctcctcatagctccacgcatatttgttctgctggtgatgatactcaggctcttatttgggaattgcccacgcttgcttctcccactgggattgatcccgtctgcatgtactctgctggctgtgaaattaaccagctgcagtggtccgccgcccagcccgattggattgccattgcttttgccaacaagatgcagcttttgaaggtttgaggtcagaacaaacaattacacattctagccacttcattgtggcatagacatagcaacttctgatcacttgagtgactgagttatatatattattgtagttgtgcaaactagtttgccctcctcatgttttacttgtggcgaaattaacgatgttcaatttgtctgttaaagatggatttttaacctgttgtgaagtaagatttcttgtctgtgatgtggaagccatagctattagtttcttagttaacatgagaaatcacatgtagtatgtggaatcaattaccacacatccagattataggtcgtaaaatcttcagtgtttgtattcccatttgattttaaacaccctacctctgatatgtatggactatggatctgtattcttgagcttttgccataaaaaaaaaaaaaaaaaaaaaaagg

SEQ ID NO: 311 - DNA, 4014 bp, Zea mays
acgagcgcatgactccccgccgctgaactgaatcggtcctgggctggttttcggcttttgcgcgactgggcccgtgcgccgtgaccttattgcgcgggcgccgcgcggtttgcgcagggtaggtttggtgcgatggaaggggcggcggcggcggaggtgggcggcggcggcgaggatgtgcagatcaagggcgccaaggagagtgggcagcccgcggcggcggcgcagcagccgccgccgctgccgtccggcagcgaggcgctggagatgccggccacgccgcttccgcgggacatggactggtccgagcacttctccttcttcacctcgccgggcgggttcgcgggcagctcggagggcgcgaggggcctcgccagcgtcggcctgtccaactccgagtccaggccggacagcgtgacgcagcgcggcgtggaccacggcgcggaagagagggtggaggagctcacattgaagaactgcattagcgctgatgctgcccagcccgaagcctctgctggtgggagcacgagcggtggggataggcctgctgttattaagggcctgtggggtaacttcacacggatggcccggagaaccagctatttggccagcagggaaaacgccgcactgagctatggcgacattgcaagctcgagggctggtgatgcttctagcagggaaaatctggcgacgagccttgccaacaatatcatctcaaggaacaacgatgtgtctggcaatgaggcacctacgagtcgtgtcggatatgtgaataatgagttcaagacgccatttcacagccagcagattctcttgtccccttggtctaatcaggacaacgctcttaaagtaagcagcttctcgaataggattcttgatcagatgagaagtaagactgtggcacccccatctggggttctagggtcaccgcttaaaagcaaatcaaaaggtaaaggggttgcataccaacgtgcacgggaggagatccgagtgcaagctaatgcaagacccagagaccctctggacaagatcccgacaattcctacctcaattcatgattctgtggccagagtggacatgcttttcagtactagtggagatgtttcaaaatcccactctgagggaactagcctgagggaactgattaagcctgggcggcaaacgatgtccaagtttgagaaattgcatttgtttaagcagatccttgatcttgtggataactgtcatgcacagggttttactttacaacatttgcgaccatcatattttacgatcctatcttcaaatcaagttaaatatatcggttcttataccacacaagatttgccaacatcaatcaaacaagagtttgctagagaagatcttgtgagtagaaaaagagcttttggccatagaattgattaccaagactctaatggccatggaaatttgatgctgaagcatcaaaaggttggtgagcaaggcttagttgctgtcaggcggctggcaaatacatttttgactgacaaaatacgcgacaatcaaattgaagataacgatccaggtatttcaaggcaagaaaattttagttacactaccagagaacattttaagttcgtcgaatcatatggcagcaatatgtccagtgctcagcatgtatctagttctggaacccaacaaccagcatttgaattgaggaatattgaggaaagctggtacaaaagcccagaggagctcagtcaatttaaaggcacacccccatcaaacatctatagccttggggttcttctatttgagctcttttgctgttctgagacatgggagatgcactgtgctgcaatgtcaaatcttcgccaacgcatccttcctccaaattttctttcagaaagtcccaaggaggctggcttctgcctttggttactgcatccagatccttgttcaagaccaaaagcaaaagagattcttggatgtgacttgataaatgagggtcgggatttgtccttgttagataagtcaccagtttccatcagtgaagatgacactgaatctagtttgctacttaacttcctttctcaattgaaagaagaaaaggagatgcaggctgccaagttatcggcagagcttggaagcttacaaacagatatcacagagattgacagaagacactcagcaggaatgagattgagtttagaggatatggatgtactgccaagttctagtttgccaggagcttctgtgagtgccctacagggtgcattgctgtcaggtttgctaccggcatcgtgcaagtcgagcatatatgaggagagggtaatgaggaatttggtgcagcttgaaaatgcttactactccatgaggtcctctgtggacacctgtgaaactaatgtaatcaaacgtccagataacgaggctttgagggtccgtgaaaatttccatcagcgtcacagtgattctgatgcaaagggagagaaaacagaccgtcttggatgcttttttgatggtttatgcaaatatgcccggcacaataggtttgaagtacgaggaattttgaagaatgcagatgtacttagctctccaaatgtcatctgttcattgagttttgatagggatgaagaatattttgctgctgctggagtttcaaagaaaataaaaatatttgaatttgatgcactcttaaatgatcgtgttgatattcattacccactggtagaaatgcctagcaagtccaagctgagctgtgtctgttggaacagctatataaagaactacctggcatcaacagactatgatggtactgttcagctatgggatgctggctctggtcaaggattcacacagtttacagagcaccgcaaaagggcttggtctgtgagtttttcacaagtcgaccctactaagttggcaagtggcagtgatgattgttgcgtgaaagtatggagtattaatcagaaaaactctattgatacaatccgaaacgtggccaatgtatgctgtgtacaattctctccatactcctcccgcatgctagcttttggttcagctgattacaaaatatactgttatgatctgaggaacacaaggataccttggtgtactatttcgggacatggaaaggctgtcagttatgtaaggttcttggatccagaaacacttatctctgcatcaaccgacaacacattgaagatatgggatcttaaccagactaattgcagtggattatctgctgattcttgcagcctgactctgaatggtcatagcaacgagaagaattttgtagggctatctgttcatgatggatacataacttgtggctctgaaaccaatgaagtgttttcttactacaaagatttccccatgccaataacttctcataggtttggttccattgacccgataactggacaagtgacaaatgaagacaaccagcagtttgtgtcgagtgtttgctggagagggaagtcaaacatggtagtggctgccaactccagtggcagcatcaaagtgcttgagcttgtgtgaatgatccaacgagagtgtcatattggagagaagaaggttctagggttgccatgcgggcctgtgatgctctcgtgccctcggtgatgctccaatggccctgcttatccggtgtctgcatcctcaatggaagcactaagcgaactgggtacctcttctaggtctgcatttcactgttttgccagggcactaaaagatgcgactgctctgtgcaagcaacctacagcaccgatcattggtcattattggaagctttgcttgaaactcccaagcgaaccaaagaaaaataaaataaaatcaagagtatgttgtgtttggaaatctctggcattttggcacggtaccttattcatcatcgtaaggagggccccaggtctgtacagaattagggggccatggggctgatgaaatagaacatgtgatcatgcaaacttcttttgggctagagaggctgacggacgccgtggcgccttactgaatcagttgggaatttaactcagttttgatgtgcgccggact

SEQ ID NO: 312 - DNA, 1455 bp, Zea mays
ggcgccaacaaaagaggaagagtcaggccgaatgttctgcaagtcaagacgatgtaagcagaggatctgagatagggagtcggtggtatgtggctacgcacaccttgtacttactgctaacaattcgtaaaaaaatggttttgttcaggatcttgatgatgagtctggtgggatgcgaggatcaggcggcagaggtacgaagcgcagccgcaccgcggaggtgcacaatttgtccgaaaggaggagaagggacaggatcaatgagaaaatgcgcgccctgcaagagctcatccccaactgcaacaagattgacaaagcctccatgctggatgaagcgattgagtacctcaaaaccctccagcttcaagttcagatgatggccatgggaagtggactgtgcattcctcccatgctgctgccgcgagccatgcagctgcaaattccttcaattgctcatttccatcatctcggcatgggattgggttatgggatgggtgtcctcgatatgaacagcacagcggcagttccatttcagcccatccctggcgctcactatacttgtccgatgatcccaggcacgccaccacaaggtcttggaattggaatgcctggcacaaacacgatgccagtgtttggagtccctgggcaagcaatccatccctcagcgtctagcgtacagccattcccatcgttggcgggtcttcctgttaggccaaacctggcacctcaagtcccagccgtcatggctaacatggtgcaggagcaacagcaaggcgtagcgactcagcagcagcagagtctgaataatgaagctcaacagaaagcaaataccggagatccacaaatactacaaaaatagatgaagagatcttcgccagtaatcagtttctggatggtggtggcaacaggactaatactataggggaaaatgaggctgaaacattaaaaacggtcagcaagtgccagtgtgtaacctgactcgagctaaacttgacacaaatcatggaacttggcagagcgttattatcctaatagataacatggctgatgattttcaggtctcgactaacaagctgcaggtgtgaatatcagcaccaactcatcatggaagagcttaacaagtttcatgattcacgaagcagatctatcacttgaaaaaggtccaatcaatcaagatgtatttggtggcgggatgtctagcttagcgagataagatgctccaaagttttgtgtaaaatgtagatggaaccttgttacaagtaacatttcttgacagcggtgccgttttcaggtgtttttttttttgcttcactgaagttttcttgagtcaatatatcttattttcccaaaaaaaaaaaaaaaaaaaaaaaaaaaaaaaaaaaaaaaaaaaaaaaaaaaaaaaaaaaaaaaaaaaaaaaaaaaaaaaaaaaaaaaaaaaaaaaaaaaaaaaaaaaa

SEQ ID NO: 313 - DNA, 1355 bp, Glycine max
attcggctcgagtctcactcttcttgcagcatctctctccattaccttcataactcaatctcccattattattagagatgacggttgaaaaggaagatttgggtttgagtctaagcttgagcttccctcagaaccccccaactcatcttcatctcaatctcgtttcctcttctccttccagccacaaccctcagaaaccctcttggaacgaccctttcacttcttcagctggatcatcattccttcgaggaatcgatgtgaaccgtttaccttctgtggtcgattgcgaagaggaagcaggtgtgtcatctccaaacagcacggtttctagtgtcagtggaaaacgtagcgagagggaagaagccaatggtgaagaaaacgacacagacagagcttgttccagaggcatcatcagcgacgaagaagatgccgaaacctctagaaagaaacttagactctccaaagaccaatcaattatcctcgaagagagcttcaaagaacacaacactctcaaccccaaacaaaagttggcgctggcgaaacagctgggtcttcgagcgagacaagtggaggtgtggttccagaacagaagggcaaggaccaagctgaagcaaacggaagttgactgtgagtttttgaaaaggtgctgcgagaatctgaccgtggagaacaggaggttgcagaaggaagtgcaagagcttagagcactgaaactttccccgcagttctacatgcacatgaccccacccaccactctcaccatgtgcccctcgtgtgagcgtgtcgcggttcccccctcctccgccgttgatcctgccatgcgtcaccatcacgtgcctcctacacaacctcgggccttccccattggcccatgggccaccgctgccgccactatcccgcacaggcccttcgatgccctccgtcgcagatcttgactcgtcgaaacaaaatgacaaaatttgaaaaaaagaaaacggttgtaatagtaggaagccatgaattatgtgttcaaagtgtggtctaagatatggtggttaggaaaactgattttgtgggtctctaatgttttgtactagtttgacccttcgtctttgttttgggtttcggagcatgacctggtttagttagttagaggtttttttagtttgtaatacttactgcgttactctcatttctcatgattaaatcggagattctgtaaagttcagtagtcttaataaatattatatattacatataaaaaaaaaaaaaaaaaaaaaaaaaaaaaaaaaaaaaaaaaaaaaaaaaaaaaaaaaaaaaaaaaaaaaaaaaaaaaaaaaaaaaaaaaaaaaaaaaaaaaaaaaaaaaaaaaaaaa

SEQ ID NO: 314 - DNA, 2527 bp, Zea mays
cccacgcgtccgcttcactcccaatccgaatccagatccgcgaatgctggggcgggcggcggcactgtccgcgccacggtggcgcggcggggtgccagaccttcgcgccgcgctgcggtcggggggcaacctcctcttcgcgctcttcgtggcggccgtgctcgcattcacgctcctcgcggcgttccacagccccgacgatccgctcctccacccgtcctctcaccagctcaccgatttcctcacctccgccacttccacctccaccttcctcactgacgactccgtgctgcgcaccggggaggacttcaactcctcgtccaccggcgccgccggcgaggtcgccgctgggggtgtcgaagtcgtcgcggaggccgtcccgttcatcaagctctccgaagttggcgccgaggccgagaagacggagcccgagacggagcgggccgtcaccgtcgacactgatgcggccacgggcgagggtgcagcggtggcggaggaaaccgccgttgcggaggcggtttcctgcgacacggaggcgcccgtggactgcacaggagacagggaactcttcaacctgctcatgcgcgcggccatcgagcggttccccgacctccacttctaccgctttggccgtcccgtggcggtgccggggagtcccatggagtgtgacctcgcgtggcgcttccgccccgctgccgacgccatcggcaccggccggaccacatactacaaggactaccgccggttcacgcttacccgcgacgtcaacacctgcagcctcgtcgtcgacaccgtgggtgaataccactcgggtgtgggtgccaagcgcaatggacggcgcaaggggaagaaagggaagaagggaaagcaggatgcacctgtgactgacttcgtgccggttaagacacagattaggctggacgagaacaccgccaacaatgaggctgctggggctgcagcggagccggtgtttgttgttggtgaggctgtcaatgacagcttgccagtggttgcttctgagtctgatttcagccgtggtaagtaccttatttacattggtggtggcgagaggtgcaagagcatgaaccatttcatttgggggttcttgtgtgcccttggtgaggcacaattcttgaaccggactcttgtcatggacttgaatgtctgcctcaatgcacggtatacttcgagtggcaaggatgaagaaagagatttcaggctctactttgattttgagcatttgaagcaatctgcgtccgtgattgaccagagccagttctggcaagattggggacagtggcacaagaaagataggctcaagaacttctacactgaagacatcaggatgaccccaatgaaacttcgtgacatcaaggacacattgatcatgaggaagtttgggaatgttgagcctgataactattggtcacgtgtgtgcgagggtgagactgagggaataatcaagcgcccatggcatttcctgtggaaatctcgtcgcttgatggagattgtatctgccattgcctcacggatgaactgggactttgactcggtccatgttgtcagaggggagaaagcgcagaacacacaactttggccaaaccttgacagagatacctcaccagacagtctccttatggcacttaatgataaggttggtgctggccggtatttgtacattgctaccaatgaacctgacaaatcgttctttaacccactcaaggaaaagtataaaacacacttccttgatgatttcaagtacctgtgggatgagaatagtgagtggttcactgaaactaaggagctgagcaatggtcagccagtagaatttgatggctatatgaggattgcagttgacactgaggtattcttgagggggaagaggcatgtggagacattcaacgagcttacacgtgattgcaaggatggcgtgaatacatgctcagcttcttcctgaacatttggtgggctaaggaaccttggagaggactagtaaggacttgggaaaggccaagatgtcaaggacgagaagctaggatattcacaacaagagaaatccaagtctgactcaacttcgtctccacctcgaagtctaggactagtctacactaaaacagacgcccaagatgcatccgaactccgattaggttatgctttatatggatggaaacctaaggagatacgctttccaacccaactggaatcaccttaaaattcatccggagtcaacaggaatcgtcgaaacaagttagcgttcagattctgttttagtgttgcaacaccgtatgttgggctgttgggccatgtatcgtgttggagcatattagggatgcaaccaaaggtcatgcacgcccctaatctctattttatcagcaaccaccaccatattagtgtttgggttttgcttagatcatatttgtcatctaagaatttgtcgttcatcagtttgtgataccccaactcgtaatcaacacagttttggttgtgttctttcaaaaaaaaaaaaaaaaaaaaaaaaaaaaaaaaa

SEQ ID NO: 315 - DNA, 2016 bp, Glycine max
cctcaatttaattcccattccctctctcagaactcatcatcatggccgttgattctgaggtccctcgtgccgagaggagcgcaaaggctcttcagttcatcgaggaagttacaaaaaacactgactccgtccaggagagagtcctcaccgagattctcacccaaaacgccgagacggagtacctcaaacgcttcggcctcaacggcgccaccgaccgtgacactttcaagtccaaggttcccgtcgtgacctacgaggatctgcaacctgatattcagcgcattgcaaatggtgacagctctcccatcttgtgctctcacccaatctctgagtttctcaccagttctggaacatctgccggcgagagaaagttgatgccaaccattcatgaagaaatggaccgtcgtcagttactgtacagcctgctcatgcctgtgatgaaccaatacgtgtctgatttggacaaaggcaaggcgcttcacttcctgttcattaaggcagaggccaagacacccggcgggttagtggcgcgtccagtgctgacaagctactacaagagcgagcaattcaggaaaagaccattcgacccttacaacgtcctcactagccccaacgaagccatcctttgccccgattccttccagagcatgtacactcagatgctctgcggcctcatcatgcgccacgaggttctccgtgtcggagccgtcttcgcctccggccttctccgtgccataaggttccttcagctcaattgggaacaactttcccatgatatcctcaccggaaccctaaacccaaagatcactgaaccttccatcaaggaacgcatgtccaagatcttgaaacccgaccctcaactcgccgctttcattaaaaacgaatgctccgtggaaaactgggagcgtataattgtgaggatttggcctaacacaaaataccttgacgttatagtcactggagccatggctcagtatattcccacactcgattactacagtggtggcctacctaaaccctgtaccatgtacgcttcttctgagtgttttttcggcctcaacctcaaacccatgtccgaaccctctgacgtgtcttacaccattttacccaacatgggttacttcgagtttttaccccatgatgattcctctcctgttactctctccaaggactcaccgcctcgcttggtggaactcgctgacgtggaacttggtaaatactatgaactcattatcaccacctattcaggtctttgccgttacagggtcggtgacatactccaagtaactggtttccacaactccgaccctcaattccgtttcgtgaggcgaaagaacgttttgctgagcattgactcggacaaaaccgatgaagcggaactgcaaaaggccatcgagaatgcctcggagttgctgaaggagttcaataccagcgttgtggagtacacgagcttcgctgacacgaaatccattccggggcattacgtgatttactgggagctcatgatgaaggactcgtctcaccctccaacgaaccaagttctgaaccagtgctgcttggtgatggaagagtcgctgaactcggtttatagacaagggagagttgcggataactctattgggccgttggagatacgagtggtgaagaatggaacgtttgaggagttgatggactacgctatctcgcgtggtgcgtcgataaaccagtacaaagtgccaaggtgcgtgagcttcacgcccataatggagctacttgactctagggtggtttcttttcattttagcccagctgcaccgcactggaccccagaacgtcgtcgttgaaggaagctagggtaacgtacagcaataacatgcagtagtcatgcataagatctagtataataataaagagagaaaaaatgggtgacagaaaagggtagttgttcattgttgttgttatattatcactgccaaacccgaaagtgtctgtatttgttgatttgatatttccaatgagcttgtttttttcaaaaaa

SEQ ID NO: 316 - DNA, 1428 bp, Zea mays
cccacgcgtccgactcgccattcctaagtcctaactacctccaaccccgcacgcacaactggccgcgccaaggcaaagctagaagaagacaacgcaaagggagaggacagaggaggagcagaggacgatgggcagcggcggcgctaacactgcccccctcctcaccccctacaagatgggaaaattcgatgttacccacagggtagtcctcgcaccactgacgagacagcggtcctacggcaacgttccccagcctcatgccatactgtactatcagcagagggcgactaaaggaggtcttctgatcgctgaggccacgggggtttcagacactgctcaagggtacaaggacactcctggcatttggacccatgagcaagtcgaagcatggaagccgatcgtagacggggttcaccagaaaggagggatatttttctgtcagatttggcacgtagggagagtctccaattccacttttcagcctaatgggcaggctccaatttcaagcaccgataagccactaaagcctcaagtgagagccaatggtatagacgtggctactttcgcagttcctagacgcttagagactgatgaaatccctttggtcgtcaatgatttcagggtagctgctcgaaatgcgattgaagctggatttgatggtgtcgaaatccatggagctcacggttacctgattgatcagtttctaaaggacggggtcaacgaccgcacagacaaatacggtggcagtctggagaaccgctgccggtttgcactggaagtaactcaagctgtggtcgacgaaattggagctgacaaggtcgggataaggctgtcaccattcgctagctactcggaggcgccggactcagacccggaagctctgggcatgtacatggcgaacgcgctgaacgagttcgggattctctactgccacatggtggagccgcggatggtgaaactcggtgaaaagttcgaaaccccctacagccttcgcccgataagggacgctttcaggggaacgttcatcgttgccggcggctacggcagggaggatgggaatcgagcgatctccactgggtatgctgatttggtcgcgttcgggcgcttgttcttggctaatcctgacctgcctcggaggtttgaagtagacgctccccttaacaagtacaacagagacacgttttacatccctgatccggttgttggatacactgactacccatttctttcgtcagatgtataaatgttctcttttcagcaatctgcttttttagattgagtagtaactggttggtgtaccagtaaaatagtagaggaataaaccattggtctgaatgcctcattctcatatatatggacaaaagcaatatgatcgttgtaattgtgcctcaaatcttatagttgtaaaaaatattgtgaagaaaaaaa

SEQ ID NO: 317 - DNA, 1324 bp, Zea mays
gctccccgtttccctctccaactccaatccatggcctccacggatcgctccacgccggcggaggacgagcaacagcagaagcgcccgtctctcttctcgccgtaccagatgccccgcttccgcctcacccaccggtgagcctccatcgcggtggtgctggcgccgatgaccaggtgcagggcgcccgacgcgatcccaggccccgcgctcgcggagtactacgcgcagcggtccacggagggcggcttgctcatctccgagggcaccatcatctcgccgtccggccctgggttccctcgtgtccctgggatatacaatcaagaacagactgatgcatggagaaaggtggttgatgctgttcatgccaagggagctatctttttctgccaactatggcatgtaggccgagcttctcaccaagtatatcagccgggtgctgctgctccgatatcctcaactgataagccaatatcatcaagatggaggatactgatgcccgatggatcctatggcaagtatccaactccgaggcgcctagccacatccgagataccagaaattgttgagcaataccgtcaagcagccgtaaacgccatcaaagcaggtttcgatggcatcgagatccatggcgcccatggctacctcatcgatcagttcctcaagggcggtatcaacgaccggactgacgagtacggtggctcactctccaaccgttgccggttcctcctggaggtgacccgagccgtggtctctgcgataggggcagaccgcgtcgcggtccgagtgtccccggccatcgaccatctcgacgcctacgactccaaccccctgcagctcggcctggccgtggtggagcgtctcaacgctctccagcaggaggccgggcggctggcctacctccacgtgacgcagccacggtacacggcgtacgggcagacagagtctggccagcacgggagtgccgaggaggagagccggctgatgcgtgccgtgcgaggtgcctaccgtggcacgttcatgtgcagcggtgggtacacgcgggagctcggggtcgaggccatcgagtccggggacgctgacctggtgtcctacgggcggctgttcatcgctaatcccgacctggtggagcggtttcggcgcgacgccccgctgaacaaatacgtgcgcaagacgttctacacgccggaccccgtcgtcggttacacggactacacattcctcggccagcctaaggcacgcatgtgatttgattattagtgcgttgccgtaattataagaggcggagtattgtttgtatgttgtgacttgagaaaacaagcaaaaa

SEQ ID NO: 318 - DNA, 1376 bp, Zea mays
cccacgcgtccggcgagcaacagagcagaagcaaagcgcagagctagcaagtgaccgaccgagagcaaataggcaaggcaacgcaggcaagatggtgcagcaagccgcgaaggaggtgatcccgctgctgacgccttacaagatggggcagttcgagctctctcaccgggtggtgctggcgccgctgacgaggtgccgctcctacggcaacgtgccgcagccacacgccgccgtgtactactcgcaacgcgccaccaggggtggcctgctcatcgcggaggccacgggggtgtcggccaccgcgcaggggttcccggagtctcctggcatctggacgcaggagcaggtcgaggcgtggaagcccatcgtcgacgccgtccaccgcaagggcgccatcttcgtctgccagatctggcatgtgggcagggtctccaccaacgagctccagcccaacggcgacgcgcctatctcgagcacggacaagcagatctcccccgacgccaagtccggaacggcgtactcgaagccgcgccggctgcggaccgacgaggtccccgggatcgtcgacgacttcaggcgggccgcacggaacgcgatccaggctggtttcgacgccgtcgagatccacggcgcgcacgggtacctcctggagcagttcatgaaggacagctgcaacgaccgcacggaccagtacggcggcagcctggagaaccggtgccgtctcgccgtggaggtcgtggacgccgtcgtccgcgaggtgggcgcgcgccgcgtcggcatcaggctgtcgcccttcgtcgacttcgtggactgcgtggactcggacccggtggcgctcggccactacatggtgcagcagctcaacaggcatagcggcttgctctactgccacatggtggagccccgcattaccgcccacgggcgcaggcagatccctcacgggctcttgccgttccgaaaggcgtttcatggaacgttcatcgccgccggtgggtacgatcgggaggaaggcaacaaggtggtggcagaagggtatgctgacctcgtcgcgtatgggaagctgttcttggctaacccggacctgcctaggaggttcgagctggatgtggcactcaacaaatacgaccgctccaccttctacacgcaagatcctattgttggctacacagattaccctttctttgaagaagaagatggcaagaatgagaggtgaaatctgataatgtggagggttcatcaagtataagttcgtcattatttccaccattcattattggtcattgtggtggagtcattgtgtcatgttgtttcattctgtactagtgtggtgtgaagtgaaataaatctatttggtgaaattgttataaaataaaaaa

SEQ ID NO: 319 - DNA, 1789 bp, Zea mays
ctcaccaccaccacacacgggagatagctatagctagcatagcaagccagccagtcagcgacttagcagcagctagctagccatgctgccgtccttcgtgtcgccgacggcgagcgccgcggcctcggtgacgcctccgccgcggccgataccaggcagctacgggccgccggtgctgggcccgctgcgggaccggctcgactacttctggttccagagccaggacgagttcttccggaagcgcgcggcggcgcaccgcagcaccgtgttccgcaccaacatcccgcccaccttccccttcttcgtgggcgtcgacccgcgcgtggtcgccatcgtggacgccgccgccttcaccgcgctcttcgacccggacctcgtggacaagcgcgacatcctcatcgggccctacaacccgggcgccggcttcaccggcgggacgcgcgtcggcgtgtacctcgacacgcaggaggaggagcacgcgcgcgtcaagaccttcgccatggacctcctccaccgctccgcccgcacctggtccgccgacttccgcgcgagcgtcggcgccatgctggacgccgtggacgcggagttcggcaaggacgacggcagcgacaagaagccctccgccagctacctcgtccccctgcagcagtgcatcttccggttcctctgcaaggcgttcgtgggcgccgacccgtccgccgactggctggtggacaacttcggcttcaccatcctggacatctggctggcgctgcagatcctgcccacgcagaagatcggcctcgtccagccgctggaggagctgctcatccactcgttcccgctgccctccttcctcatctggccgggctactacgtgctctaccgcttcatcgagaagcacggcgccgaggccgtggcctacgccgaggcgcagcacggcatcggcaagaaggacgccatcaacaacatgctgttcgtgctcggcttcaacgccttcggcggcttctccgtgttcctgcccttcctcgtggccaaggtcggcggcgccccggcgctgcgcgagcggctgcgggacgaggtgcggcgcgccatggtgggcaaaggcaaagacggcgagttcgggttcgccaccgtccgcgagggcatgccgctggtgcggtcgacggtgtacgagatgctgcggatgcagccgcccgtgccgctgcagttcgggcgcgcgcgcagggacttcgtgctgcgctcccacggcggcgccgcgtaccaggtgtccgcgggcgaggtgctgtgcgggtaccagccgctggcgatgcgggaccccgaggtgttcgagcggcccgaggagttcgtgccggaacgcttcctcggcgacgacggcgccaggctgctgcagcacctcttctggtccaacgggccggagacggcgcagcccgggcccgggaacaagcagtgcgccgccaaggaggtggtggtggacacggcgtgcatgctgctggccgagctgttccggcgctacgacgacttcgaggtggagggcacctccttcaccaagctcgtcaagcgccaggcgtcgccgagcgtggcgcaggcagcagccgccgccggagcgcagcagtgagtgcgctgtataggatccatcggtggcgtgcgacgtcgccggcgccggccaagcaataaagtaaattgagtaggccctcctcgtcatccacatgctcgtctgtgttcgacttcgatcggtgtctcttcctcccggccggccgctggccgccggcggccgttgtggtaataaaaaaaacacttgtgcaaaaaa

SEQ ID NO: 320 - DNA, 1527 bp, Oryza sativa
cagaagcccgtggaagcttcggaagcggcgcggcgcggcgctgggcgggggagaagaccagagcggcgaggaaggaggcggcgcccagcggggagagcgagcggctcgacgccgacggccatggcgctgctgatggatcccggggcgggaggccccctgacggagagcgagaaggccgacctggacgccatcgccgccatcaaggagtcggcggcggcagagtacaaggagaagggcaaccggctcgtcaagatgggccggagccactacgccgacgccgtcgactgctacaccaaggccattgcccagatggagccgctgccgccgccgccggtgccatcccccgacgcctccgtcctcttcgccaaccgcgcccacgtcaacctcctcctcggcaaccaccgccgcgccctcgacgacgccgcccgtgccgtccagctctctccctccaacgtcaaggcgtactaccgggcggcgaaagcggcgattgctctcggcttgctgccggaggcggcggccttctgccggcgggggatcgagcaggaccctgctaatgaggagctcaagaaattgctcgcacaagtggacgcccaacagagtgagcaagatcgtcatagggccaaggttgcgcaggccgtgtccgctgcgaaggatattgttgccgctatagagaagagggggttgaagcttgggaaggcagcatatcaagagcttaccggtgtaaagaagccgaagttggatgagcagggtgtgcttcactggccagttcttctgctctacccggaggtcatgtcgagtgacttcatcgaggattttccggagacagatactttcgtgccccaccttgatgtcatgttctcagaaagttctccaccattaccatgggatgataaacacgcttacacacgggatgctgttgagttatattatcaggctggcgttggcacagttctgtccaaaagtgaaatattgaaaattcttttggaaggcactatggactcaaagtcacttcctgaaagcctgcttgatgaggaagatggagaaaatgatgatggcaagagcagcacaattacatcatcagataagggttctgtgaagtggatcaatgtaaaagagggaaaaactcttcaagaagtgctgcagcataaagacttcatcatccctgcaattcctgtgttctttgttgtttcaagaaaatccaccttttacagaaagttcaaggcaggaaactggtctttgccgtaatgcttagcgtgattcagtttggcacatttggaagatgattagtgcggtacgcgtatgatcagagaagaaaagctggccacctagtcattcttgtatggttttatatgttgctttatagaatgatgaggtgtgttctttcctgtatttggtacaattctcaagtattttcctatcctttgcttgagatgctcagtatgccgtttctggagaaacacactgagaatgtacttatgtatggacagctttgggcctgatttagcgcttggcacaaaaaaaaaaaaa

SEQ ID NO: 321 - DNA, 1306 bp, Zea mays
cgcctctccctcctcttcctctcaacaccaccggcatacccatggcgaagtacggcgagggcgacaagcggtggatcgtggaggagcgcgccgatggcaccaacgtccacaactggcactgggcggagcgcgactgcatcgagtggtcccgcgcgcggctctcctcgctgctcgcgggcctcaccgtcctcgacggcgaggacggcctcacgctccgcaccgtcgcgctcgacaatctcgacggcgaggcctacgtcaacatccgcaagggcaaggtcatcccagggtacgagctctcgctcaccctctcttgggaggccgaggccgcttcggagtccggagctgtgaaggtcgccggcaccgccgaggtcccctaccttgccgacgagaacgctgacgaggaccccgacctccacatcaccgtgcgcggtgacgagacgcccctcgcgctccgcgccaaagatgccttcctctcccgcggcaaacccatggtgctcgaaaagatccgggagttcgttgctgccatggccaagggtggaccggcgaaggacgagctggattccaagaaaactcctgcgaaggtcgccgctgcagcgcctggcgccgctccggcgaagaaagaggaggtggtggctcctgcaccggctgcggggaagaaaaaggccaaggggaaggacaaggaggggttcaagaccattaagatgacggagacgttctactgccgctcaaaggacatatatgagatcttgatggatgagaacagatggaaagggtttacacagagcaatgcgaagatcagtagagaggttggaggggaatttagcctctttgatgggtgcatcactggcgtcaacgaggatctgcaggaaggaaaactgattgcgcagaaatggcggtttggaagctggcctgacggcttgtactcctcggtccggttgatgttggatgagcccgagtctggagttacagtcataaaactcaaacaaactggtgtgccagaggaagacaagtatgggaattcaactgtggttgagaacacggagagaggctggagagatctcatattccagcggatacgtgggatgtttggttttgggatctaaagagtctatagagaggcgatttaatttggcatgatgtcctaattcaaatttttacggggtcaggccatgaatgctatagcaatccatgtttctcacccagttttttttcttcatgtcggcaaaacgcaaaactctgcatatgatggggatttgaaaacatctgttattcatcaggctaaaacgctgcagtattccttgccccc

SEQ ID NO: 322 - DNA, 2005 bp, Zea mays
accccaagcgcgcacccatcttctggcctttccagccgccaagccttctagaagcttcaagagctcgattcgatcggaaccctcgccatggccgacgaggcgaaggcgaagggtaacgcggcgttctcggccggccgcttcgaggaggcggcgcggcacttcacggacgccatcgcgcttgccccagacaaccacgtcctctactccaaccggtcggcggcgctcgcctcgctccaccgctactccgatgctctcgccgacgcgcagaagaccgtcgacctcaagcccgactgggccaagggctactcccgcctcggcgcggcgcacctcggcctcggcgacgcggccagcgccgtcgccgcctacgagaagggcctcgagctcgaccccagcaacgagggcctcaaagcggggctccaggacgccaagaaagccgccgccgcccctccgcgccgcgggtcgtccggccccgacgccatcggccagatgttccagggccccgagctgtggagcaagatcgcgtccgacccctccacgcgcgcctaccttaacgagcccgattttatgcatatgatgcgcgaagtgcagaggaaccccagcagcatcagtatgtatctctccgatccccgcatgatgcaggtgctcagcctcatgcttaatgtcaagatccagagacccgaggcctccgagccgtcgcagtctaccccgccgccgccgaagcagcagcagcagcagcagacgccgccttctgagacgaaggctagggatgtggagcccgagcccgaggcagagccgatggatttgactgatgaggaaaaggaccgcaagcagacgaaagctgctgctcagaaagagaaggagttaggtaacgcagcttacaagaagaaggacttcgaggtggcaatccagcattacaccaaagccttggaacttgacgacgaggatatttcctatctgactaaccgagcagcagtctacattgagatgggaaagtacgatgaatgcatcaaggactgtgataaggctgtggagaggggaagagaacttcgtgctgatttcaagatgatttcaagggcactgacaagaaaaggaacagctctggtcaaacttgctaagacctctaaggattttgatattgctatcgagaccttccagaaggctctgactgagcatcggaacccagacactcttaaaaagttaaatgaggctgagaaagcaaagaaagagttagagcaacaagagtattatgatccaaaattggcagatgaggagagagagaaaggcaatgagttcttcaaggagcaaaaatacccagaagcaataaaacactacacagaggctctcaagagaaacccgaaggatcctagggtttatagcaatagggccgcctgctacaccaagttaggagccatgcctgaaggtcttaaagacgcagaaaagtgtcttgaacttgaccccaccttcaccaaagggtatacgaggaaaggtgcaattcagttcttcatgaaagaatatgacaaggccgtggaaacctaccaggctggcttgaagcatgacccgaacaaccaggaactgcttgatggtgttaagaggtgtgttgaacagatcaacaaggccaacagaggtgaaataagccaggacgaattgcaagaaagacagaacaaagctatgcaagacccagagatccagaacattcttaccgaccctatcatgcgacaggttctaatagatttccaggagaacccaagtgcggcccaggagcacctgaagaaccccggggttatgcagaagattcagaagcttgtaagtgctgggatagttcagatgagatgatcgagcgatgcgatgattggctttgttcgttcacgtgcaccctggtcatacatatgttttaacaagcagcagcggcataagaatgaacctgttcgggggctaatcttattccttttggattgtaagtgcattgacattggataattcatgtttgtggcactgagtttcgagt

SEQ ID NO: 323 - DNA, 1554 bp, Emericella nidulans
ctccatcgtcaaggaaggaacacggccctaactaaaccctagctaagggaagggaaacaagaccatggatgcctccaagctccgcgagcttcgcgacttcgtcgaggcgtgcaagaagaatccttcgctcctcgccgaccccaacctctccttcttccgggattacctccagagtttgggtgccaaaattcccgccgccgccccctctttcgaaagtcccaagagatcttccatggacgacattgatgacgacggtgatgacgacgacgatttggatatgagggatcccactcctgagcgagacgagctcgatgaagagattgttgagtctgatcttgagctcgaaggagaaattgtacagtctgaccatgatgacccaccacagaagatgggaaatccttcagtggaggtgactgaggaaaaccgtgatgcttcccaagaagcaaaaggcaaggctatggaagcaatttctgaaggaaaacttgaagatgctattgaacaccttaccaacgcaatagtgctgaatccactctcagcaatcatgtatggtactagagcatctgtgtttataaaaatgaagaaaccagctgctgccattcgtgatgccaatgctgctctagagatcaacccagactctgcaaaaggctataaaactcgtggaatggcatatgccatgcttggcaaatgggaggaagctgctcatgatctgcacacagcatctaacatggattacgacgaggagatcaatgctgtgctcaagaaggtggagcctaatgctcacaagatagtggaacatcgcaggaagtatgagaggttgagaaaagagagggaggaaaagagagcgcagcgtgatcggcttcgtcaacgtgcagaggcgcaggctgcttacgacaaggccaagaggaaggagcaatcgtcaagtcgctcatcaggaggtgcatctcccagaggctttcctggagggatgcctggtggtggtttccctagagggatgcccggtggaggtttccccgggggtggcatgcctgggggtttccctgggggtggcatgcctggaggtttccctggtggtgttcccggtaatgttgatatgagtaaaatcctgaatgaccctgacctgatggcagcattcagtgacccagaggtcatggcggctttacaagatgtgatgaacaatcctgccaactttgctaagcaccaagcgaatcctaaggtgggccctatcatcgcaaagatgatggccaagttcaatgggtcccagtgatggttatgtcgcagtcaggttttgtgagcagcaagcaaaggtttgttggacagtgaacaggtgttcttttcgtgcatctggtctgggagtgtgtttagcttgtgatgaagaacatgagtgtgtgtgttggtcgtggtgcatctggaggtgcgatgagcatgtgatgaaaaaaaaccaaacggctctatggtgatgtatgcaaaaagttgctttcgaacttgatttctcaattcacagatggtttgacagtttcttgaattatagaatgcttgtgtgctgctagtttccct

SEQ ID NO: 324 - DNA, 1235 bp, Oryza sativa
gcttctccaattttccaagcctgcctccaagcgcacgccacgatcttctagaagcgattcgcgcgcgccgccgcctcctcccctccccttccccggagcgaagccgccccgccgggggggatgtcgccggcggcggacagcgcggcgtcgaagcggcaggcggagctgctcaagcaggagggcaacgccttcttcaagaaggaccgcatcagcgccgccatcgacgcctacaccggggccatagctctctgcccaaaggttgcagtatattggaccaaccgagcactttgctacaagaggcggaatgagtgggttagggctgaggaagattgtagaacagctattcagcttgacagccactctgttaaggcacattacatgctcgggcttgcacttctcaacaaggacgaattggccgagggaataaaagaactagagaagtcgttggagcttggaaggggtgcacatccagcaagttacatggttgaagagatctggcaagagctttctaaagcaaaatacatagaatgggaaaatttatcaagcgaacgagtccgtcaattgcataagctgaaggaagcatgtaaagaagctcttaggaattataacagccttgacaatcctcctgcatatgtccccgaggaacagctaaatgagcttgaggaagtttttcggaatgccaggaagtctgatattccaacagaagttcctgatcatctctgctgcaaaattactcttgatattttcagagacccggtgataaccccaagtggaatcacgtatgagagggcggtgattcttgatcatcttcatagggtggggaagtttgatcctgtgacccgtgagacacttgaaccacaccaactggttcctaaccttgccatcaaggaagctgtccatgcatttttgagtgaacatggttgggcttacaggatgagatgactactttgaattacacctgggcttggagctttggaggcaacatttcagattgcaatatacatgtttcggttagtcaacttaaatgtgtcattttgtttatctttacatatttattggtggaaaaggttttacctgggatggctgtgtacagattccccttctctagctatccctcctctctactctgttcatgtgtaatgcttggtatcagattatcacttatccacagtaaaagaaaattaaagtggctgtcatactccttgttctctgattattggtttttggcgcactcg

SEQ ID NO: 325 - DNA, 1131 bp, Zea mays
caagaagccacctcaggctcacgccgcggttccacacgagcaaatcccgccgcttcctccccacgcaccccttcccatccttcccgaagcacgaggcgagccgggccgccggatatggcgccggcggcgccgtacggcggggccgagtcgcagcggcaggcggacctactcaagcaggagggcaacgcctttttcaggaaggaacgcctcagcgccgccatcgacgcctacaccggggccataactctttgcccaaatgttgcagtatattggaccaaccgagcactttgctataggaagcggaatgagtggactagagttgaggaagattgcagaacagctatccagcttgacagccagtctgttaaggcacattacatgctcgggttatctcttgtcaacagccaaagattatcagaaggaataaaatcactggagaagtccttggagcttggaaggggtgcacatcctgcaagctacatggttgaagagatatggcaggagctttctaaagcaaaatacatcgaatgggagagcttatcaagagaccgaacttgtcaactgcaaaagctgaaggtagcatgtaaagaggccctaacgagttacaacagccttgataacccagccgcaggtgcgccagtagaacagctaaatgagctcgaggaagttttcaagaaggctgcaaagactgatactccagcagaagtacctgaccatctctgttgcaaaatcacacttgatatcttcagagacccggtgatcaccccgagcgggattacctacgagagggccgtacttctcgaccaccttcaaacggtggggaggtttgaccccgtgacccgtgaggctcttgaaccgcaccagctggttcctaatcttgccatcaaggaagctgtgcatgcgtttttgagtgagcatggttgggcttacaagattagatgatcgctttggaatacaggttttggatactgtcggatgtgacggtgggatttttttgttcactgttggggggcagattttaatctgggatggctgcgtacagattcaccttctccagttgtgtacatatgagatgctcattatgatagtaattgtgaacagtacaccaaaggaagtgaagttgagcgtctg

SEQ ID NO: 326 - DNA, 1036 bp, Triticum sp.
gggagagcagagagctagtcgctcgcgcgggcaatccaaacctttccctattcttgcaaggtctcggaaacggaaaggcccctgctccgctgcgcgtttgcgagtttgggaagaagccttgcctgccggagggggggaaacgggcgagatggggcgagggcgcagcgagataaagaggatcgacaaccccacgcagcgccagtccaccttctacaagcgcagggacggcctcttcaagaaggcccgggagctcgccgtcctctgcgacgccgacctcctcctcctcctcttctccgcctccggcaagctctaccagtacctcgcgcccaccgtcccctctgtcaaggagttcgtcgagaggtacgaggcttcgaggcacaccaaagtttggtccgacatccgccaggagaggcgccgcgagctggagaaggtggccaagatgtgcgacctcttggagaaggaactgaggttcatgacggtggacgacggggagcggtacacggtgccgtcgctggcggcgctggagcacaacctggaggcggccatgcacaaggtgcgctccgagaaggaccgcaagatcggcggcgagatgagctacctcgagaacatgatcagggggaaacaagcggagcgctacggtctgtgtgacaagctcgctcatgctcagagcctcaaggtcgttgaaggtggatccacctcgctgaacaacggcctggacctcaaacttggattcaactaggaacgggtgaaagcttctggccgtggggttctgctctagtgttgcttttgagctcgagtgttatgtcaggttgaaatattctgcaatttccttcgaagggattgtatgaacttgtaagagaccactgtcttatgagatgtttggcttaggctggactgggctgtgcgttgtacctccaataggtggaatgtgataccagtccagtattgcaataatgtagttaacggtcaccttatgctctagttcatgcgttctttgtcaatgtggactattcgtgtttttcttgatttctgccag

SEQ ID NO: 327 - DNA, 972 bp, Zea mays
tggagagccattcgtgggcgtaggacgagagagagaggatcggagcagtacgcggcggcggcggcgtgtgggagatggcgcgcgagaggcgggagatacggcggatagagagcgcggcggcgcggcaggtgaccttctccaagcgccggcgcgggctgttcaagaaggcggaggagctcgccgtgctgtgcgacgccgacgtcgcgctcgtcgtgttctccgccaccggcaggctctcgcagttcgcgagctccagtgtgaatgacatcgttgacaagtacagtacacattctaagaatctggggaaatcacatcagcagccttctattgatttgaatgtagagcagagcaaatacagcggcttgaacgagcaacttgctgaagaaactaatggacttagacagatgagaggtgaagaccttgagggattgagtgtagaggaattgcaccgaatggaaaggaaacttgaagcaggactgcatagagtgattagtacaaaggaccagctattcatgcaacaaatcggcgaattactgcaaaagggcacacagctagaagatgagaacaggcgtctaaaagaacaaatgcctcaggtgctaacggctggcacaatggtggttgctgctgctgcagaaaatatcctcactgaagacgggcagtcgtctgaatctgtaatgactgcattgcattcaggaagctcgctcgactgtgatgatggttccgatatatccttgaagttgtcgttgccttgaaaggaaggaccatcgcatcgcatgttatctgcatgagtggggctgacaccagtgcttctaagaagacaaagactgggatagtcccattcgcggcattatattggtttaaccagatgtgctgtccttgtgcatgtctgtacttcaaagtggctaacgcgaaatttgtatatataatagtgtatgcgctgcgttatcttcgttctaaaaatctgtattgttt

SEQ ID NO: 328 - DNA, 1419 bp, Zea mays
caccgctttaaatccgcctcctcccagcgtctccctcctcccggcctgtcccctcacctcctccccctatctctccaccgccgcagctagctgtgacgtcatgcactcgccggcgccaccgccaccgcatactatctacaattagccagccgtaggcttacctatcctgtgtcaagcaagcctctcgcaagcaacaaggaaggaagctagctagttttatagctgctgtcggcggcggcggctgaagcgacgtgcctgggctaggatttaggttgagatcaggagagggagaaggcggcggcgatggggcgcgggaaggtgcagctgaagcggatcgagaacaagatcaaccgccaggtgaccttctccaagcgccgctcggggctactcaagaaggcgcacgagatctccgtgctctgcgacgccgaggtcgcgctcatcatcttctccaccaagggcaagctctacgagtactctaccgattcatgtatggacaaaattcttgaacggtatgagcgctactcctatgcagaaaaggttctcatttccgcagaatatgaaactcagggcaattggtgccatgaatatagaaaactaaaggcgaaggtcgagacaatacagaaatgtcaaaagcacctcatgggagaggatcttgaaactttgaatctcaaagagcttcagcaactagagcagcagctggagagttcactgaaacatatcagaacaaggaagagccagcttatggtcgagtcaatttcagcgctccaacggaaggtaaattgttgagcttgctaaagttggctgttcgaacttcctcttttaagaattgtatgatttctttagctggccattagatgggcatggtttattgcaagtgttaactactttggttgccttgttacatccacaaaatatctctgctcttgcgctgtgctgcgatgcattgttaccgcaggagaagtcactgcaggaggagaacaaggttctgcagaaggagctcgcggagaagcagaaagaccagcggcagcaagtgcaacgggaccaaactcaacagcagaccagttcgtcttccacgtccttcatgttaagggaagctgccccaacaacaaatgtcagcatcttccctgtggcagcaggcgggagggtggtggaaggggcagcagcgcagccgcaggctcgcgttggactgccaccatggatgcttagccacctgagctgctgaaggtttgctctcatcgtcgcagtgtgctagcccaaaatccagcaagtcttccccggaccccggactggccaagcttctccgcctggtgcagtatcgtcgtgatcgcgagaagcagcagcagcggtttgccgtattttttaccaccgtgtataagtagcatatctgcaatgtgtatattttgttcaccgttcctgctg

SEQ ID NO: 329 - DNA, 979 bp, Zea mays
caaatctttcagccacccgatccccaaccgcccggcccgacattccctccaaccgccgctgcggctgcgccgcccaccgccgacaggcgcagcagtcaacaggaaccgagccatggcgagcgcggatctgctgcggagggaggaggagttctactcctccctgtttgattccgccaaaggcgatggcgccaggtcgcgctcacagctgatcgagaggaagatcgaggccctggaggacatggccaccagggtcagtaaccggagatcgcggaagtggtttaacgaccgtttgctgattgaactcgtcccgcgtctttacgttgaagagatcaaaggcctattcgctcctccgccgtggggtgagcaagtgcccttgtcagcattctacagggcaaatgttggtgaatgggattccttcaggagcattgacatggatgctgaggcaagattgatgcagcatatgaaaaaatcattggaaaaacccaggaatcatgtcgatgaaggggaatcgattgcgctgaatgcttggcatcgaatagatcgacacactagagaagcaataaagagaaatttccttcctgatctgcttggaatatatgaagaacgcgttagggccttcattgaagacgctagtgacaaagatgctcttgtgctgaatgttcaggacccatttcagagactactgctccacggtgtttgtgagttctacaacgtgagctcgacaaccaccagcagtgtgagagaagatgggaggccttggaaggcaaccaccatcaagaagaggcagggcaccggcgttccctctagaatcacactagttagctttctgagaatgaagaagaatggatcgcagtaacgttagttagcgttcaagaatacaacaaaattgctttagattccgtttaggctgttgcaagacaagtgagtggtcactggcaatgtgttcttatatcgcatcagcctgctggctacggtttgg

SEQ ID NO: 330 - DNA, 2437 bp, Zea mays
atcgtcgtcgtcgcccgccgctgctaggtttggggtttccggtggccaggacccaagccagctccgtcgggcgccgtggggaactgctgggaggggcggtcgaccggcggtgcctctgcttcgggttctccgtaccggcgtcggaggggatcggatggcataagttggagcaaatctaagtcgttaaattgagaatagtccaaggaaacctaattcatcctattttggcccaagacgacgctttccactagaatgaaggtggcaaatgggttgtctttgaggaaatctaatggtaggtttaaatcaaagcttatgatggaacttgttaaacaatggcgagaacatcaagcaaatatgaggtgcatgaatctatccaagcgtaataacaacatctatgttggggcagaaggagccaacataacttctcccaacgatagcaacatttggccaacgagtgctttagtagcaaagaatagcaacccaagatatgtgctagcctcaaagtgtgcaagccagcctcctacaatgtggctagagaatagcttgaatacttcatcgggtttcaagtgctctaagctctctatcgttaggaatgcacttccttcgaaaacacctaaggcgtctgtctcttggaagtcaaaggatgattcgaatgccataccaagacacctagagcaatctcactgtaaaaagacatctagagcaactcgaactcacttcaaggcgatgccgaatttgattcacaaggcaaagaatgttgatacctcaaatctaaacgatggtacctcgggttcaagttggaggggtcagtcggattcatataagggagaggacataaatatcgggaaggaatgcactaaaacttcagagttgttgaaaagtagagaagcctcaagaaaatcaaacatcctagtggtagatcggaaggatcctaacaaagatgagccagacaaagtgaaaggaatccaagatgaagttatgaccaaagaagagggagtgaaaggccatacctgtgaaggtcgtgcgacgtgttggagttgtcttaagcaggcgaacaccacaaagacaaatgatgctccaaatttaggttcattgttggttggtaacgaacacatgcaaggcctcatgagtaatttgagagataattcatcccatttgtttgaaaagaatcattcaagacaccaaagggatgatccatgtgaatatagagaaacaaacttgaagtttcctaataggatccaatcagttggaggcaatgggaaaaccaatgatgtcacatctaggaggaaacgactcttgttagaagaaaaggctagcgcacacgtgcaaaatgatcttacttatggaccgatgaagaggcggaggtacatagaagccaacgaagatgaagaagagcaaaatgatcttacttatggaccgatgaagaggcggaggtacatagaagccaacgaagatgaagaagattatgtcggcgaccaccatccggtgcatattgaagatgctaccactgaattgacaccgcaggattctatttcaaagcattgcgttgagcgacaatgctattgttgctcaaagcctattgacatacctagatggagtggaacctttaagatagatggaaaggaacacatatcactggctggacatttgtcatccaaatcttgtgagaaagtgtggaaattgtcatcattgccgaaggtggttcaagtgacaaaggttcctagaatggcagtgtggcctaagatatttaaagcatcagaacccagtggtgacaatattggcctatatttcttccctcctgaaatgaggcacgatgaagaactagatcaactagttaatgaagtcatggataaagatttgatcttgcgagctattattggtgaagctgagatgctgatattcccgtctgttctactacctgaaagatatcagacattccaaaccaaacactacctatgggcggccttcaaagcaaaggaggataaaggtgatgcaattgtagaggaggaggttgagaagggaaattgcgtttcaaaccagccagacaaggtacagtctgataatgcttcatttccttcaaaccatggactggaccgtccaagcatggaagctccccctcaaagcagtagcagtgtctttggtattgttgtccgacaagctccaaatcttgaaccagaagtgaagcgatttatccaggagatggaacgcaaaggtgcgttggtaacggttatgaggggggaggcaattggtggagggccatagccaagcaacaccacgaccactatgcattagttgtagagagagtagagagtaaaccatgtcaaactatgctgtagttgtatagagagtctgacacataacgtcgtggacttgagctcttgttcagtttttttgtaaggtacctacaagtttggtcatatgataatttctccggaac

SEQ ID NO: 331 - DNA, 1101 bp, Saccharomyces cerevisiae
ttatttagatcgtgattctctctactcaaacatttccttgaacttgtataacggggaaataaatctgaaaagcaatacatttgcgcactgttaaaactggaaaggaagaatgacaaccagcatactcgatacttatcctcaaatatgctcccccaatgctttgccaggtactcccggcaatttgactaaggagcaagaggaagcgcttttgcaatttaggtcaatcttgttagaaaagaattacaaagaaaggctggatgattctacgctattgcgatttctacgggcaaggaaatttgatatcaatgctagcgttgagatgtttgtagaaactgaacgatggagggaagaatacggtgccaacactattatcgaggattatgaaaacaacaaggaagccgaagacaaagaaagaatcaaattggccaaaatgtaccctcagtattaccatcacgttgataaggatgggagaccattgtacttcgaagaactaggaggaattaacttaaagaaaatgtacaagatcactaccgaaaaacagatgctaagaaacttagtcaaggagtacgaattatttgccacgtaccgggtcccagcgtgttcgagaagagctggctaccttattgaaacttcgtgcactgtgctggacttgaagggtatctcactttctaatgcttatcatgtgctttcctatattaaagatgttgcagatatcagtcaaaattattatcctgaaagaatgggtaagttttatattatacacagtccatttggtttctcgacgatgttcaagatggttaaacccttcttggatccagtaaccgtgtcaaaaatctttattcttggctcttcttataaaaaggaattattaaaacaaattccaatcgagaacttgcctgttaaatatggtggtacatctgtcttgcacaaccctaatgataagttctactattccgatattggtccctggagagaccctagatacatcggaccagaaggtgaaattcccaacatttttggtaaatttactgttaccagctaactatgatacaggccttcgtcgtagctttccgtgaatatagcatgcatactctataatat

SEQ ID NO: 332 - DNA, 1882 bp, Zea mays
ctcgtcagtcctcagtcctcactttcgggccgagctccggatatccagcggcggcaatggcagccgaagccagcgccgtccagcagctcgctggcctcctggaccaagtggacgcgccgctgaagaagacatttgagaatgtgcatcagggctacccaacagagacattattgcgtttccttaaagctagagagtggcatgtgaataaggctcacaggatgcttgaagattctttgaattggaggatgcaaaatgaaatcgatagtatattggagaaacctattatcccagtagatttgtatagatcaattcgtgatacacagcttattgggttatcaggatactccaaagagggcattcctgtatttgcagttggtgttgggctgagtacatatgacaaagcttcggttaactactatgtgcaatctcacattcagatcaatgagtaccgagatcgttttattttgcctacagtgacaaagaagtatgggagacctattaccacctgtataaaggttctcgatatgactggtctgaaattgtcagcactacaccaaatgaagattgtgactgcaatatctacagttgatgatttgaattaccctgaaaagactgagacctattatatagtaaacgctccatacatattttctgcatgttggaaggtcgtgaagcctctgttgcaagagagaacaaggaagaaagttcatgtgttgcgtggctgcgggagagacgagcttctacagatcatggactactcctccctcccccatttctgcagacaggagggctcgggctcatccaaacattcgtcaggcgacgccgataactgcttctctctcgaccacccgttccaccaggagctctacagcttcatccaggagcaggcgctgaaccaggagctcatcaagcagggctccttgcacgtgaaaatccccgagcaggaccctgaggacgcaaagatcgtggaggtcatcgaggccgagttccacaagcttggcgtgcagaacgggtccgccaatggcatcgaccaagcatagcacctttgtctaataaggccagcctgattcaaccgagacgttgcttgccacttctgatgcaactaatcctactgtttattttttttggtggggtgggcccacccccgttgctgtttcctggggggaggggggtgattggtattggtggtatacatagcaaagtcatttgcagatccatccatgatgcaggactgagatagacgatatcacctgtgtaaacttgcagatttgcaatgtgtcctcatctcatatgtatgctgagttgagatgaaatgaataaatcatcctacaagtttttttaaaaaaaaaaaaaaaaaaaaaaaaaaaaaaaaaaaaaaaaaaaaaaaaaaaaaaaaaaaaaaaaaaaaaaaaaaaaaaaaaaaaaaacaaaaaaaaaaaaaaaaaacaaacaaaaaaaaaaaaaaaaaaaaaggggggccccttttaaaggaaccaattttacttcccccgcgttgcgaatttataaatttttttttgggcccaaaaaattaaatttatgggccgtttttttataaccgggtggggggataaacccgggggtcccccatttaaaacttttgaaaaaaacccctttttacaggttgggggataaaaaaagagcccgacattaaccttttcaaattttgggcaccaaaagggaaaggacccccccttaccccgaattaaacgcggggtttggggttttctcccaaggtgcccttaacttttaacccctaaagccctttcttggtttctttccttttttttccaagttggcggtttttccccagaaattaaagaggccctttgggtctgttaatttttaagccccacccccaaaa

SEQ ID NO: 333 - DNA, 1066 bp, Zea mays
gttccgatcctccacaccagcacccgccgccgccgcctcttcccttgcgcacctgctgctgtgcggatcggtgaggcggaggagtaggatggcgagcgcggccggaggcggagcggcgggggaaggggagtggcttaaggtatcccagctcaggcccatggtggaagcgcaggaccccaacgccaaggcagtggacaacctgacgctgcgtcggttcctgcgcgcgcgcgaccacgacgtggacaaggcctccgccatgttcctcaagttcctcaagtggcggagggaggcggcgcccggcggctccgtgccggaggagcaggtgaggagggagctgtcgcaggacaagctgtgcatgggcggcgtcgacagggccggccgccccatcctcgtcgccttcgcggccaggcacttctccgccggccgtgacatggcagagttcaagagttttgttgtctacttcttcgacaagatctgtgccagaatccccagagggcaggagaaattcctctgcatcgttgatctcaagggctgggggtactcaaactgtgacgtccgggcatacattgccgctatagagatcttgcagaactactacccggagcggctcggcaaggcgctgatgatccacgtgccctacatcttcatgaaggcgtggaagatgatctaccccttcatcgacaccaacaccagggacaagttcgtgttcgtggaggacaagagcctgcaggagacgctgcggcgggagatcgacgaggggcagctcccggagttcctcggcggcaagatggacgtgatcccactcaaggactatggcgtgcagcagcagcctcaggccgtgtaatagccatgccatgcgtagcatacacgagttgtggctaggagcatagcatggcaataactgtgtagctgctgtgaaagtgaaaatgaaacgttgcgctgtttagccgggtcaattgaccagcccaactgcagatctctgggctaccactatgaacagcaagaactgtttcccttatccttttcagccaaactaatcaaaccagaaaatgtttcttgtaaaaaa

SEQ ID NO: 334 - DNA, 1407 bp, Zea mays
cgagattcgagagaaatggcgatggcgacgccagctgccaaacaatcacttctcaccgtccaaccgtgcacaatgaattgaagcgccacgcggttccaataatctattgccacgggcaggtgcgtcgcgtcgattcctggtcttcgagaggagcggaggaggagggcggcgagtgcggaggagaggcgagttcagctgtagcgtttcgcttcttgcccgtggcggcggcggtgccacctcgaacgctgctccctgttctggggcttactgcggatcctgatctgagcatcattcagagaggaagaaatatgtttaggagaaagcatggctctgatttcaactcagatgatgctgagcaaagagaagcaaagattagtgaactgaaagctgctcttgggactttgtctgcccgtggcgagaagtactgcagtgaagcatgcttgagaagatatctggaagcccgtaactggaatgttgctaagtcgagaaaaatgttggaagaaagtctcaagtggagggcagcttacaagccagaggatattcgttggcctgatgtttctgttgaagcggaaacaggtaaaatgtacagggcaagtttccgagacagggagggcagaactgttgttgtcatgaaacctacaaaacaaaatacttcatcccatgaagggcagatacggttcctagtatatactttggagaatgcaatcttcagcctgcctgaaggccaagaaaaaatggtatggctgattgatttcacaggatggacagtgtcccatgcttcgccgataaagacttgtagagaaactgcaaatatactgcaaaatcattttcctgaaaggctggccattggatttctatttaatccccccaaagtatttgaagctttttataaggtcatcaagattttcctcgatccaaaatcagtcgagaaggtgaacttcgtgtacgagaaggatgaggagagcatgaaggtcatgtacaaatacatcgatccggaagtccttcctgtagagtttggggggaagagcaatgtggtgtacaaccacgaggagtactccgagttaatgagacaagatgacatcaaaacagcaagcttttgggcggttgatgcgaaaactaaccatgctaaccctgccatcaatgggaccttggttcctgaggttgcgccacagtcgtcgctggctgctaaagctagttgaagagtatctgcattctctgagaaaattgagaagccgaggactaatggaaccttgagagaaacatatgaaataagaaacatggtatactcgttcatcctcaagagttgtttaagtactggaagtttattcagcacacaataagctactagagaatgtcaccatgtgtgatttgatgcccaaaagagatggtttacaaggtagaaaaaaa

SEQ ID NO: 335 - DNA, 1147 bp, Glycine max
attcggctcgagggggaagaaacatttaatttgggttgataatagtttatgttaagatatcactactgctatatatatgttgccatagccaagttagccttataaagggaaactcacttgccttatttttggttttgagattgagctaaaggccaactcaaccatcgaatttgttggtgattgaaagagaaggaagaagaagcaggaaatggaagcagtgagagctggtcgagaaggagcaataggtctaggtcaaggtgatggcgtagccaaggacagcactgagactgaactcaccaaaatccgtctcctcagggcaattgttgaaacccgtgatccctcttccaaggaagaggatgattttatgattagaagattcctgcgtgctcgtgatttagatgtagagaaggcttcggcaatgctcctcaagtacttgaaatggagaaattcatttgttccaaatggctctgtatctgtgtcagatgttcctaacgaacttgcacaagataaggtgttcatgcaaggacacgacaagataggtcgacctatacttatggtcttcggtggaagacattttcagaacaaggatggtcttgatgaattcaagcgatttgttgtttatgttcttgataaagtatgtgcaagtatgccacctgggcaagaaaagtttgtcggtatagcagaacttaagggatggggatactcaaacagtgacgtgcgtggatatcttagtgctctatccattttgcaggattactacccagagagattggggaagttgtttattgtgaacgcaccatacatctttatgaaagtgtggcaaattgtttacccattcattgacaacaaaaccaagaaaaagatagtatttgtggagaaaaataaggtgaaatcaacactgctagaagagatggaggaaagtcaggtcccagagatattcggtggctcactgccattagtcccaattcaagatagctaattaattaagtaaccgctgacagaataaggagaggcgggcctaaaaataaatattgttatttcttatttatgtgtttctatgccgttttctttttacccaattactttacactgttgtatcagctatcaatattcagtagtaaatgagtacgaaaaaaaaaaaaaaagg

SEQ ID NO: 336 - DNA, 1684 bp, Glycine max
gtagagataaaattatagaacaagaatgaaggtagcacaggtactgcacatgaacggtggcgttggacacgcaagctatgcaaacaactcccttcttcagcaaaaggtgatttgtttgacaaagcccataagagaggaagccataacaagcctctattgcaacaccgtccccagaagcttggcggttgcagatttgggttgctcttctggaccaaacactttgcttgttgtgtctgaattcatcaaaattgtggagaagctttgtcgggagctaaaccataaatctccagaatacaaggtctttctgaatgatcttcctgggaatgacttcaacaacatcttcaagtcccttgatagcttcaaaaagaagttgtgtgatgaaatggaaagtgggattggtccatgctacttctctggggttcctggttctttctatggcagggttttcccaaatcaaagtcttcattttgtccattcctcttatagccttcactggctatctaaggttccggagggtgtagacaacaacaggggcaatgtttacattggcagtacaagcccgacaaatgttgcaagagcttactatgagcaatttcaaagagatttctctctttttctcaagtgtcgtgcagaggaattagttaaaggaggtcgtatggttctaacatttttgggaagaagaagcgatgatccctctagcaaagatggtggctacgtttgggagcttatggctactgctcttaacgatatggtcttgcagggaatcataaaagaagagcagttagatacttttaacattcctctatacactccatctccatctgaagtgaaattggaagttcttaaagaaggttcatttgccagcaatcgtctagaggtgtctgaagtgaattggaatgcttttgatgactggaacgctcttgaatttgaatctgaaaggtctgatacacttagtgatggcggatacaatgtggcacagtgcatgagggctgtggcagaaccaatgcttgtcagccactttggtgaagctatcattgaagaggtttttagccgctaccaacaaatcttgactgatcgtatgtccaaggagcaaactaagtgcatcaatgtcaccgtattattgactagaaaagcataagcaagaagtttgcatctatatagggtttctcaaaatgggattgttgtagtcatagtttaaaaatatggctcgactaggcttgtcggatcgagatctgatgacataacccgtccgatttgattattggaccggttatgcatttggtccagaataatccggtccaacccgcccgatttggagtaaattcggcgatcctgtccgatatttccatttcgcctaaaaaagaaaacaaaaaaaaatgttaaaaaaacctaagacttaagtatttgtgttatactccaaagattaaggcagtcgatgtgagacttaagtatttttcaataatatatattggatcaaatcgagctaataactggcctaccggttagaacactgactcactacctcaactgggtcaatgacaggaagagattaactttggctgctctgagttgtgactttttgcttgttcgtttttcttctagcaattagctagatgttaagttggagaaaaataaaactagtattgtgtggttcagtaaaaaaaaaaaaaaaaaaaaaaaaaaa

SEQ ID NO: 337 - DNA, 1410 bp, Zea mays
cttgtcactcatcagcacggttagtatagctagccaccatgaaggtagagcgcgatctccacatgagccggggcgacggcgaggacagctacgcctccaactcaaggcttcaggagaagtccatactgaagacgaggccggtgctgcacaaggccgtggcggcggcgcacgccttgtcgctctcctcaggaggacccggcggcggcgccatggtcgtcgcggacctcggctgctcgtcggggcccaacacactgctcgtcgtctcggaggtgctagcagcggtggcgatggtggccggcggcagcgcccaaccgcagcacgtgcagttcttcctgaacgacctccccgggaacgactttaacctcgtcttccggtcgctggacctgttgaagaacaagaagctggccgccaaggacaggcgggaggagtcgctgctaccgccgtactacgtggccgggctgccgggctccttctacacccggctgttcccggaccactgcgtccacctcttccactcctcctactgcctcatgtggcgctccaaggtccccgacgagctcgccggtggcgcggtcctcaacgagggccacatgtacatctgggaaaccacgccgcaggcggtggtggccctgtacaggaggcagttccaggaggacatgtcgctgttcctcaggcttcgccacagggagctcgtgcccggtggccacatggtgctggcgttcctgggcaggaagaagagcaaggacgtgcttcgtggcgaggtcagctacacgtgggggctcctcgcgcaggctctccagtccctcgtcaaacagggccgtgtgaagaaggataagctggactccttcaacctgccgttctacgcaccttcgatggacgaggtgagggacgtgatcacgcggagccaggcgttcgacatcacccacatccagctcttcgagtccaactgggatccacacgacgacgacgacgtggagatgaagatggaagaagacgtcgccgccgtccagagcggcgtcaacgtcgccaggtccatcagggccgtgatcgggcccctcatcgcccgccactttggcgagcacatactcgacgatctcttcgagctgcatgccaaaaatgtcgcagtgcacctgcagaaagtgaagaccaagtaccctgtcatcgtcgtttccctccaggcgaaatgagccgcgcgccaaataaaggaccaagctagctgatgcaaaatctggcgtcaagttagctattagtaccgctactattatatgcatgcagaataattagtcaaacaatcagaaaaataaagtgcctcagagactgttagtggcagatccaatgtttcgttaattatatgtagtgtaatggtaatggtaatggtaatggtagacatcaggtttcatcgtccaaaaa

SEQ ID NO: 338 - DNA, 1494 bp, Zea mays
gaattcccgggtcgacccacgcgtccgcggcgcaccgctgaagcctaaactcgcagccagccatgtcgatgagaatcgagcgtgatctccacatggccacagggaacggagaaactagctacacaaaaaattctaggattcaagagaaagctatgtttcagatgaagtcggtacttgaggaggccactagagcagtatgcacagctctcctcccacaaaccatggttgtggccgacttaggctgctcatcagggcctaacacactgcgcttcgtcactgaggtgactagaatcatagctcaccattgcaagctggagcacaaccgacgacatgaccacccgttgcagcttcagttctttctgaatgacctgcccggtaacgacttcaacaatctcttccagctcatcgagcagttcaataagtcatcgacgacacacaagggagatgcagcaactgaggcactacagcctccttgctatatctccggattgccgggctcctactacactaggatcttccctagcgaaagcgttcatcttttccactctctgttctgccttcagtggcgctctcaggcaccagagcaactgaagggcacccaaaaatcatgcctagatatctacatcacaaagactatgtcaccatcgatggtgaagttgtttcaacagcagtttcagaaggacttctccctcttcctcaggctacgctatgaggaactcgtgtctggtggccaaatggttctaacatttattggaaggaagcatgaggatgtgttcactggagagtccaaccatctttacggattgcttgcgcagtcactgaaatccctagttgatgagggtcttgtggagaaagaaaaacttgagtcattctatcttccgatctactcaccgtcggttggtgaagtggaggcgatagtgaagcaacttgggttgttcaacatgaatcatgttaaagtatttgagataaattgggacccctacgatgactcagaaggtgatgatgtgcataacaatattgagagcggtgaaaatgttgctaagtgcctacgcgcagttatggagccgctggtcgcaagccaatttggagaacgcatactcgacaagttattcaaagagtacgctcgccgtgttgccaaacaccttgagaatgagaaaacaaagcatgctgttcttgtcctatccatcaagaaagcaataattcatgtgtgaagtgtcttgtttctcactatatatctttccattagtatcacatggtaatgtatgtttgttttgaatgtgcatgtttgtgtcactagctggtgtattgaatgtcatggtgtttttgttgttttctttatcgcttctcctatattttagatgcctgaattttaaggtgatttcaggcaacactcttgtacaaggaattaataccaataaattgctccttttatgatcaaaaaaaaaaaaaaaaaaaaaaaaaaaaaaaaaaaaaaaaaaaaaaaagggcggccgc

SEQ ID NO: 339 - DNA, 2438 bp, Zea mays
ggcctcctccctgagacaatccccacgccaccgcgcaccggagacgaacctgaggagagaaaaaatctgcgcccgtcagtgtgctcgcctacttctacgctccgctcgttcccccaaatagttcctcggcttcgctcccttcccctccctgctccggctccggttcgcacacagtaagaaaagatggcgctgccatccatgagtcttgtggcaaagggtgtgcttcccttctcagcacgtacctcgagtggtgtcacacaaaggccggtgtcagtgactgcttccttggagcacaaaaccagcgatgccagaaggaagttcctaaaacttgcgcttgggaaccttggagttggactgcccaccttgttgggcgctaagaaagctctcgctgatgagcaaggcgtctcgtcctcgaggatgtcttattcgaggttccttgagtatcttgacaaggatagagtgaagaaggttgatttgtttgagaatgggacaattgctattgtggaggccatttctcctgagcttggtaaccgcgtgcaaagagtccgtgtgcagcttcctggtctaagccaggagcttcttcaaaagttgagggagaagaacatcgattttgctgctcacagcaaccaggaggactctggttctcttctgttcaaccttattggaaatttggcattcccgcttatccttatcggtggtctgtttttactttcaagaagggcacagggtggcctcggtggacccaatggtcctggctttccccttggttttggtcaatctagggccaagtttcagatggaacccaacactggtgttacatttgatgatgttgctggtgtcgatgaagcgaagcaagacttcatggaagtggttgagttcttgaagaaacccgaaaggttcactgctgttggtgctcgcattcctaagggtgttctgcttgtcggtcctcctgggacgggtaaaactttgcttgccaaggcaattgcaggagaggctggcgtgccatttttctcaatttcaggttctgaatttgtggagatgtttgttggtgttggagcttccagagttcgtgaccttttcaagaaggccaaggagaatgctccttgcatagtgtttgttgatgaaattgatgctgttggaaggcaaagaggtacaggtattggtggtggaaatgatgaaagggagcagactctcaatcaactactaactgagatggatggtttcgagggcaacactggaattattgttattgctgccactaaccgggctgacatattggattccgctttacttagacctgggcgttttgatagacaggtgtctgtcgacgttcctgatgtacgtggaaggacagagattctaaaagtgcatggtagcaacaagaaatttgattctgatgtttctcttgatgtcatagcaatgagaacacctgggttcagcggagcagacttggcaaaccttctgaatgaagcagccattctggctggaagacggggaaggacagcaatttcttcaaaagagattgatgattctattgacagaattgtagctggtatggaagggaccgtgatgacagacgggaagagcaaaagtcttgttgcttaccatgaagttgggcatgcaatttgcggaactttgacgcctggccatgatcctgtccaaaaggttaccttagttccaaggggtcaagctcgtggtcttacatggtttatcccgatggatgacccaacactcatctccaggcagcaactttttgccagaattgttggcggccttggtggtagagctgctgaggaggtcatatttggagagcctgaggtgaccactggagctgctggtgacttgcagcaaattactggcttagccaagcagatggtggtgacattcggtatgtctgaaattggtccatggtctctgatggagggtggagcgcagagtggggacgtcatcatgagaatgatggcaaggaactccatgtcagagaagctcgcggaggacattgattcggccgtgaagcagttgtcggatgaggcctacgagatcgctttgaggcacattagaaacaacagggaggccattgacaaaatcgttgaggtgctcattgagaaggagacagtgaccggagacgagttccgggcgatcctttctgagtttgccgagatccctgttgagaaccgggttcccccagccacaccggcggctgcgctcccagcctaaaccctagccttgtaggggaggattttcttgttgtatggtgttcatattttggattcttggtgtactctaactctactaaatctgccggattttcggtactcgacatgtaagatgtaacttactcatggtgaattaatagtaaaatgtaattagattaaaataataggcctggcgcaacattttcagtttggaaaaaaaaaaaaaaaaaaaaaaaaaaaaaa

SEQ ID NO: 340 - protein, 983 aa, Zea mays
MMESAAAQSCAACGDDARAACRACSYALCRACLDEDAAEGRTTCARCGGDYAAINPARASEGTEAEEEVVENHHTAGGLRERVTMGSHLNDRQDEVSHARTMSSLSGIGSELNDESGKPIWKNRVESWKEKKNEKKASAKKTAAKAQPPPVEEQIMDEKDLTDAYEPLSRVIPISKNKLTPYRAVIIMRLIVLGLFFHYRITNPVNSAFGLWMTSVICEIWFGFSWILDQFPKWYPINRETYVDRLIARYGDGEESGLAPVDFFVSTVDPLKEPPLITANTVLSILAVDYPVEKISCYVSDDGSAMLTFESLAETAEYARKWVPFCKKYAIEPRAPEFYFSQKIDYLKDKIHPSFVKERRAMKRDYEEYKVRINALVAKAQKTPDEGWIMQDGTPWPGNNPRDHPGMIQVFLGETGARDFDGNELPRLVYVSREKRPGYQHHKKAGAMNALVRVSAVLTNAPYILNLDCDHYVNNSKAVREAMCFMMDPTVGRDVCYVQFPQRFDGIDRSDRYANRNVVFFDVNMKGLDGLQGPVYVGTGCCFNRQALYGYGPPSLPALPKSSICSWCCCCCPKKKVERSEREINRDSRREDLESAIFNLREIDNYDEYERSMLISQMSFEKSFGLSSVFIESTLMENGGVPESANPSTLIKEAIHVISCGYEEKTEWGKEIGWIYGSVTEDILTGFKMHCRGWRSIYCMPVRPAFKGSAPINLSDRLHQVLRWALGSVEIFFSRHCPLWYGYGGGRLKWLQRLSYINTIVYPFTSLPLVAYCCLPAICLLTGKFIIPTLSNAATIWFLGLFMSIIVTSVLELRWSGIGIEDWWRNEQFWVIGGVSAHLFAVFQGILKMIAGLDTNFTVTAKATDDTEFGELYLFKWTTVLIPPTSILVLNLVGVVAGFSAALNSGYESWGPLFGKVFFAMWVIMHLYPFLKGLMGRQNRTPTIVVLWSVLLASVFSLLWVKIDPFVGGTETVNTNNCNTIIC

SEQ ID NO: 341 - protein, 352 aa, Arabidopsis thaliana
MDSSCIDEISSSTSESFSATTAKKLSPPPAAALRLYRMGSGGSSVVLDPENGLETESRKLPSSKYKGVVPQPNGRWGAQIYEKHQRVWLGTFNEQEEAARSYDIAACRFRGRDAVVNFKNVLEDGDLAFLEAHSKAEIVDMLRKHTYADELEQNNKRQLFLSVDANGKRNGSSTTQNDKVLKTCEVLFEKAVTPSDVGKLNRLVIPKQHAEKHFPLPSPSPAVTKGVLINFEDVNGKVWRFRYSYWNSSQSYVLTKGWSRFVKEKNLRAGDVVTFERSTGLERQLYIDWKVRSGPRENPVQVVVRLFGVDIFNVTTVKPNDVVAVCGGKRSRDVDDMFALRCSKKQAIINAL

SEQ ID NO: 342 - protein, 365 aa, Oryza sativa
MGVVSFSSTSSGASTATTESGGAVRMSPEPVVAVAAAAQQLPVVKGVDSADEVVTSRPAAAAAQQSSRYKGVVPQPNGRWGAQIYERHARVWLGTFPDEEAAARAYDVAALRYRGRDAATNFPGAAASAAELAFLAAHSKAEIVDMLRKHTYADELRQGLRRGRGMGARAQPTPSWAREPLFEKAVTPSDVGKLNRLVVPKQHAEKHFPLRRAASSDSASAAATGKGVLLNFEDGEGKVWRFRYSYWNSSQSYVLTKGWSRFVREKGLRAGDTIVFSRSAYGPDKLLFIDCKKNNAAAATTTCAGDERPTTSGAEPRVVRLFGVDIAGGDCRKRERAVEMGQEVFLLKRQCVVHQRTPALGALLL

SEQ ID NO: 343 - protein, 317 aa, Oryza sativa
MEQEAAMVVFSCNSGSGGSSSTTDSKQEEEEEEELAAMEEDELIHVVQAAELRLPSSTTATRPSSRYKGVVPQPNGRWGAQIYERHARVWLGTFPDEEAAARAYDVAALRFRGRDAVTNRAPAAEGASAGELAFLAAHSKAEVVDMLRKHTYDDELQQGLRRGSRAQPTPRWAREPLFEKAVTPSDVGKLNRLVVPKQQAERHFPFPLRRHSSDAAGKGVLLNFEDGDGKVWRFRYSYWNSSQSYVLTKGWSRFVREKGLRPGDTVAFSRSAAAWGTEKHLLIDCKKMERNNLATVDDDARVVVKLFGVDIVGDKTR

SEQ ID NO: 344 - protein, 225 aa, Oryza sativa
CFFCYVRCGSKRRVWLGTFETAEEAARAYDEAAILMSGRNAKTNFPVARNATGELTPAAAVAGRDGRVGGGSGSSSSMTANGGGNSLSQILSAKLRKCCKTPSPSLTCLRLDPEKSHIGVWQKRAGARADSSWVMTVELNKDTAVSSAATVAAATAVSSSDQPTPSDSTVTTTSTSTTGSPSPPPPAMDDEERIALQMIEELLGRSGPGSPSHGLLHGGEGSLVI

SEQ ID NO: 345 - protein, 213 aa, Zea mays
MTENLHSRKMVQPKKFRGVRQRHWGSWVSEIRHPLLKRRVWLGTFETAEEAARAYDEAAVLMSGRNAKTNFPIQRSSTGEPTPAAGRDARSNFSSGSSTTNLSQILSAKLRKCCKAPSPSLTCLRLDPEKSHIGVWQKRAGARADSNWVMTVELNKDAASTDAASQSTSATTAPPATPMDEEERIALQMIEELLSSSSPASPSNGDDQGRFII

SEQ ID NO: 346 - protein, 446 aa, Zea mays
MAATRRAFFHSAVDGIARAGPGEAERLPAPPQVGRPVEGASSMVLGFPVPRPTMPDRRPAAVTQQFFPPTTTAAQQATMEEQCHVPAGSAAEQWVRSSASRKSRRGPRSRSSQYRGVTFYRRTGRWESHIWDCGKQVYLGGFDTAQAAARAYDQAAIKFRGLNADINFTLDDYKDEMKKMKDLSKEEFVLVLRRQGAGFVRGSSRFRGVTQHKCGKWEARIGQLMGKKYVYLGLYDTETEAAQAYDKAAIKCYGKEAVTNFDAQSYDKELQSQPWDGELDLELSLGCASSDPSTVAVEAFSPATSSSSRKQRTMTLTLGLPEEEETGAGYPHPAAGMFGRPADGHVHVAPPPHRQWQQQQQGQHAAPDAAPERRAAEPADRQRWGRGARWPIASASGINWAWAPPYATARAGTDDDDASSAAAAASSGFPLWQLGAASSRSSWPSC

SEQ ID NO: 347 - protein, 249 aa, Zea mays
MVKLAFGSVGDSFSVTSIKAYVAEFIATLLFVFAGVGSAIAYGQLTNGGALDPAGLVAIAIAHALALFVGVSVAANISGGHLNPAVTFGLAVGGHITILTGVFYWVAQLLGATVACLLLGFVTHGKAIPTHAVAGISELEGVVFEVVITFALVYTVYATAADPKKGSLGTIAPIAIGFIVGANILAAGPFSGGSMNPARSFGPAVAAGDFAGNWVYWVGPLVGGGLAGLVYGDVFIGGSYQQVADQDYA

SEQ ID NO: 348 - protein, 356 aa, Oryza sativa
MGVLCFGASNILLCAEDSSSVLGLGGFGGGGGEVAAELGCGGGGGFDFFGFGGGAVFPIDSDEFVALLVEKEMDHQPQRGYLEKLELGGLECSWRKDAIDWICKVHSYYNFGPLSLYLAVNYLDRFLSSFNLPHDESWMQQLLSVSCLSLATKMEETVVPLPMDLQVFDAEYVFEARHIKRMELIVMKTLKWRLQAVTPFSFIGYFLDKFNEGKPPSYTLASWCSDLTVGTLKDSRFLSFRPSEIAAAVVLAVLAENQFLVFNSALGESEIPVNKEMVMRCYELMVEKALVKKIRNSNASSSVPHSPITVLDAACFSFRSDDTTLGSSQSNSNNKDYNSQDSAPASKRRRLNTTPI

SEQ ID NO: 349 - protein, 652 aa, Oryza sativa
MMDGAAPLLPETSPESRQQRDPERGKRRTPVLPAVVASAVVLLGLAALFLVYGFHDGGDGRAAVLAPGTVEVAASSSRGVVEGVSEKSTTPALRLGGGAVRDYAWTNSMLSWQRTAFHFQPPNNWMNGPLYYKGWYHLFYQWNPDSAVWGNITWGHAVSRDLIHWLHLPLAMVPDHWYDINGVWTGSATQLPDGRIVMLYTGATEESVQVQNLAEPADPNDPLLREWSKAEANPVLVPPPGIGLTDFRDPTTAWRNPADSAWRITIGSKDRDHAGLALVYKTEDFLHYDLLPTLLHVVKGTGMWECVDLYPVSTSPAVEDGLETSTPPGPGVKHVLKASLDDDRNDYYAIGTYDGETDTWTPDNADIDVGIGLRYDYGKFYASKTFYDPVGRRRVLWGWIGETDSERADILKGWASLQSIPRTVMLDTKTGSNLLQWPVVEVENLRMRGKSFDGLDVSPGSVVPLDVGKATQLDIEAVFEVDTSAADGVVTEAGAAAYSCGTGGGAVGRGLMGPFGLLVLADDQLSERTAVFFYLVKGVDGNLTTFFCQDELRSSKANDLVKRVYGSLVPVLDGENLSIRILVSLSSNVDHSIVEGFAQGGRTCITSRVYPTKAIYESAKIFLFNNATNVRVTAKSLKIWELNSAYIRPYVD

SEQ ID NO: 350 - protein, 328 aa, Oryza sativa
MAASAAAAAAVSQALRDRDVLDAVGTSAAALSLAGSSFIVLCYLLFRELRKFSFKLVYFLAVSDMFCSLFTIMGGPSNAFYCFAHDYSAHFFCVASFLWTTTIAFTLHRTVVKHKTDVEEFGSIFHLYVWGTSLATTVLRSIGSDYGRPGTWCWIQQGSMGKACDLLCFVLHLVTFYLPLWGAILYNGYTYFQVNRMINNATRMAVGISDRSIQSDVRADKKAFNRWGYYPLILIGSWAFATINRVHDFANPGHKIFWLSILDVGFAGLMGLFNSIAYGLNSSVRRAIAERLDMYLPERFKRSLPTLTRFKSQQENELTSLIVDASNT

SEQ ID NO: 351 - protein, 359 aa, Zea mays
MEEITQHFGVGASSHGHGHGQHHHHHHHHHPWASSLSAVVAPLPPQPPSAGLPLTLNTVAATGNSGGSGNPVLQLANGGGLLDACVKAKEPSSSSPYAGDVEAIKAKIISHPHYYSLLTAYLECNKVGAPPEVSARLTEIAQEVEARQRTALGGLAAATEPELDQFMEAYHEMLVKFREELTRPLQEAMEFMRRVESQLNSLSISGRSLRNILSSGSSEEDQEGSGGETELPEVDAHGVDQELKHHLLKKYSGYLSSLKQELSKKKKKGKLPKEARQQLLSWWDQHYKWPYPSETQKVALAESTGLDLKQINNWFINQRKRHWKPSEEMHHLMMDGYHTTNAFYMDGHFINDGGLYRLG

SEQ ID NO: 352 - protein, 810 aa, Zea mays
MASQGEPSASASDPKEKKDYSTAILERKKSPNRLVVDEATNDDNSVVALHPDTMERLQLFRGDTVLLKGKKRKDTVCIVLADETCEEPKVRMNKVVRQNLRVRLGDVVSVHQCQDVKYGKRVHILPIDDTVEGITGNLFDAFLKPYFLEAYRPVRKGDLFLVRGGMRSVEFKVIETDPSEYCIVAPDTEIFCDGEPIKREDEERLDEVGYDDVGGVRKQMAQIRELVELPLRHPQLFKSIGVKPPKGILLYGPPGSGKTLIARAVANETGAFFFLINGPEIMSKLAGESESNLRKAFEEAEKNAPSIIFIDEIDSIAPKREKTNGEVERRIVSQLLTLMDGLKSRSHVIVMGATNRPNSIDPALRRFGRFDREIDIGVPDEVGRLEVLRIHTKNMKLAEDVNLELISKDTHGYVGADLAALCTEAALQCIREKMDIIDLEDETIDAEILNSMAVTNDHFKTALGTSNPSALRETVVEVPNVSWEDIGGLENVKRELQETVQYPVEHPEKFEKFGMSPSKGVLFYGPPGCGKTLLAKAIANECQANFISVKGPELLTMWFGESEANVREIFDKARQSAPCVLFFDELDSIATQRGSSVGDAGGAADRVLNQLLTEMDGMNAKKTVFIIGATNRPDIIDPALLRPGRLDQLIYIPLPDEQSRLQIFKACLRKSPVAKDVDLNALAKYTQGFSGADITEICQRACKYAIRENIEKDIERERRMKDNPEAMEEDEVDEIAEIKAAHFEESMKYARRSVSDADIRKYQAFAQTLQQSRGFGSEFRFSEQSATAGAAAADPFASAGAAADDDDLYS

SEQ ID NO: 353 - protein, 408 aa, Oryza sativa
MSSRMAGATLLRHLGPRLFAAEPVYSGLAASARGVMPAAARIFPARMASTSSAGADVKEGAAEKLPEPAATAAAAATDPQNKKAVVSYWGIQPPKLVKEDGTEWKWLSFRVSAHQPLMCALLFLFFCTVNSRFDRVHDVCFFCIVTQPWDTYTSDTSIDVTKHHEPKGLPDKLAYWTVRSLAVPRDLFFQRRHASHALLLETVAGVPGMVGGMLLHLRSLRRFEQSGGWIRALLEEAENERMHLMTFLEVMQPRWWERALVLAAQGVFFNAYFVGYLVSPKFAHRFVGYLEEEAVSSYTEYLKDLEAGKIENTPAPAIAIDYWRLPADATLKDVVTVIRADEAHHRDLNHFASVRICQPENNQSRLLNFCVNGFELTDRVSRVGTSLVQDIQQQGMKLKDTPAPIGYH

SEQ ID NO: 354 - protein, 354 aa, Emericella nidulans
MNSMSTTGPIRVAAIPKHYLQFTVRTYTRSMASAGLRYSNPPLVKKCYDQPTGKRFISSTPQSQIKDYFPPPDAPKIVEVKTAWAHPVYSEEEMRAVTVGHREAKNWSDWVALGSVRLLRWGMDLVTGYKHPAPGQEDIKKFQMTEKEWLRRFVFLESVAGVPGMVGGMLRHLRSLRRMKRDNGWIETLLEEAYNERMHLLTFLKMAEPGWFMRLMVLGAQGVFFNGFFLSYLISPRTCHRFVGYLEEEAVLTYTRAIKDLESGRLPHWEKLEAPEIAVKYWKMPEGNRTMKDLLLYVRADEAKHREVNHTLGNLKQAVDVNPFAVEWKDPSKPHPGKGIKHLKTTGWEREEVV

SEQ ID NO: 355 - protein, 484 aa, Zea mays
MDKSGGEAAAAAAAADDVERRGGDYEQDEHERRGTVWTATAHIVTAVIGSGVLALAWSVAQLGWVAGPLALAGFACVTYYTSTLLAGAYRAPHPVTGHRNRTYMDAVRSYLSPREVFMCGVAQYVNLWGTMVGYTITATISMAAIRQADCLRRDGAGAGARCDAPGTVLMLAFSVVQVVLSQFPGLEHITWLSVVAAAMSFAYSFAGLGLSVGHWVSRGGGGLGGRVAGAAAASSTRKLWNVLLALGNIAFAYTFAEVLIEIQDTLKSPPPENRTMKKAAMYGIGATTIFYISVGCAGYAAFGSNAPGNILAAGGLGPLWLVDIANMCLILHLIGAYQVYAQPVFASVERWAASRWPEAKFMSSAYTVSVSIPLLQRGSVTVAPHKLVLRTAIVGATTAVALAIPFFNAVLGLLGAFSFWPLTVYFPISMHIAQGKIARGTKWWCLLQALSMVCLVISVAVGVGSVTDIVDSLKASSSPFKIVG

SEQ ID NO: 356 - protein, 650 aa, Zea mays
MSRDLDCPVQTQMAVAVLDRSFSSEYPGGSRIEGRQLSWKRVFVQTDNGSVLGIELERGENVQTVKKKLQIALNVPTDESSLTFGDLVLNNDLSSIRNDSPLFLKRNQIHRSNSTPCLSPTGKNVLQRDRSGPIEILGCSSPSSRMKQLAKDVIKAIMNDVDPVAVNSGMGGAYYFKNIWGERVAIVKPTDEEPFAPNNPKGFVGKALGQPGLKRSVRVGETGFREVAAYLLDYGHFANVPPTMLVKITHTIFNVNDCVGCKSKVFCNKSEAVSKIASLQEFIPHDFDASDHGTSSFPVSAVHRIGILDIRIFNTDRHAGNLLVKKLGPGADNFGEQTELIPIDHGLCLPECLEDPYFEWIHWPQASVPFSEEELEYIARLDPVKDAEMLRMELPMIRDACLRVLVLSTVFLKEAAASGLCLSEIGDMMSRQFTAKEEEPSQLELLCMEARKWVEERESFLPNEAGVEDDDDDFTQFLIDGEDDYPDALEPSAFCKFGSMKASSRNPLSKLDERDEEDGDGTEEDDDDDILTGALPQRISSISKLSSSMKGLGFIGKPKPYRTCLRKGKATGRTKYTGKASEHQSGSRSANELLPPSASFVKLSDMSPKQWSAFLDKFQELLPGALSARKHAAGVVGQRSMPRLGTSCQF

SEQ ID NO: 357 - protein, 472 aa, Zea mays
MSSARVRGPFTPPQWIELEHQALIYKYLSANSPVPHSLLVPIRRSGSLASSPYPPPYFGTSTFGWGSFQLGYSGNADLEPGRCRRTDGKKWRCSRDAVADQKYCERHMNRGRHRSRKHVEDQPGHAAKAMSAVAVAAAAAAATQHAAALAGAGATAAAGLAVNRHRQPGKSYATGATDPCSLQYSRELANKLSNESENMQDSDNVSMLTSMNTGNTAGSVFPFSKQNTALFEVSSSRPEFGLVPSDSLTSSPHSSLKSVKNLLSSRSLSEHQSSASLQHFVDWPRTPPAQGGLSWPEAEDMPRAQRSQLSVSAPMASSELSSASTSPIHDHEKLILSPLKLGREYTPSGVVSAAANRYEVSQLEATWATMFRDSSTGGPLGEVLAKNNSNAEARGCPSAAPPLTDYYCWDSGHGMQSSPVGVLQRTTAFGSVSSSTGSSPRVENHGACCDGTSNLMDDLGSVVVRHPSIRLL

SEQ ID NO: 358 - protein, 396 aa, Oryza sativa
MMMMSGRPSGGAGGGRYPFTASQWQELEHQALIYKYMASGTPIPSDLILPLRRSFLLDSALATSPSLAFPPQPSLGWGCFGMGFGRKAEDPEPGRCRRTDGKKWRCSKEAYPDSKYCEKHMHRGKNRSRKPVEMSLATPPPPSSSATSAASNSSAGVAPTTTTTSSPAPSYSRPAPHDAAPYQALYGGPYAAATARTPAAAAYHAQVSPFHLHIDTTHPHPPPSYYSMDHKEYAYGHATKEVHGEHAFFSDGTEREHHHAAAGHGQWQFKQLGMEPKQSTTPLFPGAGYGHTAASPYAIDLSKEDDDEKERRQQQQQQQQHCFLLGADLRLEKPAGHDHAAAAQKPLRHFFDEWPHEKNSKGSWMGLEGETQLSMSIPMAANDLPITTTSRYHNDE

SEQ ID NO: 359 - protein, 453 aa, Glycine max
MATWVLSECSLKPLAPVIPRPRTGAVLSSTSKVGFLETNKVLEGSKFQPLRCNLRERNWGLKVSVPLRIASIEEEEQKSVDVINGSNGVEHEKLPEFDPGAPPPFNLADIRAAIPKHCWVKDPLKSMSYVVRDVIAVFGLASAAAYLNNWLVWPLYWAAQGTMFWALFVLGHDCGHGSFSNNPKLNSVVGHLLHSSILVPYHGWRISHRTHHQHHGHVENDESWHPLPEKLFRSLDTVTRMLRFTAPFPLLAYPVYLWGRSPGKTGSHFDPSSDLFVPNERKDVITSTACWAAMLGLLVGLGFVMGPIQLLKLYGVPYVIFVMWLDLVTYLHHHGHEDKLPWYRGKEWSYLRGGLTTLDRDYGLINNIHHDIGTHVIHHLFPQIPHYHLVEATEAAKPVFGKYYREPKKSSPLPFHLIGELIKSFKTDHFVSDKGDVVYYQTDSEINGSSKSE

SEQ ID NO: 360 - protein, 446 aa, Arabidopsis thaliana
MANLVLSECGIRPLPRIYTTPRSNFLSNNNKFRPSLSSSSYKTSSSPLSFGLNSRDGFTRNWALNVSTPLTTPIFEESPLEEDNKQRFDPGAPPPFNLADIRAAIPKHCWVKNPWKSLSYVVRDVAIVFALAAGAAYLNNWIVWPLYWLAQGTMFWALFVLGHDCGHGSFSNDPKLNSVVGHLLHSSILVPYHGWRISHRTHHQNHGHVENDESWHPMSEKIYNTLDKPTRFFRFTLPLVMLAYPFYLWARSPGKKGSHYHPDSDLFLPKERKDVLTSTACWTAMAALLVCLNFTIGPIQMLKLYGIPYWINVMWLDFVTYLHHHGHEDKLPWYRGKEWSYLRGGLTTLDRDYGLINNIHHDIGTHVIHHLFPQIPHYHLVEATEAAKPVLGKYYREPDKSGPLPLHLLEILAKSIKEDHYVSDEGEVVYYKADPNLYGEVKVRAD

SEQ ID NO: 361 - protein, 435 aa, Arabidopsis thaliana
MASSVLSECGFRPLPRFYPKHTTSFASNPKPTFKFNPPLKPPSSLLNSRYGFYSKTRNWALNVATPLTTLQSPSEEDTERFDPGAPPPFNLADIRAAIPKHCWVKNPWMSMSYVVRDVAIVFGLAAVAAYFNNWLLWPLYWFAQGTMFWALFVLGHDCGHGSFSNDPRLNSVAGHLLHSSILVPYHGWRISHRTHHQNHGHVENDESWHPLPESIYKNLEKTTQMFRFTLPFPMLAYPFYLWNRSPGKQGSHYHPDSDLFLPKEKKDVLTSTACWTAMAALLVCLNFVMGPIQMLKLYGIPYWIFVMWLDFVTYLHHHGHEDKLPWYRGKEWSYLRGGLTTLDRDYGWINNIHHDIGTHVIHHLFPQIPHYHLVEATEAAKPVLGKYYREPKNSGPLPLHLLGSLIKSMKQDHFVSDTGDVVYYEADPKLNGQRT

SEQ ID NO: 362 - protein, 1128 aa, Oryza sativa
MSSSRPTQCSSSSSRTRQSSRARILAQTTLDAELNAEYEEYGDSFDYSKLVEAQRTTGPEQQARSEKVIAYLHHIQRAKLIQPFGCLLALDEKTFNVIALSENAPEMLTTVSHAVPSVDDPPKLRIGTNVWSLFTDPGATALQKALGFADVSLLNPILVQCKTSGKPFYAIVHRATGCLVVDFEPVKPTEFPATAAGALQSYKLAAKAISKIQSLPGGSMEVLCNTVVKELFDLTGYDRVMAYKFHEDDHGEVFAEITKPGLEPYLGLHYPATDIPQAARFLFMKNKVRMICDCRARSIKIIEDESLHLDISLCGSTLRAPHSCHLQYMENMNSIASLVMAVVVNENEDDDEVGADQPAQQQKRKKLWGLLVCHHESPRYVPFPLRYACEFLAQVFAVHVNKEFELERQVREKSILRMQTMLSDMLLRESSPLSIVSGTPNIMDLVKCDGAALLYGGKVWRLQNAPTESQIRDIAFWLSDVHRDSTGLSTDSLHDAGYPGAAALGDMICGMAVAKINSKDILFWFRSHTAAEIRWGGAKHDPSDKDDSRRMHPRLSFKAFLEVVKMKSLPWNDYEMDAIHSLQLILRGTLNDDIKPTRAASLDNQVGDLKLDGLAELQAVTSEMVRLMETATVPILAVDSNGLVNGWNQKVAELTGLRVDEAIGRHILTVVEESSVPVVQRMLYLALQGKEEKEVKFEVKTHGSKRDDGPVILVVNACASRDLHDHVVGVCFVAQDMTVHKLVMDKFTRVEGDYKAIIHNPSPLIPPIFGADEFGWCSEWNAAMTKLTGWHRDEVINKMLLGEVFDSTNASCLVKNKDAFVSLCILINSALAGDETEKAPFSFFDRNGKYIECLLSVNRKVNADGVITGVFCFIQVPSHELQHALHVQQASQQNALTKLKAYSYMRHAINNPLSGMLYSRKALKNTGLNEEQMKEVNVADSCHRQLNKILSDLDQDSVMNKSSCLDLEMVEFVLQDVFVAAVSQVLITCQGKGIRVSCNLPERYMKQTVYGDGVRLQQILSDFLFVSVKFSPVGGSVEISCSLTKNSIGENLHLIDLELRIKHQGKGVPADLLSQMYEDDNKEQSDEGMSLAVSRNLLRLMNGDVRHMREAGMSTFILSVELASAPAK

SEQ ID NO: 363 - protein, 1131 aa, Sorghum bicolor
MSSSRPAHSSSSSSRTRQSSQARILAQTTLDAELNAEYEESGDSFDYSKLVEAQRSTPSEQQGRSGKVIAYLQHIQRGKLIQPFGCLLALDEKSFRVIAFSENAPEMLTTVSHAVPNVDDPPKLGIGTNVRSLFTDPGATALQKALGFADVSLLNPILVQCKTSGKPFYAIVHRATGCLVVDFEPVKPTEFPATAAGALQSYKLAAKAISKIQSLPGGSMEALCNTVVKEVFELTGYDRVMAYKFHEDEHGEVFAEITKPGIEPYLGLHYPATDIPQAARFLFMKNKVRMICDCRAKSVKIIEDEALSIDISLCGSTLRAPHSCHLQYMENMNSIASLVMAVVVNENEEDDEPGPEQPPQQQKKKRLWGLIVCHHESPRYVPFPLRYACEFLAQVFAVHVNKEFELEKQIREKSILRMQTMLSDMLFKEASPLSIVSGSPNIMDLVKCDGAALLYGDKVWRLQTAPTESQIRDIAFWLSEVHGDSTGLSTDSLQDAGYPGAASLGDMICGMAVAKITSKDILFWFRSHTAAEIKWGGAKHDPSDKDDNRRMHPRLSFKAFLEVVKMKSLPWSDYEMDAIHSLQLILRGTLNDALKPVQASGLDNQIGDLKLDGLAELQAVTSEMVRLMETATVPILAVDGNGLVNGWNQKVAELSGLRVDEAIGRHILTLVEDSSVSIVQRMLYLALQGKEEKEVRFELKTHGSKRDDGPVILVVNACASRDLHDHVVGVCFVAQDMTVHKLVMDKFTRVEGDYKAIIHNPNPLIPPIFGADQFGWCSEWNVAMTKLTGWHRDEVIDKMLLGEVFDSSNASCLLKSKDDFVRLCIIINSALAGEEAENAPFGLFDRNGKYIECLLSVNRKVNADGVVTGVFCFIHVPSDDLQHALHVQQASEQTAQRRLKAFSYMRHAINKPLSGMLYSRETLKSTGLNEEQMRQVHVADSCHRQLNKILADLDQDNITDKSSCLDLDMAEFVLEDVVVSAVSQVLIGCQGKGIRVACNLPERFMKQKVYGDGIRLQQILSDFLFVSVKFSPVGGSVDISSKLTKNSIGENLHLIDFELRIKHQGAGVPAEILSQMYEEDNKEPSEEGLSLLVSRNLLRLMNGNIRHIREAGMSTFILTAELAAAPSAVGQ

SEQ ID NO: 364 - protein, 1171 aa, Oryza sativa
MASGSRATPTRSPSSARPAAPRHQHHHSQSSGGSTSRAGGGGGGGGGGGGGAAAAESVSKAVAQYTLDARLHAVFEQSGASGRSFDYTQSLRASPTPSSEQQIAAYLSRIQRGGHIQPFGCTLAVADDSSFRLLAYSENTADLLDLSPHHSVPSLDSSAVPPPVSLGADARLLFAPSSAVLLERAFAAREISLLNPLWIHSRVSSNPFYAILHRIDVGVVIDLEPARTEDPALSIAGAVQSQKLVVRAISRLQALPGGDVKLLCDTVVEHVRELTGYDRVMVYRFHEDEHGEVVAESRRSNLEPYIGLHYPATDIPQASRFLFRQNRVRMIADCHAAPVRVIQDPALTQPLCLVGSTLRSPHGCHGQYMANMGSIASLVMAVIISSGGDDDHNIARGSIPSAMKLWGLVVCHHTSPRCIPFPLRYACEFLMQAFGLQLNMELQLAHQLSEKHILRTGTLLCDMLLRDSPTGIVTQSPSIMDLVKCDGAALYYHGKYYPLGVTPTEVQIKDIIEWLTMCHGDSTGLSTDSLADAGYSGAADLGDAVSGMAVAYITPSDYLFWFRSHTAKEIKWGGAKHHPEDKDDGQRMHPRSSFKAFLEVVKSRSLPWENAEMDAIHSLQLILRDSFRDSAEGTSNSKAIVNGQVQLGELELRGIDELSSVAREMVRLIETATVPIFAVDTDGCINGWNAKVAELTGLSVEEAMGKSLVNDLIFKESEETVNKLLSRALRGDEDKNVEIKLKTFGPEQSKGPIFVIVNACSTRDYTKNIVGVCFVGQDVTGQKVVMDKFINIQGDYKAIVHNPNPLIPPIFASDENTCCSEWNTAMEKLTGWSRGEVVGKLLVGEVFGNCCRLKGPDALTKFMIVLHNAIGGQDCEKFPFSFFDKNGKYVQALLTANTRSRMDGEAIGAFCFLQIASPELQQAFEIQRHHEKKCYARMKELAYIYQEIKNPLNGIRFTNSLLEMTDLKDDQRQFLETSTACEKQMSKIVKDASLQSIEDGSLVLEKGEFSLGSVMNAVVSQVMIQLRERDLQLIRDIPDEIKEASAYGDQYRIQQVLCDFLLSMVRFAPAENGWVEIQVRPNIKQNSDGTDTMLFPFRFACPGEGLPPEIVQDMFSNSRWTTQEGIGLSICRKILKLMGGEVQYIRESERSFFHIVLELPQPQQAASRGTS

SEQ ID NO: 365 - protein, 1178 aa, Sorghum bicolor
MASGSRATPTRSPSSARPEAPRHAHHHHHHHSQSSGGSTSRAGGGGGGGGGGGGTAATATATATESVSKAVAQYTLDARLHAVFEQSGASGRSFDYSQSLRAPPTPSSEQQIAAYLSRIQRGGHIQPFGCTLAVADDSSFRLLAFSENAADLLDLSPHHSVPSLDSAAPPPVSLGADARLLFSPSSAVLLERAFAAREISLLNPLWIHSRVSSKPFYAILHRIDVGVVIDLEPARTEDPALSIAGAVQSQKLAVRAISRLQALPGGDIKLLCDTVVEHVRELTGYDRVMVYRFHEDEHGEVVAESRRDNLEPYLGLHYPATDIPQASRFLFRQNRVRMIADCHATPVRVIQDPGMSQPLCLVGSTLRAPHGCHAQYMANMGSIASLVMAVIISSGGDDEQTGRGGISSAMKLWGLVVCHHTSPRCIPFPLRYACEFLMQAFGLQLNMELQLAHQLSEKHILRTQTLLCDMLLRDSPTGIVTQSPSIMDLVKCDGAALYYHGKYYPLGVTPTESQIKDIIEWLTVCHGDSTGLSTDSLADAGYLGAAALGDAVCGMAVAYITPSDYLFWFRSHTAKEIKWGGAKHHPEDKDDGQRMHPRSSFKAFLEVVKSRSLPWENAEMDAIHSLQLILRDSFRDAAEGTSNSKAIVNGQVQLGELELRGINELSSVAREMVRLIETATVPIFAVDTDGCINGWNAKIAELTGLSVEEAMGKSLVNDLIFKESEEIVEKLLSRALRGEEDKNVEIKLKTFGSEQSNGAIFVIVNACSSRDYTQNIVGVCFVGQDVTGQKVVMDKFINIQGDYKAIVHNPNPLIPPIFASDENTSCSEWNTAMEKLTGWSRGEVVGKFLIGEVFGSFCRLKGPDALTKFMVVIHNAIGGQDYEKFPFSFFDKNGKYVQALLTANTRSKMDGKSIGAFCFLQIASAEIQQAFEIQRQQEKKCYARMKELAYICQEIKNPLSGIRFTNSLLQMTDLNDDQRQFLETCSACEEQMSKIVKDATLQSIEDGSLVLEKSEFSFGDVMNAVVSQAMLLLRERDLQLIRDIPDEIKDASAYGDQFRIQQVLADFLLSMVRSAPSENGWVEIQVRPNVKQNSDGTDTELFIFRFTYPGEGLPADIVQDMFSNSQWSTQEGVGLSTCRKILKLMGGEVQYIRESERSFFLIVLELPQPRPAADREIS

SEQ ID NO: 366 - protein, 1137 aa, Oryza sativa
MSSSRSNNRATCSRSSSARSKHSARVVAQTPMDAQLHAEFEGSQRHFDYSSSVGAANRSGATTSNVSAYLQNMQRGRFVQPFGCLLAVHPETFALLAYSENAAEMLDLTPHAVPTIDQREALAVGTDVRTLFRSHSFVALQKAATFGDVNLLNPILVHARTSGKPFYAIMHRIDVGLVIDLEPVNPVDLPVTATGAIKSYKLAARAIARLQSLPSGNLSLLCDVLVREVSELTGYDRVMAYKFHEDEHGEVIAECKRSDLEPYLGLHYPATDIPQASRFLFMKNKVRMICDCSATPVKIIQDDSLTQPISICGSTLRAPHGCHAQYMASMGSVASLVMSVTINEDEDDDGDTGSDQQPKGRKLWGLMVCHHTSPRFVPFPLRYACEFLLQVFGIQINKEVELAAQAKERHILRTQTLLCDMLLRDAPVGIFTQSPNVMDLVKCDGAALYYQNQLWVLGSTPSEAEIKNIVAWLQEYHDGSTGLSTDSLVEAGYPGAAALGDVVCGMAAIKISSKDFIFWFRSHTAKEIKWGGAKHEPIDADDNGRKMHPRSSFKAFLEVVKWRSVPWEDVEMDAIHSLQLILRGSLQDEDANKNNNAKSIVTAPSDDMKKIQGLLELRTVTNEMVRLIETATAPILAVDITGSINGWNNKAAELTGLPVMEAIGKPLVDLVIDDSVEVVKQILNSALQGIEEQNLQIKLKTFNHQENNGPVILMVNACCSRDLSEKVVGVCFVAQDMTGQNIIMDKYTRIQGDYVAIVKNPSELIPPIFMINDLGSCLEWNEAMQKITGIKREDAVDKLLIGEVFTHHEYGCRVKDHGTLTKLSILMNTVISGQDPEKLLFGFFNTDGKYIESLMTATKRTDAEGKITGALCFLHVASPELQHALQVQKMSEQAAMNSFKELTYIRQELRNPLNGMQFTRNLLEPSDLTEEQRKLLASNVLCQEQLKKILHDTDLESIEQCYTEMSTVDFNLEEALNTVLMQAMPQSKEKQISIDRDWPAEVSCMHLCGDNLRLQQVLADFLACMLQFTQPAEGPIVLQVIPRMENIGSGMQIAHLEFRLVHPAPGVPEALIQEMFRHSPGASREGLGLYISQKLVKTMSGTVQYLRESESSSFIVLVEFPVAQLSTKRCKASTSKF

SEQ ID NO: 367 - protein, 1135 aa, Sorghum bicolor
MSSPLNNRGTCSRSSSARSRHSARVVAQTPVDAQLHAEFESSQRNFDYSSSVSAAIRPSVSTSTVSTYHQTMQRGLYIQPFGCLLAVHPDTFTLLAYSENAPEMLDLTPHAVPTIDQRDALAVGADVRTLFRSQSSVALHKAATFGEVNLLNPILVHARTSGKPFYAILHRIDVGLVIDLEPVNPVDVPVTAAGALKSYKLAAKAISRLQSLPSGNLSLLCDVLVREVSELTGYDRVMAYKFHEDEHGEVISECRRSDLEPYLGLHYPATDIPQASRFLFMKNKVRMICDCSATLVKIIQDDSLAQPLSLCGSTLRASHGCHAQYMANMGSVASLVMSVTISNDEEEDVDTGSDQQPKGRKLWGLVVCHHTSPRFVPFPLRYACEFLLQVFGIQLNKEVELAAQAKERHILRTQTLLWDMLLRDAPVGIFTQSPNVMDLVKCDGVALYYQNQLLLLGSTPSESEIKSIATWLQENHDGSTGLSTDSLVEAGYPGAAALREVVCGMAAIKISSKDFIFWFRSHTTKEIKWGGAKHEPVDADDNGRKMHPRSSFKAFLEVVKWRSVPWEDVEMDAIHSLQLILRGSLQDEDANRNNVRSIVKAPPDDTKKIQGLLELRTVTNEMVRLIETATAPVLAVDIAGNINGWNNKAAELTGLPVMEAIGRPLIDLVVVDSIEVVKRILDSALQGIEEQNLEIKLKAFHEQECNGPIILMVNSCCSRDLSEKVIGVCFVGQDLTTQKMIMDKYTRIQGDYVAIVKNPSELIPPIFMINDLGSCLEWNKAMQKITGIQREDVIDKLLIGEVFTLHDYGCRVKDHATLTKLSILMNAVISGQDPEKLLFGFFDTDGKYIESLLTVNKRINAEGKITGAICFLHVASPELQHALQVQKMSEQAATNSFKELTYIHQELRNPLNGMQFTCNLLEPSELTEEQRKLLSSNILCQDQLKKILHDTDLESIEQCYMEMNTVEFNLEEALNTVLMQGIPLGKEKRISIERDWPVEISRMYLYGDNLRLQQVLADYLACALQFTQPAEGPIVLQVIPKKENIGSGMQIAHLEFRIVHPAPGVPEALIQEMFRHNPEVSREGLGLYICQKLVKTMSGTVQYLREADTSSFIILIEFPVAQLSSKRSKPSTSKF

SEQ ID NO: 368 - protein, 213 aa, Oryza sativa
MATEEDASTMAAAEADPKPAATPSYPEMILAAIEALDDRNGSNKTAISQHIEGKYEGLLPPAHPSLLTAHLARMKQTGELAFSKNNYFRGDDPSLPPKRGRGRPPKPKDAAAAAAAPAPAPAAPAASSPRPRGRPPKPKDPLAEAVAKATSGMPRARGRPPKKAKVEQEDPIGAPAAASAPAAAAEAAPPVKRGRGRPPKVRPAAPVGEPAAA

SEQ ID NO: 369 - protein, 737 aa, Oryza sativa
MQQHQGGGSQYGAVPPDMGPFSPTHHASAPAPLPLSTATAAALSQPPPPQQQQQQPRTSYDELAAATSAGAGGFPDDDMLGDAGGSGGGGGSGAAGNRWPREETLALIRIRSEMDATFRDATLKGPLWEEVSRKLAELGYKRSAKKCKEKFENVHKYYKRTKEGRAGRQDGKSYRFFTELEALHAAAPQTPQPQQQQQQQLPPVTSSAPAMHAFAPPVPAPPPMSAMPPPPGPIQPAPISSAAPAVPLELPPQPPINLQGLSFSSMSGSESDDESEDDEMTAETGGSQDRLGKRKQAPAAKGWRLSSRGSSSKSSTGRRRCSGGFWRLWRSERRTHGREEAWRRQEVARLNREQEQLAQERAAAASRDAAIISFLQRIGGQSVQVPPAATVIQMPTPVQLQTPPPVKQPARQHQPQPTPPPPQAAPIPAAPLQQQPPQPQHKETIHHEAVTPRRAPPTSGSSLELVPAAEQHVESGLGGGEGGSASSSRWPKTEVQALIQLRMELDMRYQETGPKGPLWEEISSGMRRLGYNRSSKRCKEKWENINKYFKKVKESNKKRPEDSKTCPYFHQLDVIYRRKHLTGGGGGGASAANVAATAIEHQNPNRHEIEGKNINDNDKRKNGGGGGAQVPTSNGDTAPTTATFDVDSGMKKPEDIVRELSEQPPREFTTDETDSDDMGDDYTDDGEEGEDDGKMQYRIQFQRPNPGGANTAPPPATTPASAVPTSTPTSTFLAMVQ

SEQ ID NO: 370 - protein, 328 aa, Synechocystis PCC6803
MSENFAVATPVRVGIVGTGYAAQRRAEVFRGDRRSQLVSFWGNSEANTAKFADTFGVRPQQSWQALINDPEIDLVLIATINQLHGAIAEAALQAGKHVVLEYPLALTYAMGKKLQQLAREKGKLLHVEHIELLGGVHQAIRQNLGKIGEVFYARYSTIMGQNPAPQRWTYHHQQFGFPLVAALSRISRFTDLFGTVQQVDAQCRFWDQPNPEYFRACLATAYLQFNNGLKAEVIYGKGEVFHQNERIFTLHGDRGTLIFVGETGRLIQGQTETEITVGSRRGLFRQDTEAVLDYLTTGKPLYVDLEASLYALEVADLCAQACGYKVEN

SEQ ID NO: 371 - protein, 344 aa, Zea mays
MGILCLGASSTLLCGEDRNNVLGLGCGNELVEVGSGHDGLDSVVGAVFPVDTDEAVRALLEKETDHKPQDGYAERLERGGLEYSWRRDAMDWICKVHSYYRFGPLSLYLAVNYLDRFLSSYDLPHDKPWMRQLLSVACLALAVKMEETVLPLPVDLQVCDVKFEFEARTIGRMELLVLATLKWRMQAVTPFTFISYFLDKFNGGKPPSMALASRCTEIIIGTLKGSTFLSFRPSEIAAASALAAVSENQVVGSSSALSASEVPINKEMIARCYELLQEQALVRKTGHINGSPSVPQSPIGVLDATCFSFRSEDVRLGSSQSNNISSSSNDNQVSKRRRLSISPI

SEQ ID NO: 372 - protein, 911 aa, Zea mays
MAFKGLPRDSRGSLEVFNPDAPVSDRATTSPFLLPPAVASHPSLLAAGDGGDADVGRATQRAAEWGLVLQTDEHTGRPQGVVARPSGSNRTSESGNSIDERAAAAGAGRALPRVSEELRAALSAFQQTFVVSDATRPDHPILYASAGFFNMTGYSSNEVVGRNCRFLQGSGTDPVEISKIRQALAAGSNYCGRILNYKKDGTPFWNLLTVAPIKDEDGRVLKFIGMQVEVSKYTEGNKDTALRPNGLPESLIKYDARQKDHARSSVSELLLALKDPRSLSESRNNTLKRKSQESAGSALVPGKRSSETGSRRNSHSGMRNSLQKISEVPEGGNKTRKSGLRSFMGLIGMGHGNVEKNILKPREDPLLDSDDERPDSFDDDFRKKEMRKGIDLATTLERIEKNFVITDPRLPDNPIIFASDSFLRLTEYCREEILGRNCRFLQGPETDRGTVKKIRDAIDNQTEVTVQLINYTKSGKKFWNLFHLQPMRDQKGDVQYFIGVQLDGTERVREAAAKDGAILVKKTADNIDEAAKELPDANLRPEDLWANHSKPVLPKPHMKDTASWRAIQKVLENGESIDLKHFRPVRPLGSGDTGSVHLVELLGTGEYFAMKAMDKSVMLNRNKVHRATAERQILDMLDHPFLPTLYASFQTKTHICLIVDYCAGGELFMLLDRQPMKVLKEDAVRFYAAEVVTALEYLHCQGIIYRDLKPENILLHRDGHISLTDFDLSCLTSCRPQVFLPHDIDKKKKRRKSRSNPIFFAEPMRASNSFVGTEEYIAPEIITGAGHTSAVDWWALGILLYEMLYGYTPFRGKTRQRTFANILHKDIRFPASIQVSLAARQLIYRLLHRDPANRLGSYEGAMEIKQHPFFRGINWALVRAATPPELEAPLQDTLEATLPPPAADAAHTDMF

SEQ ID NO: 373 - protein, 165 aa, Zea mays
MALAEADDGAVVFGEEQEALVLKSWAVMKKDAANLGLRFFLKVFEIAPSAKQMFSFLRDSDVPLEKNPKLKTHAMSVFVMTCEAAAQLRKAGKVTVRETTLKRLGATHLRYGVADGHFEVTGFALLETIKEALPADMWSLEMKKAWAEAYSQLVAAIKREMKPDA

SEQ ID NO: 374 - protein, 419 aa, Oryza sativa
MENMRSENFNQGVSMEGVKHAPEMANTNRRALRDIKNIIGAPHQHMAVSKRGLLDKPAAKNQSGHRPMTRKFAATLANQPSIAPLAPIGSERQKRTADSAFHGPADMECTKITSDDLPLPMMSEMDEVMGSELKEIEMEDIEEAAPDIDSCDANNSLAVVEYVDEIYSFYRRSEGLSCVSPNYMLSQNDINEKMRGILIDWLIEVHYKLELLDETLFLTVNIIDRFLARENVVRKKLQLVGVTAMLLACKYEEVSVPVVEDLILICDRAYTRTDILEMERMIVNTLQFDMSVPTPYCFMRRFLKAAQSDKKLELMSFFIIELSLVEYEMLKFQPSMLAAAAIYTAQCTINGFKSWNKCCELHTKYSEEQLMECSKMMVELHQKAGHGKLTGVHRKYSTFRYGCPAKSEPAVFLLKSVAL

SEQ ID NO: 375 - protein, 257 aa, Oryza sativa
MAANFWTSSHCKQLLDQEDVDKVPQADSDRGITLEEFRLVKIHMSFHIWRLAQQVKVRQRVIATAVTYFRRVYTRKSMTEYDPRLVAPTCLYLASKVEESTVQARLLVFYIKKMCASDEKYRFEIKDILEMEMKLLEALDYYLVVYHPYRPLLQLLQDAGITDLTQFAWGIVNDTYKMDLILIHPPYMIALACIYIASVLKDKDITLWFEELRVDMNIVKNISMEILDFYDTYKIDPQRGLPEDKIAPVMNKLPSKA

SEQ ID NO: 376 - protein, 420 aa, Oryza sativa
MDRASENRRLAAVGKPVPGIGEMGNRRPLRDINNLVGAPSHPSAIAKKPMLEKSGKEEQKPALVVSHRPMLRNFAASLTRKEQLDHQVSVADAAVVCTDPQKNPIPDGTVDDDVESCESNDYIAVDECNDTDEDESMMDIDSADSGNPLAATEYVEELYKFYRENEEMSCVQPDYMSSQGDINEKMRAILIDWLIEVHHKFELMDETLFLTVNIVDRFLEKQVVPRKKLQLVGVTAMLLACKYEEVAVPVVEDLVLISDRAYTKGQILEMEKLILNTLQFNMSVPTPYVFMRRFLKAAQSDKQLQLLSFFILELSLVEYQMLKYRPSLLSAAAVYTAQCALTRCQQWTKTCELHSRYTGEQLLECSRMMVDFHQKAGAGKLTGVHRKYSTFKFGCAAKTEPALFLLESGAGGYNLQKQPC

SEQ ID NO: 377 - protein, 508 aa, Oryza sativa
MSSNLAASRRSSSSSSVAAAAAAKRPAVGEGGGGGGGKAAAGAAAAKKRVALSNISNVAAGGGAPGKAGNAKLNLAASAAPVKKGSLASGRNVGTNRASAVKSASAKPAPAISRHESATQKESVLPPKVPSIVPTAALAPVTVPCSSFVSPMHSGDSVSVDETMSTCDSMKSPEFEYIDNGDSSSVLGSLQRRANENLRISEDRDVEETKWKKDAPSPMEIDQICDVDNNYEDPQLCATLASDIYMHLREAETRKRPSTDFMETIQKDVNPSMRAILIDWLVEVAEEYRLVPDTLYLTVNYIDRYLSGNEINRQRLQLLGVACMLIAAKYEEICAPQVEEFCYITDNTYFRDEVLEMEASVLNYLKFEVTAPTAKCFLRRFVRVAQVSDEDPALHLEFLANYVAELSLLEYNLLSYPPSLVAASAIFLAKFILQPTKHPWNSTLAHYTQYKSSELSDCVKALHRLFSVGPGSNLPAIREKYTQHKYKFVAKKPCPPSIPTEFFRDATC

SEQ ID NO: 378 - protein, 470 aa, Oryza sativa
MASRRQWGAGAGAVDVPAQERKGGKAATDHLLRAFFAVFFVLEGLSWRRRRRRDGEGVFLLRYVACLLCLQAAKIARRPKTTTVVAQQPPRIRRALADVSNLVNGRAALPVVNRQKAAAAAADKCRKPIKQRNENNKAAKPEVIVISSDSEKHKKNPAQRAASRRAPIQTLTSILTKCSRASDGVISPKKELIYDIDASDSHNELAVVDYVEDIYRFYRNTENTYRPLCTYMVSQTEINERMRAILTDWLIEVHYRLMLMPETLYLTVYIIDQYLSLENVPRKELQLVGVSAMLIACKYEETWAPLVKDFLVISDNSFSRQQVLSTEKSILNKLQWNLTVPTMYMFILRYLKAALGDEELEHMTFFYAELALVQYSMLFFAPSVIAAAAVYAARCTLGLSPLWSDLLEYHTGLAEPQLLECARRLVSLHAAAPESRQKVVYKKYASPKLGAVSLHSPAKKLLPPPSPVAA

SEQ ID NO: 379 - protein, 228 aa, Zea mays
MARERREIKRIESAAARQVTFSKRRRGLFKKAQELSVLCDADVALIVFSSTGKLSQFASSSMNEIIDKYNTHSKNLGKTEQPSLDLNLEHSKYANLNEQLAEASLRLRQMRGEELEGLNVEELQQLEKNLESGLHRVLQTKDQQFLEQINDLERKSTQLAEENMQLRNQVSQIPPAGKQAVADTENVIAEEGQSSESVMTALHSGSSQDNDDGSDVSLKLGLPCVAWK

SEQ ID NO: 380 - protein, 233 aa, Zea mays
MVGTGKRERIAIRRIDNLAARQVTFSKRRRGLFKKAEELSILCDAEVGLVVFSATGKLFHFASSSMKQVIDRYDSHSKTLQRSEPQSSQLQSHMDDGTCARLKEELAETSLKLRQMRGEELQRLSVEQLQELEKTLESGLGSVLKTKSQKILDEISGLERKRTQLIEENSRLKEQVTRMSRMETQLGADPEFVYEEGQSSESVTNTSYPRPSTDTDDCSDTSLRLGLPLFSSK

SEQ ID NO: 381 - protein, 206 aa, Glycine max
MTRKRIQIKKIDNISSRQVTFSKRRKGLFKKAQELSTLCDADIALIVFSATSKLFEYASSSMHQVIERHDRYSAIHRLDRPSIELQIESDSNNILRKKVEDKTRELRQMNGEDLQGLTLQELQKLEEHLKRSLTNVSKVKDAKFMQEISTFKRKGVELMEENQRLKQVPSLIHAHSYRQSSESILSNSSNLPEDGGSNTSLKLGLP

SEQ ID NO: 382 - protein, 205 aa, Glycine max
MTRKRIQIKKIDNISSRQVTFSKRRKGLFKKAQELSTLCDADIALIVFSATSKLFEYASSSMHQVIERRDSHSAMNRLDRPSIELQIENDSNEILRKKVEDKNRELRQMNGEDLQGLTLQELHKLEEHLKRGLINVSKVKDEKLMQEISTLKRKGVELMEENQRLKQVVPSLIHVHRQSSESILSNSSNLPEDGGSDTSLKLGLP

SEQ ID NO: 383 - protein, 509 aa, Zea mays
MSTIAASRRSSSSSSSATAKRPAIADGPGGPKATAAQAKKRVALGNITNVAARGGRASVGGSLGNVMAPTSSAKLNPTVPLKKPSLATSARSVSSSIRGSADKPASIKPAPPVARHGSATQRHNNVPPPKVPTIADVPSRAPALVSCTGLVSPGRSGDSVSSDETMSTCDSMKSPDFEYVDNQDTSMLASLQRRTSEHLRISEDRDVEENKRKKNAVAPMEIDRICDVDSEYEDPQLCATLASDIYMHLREAETKKRPSTDFMETIQKDVNPSMRAILIDWLVEVAEEYRLVPDTLYLTVNYIDRYLSGNEISRQRLQLLGVACMLIAAKYEEICAPQVEEFCYITDNTYFRDEVLDMEASVLNYLKFEMTAPTAKCFLRRFARAAQACDEDPALHLEFLANYIAELSLLEYSLLSYPPSLIAASAIFLARFILQPTKYPWNSTLAHYTQYKPSKLSECVKALHRLCSVGSGSNLPAIREKYSQHKYKFVAKKQCPPQIPTEFFRDTTC

SEQ ID NO: 384 - protein, 372 aa, Zea mays
MENSAAAAAARPRLTRAAAKRSAVVTAVAVAAKRKRVALSQLPTLPNAVLGAHDDDDDKPVRKQRLLPAAKPKPKPKAAPAPAAPAAADDTDDDIQLCKPYASDIYSYLRSMESQAKRRLAVDYIAAVQIDVTPNMRGILIDWLVEVAEEYKLVSDTLYLTVSYIDRFLSAKVLNRQKLQLLGVSAMLIASKYEEISPPNVEDFCYITDNTYTKQEVVKMESDILNVLKFEVGSPTAKTFLRMFIRSAQEDNKKYPSLQLEFLGSYLSELSLLDYGLIRSLPSLVAASAVFVARLTLDPHTHPWSKKMQTLTGYKPSELKDCVAAIHNLQLNRTCQSMVAIREKYRQHRFKGVSALLPPVEIPASYFNTLKE

SEQ ID NO: 385 - protein, 424 aa, Zea mays
MAARAADENRRPAAGKPAPGVRDMASRRALTDIKNLVGAAPYPYAVAKKPMLQKSKRDEKQPALASSRPMTRKFAASLASKGQPECQPIVADPEPEVCQQKESVGDGTVDIDVELYELVDGSDSDIDMGATENKDIMNEDELLMDIDSADSGNPFAATEYVKELYTFYRENEAKSCVRPDYMSSQQDINSKMRAILIDWLIEVHYKFELMDETLFLMVNIIDIFLEKEVVPRKKLQLVGVTAMLLACKYEEVSVPVVEDLVLISYRAYTKGQILEMEKLILNTLQFNMSVPTPYVFMKRFLKAADADKQLELASFFMLELCLVEYQMLNYRPSHLAAAAVYTAQCAINRCQHWTKVCESHSRYTSDQLLECSRMMVDFHQKAGTSKLTGVHRKYSTYKFGCVAKILPAQFLLESGGTPPPSGAN

SEQ ID NO: 386 - protein, 479 aa, Zea mays
MECARELRVRSTFTAAAMASKKQVGPGGAVPAQEQMNGGDAARLVRKPMDTFPQPAAARGRRALVDVGNLMNGRPSLVNHQKQAVAAAATSHKPLNVGNKKPLVPQAAARGLRPLADVTNLMIKDRAAPANRQKPVDAVFNRNGKAVKLKECKVKPEVIVIIPDSEKEKKGKFPGGQRVCRRVPTLFDNLTKCSRASDGITTPKKKDPYDIDAPDSCNELAVVEYVEDIYRFYKSTEGTCLPLSSYMSSQAEISERMRAILIDWIIEVQYRLTLMPETLYLTVYIIDQYLSMESVPRKELQLVGISAMLIASKYEEIWAPLVKDLMCLCDNAFTRDQILTKEKAILDMLHWNLTVPTMYMFIVRYLKAAMCDAELENMTFFYSELALVQYAMLVYPPSVTAAAAVYAARSTLGMNPQWTDILEHHTGLAEPQLLDCARRLISFHALAPESKQKAVYRKYSKPKLGSVALQSPDKKLLSG

SEQ ID NO: 387 - protein, 424 aa, Zea mays
MENLRSQNCHQGVAMEGVKFAPEKANTNRRALSDIKNIIGGPHQHLAVSKRALSEKPAAAAAANAKDQAGFVGHRPVTRKFAATLATQPTVALLDPIGSERLKRNADTAFHTPADMESTKMTDDSPLPMVSEMDEMMSPELKEIEMEDIEEAAPDIDSGDAGNSLAVADYVDEIYRFYRKTEGASCVPTNYMSSQTDINEKMRGILIDWLIEVHYKLELLEETLFLTVNIIDRFLARENVVRKKLQLAGVTAMLLACKYEEVSVPVVEDLILIGDRAYTRADILEMERRIVNTLNFNMSVPTPYCFMRRFLKAAQSEKKLELLSFFMIELSLVEYEMLQFCPSMLAAAAIYTAQCTINGFKSWNKCCELHTRYSEEHLMVCSRMMVELHQRAAHGKLTGVHRKYNTSRYSYAAKSEPATFLLDA

SEQ ID NO: 388 - protein, 442 aa, Zea mays
MASRNHNAAAPQLHHHNRAGVPALGKAKAVPARADALNRRPPLGDIGNLVSVRPATGNPQEQVNRPITRSFGAQLVKKAQAKAAIKNAAILPARHAPRQERKAPVKQQPPPEDIIVLSSDSEQSRAQSESSASSVRSRRKAINTLSSVLSARSKAACGIAGKPRQVVDDIDKLDVNNELAVVEYIEDIYTFYKIAQHERRPCDYIDAQLEINSKMRAILADWIIEVHHKFELMPETLYLTMYIIDQYLSLQPVLRKELQLVGVSSMLIACKYEEIWAPEVNDFILISDSAYSREQILSMEKGILNRLEWNLTVPTVYMFLVRFLKAATLGGKVEKEMENMVFFFAELALMQYDLVTRLPSLVAASAVYAARLTLKRAPLWTDTLKHHTGFRESEAELIECTKMLVIAHSTAPESKLRVVYKKYSSEQFGGVALRPPAEEICK

SEQ ID NO: 389 - protein, 387 aa, Zea mays
MAAFAALFDPLYCPEEHLDLYHEGPVEVVDEQWQDQRGQQQPAALDDELPALFEALRDKEGVVLAGDGEEDGYGGSAGREAAVGWASRAAARLGFSALTSALSAAYLDRCFLPGGALRLGDQPWMSRLAAVACVALAAKVEETRVPLLLDLQLCAAASSDADAADADVFEAKTVRRMELLVLSALGWRMHPVTPFSYLQPVLADAAMRLRNCEAVLLAVMADWRWPRHRPSAWAAAALLTTAGGGDDDSELLALINAPEDETAECAKIISEVTGMSFLVCDVGGMIAGNKRKHAAARMYSPPLSPSGVIGALSCFSCESSLSATADSRTLATTAAGVGPWAPSAPVSVSSSPEPPGRAPKRAAAAGVPHPLPPDEESRDAWPSTCAA

SEQ ID NO: 390 - protein, 321 aa, Zea mays
MPGDAYDLLCAEDDAAGSALLCTTDDDDGCCSAVEEDSAAAAASIAELIGGEAQYSPRPDYPDRLRSRSIDPAARAESVAWILKVQEYYGFLPLTAYLAVNYMDRFLSLHRLPEDGWAMQLLAVTCLSLAAKMEETLVPSLLDLQVEGTSRYDCFEPGTVGRMELLVLMALNWRLRSVTPFTFVDFFACKVDPGGRHTRCLIARATQVILAAMHDVEFLDHCPSSMAAAAVLCAIGETPSLESVSPGAAVSWCIGLAEEGISSCYRLMQRLVIGNVRTRVASTTTMAAVNLCCSDEALSSHSSATSSPPPAKRRKRSPTAT

SEQ ID NO: 391 - protein, 349 aa, Zea mays
MGDAAASTSAPTTPTSILICLEDGSDLLADADDGAGTDLVVARDERLLVVDQDEEYVALLLSKESASGGGGPVEEMEDWMKAARSGCVRWIIKTTAMFRFGGKTAYVAVNYLDRFLAQRRVNREHAWGLQLLMVACMSLATKLEEHHAPRLSEFPLDACEFAFDRASVLRMELLVLGTLEWRMVAVTPFPYISCFAARFRQDERRAVLVRAVECVFAAIRAMSSVEYQPSTIAVASILVARGRETPAGNLDALKAILGSSFPQLDTGHVYSCYSAMIREDDKSPTQSTSTSTGVASSGVSVAAHAGGSGSPSPPGASVSVGANNAAGTAPPATTDNRNKRRRLRSPQRQ

SEQ ID NO: 392 - protein, 222 aa, Zea mays
METMSALARTAPPLAGTIRRPSCALRPTASLSFAAASTTPRGRLGLGLSTAPAGSGRAARARAVPRRIVASSEVEQSYIMIKPDGVQRGLVGEIISRFEKKGFLLKGLKLFQCPKDLAQEHYKDLKDKPFFPKLIDYITSGPVVCMAWEGDGVVASARKLIGATNPLQAEPGTIRGDLAVQTGRNVVHGSDSPDNGKREIELWFKEGEVCQWESVQAPWLIE

SEQ ID NO: 393 - protein, 238 aa, Zea mays
MSAASKKLFQAARSLVLSASNRSVLAAEGRTAALATLTNFGRKTLPTAYLSYHKQGSHHAASGWGAIAAAVPAAVYMLQDQEAHAAEMERTFIAIKPDGVQRGLISEIMSRFERKGYKLVAIKLIVPSKEFAEKHYHDLKERPFFSGLCDFLSSGPVLAMVWEGEGVIKYGRKLIGATDPQKSEPGTIRGDLAIVVGRNIIHGSDGPETAKDEIALWFEPKELVSYTSNAEKWIYGVN

SEQ ID NO: 394 - protein, 150 aa, Zea mays
  unsure (1)..(150): unsure at all Xaa locations
MESTFIMIKPDGVQRGLIGEIISRFEKKGFYLKALKLVNVERSFAEKHYAXDLASKPFFQGXVDYIISGPVVAMVWEGKSVVTTGRKIIGATNPLASEPGTIRGDFAVDIGRNVIHGSDSIESANKEIALWFPEGPADWQSSQHPWIYEK

SEQ ID NO: 395 - protein, 149 aa, Zea mays
MEQTFIMIKPDGVQRGLIGDIISRFEKKGFYLKGMKFMNVERSFAQQHYADLSDKPFFPGLVEYIISGPVVAMVWEGKDVVLTGRRIIGATRPWEAAPGTIRGDYAVEVGRNVIHGSDSVENGKKEIALWFPEGVAQWKSNLHPWIYEA

SEQ ID NO: 396 - protein, 1039 aa, Synechocystis PCC6803
MATIHGNWQPSHGENGGKLFLWADTWGHPLPETIGDRHPFALDLPDLLQAWSNLPLAFPKADGVTEAALTLHLPSHRQQKIPLPFVTGQDPVAMDAKYLHWRSWQVTGVNLTPSQTLTLLQSIPLGGQALANLGSEFYFYGQLHRWCLDLVLRGKFVPGLEQRGEDGNYYAQWIPILDSIQDQTHLAQFSQRVPACALANLTDSQEPQMLVVDLLQKLLQAQIGAVSPSLANVKEVWLNDWLRGLTHGGQTSLGTGKALQRLATSLDHWYLPVQNYLGQKNNQALAQRQWRGALRLQPPADDGGGTWQLDYGLQALDDGEFWLPAASLWAMAGDRLVWQGRRVDQGAESLLRGLGVAAQIYEPIAASLTERCPTGCGLDAIQAYEFILAIAHQLRDRGLGVILPPGLERGGTAKRLGVKVVGEVQRQRGQRLTLQSLINYDLQLMMGSGDNARLLTAKDFEALLAQKSPLVVLDGEWITLQPADVRAAKVILQQQQSAPPLTVEDALRLSIGDLQTVSKLPVTQFAARGILQELIDTLRNPEGVKAIADPPGFQGTLRPYQARGVGWLAFLERWGLGACLADDMGLGKTPQLLAFLLHLAAEDMLVKPVLIVCPTSVLSNWGHEINKFAPQLKTLLHHGDRRKKGQPLVKQVKDQQIVLTSYALLQRDFSSLKLVDWQGIVLDEAQNIKNPQAKQSQAARQLPAGFRIALTGTPVENRLTELWSILEFLNPGFLGNQSFFQRRFANPIEKFGDRQSLLILRNLVRPFILRRLKTDQTIIQDLPEKQEMTVFCDLSQEQAGLYQQLVEESLQAIADSEGIQRHGLVLTLLTKLKQVCNHPDLLLKKPAITHGHQSGKLIRLAEMLEEIISEGDRVLIFTQFASWGHLLKPYLEKYFNQEVLYLHGGTPAEQRQALVERFQQDPNSPYLFILSLKAGGTGLNLTRANHVFHVDRWWNPAVENQATDRAFRIGQTRNVQVHKFVCTGTLEEKINAMMADKQQLAEQTVDAGENWLTRLDTDKLRQLLTLSATPVDYQAEASD

SEQ ID NO: 397 - protein, 181 aa, coliphage T4
MTIEKEIEGLIHKTNKDLLNENANKDSRVFPTQRDLMAGIVSKHIAKNMVPSFIMKAHESGIIHVHDIDYSPALPFTNCCLVDLKGMLENGFKLGNAQIETPKSIGVATAIMAQITAQVASHQYGGTTFANVDKVLSPYVKRTYAKHIEDAEKWQIADALNYAQSKTEKDVYDAFQAYELT

SEQ ID NO: 398 - protein, 178 aa, Zea mays
MAGATTPASGALVRLCLPSLLLFLYRCEAVEMERTLAMIKPDGLSGKYTEAIKEVILDSGFHIVKETEVQLDAERASVFYAEHSQRSFFDSLVKYITSGPVLAMVLERPDAVAQWRTLIGPTDAKKAKTSHPNSIRAMCGLDSEKNCVHGSDSPESADREISFFFGEAESVTVEHDEL

SEQ ID NO: 399 - protein, 2470 aa, Saccharomyces cerevisiae
MEPHEEQIWKSKLLKAANNDMDMDRNVPLAPNLNVNMNMKMNASRNGDEFGLTSSRFDGVVIGSNGDVNFKPILEKIFRELTSDYKEERKLASISLFDLLVSLEHELSIEEFQAVSNDINNKILELVHTKKTSTRVGAVLSIDTLISFYAYTERLPNETSRLAGYLRGLIPSNDVEVMRLAAKTLGKLAVPGGTYTSDFVEFEIKSCLEWLTASTEKNSFSSSKPDHAKHRALLIITALAENCPYLLYQYLNSILDNIWRALRDPHLVIRIDASITLAKCLSTLRNRDPQLTSQWVQRLATSCEYGFQVNTLECIHASLLVYKEILFLKDPFLNQVFDQMCLNCIAYENHKAKMIREKIYQIVPLLASFNPQLFAGKYLHQIMDNYLEILTNAPAKKIPHLKDDKPQILISIGDIAYEVGPDIAPYVKQILDYIEHDLQTKFKFRKKFENEIFYCIGRLAVPLGPVLGKLLNRNILDLMFKCPLSDYMQETFQILTERIPSLGPKINDELLNLVCSTLSGTPFIQPGSPMEIPSFSRERAREWRNKSILQKTGESNDDNNDIKIIIQAFRMLKNIKSRFSLVEFVRIVALSYIEHTDPRVRKLAALTSCEIYVKDNICKQTSLHSLNTVSEVLSKLLAITIADPLQDIRLEVLKNLNPCFDPQLAQPDNLRLLFIALHDESFNIQSVAMELVGRLSSVNPAYVIPSIRKILLELLTKLKFSTSSREKEETASLLCTLIRSSKDVAKPYIEPLLNVLLPKFQDTSSTVASTALRTIGELSVVGGEDMKIYLKDLFPLIIKTFQDQSNSFKREAALKALGQLAASSGYVIDPLLDYPELLGILVNILKTENSQNIRRQTVTLIGILGAIDPYRQKEREVTSTTDISTEQNAPPIDIALLMQGMSPSNDEYYTTVVIHCLLKILKDPSLSSYHTAVIQAIMHIFQTLGLKCVSFLDQIIPTILDVMRTCSQSLLEFYFQQLCSLIIIVRQHIRPHVDSIFQAIKDFSSVAKLQITLVSVIEAISKALEGEFKRLVPLTLTLFLVILENDKSSDKVLSRRVLRLLESFGPNLEGYSHLITPKIVQMAEFTSGNLQRSAIITIGKLAKDVDLFEMSSRIVHSLLRVLSSTTSDELSKVIMNTLSLLLIQMGTSFAIFIPVINEVLMKKHIQHTIYDDLTNRILNNDVLPTKILEANTTDYKPAEQMEAADAGVAKLPINQSVLKSAWNSSQQRTKEDWQEWSKRLSIQLLKESPSHALRACSNLASMYYPLAKELFNTAFACVWTELYSQYQEDLIESLCIALSSPLNPPEIHQTLLNLVEFMEHDDKALPIPTQSLGEYAERCHAYAKALHYKEIKFIKEPENSTIESLISINNQLNQTDAAIGILKHAQQHHSLQLKETWFEKLERWEDALHAYNEREKAGDTSVSVTLGKMRSLHALAEWEQLSQLAARKWKVSKLQTKKLIAPLAAGARGGSGEWDMLDEYISVMKPKSPDKEFFDAILYLHKNDYDNASKHILNARDLLVTEISALINESYNRAYSVIVRTQIITEFEEIIKYKQLPPNSEKKLHYQNLWTKRLLGCQKNVDLWQRVLRIRSLVIKPKQDLQIWIKFANLCRKSGRMRLANKALNMLLEGGTILVYQIRSKPPPPVVYAQLKYIWATGAYKEALNHLIGFTSRLAHDLGLDPNNMIAQSVKLSSASTAPYVEEYTKLLARCFLKQGEWRIATQPNWRNTNPDAILGSYLLATHFDKNWYKAWHNWALANFEVISMVQEETKLNGGKNDDDDDTAVNNDNVRIDGSILGSGSLTINGNRYPLELIQRHVVPAIKGFFHSISLLETSCLQDTLRLSTLLFNFGGIKEVSQAMYEGFNLMKIENWLEVLPQLISRIHQPDPTVSNSLLSLLSDLGKAHPQALVYPLTVAIKSESVSRQKAALSIIEKIRIHSPVLVNQAELVSHELIRVAVLWHELWYEGLEDASRQFFVEHNIEKMFSTLEPLHKHLGNEPQTLSEVSFQKSFGRDLNDAYEWLNNYKKSKDINNLNQAWDIYYNVFRKITRQIPQLQTLDLQHVSPQLLATHDLELAVPGTYFPGKPTIRIAKFEPLFSVISSKQRPRKFSIKGSDGKDYKYVLKGHEDIRQDSLVMQLFGLVNTLLKNDSECFKRHLDIQQYPAIPLSPKSGLLGWVPNSDTFHVLIREHRDAKKIPLNIEHWVMLQMAPDYENLTLLQKIEVFTYALDNTKGQDLYKILWLKSRSSETWLERRTTYTRSLAVMSMTGYILGLGDRHPSNLMLDRITGKVIHIDFGDCFEAAILREKYPEKVPFRLTRMLTYAMEVSGIEGSFRITCENVMRVLRDNKESLMAILEAFALDPLIHWGFDLPPQKLTEQTGIPLPLINPSELLRKGAITVEEAANMEAEQQNETRNARAMLVLRRITDKLTGNDIKRFNELDVPEQVDKLIQQATSIERLCQHYIGWCPFW

SEQ ID NO: 400 - protein, 160 aa, Zea mays
MSDSEEHHFESKADAGASKTYPQQAGTVRKNGFIVIKNRPCKVVEVSTSKTGKHGHAKCHFVAIDIFNGKKLEDIVPSSHNCDIPHVNRTEYQLIDISEDGFVSLLTSDGNTKDDLRLPTDETLVAQIKEGFESGKDLVVTVQSAMGEEQICALKDVGPK

SEQ ID NO: 401 - protein, 157 aa, Saccharomyces cerevisiae
MSDEEHTFENADAGASATYPMQCSALRKNGFVVIKGRPCKIVDMSTSKTGKHGHAKVHLVTLDIFTGKKLEDLSPSTHNLEVPFVKRSEYQLLDIDDGYLSLMTMDGETKDDVKAPEGELGDSMQAAFDEGKDLMVTIISAMGEEAAISFKEAPRSD

SEQ ID NO: 402 - protein, 387 aa, Saccharomyces cerevisiae
MSDINEKLPELLQDAVLKASVPIPDDFVKVQGIDYSKPEATNMRATDLIEAMKTMGFQASSVGTACEIIDSMRSWRGKHIDELDDHEKKGCFDEEGYQKTTIFMGYTSNLISSGVRETLRYLVQHKMVDAVVTSAGGVEEDLIKCLAPTYLGEFALKGKSLRDQGMNRIGNLLVPNDNYCKFEEWIVPILDKMLEEQDEYVKKHGADCLEANQDVDSPIWTPSKMIDRFGKEINDESSVLYWAHKNKIPIFCPSLTDGSIGDMLFFHTFKASPKQLRVDIVGDIRKINSMSMAAYRAGMIILGGGLIKHHIANACLMRNGADYAVYINTGQEYDGSDAGARPDEAVSWGKIKAEAKSVKLFADVTTVLPLIVAATFASGKPIKKVKN

SEQ ID NO: 403 - protein, 297 aa, Saccharomyces cerevisiae
MAFQKDAKSSAYSSRFQTPFRRRREGKTDYYQRKRLVTQHKAKYNTPKYRLVVRFTNKDIICQIISSTITGDVVLAAAYSHELPRYGITHGLTNWAAAYATGLLIARRTLQRLGLDETYKGVEEVEGEYELTEAVEDGPRPFKVFLDIGLQRTTTGARVFGALKGASDGGLYVPHSENRFPGWDFETEEIDPELLRSYIFGGHVSQYMEELADDDEERFSELFKGYLADDIDADSLEDIYTSAHEAIRADPAFKPTEKKFTKEQYAAESKKYRQTKLSKEERAARVAAKIAALAGQQ

SEQ ID NO: 404 - protein, 466 aa, Saccharomyces cerevisiae
MSSTQVGNALSSSTTTLVDLSNSTVTQKKQYYKDGETLHNLLLELKNNQDLELLPHEQAHPKIFQALKARIGRINNETCDPGEENSFFICDLGEVKRLFNNWVKELPRIKPFYAVKCNPDTKVLSLLAELGVNFDCASKVEIDRVLSMNISPDRIVYANPCKVASFIRYAASKNVMKSTFDNVEELHKIKKFHPESQLLLRIATDDSTAQCRLSTKYGCEMENVDVLLKAIKELGLNLAGVSFHVGSGASDFTSLYKAVRDARTVFDKAANEYGLPPLKILDVGGGFQFESFKESTAVLRLALEEFFPVGCGVDIIAEPGRYFVATAFTLASHVIAKRKLSENEAMIYTNDGVYGNMNCILFDHQEPHPRTLYHNLEFHYDDFESTTAVLDSINKTRSEYPYKVSIWGPTCDGLDCIAKEYYMKHDVIVGDWFYFPALGAYTSSAATQFNGFEQTADIVYIDSELD

SEQ ID NO: 405 - protein, 799 aa, Oryza sativa
MSSMESLAQLELLCEKLYNSRDSAERAHAESTLKCFSENSDYISQCQYILDNASTPYALMLASSSLLNQVNDRSLSLQLRLDILNYVINYLAMRGPKLQTFVIKSLIQLVCRITKFGWFDDDKFRDIVKEAADFLSLASQDHYFIGLKILYHLVGEMNQANAMPLTLHRKIACSFKDQFLLQIFQISLTSLHQLKSEVPDDFRRDPLSLALRCLSFDFVGCPVDESSEEFGTVQLPASWRPLLQDPSTVQIFFDYYKVNDTCVSKEKECLFKAKYFLQERSRLPAPGDANELSVIEGQLTWLVHIIEAILKIRQTIGCSQESQELIDAELAARVLQLINVTDTGVHAQRYRVLSKQRLGRAILIFVQNFRRSYVGDQAMHSSKQLYARLSELLGLNDHLVLLNAIVGKIATNLKCYAENVAISGPVQIVAVNLEATADAAFWTDVVKYAFIGLMRDLRGIAMATNRTYGLLFDWLYPSRMPLLLKAISLCADEPEVTTPLLKFMCEFVLNKAQRLTFDSSSPNGILLFQEVSKLIVAYGSRILLLPNGTDIYGSKYKGIWISLAVLSRALCGNYVNFGVFELYGDRALADALDISLKMSLSVPLSDILAFKKLSKAFYGYIEVLFSSHITFVLNLDTNTFVHIVSTLESGLKGLDTGISTQCASAIDSLAAFYFNNITAADGPPSPAALNLARHIGEFPTLFPQILKTLFEIIIFEDAGNQWSLSRPILSLIMISEQMFSNLRAQILASQPVDQQQRLSQCFEKLMSDVARNLEPKNRDKFTKNLTTFRHDFRVKNIQA

SEQ ID NO: 406 - protein, 396 aa, Saccharomyces cerevisiae
MTVTIKELTNHNYIDHELSATLDSTDAFEGPEKLLEIWFFPHKKSITTEKTLRNIGMDRWIEILKLVKCEVLSMKKTKELDAFLLSESSLFVFDHKLTMKTCGTTTTLFCLEKLFQIVEQELSWAFRTTQGGKYKPFKVFYSRRCFLFPCKQAAIHQNWADEVDYLNKFFDNGKSYSVGRNDKSNHWNLYVTETDRSTPKGKEYIEDDDETFEVLMTELDPECASKFVCGPEASTTALVEPNEDKGHNLGYQMTKNTRLDEIYVNSAQDSDLSFHHDAFAFTPCGYSSNMILAEKYYYTLHVTPEKGWSYASFESNIPVFDISQGKQDNLDVLLHILNVFQPREFSMTFFTKNYQNQSFQKLLSINESLPDYIKLDKIVYDLDDYHLFYMKLQKKI

SEQ ID NO: 407 - protein, 368 aa, Zea mays
  unsure (1)..(368): unsure at all Xaa locations
MAVLSAAGAPPASAIGFEGYEKRLEITFSEAPVFVDPHGSGLRALSRSQIDSVLDLARKIVIKTCGTTKLLLTIPRILELAEELSMPLAAVKYSRGTFIFPGAQPAPHRSFSEEVAVLNRYFGGLKSGGNAYVIGDAARPGQKWHIYYATEYPEQPMVNLEMCMTGLDTKKASVFFKTNADGNTTCAKEMTKLSGISEIIPEMEICDFDFEPCGYSMNAIHGSAFSTIHVTPEDGFSYASYEVMGLDATALSYGDLVKRVLGCFGPSEFSVAVTIFGGRGQAGTWGKELGAEAYDCNNMVEQELPGGGILIYQSFCAAEDAVASSPKSVLRCFDGENAAPFAKDCKLANLVCLEEXDAIEEKDGVLDE

SEQ ID NO: 408 - protein, 400 aa, Zea mays
MAVLSAADASPVSAIGFEGYEKRLEITFSEAPVFVDPHGRGLRALSRAQIDSVLDLARCTIVSELSNKDFDSYVLSESSLFIYPLKIVIKTCGTTKLLLTIPRILELAEELSMPLAAVKYSRGTFIFPGAQPAPHRSFSEEVAALNRYFGGLKSGGNAYVIGDPARPGQKWHVFYATEYPEQPMVNLEMCMTGLDKKKACVFFKTNADGNTTCAKEMTKLSGISEIIPEMEICDFDFEPCGYSMNAIHGSAFSTIHVTPEDGFSYASYEVMGLDATALSYGDLVKRVLRCFGPSEFSVAVTIFGGRGHAGTWGKALGAEVYDCNNMVEQELPGGGLLVYQSFCAAEDAVATSPKSVFHCFDGENVESAPPPMKKDYKLANLLCWEEEADAMEEKAGVLDE

SEQ ID NO: 409 - protein, 866 aa, Zea mays
MSSLDPSPATSTQQKQLESLVNLLTQGSRFYRKAYNELFSGVTTEQDPDSSTNIPEYMLFGWHLFLMLHSRSPELFKDLVSCIHGLVAVLAILLIHVPAKFRSFTIEGSSHLIKQTEKGVDLIASLCHNYHTSEERLKEMLHKSYNAIEDIFHMKALSASECKPENLDKIDTDDLMYFKGLIDMECFQSNLEKMEKLCNSNSCKGELDFKSILINNDYIPYDENSTGDSTNLGRSKCAFETLASPTKTIKNMLTVPSSPLSPATGGSVKIVQMTPVTSAMTTAKWLREVISSLPDKPSSKLQQFLSSCDRDLTNAVTERVSIVLEAIFPTKSSANRGVSLGLNCANAFDIPWAEARKVEASKLYYRVLEAICRAELQNSNVNNLTPLLSNERFHRCLIACSADLVLATHKTVIMMFPAVLESTGLTAFDLSKIIENFVRHEETLPRELKRHLNSLEEQLLESMAWEKGSSLYNSLIVARPSVASEINRLGLLAEPMPSLDDLVSRQNVRIEGLPATPSKKRASGPDDNADPRSPKRSCNESRNTVVERNLQTPPPKQSHMVSTSLKAKCHPLQSTFASPTVCNPVGGNEKCADVTIHIFFSKILKLAAIRIRNLCERVQCVEQTERVYNVFKQILEQQTTLFFNRHIDQLILCCLYGVAKVCQLELTFREILNNYKREAQCKPEVFSSIYIGSTNRNGVLVSRHVGIITFYNEVFVPAAKPFLVSLISSGTHPEDKKNASGQILGSPKPSPFPNLPDMSPKKVSASHNVYVSPLRQTKLDLLLSPSSRSFYACIGEGTHAYQSPSKDLAAINSRLNYNGRKVNSRLNFDMVSDSVVAGSLGQINGGSTSDPAAAFSPLSKKRETDT

SEQ ID NO: 410 - protein, 264 aa, Wheat dwarf virus
MASSSAPRFRVYSKYLFLTYPECTLEPQYALDSLRTLLNKYEPLYIAAVRELHEDGSPHLHVLVQNKLRASITNPNALNLRMDTSPFSIFHPNIQAAKDCNQVRDYITKEVDSDVNTAEWGTFVAVSTPGRKDRDADMKQIIESSSSREEFLSMVCNRFPFEWSIRLKDFEYTARHLFPDPVATYTPEFPTESLICHETIESWKNEHLYSVSLESYILCTSTPADQAQSDLEWMDDYSRSHRGGISPSTSAGQPEQERLPGQGL

SEQ ID NO: 411 - protein, 399 aa, Saccharomyces cerevisiae [sequence omitted]

SEQ ID NO: 412 - protein, 199 aa, Arabidopsis thaliana
MVQTKKFRGVRQRHWGSWVAEIRHPLLKRRIWLGTFETAEEAARAYDEAAVLMSGRNAKTNFPLNNNNTGETSEGKTDISASSTMSSSTSSSSLSSILSAKLRKCCKSPSPSLTCLRLDTASSHIGVWQKRAGSKSDSSWVMTVELGPASSSQETTSKASQDAILAPTTEVEIGGSREEVLDEEEKVALQMIEELLNTN

SEQ ID NO: 413 - protein, 525 aa, Oryza sativa
  unsure (1)..(525): unsure at all Xaa locations
MPGAAGYSGSVKLKYVKLGYQYLVNHFLTLLLVPVMAATALELARMGPGELLSLWRSLQLDLVHILCSVFLVVFVGTVYFMSRPRPVYLVDYSCYKPPPSCRVPFATFMEHTRLITDDEKSVRFQTRILERSGLGEETCLPPANHYIPPNPSMEASRAEAQLVIFSAIDDLVRRTGLKPKDIDILVVNCSLFSPTPSLSAMIINKYKLRSNIRSFNLSGMGCSAGLISLDLARDMLQVSTSQLFDVTTVXLTNXSGEPLTSDMDGHAQVHPNSNALVVSTEIITPNFYWGTRRDMMLPNCLFRMGAAAILLSNRRREARRAKYRLMHVVRTHKGADDRAYRCVYEEEDEQGHSGISLSKELMAIAGDALKSNITTIGPLVLPMSEQLLFFFRLVGRKLINKKWKPYIPDFKLAFEHFCIHAGGRAVIDELQKNLDLSAQHVEASRMTLHRFGNTSSSSLWYELAYIEAKGRMRRGDRVWQIGFGSGFKCNSAVWKCLRTVKTPADGPWDDCIHRYPVDIPEVVKL

SEQ ID NO: 414 - protein, 445 aa, Zea mays
MATRNHRAAAAPQPANRGAARVAGKQKAAAAGTRRALGDIGNVVSDALDRAIKLPEGIHRPITRSFGAQLMKAALANKNADAAVAPAQPVAARAVTKPARKVTTKNVPRPGAGQAPKENKKPSAEGAAAASGRSVQKNRRKKPACTLSTVLSARSKAACPVTEKPKEPIEDIDKFDGDNQLALVDYVEDIYTFYRPPMHESRPIDYMGQTSPELSPRMRSILADWLIESHRRFQLMPETLYLTIYIVDRYLSLQPTPRRELQLVGVAALLIACKYEEIWAPEVNDLIHIADGAFNRSQILAAEKAILNSMEWNLTVPTPYHFLLRFAKAAGSADEQLQHTINFFGELALMDYGMVMTNPSTAAACAVYAARLTLGRSPLWTETLKHHTGPQRAADTGRAKTLVGSHAASASPDARLKAVYQKYATEQFGRVALHPPAPAALPDLV

SEQ ID NO: 415 - protein, 1511 aa, Saccharomyces cerevisiae
MPEAKLNNNVNDVTSYSSASSSTENAADLHNYNGFDEHTEARIQKLARTLTAQSMQNSTQSAPNKSDAQSIFSSGVEGVNPIFSDPEAPGYDPKLDPNSENFSSAAWVKNMAHLSAADPDFYKPYSLGCAWKNLSASGASADVAYQSTVVNIPYKILKSGLRKFQRSKETNTFQILKPMDGCLNPGELLVVLGRPGSGCTTLLKSISSNTHGFDLGADTKISYSGYSGDDIKKHFRGEVVYNAEADVHLPHLTVFETLVTVARLKTPQNRIKGVDRESYANHLAEVAMATYGLSHTRNTKVGNDIVRGVSGGERKRVSIAEVSICGSKFQCWDNATRGLDSATALEFIRALKTQADISNTSATVAIYQCSQDAYDLFNKVCVLDDGYQIYYGPADKAKKYFEDMGYVCPSRQTTADFLTSVTSPSERTLNKDMLKKGIHIPQTPKEMNDYWVKSPNYKELMKEVDQRLLNDDEASREAIKEAHIAKQSKRARPSSPYTVSYMMQVKYLLIRNMWRLRNNIGFTLFMILGNCSMALILGSMFFKIMKKGDTSTFYFRGSAMFFAILFNAFSSLLEIFSLYEARPITEKHRTYSLYHPSADAFASVLSEIPSKLIIAVCFNIIFYFLVDFRRNGGVFFFYLLINIVAVFSMSHLFRCVGSLTKTLSEAMVPASMLLLALSMYTGFAIPKKKILRWSKWIWYINPLAYLFESLLINEFHGIKFPCAEYVPRGPAYANISSTESVCTVVGAVPGQDYVLGDDFIRGTYQYYHKDKWRGFGIGMAYVVFFFFVYLFLCEYNEGAKQKGEILVFPRSIVKRMKKRGVLTEKNANDPENVGERSDLSSDRKMLQESSEEESDTYGEIGLSKSEAIFHWRNLCYEVQIKAETRRILNNVDGWVKPGTLTALMGASGAGKTTLLDCLAERVTMGVITGDILVNGIPRDKSFPRSIGYCQQQDLHLKTATVRESLRFSAYLRQPAEVSIEEKNRYVEEVIKILEMEKYADAVVGVAGEGLNVEQRKRLTIGVELTAKPKLLVFLDEPTSGLDSQTAWSICQLMKKLANHGQAILCTIHQPSAILMQEFDRLLFMQRGGKTVYFGDLGEGCKTMIDYFESHGAHKCPADANPAEWMLEVVGAAPGSHANQDYYEVWRNSEEYRAVQSELDWMERELPKKGSITAAEDKHEFSQSIIYQTKLVSIRLFQQYWRSPDYLWSKFILTIFNQLFIGFTFFKAGTSLQGLQNQMLAVFMFTVIFNPILQQYLPSFVQQRDLYEARERPSRTFSWISFIFAQIFVEVPWNILAGTIAYFIYYYPIGFYSNASAAGQLHERGALFWLFSCAFYVYVGSMGLLVISFNQVAESAANLASLLFTMSLSFCGVMTTPSAMPRFWIFMYRVSPLTYFIQALLAVGVANVDVKCADYELLEFTPPSGMTCGQYMEPYLQLAKTGYLTDENATDTCSFCQISTTNDYLANVNSFYSERWRNYGIFICYIAFNYIAGVFFYWLARVPKKNGKLSKK

SEQ ID NO: 416 - protein, 330 aa, Oryza sativa
MADFRTSTHRERWIFQTNDLMDRWGAANQRATETLVQYGTTRLKVDPVDGSLSYPEPAPDHVVGSSGVKPLSCEEERLMRVFYEQKIQEVCSAFKFPHKIQATAIIYFKRFYLQWSVMEHHPKHIMLTCIYSSCKVEENHVSAEELGKGIQQDHQIILNNEMIVLKSLDFDLIVYAPYRSIEGFVDDMEDFCRAGNGEHQRLQDLRQTAISQVDKMMLTDAPLLYTPGQLALAALHKSNDMHKILNFERYLESVFSRQHSDCPIEQFVGSINMINYLVEQLKIPTPKDMRHIDRKLKHCLDPSSQDEHKKKEKKSKHKSKRAANEAQLDS

SEQ ID NO: 417 - protein, 424 aa, Oryza sativa
MASGDGGDDAGVKRVADRYLKREVLGEGTYGVVFKAVDTKTGNTVAIKKIRLGKYKEGVNFTALREIKLLKELKDSNIIELIDAFPYKGNLHLVFEFMETDLEAVIRDRNIVLSPADTKSYIQMMLKGLAFCHKKWVLHRDMKPNNLLIGADGQLKLADFGLARIFGSPERNFTHQVFARWYRAPELLFGTKQYGSAVDIWAAGCIFAELLLRRPFLQGSSDIDQLGKIFAAFGTPKSSQWPDMVYLPDYVEYQFVSAPPLRSLFPMASDDALDLLSRMFTYDPKARITAQQALEHRYFLSVPAPTKPSQLPRPPPKGDSGNNKIPDLNLQDGPVVLSPPRKLRRVTAHEGMEVHMHRADRTEEHPSGARHMDDMSSQSSRIPMSVDVGAIFGTRPAPRPTLNSADKSRLKRKLDMDPEFGYTE

SEQ ID NO: 418 - protein, 409 aa, Glycine max
MDPPPKSWSIHTRSEIIAKYEVMERVGSGAYADVYRGRRLSDGLTVALKEIHDYQSAFREIDALQLLEGSPNVVVLHEYFWREDEDAVLVLEFLRTDLATVIADTAKANQPLPAGELKCWMIQILSGLDACHRHMVLHRDLKPSNLLISEHGLLKIADFGQARILMEPGIDASNNHEEYSRVLDDIDNKDTITSTHDGNATCNTSDVDREEEELGCFTSCVGTRWFRAPELLYGSRNYGLEVDLWSLGCIFAELLTLQPLFPGTADIDQLSRIIGVLGNLDENAWAACSKLPDYGIISFSKVENPAGLEACLPNRSPDEVALVKKLVCYDPAKRATAMELLHDKYFSDEPLPVLVSELRVPLTRKEQDGDSPGGWGDINDMDSDSDSQFDEFGPLNITRTGTGFSIQFP

SEQ ID NO: 419 - protein, 590 aa, Arabidopsis thaliana
MSLPETKSDDILLDAWDFQGRPADRSKTGGWASAAMILCIEAVERLTTLGIGVNLVTYLTGTMHLGNATAANTVTNFLGTSFMLCLLGGFIADTFLGRYLTIAIFAAIQATGVSILTLSTIIPGLRPPRCNPTTSSHCEQASGIQLTVLYLALYLTALGTGGVKASVSGFGSDQFDETEPKERSKMTYFFNRFFFCINVGSLLAVTVLVYVQDDVGRKWGYGICAFAIVLALSVFLAGTNRYRFKKLIGSPMTQVAAVIVAAWRNRKLELPADPSYLYDVDDIIAAEGSMKGKQKLPHTEQFRSLDKAAIRDQEAGVTSNVFNKWTLSTLTDVEEVKQIVRMLPIWATCILFWTVHAQLTTLSVAQSETLDRSIGSFEIPPASMAVFYVGGLLLTTAVYDRVAIRLCKKLFNYPHGLRPLQRIGLGLFFGSMAMAVAALVELKRLRTAHAHGPTVKTLPLGFYLLIPQYLIVGIGEALIYTGQLDFFLRECPKGMKGMSTGLLLSTLALGFFFSSVLVTIVEKFTGKAHPWIADDLNKGRLYNFYWLVAVLVALNFLIFLVFSKWYVYKEKRLAEVGIELDDEPSIPMGH

SEQ ID NO: 420 - protein, 584 aa, Oryza sativa
MDSSYQHDKPLLDEENSSQVTLEYTGDGSVCIRGHPALRKHTGNWKGSSLAIVFSFCSYLAFTSIVKNLVSYLTKVLHETNVAAARDVATWSGTSYLAPLVGAFLADSYLGKYCTILIFCTIFIIGLMMLLLSAAVPLISTGPHSWIIWTDPVSSQNIIFFVGLYMVALGYGAQCPCISSFGADQFDDTDENERTKKSSFFNWTYFVANAGSLISGTVIVWVQDHKGWIWGFTISALFVYLGFGTFIFGSSMYDFRNLEEAPLARICQVVVAAIHKRDKDLPCDSSVLYEFLGQSSAIEGSRKLEHTTGLKFFDRAAMVTPSDFESDGLLNTWKICTVTQVEELKILIRMFPVWATMILFAAVLDNMFSTFIEQGMVMEKHIGSFEIPAASFQSIDVIAVLILVPVYERVLVPVFRKFTGRANGITPLQRMGIGLFFSMLSMVSAALVESNRLRIAQDEGLVHRKVAVPMSILWQGPQYFLIGVGEVFSNIGLTEFFYQESPDAMRSLCLAFSLANVSAGSYLSSFIVSLVPVFTAREGSPGWIPDNLNEGHLDRFFWMMAGLCFLNMLAFVFCAMRYKCKKAS

SEQ ID NO: 421 - protein, 303 aa, Zea mays
MNTSPSRYRAMMGGWGGSDGYEGSKRTRMMMESNPYFAVNAGSPLDVSKRARMMEPGAPYFGAMGSSASGAGGGFYQPFNSNLAGAGSSTGIQSFPCVRLRGLPFDCNDIDVCKFFVGLDIVDCLLVNKNGRFTGEAFVVFPTSMQAEFALHRDRQNMGRRYVEVFRCKKHEYYCAIANEVNQGGYFEPEYRRSPPPPRPRKPSEDKGSMEYTEVLKLRGLPYSATTEDIIKFFLEYELAEENVHIAYRTDGKATGEAFVEFPTAEVAKTAMCKDKMTIGTRYVELFPSTPEEASRAKSRGRH

SEQ ID NO: 422 - protein, 339 aa, Zea mays
MVRVGLSSAPGVNLTEQIDNVFDQLINKIEHADFDTRPFLKQLNVLGRYEPIKRNVYCTKRRIEDYGISCHCKPSPGSSVVCGRDCHCGMLFSCCSSQCECDDTCTNKSFQHRPLKKTKLIKTEKCGHGLVAEDEIKKGEFVIEYVGEVIDDRTCENRLWTMKRLLDTDFYLCEVSSNMVIDATNKGNRSRFINHSCEPNTAMQKWTVDGETRVGIFALRDIKIGEELTYDYKFVQFGAAQVCHCGSSNCRKMLGTTKYSGSSQNHHAKKKKRKTSCENCIQQFLRLWHPHKKMYVGCWIIDFDQETKMHTLKFNDLHTEKFNLKEEEWHFLEVDFDED

SEQ ID NO: 423 - protein, 833 aa, Saccharomyces cerevisiae
MNNAANTGTTNESNVSDAPRIEPLPSLNDDDIEKILQPNDIFTTDRTDASTTSSTAIEDIINPSLDPQSAASPVPSSSFFHDSRKPSTSTHLVRRGTPLGIYQTNLYGHNSRENTNPNSTLLSSKLLAHPPVPYGQNPDLLQHAVYRAQPSSGTTNAQPRQTTRRYQSHKSRPAFVNKLWSMLNDDSNTKLIQWAEDGKSFIVTNREEFVHQILPKYFKHSNFASFVRQLNMYGWHKVQDVKSGSIQSSSDDKWQFENENFIRGREDLLEKIIRQKGSSNNHNSPSGNGNPANGSNIPLDNAAGSNNSNNNISSSNSFFNNGHLLQGKTLRLMNEANLGDKNDVTAILGELEQIKYNQIAISKDLLRINKDNELLWQENMMARERHRTQQQALEKMFRFLTSIVPHLDPKMIMDGLGDPKVNNEKLNSANNIGLNRDNTGTIDELKSNDSFINDDRNSFTNATTNARNNMSPNNDDNSIDTASTNTTNRKKNIDENIKNNNDIINDIIFNTNLANNLSNYNFNNNAGSPIRPYKQRYLLKNRANSSTSSENPSLTPLISNLIMTAKFQKFLLMTKKKKKPDFRPFTSRDPNNQTSENTFDPNRFTMLSDDDLKKDSHTNDNKHNESDLFWDNVHRNIDEQDARLQNLENMVHILSPGYPNKSFNNKTSSTNTNSNMESAVNVNSPGFNLQDYLTGESNSPNSVHSVPSNGSGSTPLPMPNDNDTEHASTSVNQGENGSGLTPFLTVDDHTLNDNNTSEGSTRVSPDIKFSATENTKVSDNLPSFNDHSYSTQADTAPENAKKRFVEEIPEPAIVEIQDPTEYNDHRLPKRVKK

SEQ ID NO: 424 - protein, 912 aa, Zea mays
MNPDNFTHKTNEAIVGAHEIAVEAGHAQLTPLHLAAVLAADKGGILRQAITGASGGDGAAGDSFERVLNNSLKKLPSQSPPPDSVPASTALIKVIRRAQSAQKKRGDSHLAVDQLLLGLLEDSQISDCLKEAGVSAARVRAELEKLRGGEGRRVESASGDTNFQALKTYGRDLVEQAGKLDPVIGRDEEIRRVVRILSRRTKNNPVLIGEPGVGKTAVVEGLAQRIVRGDVPSNLLDVRLIALDMGALVAGAKYRGEFEERLKAVLKEVEEAEGKVILFIDEIHLVLGAGRTEGSMDAANLFKPMLARGQLRCIGATTLEEYRKYVEKDAAFERRFQQVFVAEPSVPDTVSILRGLKEKYEGHHGVRIQDRALVVAAQLSARYIMGRHLPDKAIDLVDEACANVRVQLDSQPEEIDNLERKRIQLEVELHALEKEKDKASKARLIEVRKELDDLRDKLQPLTMKYRKEKERIDEIRKLKQRREELQFTLQEAERRMDLARVADLKYGALQEIDAAISKLESETGENLMLTETVGPEQIAEVVSRWTGIPVTRLGQNDKERLVGLADRLHQRVVGQTEAVSAVAEAVLRSRAGLGRPQQPTGSFLFLGPTGVGKTELAKALAEQLFDDENLLVRIDMSEYMEQHSVARLIGAPPGYVGHEEGGQLTEQVRRRPYSVILFDEVEKAHVAVFNTLLQVLDDGRLTDGQGRTVDFRNTVIIMTSNLGAEHLLAGMVGKNSMKVARDLVMQEVRRHFRPELLNRLDEIVIFDPLSHEQLRKVARLQMKDVAVRLAERGIALAVTDAALDIILSLSYDPVYGARPIRRWIEKRVVTQLSKMLIQEEIDENCTVYIDAAPGKDELVYRVDRSGGLVNAETGMKSDILIQVPNSSTRSDAAQAVKKMRIMEEDEDGMDEE

SEQ ID NO: 425 - protein, 861 aa, Escherichia coli
MGGVMRLDRLTNKFQLALADAQSLALGHDNQFIEPLHLMSALLNQEGGSVSPLLTSAGINAGQLRTDINQALNRLPQVEGTGGDVQPSQDLVRVLNLCDNVAQKRGDNFISSELFVLAALESRGTVADILKAAGATTANITQAIEQMRGGESVNDQGAEDQRQALKKYTIDLTERAEQGKLDPVIGRDEEIRRTIQVLQRRTKNNPVLIGEPGVGKTAIVEGLAQRIINGEVPEGLKGRRVLALDMGALVAGAKYRGEFEERLKGVLNDLAKQEGNVILFIDELHTMVGAGKADGAMDAGNMLKPALARGELHCVGATTLDEYRQYIEKDAALERRFQKVFVAEPSVEDTIAILRGLKERYELHHHVQITDPAIVAAATLSHRYIADRQLPDKAIDLIDEAASSIRMQIDSKPEELDRLDRRIIQLKLEQQALMKESDEASKKRLDMLNEELSDKERQYSELEEEWKAEKASLSGTQTIKAELEQAKIAIEQARRVGDLARMSELQYGKIPELEKQLEAATQLEGKTMRLLRNKVTDAEIAEVLARWTGIPVSRMMESEREKLLRMEQELHHRVIGQNEAVDAVSNAIRRSRAGLADPNRPIGSFLFLGPTGVGKTELCKALANFMFDSDEAMVRIDMSEFMEKHSVSRLVGAPPGYVGYEEGGYLTEAVRRRPYSVILLDEVEKAHPDVFNILLQVLDDGRLTDGQGRTVDFRNTVVIMTSNLGSDLIQERFGELDYAHMKELVLGVVSHNFRPEFINRIDEVVVFHPLGEQHIASIAQIQLKRLYKRLEERGYEIHISDEALKLLSENGYDPVYGARPLKRAIQQQIENPLAQQILSGELVPGKVIRLEVNEDRIVAVQ

SEQ ID NO: 426 - protein, 872 aa, Synechocystis PCC6803
MQPTDPNKFTEKAWEAIAKTPEIAKQHRQQQIETEHLLSALLEQNGLATSIFNKAGASIPRVNDQVNSFIAQQPKLSNPSESIYLGRSLDKLLDNAEIAKSKYGDDYISIEHLMAAYGQDDRLGKNLYREIGLTENKLAEIIKQIRGTQKVTDQNPEGKYESLEKYGRDLTELAREGKLDPVIGRDEEVRRTIQILSRRTKNNPVLIGEPGVGKTAIAEGLAQRIINHDVPESLRDRKLISLDMGALIAGAKYRGEFEERLKAVLKEVTDSQGQIILFIDEIHTVVGAGATQGAMDAGNLLKPMLARGALRCIGATTLDEYRKYIEKDAALERRFQEVLVDEPNVLDTISILRGLKERYEVHHGVKIADSALVAAAMLSNRYISDRFLPDKAIDLVDEAAAKLKMEITSKPEELDEVDRKILQLEMERLSLQRENDSASKERLEKLEKELADFKEEQSKLNGQWQSEKTVIDQIRTVKETIDQVNLEIQQAQRDYDYNKAAELQYGKLTDLQRQVEALETQLAEQQTSGKSLLREEVLESDIAEIISKWTGIPISKLVESEKEKLLHLEDELHSRVIGQDEAVTAVAEAIQRSRAGLSDPNRPTASFIFLGPTGVGKTELAKALAKNLFDTEEALVRIDMSEYMEKHAVSRLMGAPPGYVGYEEGGQLTEAIRRRPYSVILFDEIEKAHGDVFNVMLQILDDGRLTDAQGHVVDFKNTIIIMTSNLGSQYILDVAGDDSRYEEMRSRVMDVMRENFRPEFLNRVDETIIFHGLQKSELRSIVQIQIQSLATRLEEQKLTLKLTDKALDFLAAVGYDPVYGARPLKRAVQKYLETAIAKGILRGDYKPGETIVVDETDERLSFTSLRGDLVIV

SEQ ID NO: 427 - protein, 861 aa, Xylella fastidiosa
MRMDKLTSRFQNALADAQSLAVGRDHTIIEPVHVFSALLDQQGGSTRPLLMQAGVNVPLLRERLTEILEALPKVSGQTVNVSPSNELSRLFHRTDKLAQQHGDQFMASEWFVLAVVDDSGGLGQALRAAGAEKKKIEAAIDKLRGGETVQTENAEEQRQALEKYTIDLTARAESGKLDPVIGRDEEIRRTIQVLQRRTKNNPVLIGEPGVGKTAIVEGLAQRIVNGEVPEGLRSKRLLSLDLGALIAGAKFRGEFEERLKGVLNDLAKNEGRVILFIDELHTMVGAGKADGAMDAGNMLKPALARGELHCIGATTLDEYRKYIEKDAALERRFQKVFVGEPTVEDTIAILRGLKEKYALHHGVEITDPAIVAAATLSNRYITDRQLPDKAIDLMDEAASRIRMEIDSKPEELDRLERRLIQLKIQREMLKKEKDEASKQRLADLERDIEVLDREFSDLEEVWRSEKAALQGATKIKESIEQAKLDLEAAQRRQDYAKMSEIQYGVLPALEKQLVAASQAEQHDFTLVQEKVTAEEIAEVVSRWTGIPVSKMLEGERDKLLRMEADLGRRVVGQEEAIKVVSDAVRRSRTGLSDPNRPSGSFLFLGPTGVGKTELCKALAEFLFDSQDAMVRIDMSEFMEKHSVARLIGAPPGYVGYEEGGYLTELVRRRPYSLILLDEVEKAHSDVFNILLQVLDDGRLTDGQGRTVDFRNTVIVMTSNLGSHQIQELSGDDSPEVYTQMKAAVMEVVQAHFRPEFINRLDDIVVFHPLDKAQIKQIARIQLQGLEKRLAESELKLDLDDRALELLGNVGFDPVYGARPLKRAIQSQLENPLAQQILAEAFVSGDTVQVGVDGGKLVFAKV

SEQ ID NO: 428 - protein, 391 aa, Zea mays
MAAFAALFDPLYCPEEHLDLYRDEPGEGADEQWPGQHGQQEPAVLDDELPALFEAHRAKEGVVLAEDGGYGGAAGREAAVGWVSRAAARLGLSALTAALAAAYLDRCFLPGGALRLGDQPWMARLAAVTCFALAAKVEETRVPPLLDLQLYAAADAADPYVFEAKTVRRMELLVLSALGWRMHPVTPFSYLQPVLADAATRLRSCEGVLLAVMADWRWPRHRPSAWAAAALLITAAAGDGGDGDGDTELLALINAPEDKTAECAKIISEVTGMSFLACDVGVSAGNKRKHAAAQLYSPPPSPSGVIGALSCFSCESSTSATAMAAAVGPWAPSASVSVSSSPEPPGRAPKRAAAASASASASAGVAPPVQVPHQLPPDEESRDAWPSTCAA

SEQ ID NO: 429 - protein, 347 aa, Emericella nidulans
MPSTTSRAAFEAVFPSLAEAMLDHARKYNLPQNAQEWFSKAIHTNVPGGKLNRGLSVPDTGVALLQKELSEEQYKDLATLGWLTELLQAFFLVSDDLMDGSITRRGQPCWYRHQGVGLIAINDAFLLESGIYVILKKQFRSHPAYVDFIELFHETTWQTELGQLCDLITAPEDKVDLNNFSMEKYMFIVTYKTAYYSFYLPVALALHYLQLATPENLRQAHDILIPLGQYFQVQDDYLDAYGDPEVIGKIGTDIQDNKCSWLVNQALQRCSAEQRKVLDAAYGRKDAEQEAKVKAIFRELDLESVYKEYEEKIVGELKTKIAAVNESEGLKKEVFEAFLGKIYKRSK

SEQ ID NO: 430 - protein, 353 aa, Oryza sativa
MAAAVVANGASGDSSKAAFAEIYSRLKEEMLEDPAFEFTDESLQWIDRMLDYNVLGGKCNRGISVIDSFKMLKGTDVLNKEETFLACTLGWCIEWLQAYFLVLDDIMDNSQTRRGQPCWFRVPQVGLIAVNDGIILRNHISRILQRHFKGKLYYVDLIDLFNEVEFKTASGQLLDLITTHEGEKDLTKYNLTVHRRIVQYKTAYYSFYLPVACALLLSGENLDNFGDVKNILVEMGTYFQVQDDYLDCYGDPEFIGKIGTDIEDYKCSWLVVQALERADENQKHILFENYGKPDPECVAKVKDLYKELNLEAVFHEYERESYNKLIADIEAHPNKAVQNVLKSFLHKIYKRQK

SEQ ID NO: 431 - protein, 355 aa, Zea mays
MATAEVVVANGSGGADTKTAFKEIYSKLKQEMLEDPAFEFTDESLQWIDRMLDYNVLGGKCNRGLSVVDSYKILKGVDVLSKEETFLACTLGWCIEWLQAYFLVLDDIMDNSQTRRGQPCWFRVPQVGLIAVNDGIILRNHISRILQRHFKGKPYYVDIIDLFNEVEFKTASGQMLDLITTHEGEKDLTKYNLTVHRRIVQYKTAYYSFYLPVACALLLAGENLENFVDVKNILVEMGTYFQVQDDYLDCFGDPEFIGKIGTDIEDYKCSWLVVQALERAAENQKSILFENYGKSDPACVAKVKDLYKELKLEEVFHEYERESYNKLIADIEAQPSKAVQTVLKSFLHKIYKRDK

SEQ ID NO: 432 - protein, 349 aa, Zea mays
MGERGAEEDGSGGSSLSLMCLEDGADLDAGGSAESADDGEPAVVAHSDAGEDQEEEYMDYLVSKESSFCCSPSSSPVSSDAGAETRPSSTASSSDEWFRCARHATVAWVLETRAYFGFSHRAAYLAVSYMDRFCLRRCMDVSVMPWAARLLAVACLSLAAKMEEYRAPALSEFRAHDDYDFSSVCIRRVELLVLSTLGWRMGGVTPLDYLPCLSFRLRRGGGGGLIAAKAAALIFSAAEAASVLDYRPSTVAVAAVLAAAHGAMTKEALECNMSSLTPSCLLDKDDVHACYSTMLSESSSPTPSKLADKRPPPSSSGSTMYESVDAASSFAATAGRSKRARLEMPAIGP

SEQ ID NO: 433 - protein, 349 aa, Zea mays
MMPVAAVDDWSERGFSLTCEEDCADLGNGVVDDDEFLPLYNAGEEEEEEYLEQLVFKETSLCSSSDSAADCDGDGEGDEEYPSLASEEWFRQARLAAVKWILETRGCFGFGHRTAYLAIAYFDSFLLRRRVDREAMPWAAQLLSVACVSVAAKMEECQVPALSEFHAGGYDFDSASIRRMELLVLSTLGWRMGAVTPLDFLPCFSSRVHPHGGAGAGGHVAHKAIGFIFATAEAGSVLDHRPSTVAAAAILAATYGPLLTKEALDSKMSYLSPSCLIEKEHVHACYSMMVGDNNRRGSKRSLPCSVSNEIATSTYHSVLVDDVTDTAAAFATAVSARNKRIRLELTGIS

SEQ ID NO: 434 - protein, 247 aa, Arabidopsis thaliana
MNIAHTIFGVFGNATALFLFLAPSITFKRIIKNKSTEQFSGIPYPMTLLNCLLSAWYGLPFVSKDNTLVSTINGTGAVIETVYVLIFLFYAPKKEKIKIFGIFSCVLAVFATVALVSLFALQGNGRKLFCGLAATVFSIIMYASPLSIMRLVVKTKSVEFMPFFLSLFVFLCGTSWFVYGLIGRDPFVAIPNGFGCALGTLQLILYFIYCGNKGEKSADAQKDEKSVEMKDDEKKQNVVNGKQDLQV

SEQ ID NO: 435 - protein, 291 aa, Oryza sativa
MEHIARFFFGVSGNVIALFLFLSPVVTFWRIIKKRSTEDFSGVPYNMTLLNCLLSAWYGLPFVSPNNILVTTINGTGSVIEAIYVVIFLIFAERKARLKMMGLLGLVTSIFTMVVLVSLLALHGQGRKLFCGLAATIFSICMYASPLSIMRLVIKTKSVEFMPFLLSLSVFLCGTSWFIYGLLGRDPFIAIPNGCGSFLGLMQLILYAIYRNHKGATPAAAAGKGDAADDVEMAEGRNNKVADGGAADDDSYGRRQGGHRSVALACVSNRLRFPACVLLLQVVILARPLLL

SEQ ID NO: 436 - protein, 244 aa, Oryza sativa
MVSNTIRVAVGILGNAASMLLYAAPILTFRRVIKKGSVEEFSCVPYILALFNCLLYTWYGLPVCLPSMGLAYCLRSHSSAYTHGLHPEKERQKFVLRMVLPVLAFFALTAIFSSFLFHTHGLRKVFVGSIGLVASISMYSSPMVAAKQVITTKSVEFMPFYLSLFSFLSSALWMIYGLLGKDLFIASPNFIGCPMGILQLVLYCIYRKSHKEAEKLHDIDQENGLKVVTTHEKITGREPEAQRD

SEQ ID NO: 437 - protein, 752 aa, Zea mays
MDSSGEELLKKIRELEVGQAQLKQEMSKLIPGAGERRRSQSVSPRRGVPVPPPPPAKAKAGAPGRRLSGGFEGGQRAWARGSASFPHSSPLQREGRAGAGDASTSARLPERQYSRVLQSMGQSVHILDLDGRIIYWNQSAENLFGYPASEALGQDALMLLVDSHDHNAVNNIFQRISMGESWTGKFPVKNKQGHRFSAVATNTPFYDEDGSLMGFICVSSDSRQLEQIFCKPPTSARSQSESSMTSCDGSCSNTSHRINSLNRSSFDSNLPLQSTLASKITNLATKVTNKVRSRVRTDENDDGGSGESHCLDRGAKEEPTSSGTSTPRGDAPHGPFATEENSPGKSTNPNSDESEGKVGLHKILGSKAEALLNKKGISWPWKGRENEGPDERNHVILPWLHGGQENGVNHQKVSDSSISPDAQGAEHNQPSKNEASGSWSSFNNNSTGSASSTGSTNSSALYKVDHEADCLDYEILWEDLVIGEQIGQGSCGTVYHALWYGSDVAVKVFSKQEYSEEVILTFRQEVSLMKKLRHPNILLFMGAVMSPQRLCIVSEFLPRGSLFRLLQRSATKLDVRRRVHMALDIVRGMNYLHHSSPPIIHRDLKSSNLLVDKNWIVKVADFGLSRLKRETFLTTKTGKGTPQWMAPEVLRNEPSDEKSDVYSYGVILWELVTQKIPWENLNSMQVIGAVGFMNQRLDIPSEVDPQWKSIILSCWESDPQQRPSFQELLERLRELQRHYAIQHRNTKNSIEE

SEQ ID NO: 438 - protein, 271 aa, Zea mays
PEELLPHGSSLPWEGFHYITNRVMDSSLIDSENSMPGCACSHPECSPENCGHVSLFDGVYNSLVDINGTPMHGRFAYDEDSKIILQEGYPIYECNSSCICDSSCQNKVLQKGLLVRLELFRSENKGWAIRAAEPILQGTFVCEYIGEVVKADKAMKNAESVSSKGGCSYLFSIASQIDRERVRTVGAIEYFIDATRSGNVSRYISHSCSPNLSTRLVLVESKDCQLAHIGLFANQDIAVGEELAYDYRQKLVAGDGCPCHCGTTNCRGRVY

SEQ ID NO: 439 - protein, 242 aa, Zea mays
MGQGGEVKAAPAVRVLVVDDSPVDRKVVELLLRNHNHQGGAAPFHVTAVDSGKKAMEHLRLMEQGGQLDSCAADANRITIDIVLTDYCMPEMTGYDLLKAIKALSSPNPIPVVVMSSENEPQRISRCLTAGAEDFILKPLKTKDVQRLRNCSSAARPRDDAAHQCESLRRSSRKLRSDQVAAPGHRSQPTTGLTMVLHASSIELSHYFQFLLKFVLLAYAVLCLTELLHRWSNGSVLSLWSA

SEQ ID NO: 440 - protein, 686 aa, Zea mays
MAAAEARGGEFPVGMKVLVVDDDPTCLVVLKRMLLECRYDVTTCPQATRALTMLRENRRGFDVIISDVHMPDMDGFRLLELVGLEMDLPVIMMSADSRTDIVMNGIKHGACDYLIKPVRMEELKNIWQHVIRKKFNENKDHEHSGSLDDTDRNRPTNNDNEYASSANDGGDGSWKSQRKKREKEDDETDLENGDPSSTSKKPRVVWSVELHQQFVNAVNHLGIDKAVPKKILELMNVPGLTRENVASHLQKFRLYLKRIAQHHAGIPHPFVAPVSSANVAPLGGLEFQALAASGQIPPQALAALQDELLGRPTSSLALPGRDQSSLRVAAIKGNKHHEEREIAFGQPIYKCQNNAYGAFPQNSPAVGGLQPFAAWPNNKVGMTDSTSTLGNVGNSQNSNMLLHELQQQPDTLLLGTLHNIDAKPSGVVMPSQSLNTFPASEGISPNQNPLIIPSQPPSFVSSIPPSMKHESLLGLPSTSTSLLGGLDMVNQASTSQALISSHGTNLPGLMNRSSNAIPSPGISNFQSGNIHYVVNQNAMGVSSKPPGVLKTESTDSLSCSYGYIGGSTSVDSGLFSSQSKNPQYGLLQNQNDVNGSWSPSQDFDSFGNSLGQGHPGTTSSNFQSSALGKLPDQGRGRNHGFVGKGTCIPSRFAVDEVESPTNNLSHSIGNSGDIVNHDIFGFSGHM

SEQ ID NO: 441 - protein, 746 aa, Zea mays
GNAALENGHHQAEADADEWREKEEDLANNGHSAPPPGMQQVDEHKEEQRQSIHWERFLPVKTLRVLLVENDDSTRQVVSALLRKCCYEVIPAENGLHAWRYLEDLQNNIDLVLTEVFMPCLSGIGLLSKITSHKICKDIPVIMMSTNDSMSMVFKCLSKGAVDFLVKPLRKNELKNLWQHVWRRCHSSSGSESGIQTQKCAKLNTGDEYENGSDSNHDDEENDDGDDDDFSVGLNARDGSDNGSGTQSSWTKRAVEIDSPQPISPDQLVDPPDSTCAQVIHPRSEICSNKWLPTANKRNVKKQKENKDESMGRYLGIGAPRNSSAEYQSSLNDVSVNPIEKGHENHMSKCKSKKETMAEDDCTNMPSATNAETADLISSIARNTEGQQAVQAVDAPDGPSKMANGNDKNHDSHIEVTPHELGLKRSRTNGATAEIHDERNILKRSDQSAFTRYHTSVASNQGGARYGESSSPQDNSSEAMKTDSTCKMKSNSDAAPIKQGSNGSSNNDVGSSTKNVAARPSGDRERVASPLAIKSTQHASAFHTIQNQTSPANLIGEDKADEGISNTVKMSHPTEVPQGCVQHHHHVHYYLHVMTQKQPSTDRGSSDVHCGSSNVFDPPVEGHAANYSVNGGVSVGHNGCNGQNGSSAVPNIARPNIESINGTMSQNIAGGGIVSGSGSGNDMYQNRFLQREAALNKFRLKRKDRNFGKKVRYQSRKRLAEQRPRVRGQFVRQSEQEDQTAQGSER

SEQ ID NO: 442 - protein, 631 aa, Zea mays
MGGGADEVVKVVDSEDGEGEEEEAEAAAAEGSSKETPMLPRMPVRVLLAEGDDSTRHVISALLRKCGYRVAAASDGVKAWDILKEKSFNIDLVLTEVELPLMSGFLLLSTIMEHDASKNIPVIMMSSHDSVSMVFKCMLKGAADFLVKPLRKNELRNLWQHVWRKQLANGGPDVQHIQEENLAERMEQKTGVTKADNLNSDGPHKNRECSEQESDAQSSCTRSELEAESKQTNNILEYMQSTERHLFIRSHKDLELNGETKTRTKGNNLIPTREDDLLPKKRTCLNDNDSERTSRDMELVHIMDNQQKHDTQRDVDTMRTTSRGNDEKNSIPAHQLELSLRRTDYGKLENHEKNDRRTLNHSTSSAFYLYNCRTASSLGNAGDGQLCSTSETLVDVENRNGDLAALSEDTTETNRPPIRVVPFPVPVQCFTFDGQPFWNGTPVASPFYPQSAPPIWNSKTPTWQESTPQATSLPQKSQQNEPVEMDAKPVENAEEQFVVGPPSASGKQLHVEIPKDGLRHISPVTGESGISTVLDSTRNTLSSSGCDSTSNRITASTEPSSNVYRGVPETARAEGLRHLSQREAALNKFRLKRKDRCFEKKVRYQSRKLLAEQRPRVKGQFVRQDHSIQGS

SEQ ID NO: 443 - protein, 631 aa, Zea mays
MTVDELKLQARASGGHGAKDQFPVGMRVLAVDDDPTCLKILENLLLRCQYHVTTTGQAATALKLLREKKDQFDLVISDVHMPDMDGFKLLELVGLEMDLPVIMLSANGETQTVMKGITHGACDYLLKPVRIEQLRTIWQHVVRRRSCDAKNSGNDNDDSGKKLQVVSAEGDNGGVNRNKRISRKGRDDNGDDGDDSDDNSNENGDSSSQKKPRVVWSVELHRKFVAAVNQLGIDKAVPKKILDLMNVENITRENVASHLQKYRLYLKRLSADASRQANLTAAFGGRNPAYVNMGLDAFRQYNAYGRYRPVPTTNHSQPNNLLARMNSPAFGMHGLLPSQPLQIGHNQNNLSTSLGNVGGMNNGNLIRGAHMPLQDTSKCFPTGPSGNSFANISNSTQLVTTNNLPLQSLEPSNQQHLGRLHSSADPFNSFVGEPPQFADLGRCNTTWPTAVSSSNVQEIGQKDRIVNRPKLEPLSSFTEASSQIPLLGSEMQSHQVASLASNGLPMPFTQEAVPFAYGSSTNSREMLNNNLALSNSGVNSTLPNLRIDGSVVPGQTLGGSNSGGCVVPPLQDGRIDHQAVSSHLNYNNELMGTGRLQRGLSGGLDDIVVDMFRPDRADDGVSFIDGDWELV

SEQ ID NO: 444 - protein, 584 aa, Zea mays
MALTDATAFPYGLRVLVVDDDPTWLKILEKMLRKCSYEVTTCGLASVAIQILRERRNKFDIVISDVNMPDMDGFKLLELIGLEMDLPVIMMSIDGETSRVMKGVQHGACDYLLKPVRMKELRNIWQHVYRKKMHEVKEIEGNDSYDDLQMFRNGVEGFDERDLFMRADSDTMRKRKDVNKDHADQDSSDGATVKKARVVWSVDLHQKFVNAVNQIGFDKVGPKKILDLMNVPGLTRENVASHLQKYRLYLSRLQKQNEERIMGAARQDFNQKGPSDHLNLRSSFQEQPGNLSNGCQHSSQKVEAQTNILDPHLDDTKTSMPLKVPDKNGISASDAVDPHNITTASPLSGVFSFERMPVNQDRKLSETMILECESWSGSVPPKQFMQYPKHNHERCDLLGDYSCLPKPDLEHPIAPGHLYAPPPVISMSYNVEKDVRDFSDVKPDLLGCMKSLSPALTCTVESVSAQLSDSVVTSTNSDRKFSSVEGLSSIKDCDFDQERNGAILFTSEEASILCGTDFTCLPEDLSGYQLQGVSFGNKGLNSIDLYQCNDTMLIPGLQNNWYDDDVEFSSETVEFPLLDGGLFA

SEQ ID NO: 445 - protein, 242 aa, Zea mays
MTVPDAESRFHVLAVDDSLVDRKLIEMLLKTSSYQVTTVDSGSKALELLGLRDASSPSPSSPDHQEIDVNLIITDYCMPGMTGYDLLKRVKGSSSLKDIPVVIMSSENVPARISRCLQDGAEEFFLKPVKLADMKKLKSHLLKRKQPKEAQAQAQAQAQQGQAVELEPEQQLDPRTQPAHDAEETAAEPPPAASNGTTDGGNKRKAAAMEEEGMLAVMTVAAPESSTKPRLSTTTSSLAVET

SEQ ID NO: 446 - protein, 244 aa, Zea mays
MEAGGAGAEGVMRVLLVDDSPVDRRVAQLLLSSNSCAGSFHVIAVDSAKKAMEFLGLKDGGKEQAIDMVLTDYCMPEMTGYDLLKAIKALNPLKPIPVIVMSSEDEPQRISRCLNAGAEDFIVKPLQSKDVQRLRNCSTVGRPSNKGGATLPCEENAVAKWSNNKLPPSAGAGAGASATSPSGRRANLAGVAMRQVLHSSSVEISQYLPLLLKLVVLAYAALCLGELLHRWSSGGSCSLSPWCA

SEQ ID NO: 447 - protein, 235 aa, Zea mays
MPSQSTHTSSSLSSSTAPILPCSSAAALFRSVMAAVATETPFHVLAVDDSLPDRKLIERLLKTSSFQVTTVDSGSKALQFLGLHDQDSTVPPVHTHQLDVAANQDVAVNLIITDYCMPGMTGYDLLKKIKESSSLRDIPVVIMSSENIPSRINRCLEEGADEFFLKPVRLSDMNKLKPHILKSRCNQEQHQQSDSHSGERRNPTISSSDSINNRKRKGAGTEEILPQLANRSRHS

SEQ ID NO: 448 - protein, 157 aa, Zea mays
MAAAATATPAVAPEAGDRKAVAPPVDAVDLELELEEKHVLAVDDSSVDRAVIAKILRSSKYRVTTVDSATRALELLALGLVPDVNMIITDYWMPGMTGYELLKHVKESSALRAIPVVIMSSENVPTRISRCLEEGAEDFLLKPVRPADVSRLCSRIR

SEQ ID NO: 449 - protein, 517 aa, Zea mays
MVGGGEGDRVGGGVGVGGGQQFVDRSKVRILLCDGDASSSREVLRLLCNCSYHVTCAKSPRQVINILNYEGGEIDIILAEVDLPVSKCFKMLKYIARNKDLRHIPIIMMSNRDEVSVVVKCLRLGAAEYLVKPLRTNELLNLWTHVWRRRRMLGLPEKNFFNDNFELVLSEPSDANTNSATLLSDETDDRPKENTNQETGTSNQLEYESNPSVAERDQRDKIGAPGSALDASQSSTPGRMFSRPIKTNLKVAESSAFLAYVKSSTPATSSFDSGLQRGDSRLDSLDNHGNCSSATDRSDTGTDVNIRNKEAFEMPVQYPMVCFSSSSMHMERSNEGHNDTSGTPPAYHFPFYYPGMVEHNMALSSVQNFQANINSAQAHTPPAMLHQYNVFSQCHSLPMISPFQFNTSGMSMHSSHLPTQNVWSSASSTPTPDETCNRSERRAAALAKFRQKRKERCFDKKVRYVNRKKLAETRLRVRGQFVRHASNMDIISTGDDISEDEDDDPTSREVDMISSPE

SEQ ID NO: 450 - protein, 181 aa, Zea mays
  unsure (1)..(181): unsure at all Xaa locations
PTRPPTRPAPHGTPGAESDEEIRRXVPEMGGASASASSGAGADERPKGEDGKQXAGGGGGAAXAGGKKRGRTAGDKEQNRLKRLLRNHVSAQQARERKKAYLTELEAKAKGLELRNAELEQRVSTLQNENNTLRQVIDVSGKEFKFTWASGRGELCDIYEERQSGEDGNGLLLECGSTWRK

SEQ ID NO: 451 - protein, 545 aa, Zea mays
MPIKFALENMSTQASNRSYRYPDRTQLPYHNGNPMHVGGNGNYCVQQNHDDVNYISSDDGSQSSSSRVQDFQAQFCTLDSSSANCVYPAHSSTSSQSISGSPLSQQESHSDHAYGSSPSASCITQVPTWTLKDLENVMLGPDSDIGSPDSSFLLDTALHGNNWRELLGIQTGDLRQVIVACGKAVDENAVYMDALMSELREMVSVSGEPMQRLGAYMLEGLIARLSFTGHALYKSLKCKEPVATSSELLSYMHLLYEICPFFKFGYMSANGAIAEAVKGEDIIHIIDFQIAQGSQWMTMIQALASRPGRRPYLRITGIDDSNSAHARGGGLDMVGQRLHRMAQSCGLPFEFNAVPAASHEVVFEDLCLRSGEAIVVNFAYQLHHTPDESVGIENHRDRILRMVKSLSPKVVTLVEQEANTNTAPFFLRYMETLDYYTAMFEAIDVACPRDDKKRISTEQHCVARDIVNLIACEGAERIERHEPFGKWRARLVMAGFRPYPLSPVVNRTIKTLLDSYHSHYRLEERDGILYLGWKNRKLVVSSAWC

SEQ ID NO: 452 - protein, 620 aa, Zea mays
NPLPCYHFDLEQAHSSCCRLAAVAAYMDTLFRLVSLQASEQQQQQQSASYNSRSTTSSGSRSSSHQTNASYNYYYHSNSSGGGGGGQYYYGQQHPQQHQHQQYYLEPYQQEECGNTHHLYMDEDFSSSSSSRQHFHSHGAVVQPPTSSTATPTAPTPSLSTSSTAAGAAHALFEAADLSFPPDLNLDFSSPASSSGGGAASSAAVGGGGGGRWASQLLLECARAVAGRDSQRVQQLMWMLNELASPYGDVEQKLASYFLQGLFARLTASGPRTLRTLAAASDRNTSFDSTRRTALRFQELSPWSSFGHVAANGAILESFLEAAAASPEPQRLHILDLSNTFCTQWPTLLEALATRSADDTPHLSITTVVSSAPSAPTAAVQRVMREIGQRMEKFARLMGVPFSFRAVHHAGDLAGLDLDALDLRDGGATTALAINCVNSLRGVVPGGARRRDAFAASLRRLDPRVVTVVEEEADLVAFDPGAPEESGDTEAAFLKVFGEGLRFFSAYMDSLEESFPKTSNERLALERGAGRAIVDLVSCPASESMERRETAASWARRMRSSGFSPVAFSEDVADDVRSLLRRYREGWSMRDAGLDDSAAGAGVFLAWKEQPLVWASAWRP

SEQ ID NO: 453 - protein, 380 aa, Zea mays
MASVAELKEKHAAATASVNSLRERLRQRRETLLDTDVARYSKSQGRVPVSFNPTDLVCCRTLQGHSGKVYSLDWTPEKNWIVSASQDGRLIVWNALTSQKTHAIKLHCPWVMACAFAPNGQSVACGGLDSACSIFNLNSQADRDGNMPVSRILTGHKGYVSSCQYVPDQETRLITSSGDQTCVLWDVTTGQRISIFGGEFPSGHTADVQSVSINSSNTNMFVSGSCDTTVRLWDIRIASRAVRTYHGHEDDVNSVKFFPDGHRFGTGSDDGTCRLFDMRTGHQLQVYSREPDRNSNELPTVTSIAFSISGRLLFAGYSNGDCYVWDTLLAEVVLNLGNLQNSHDGRISCLGMSSDGSALCTGSWDKNLKIWAFSGHRKIV

SEQ ID NO: 454 - protein, 259 aa, Glycine max
MSVEKERETQVYLAKLAEQAERYEEMVECMKKVAKLDLDLTVEERNLLSVGYKNVIGARRASWRIMSSIEQKEESKGNEHNVKLIKSYCQKVEEELSKICGDILTIIDQHLIPSSGSAEASVFYYKMKGDYFRYLAEFKTDQERKEAAEQSLKGYEAASATANTDLPSTHPIRLGLALNFSVFYYEIMNSPERACHLAKQAFDEAIAELDTLSEESYKDSTLIMQLLRDNLTLWTSDLPEDGGEDNIKAEEAKPSEPEH

SEQ ID NO: 455 - protein, 261 aa, Glycine max
MTASKDRENFVYIAKLAEQAERYEEMVESMKNVANLDVELTVEERNLLSVGYKNVIGARRASWRILSSIEQKEETKGNELNAKRIKEYRQKVELELSNICNDVMRVIDEHLIPSAAAGESTVFYYKMKGDYYRYLAEFKSGNEKKEAADQSMKAYESATAAAEADLPPTHPIRLGLALNFSVFYYEILNSPERACHLAKQAFDEAISELDTLNEESYKDSTLIMQLLRDNLTLWTSDIPEDGEDAQKVNGTAKLGGGEDAE

SEQ ID NO: 456 - protein, 262 aa, Glycine max
MAASAPTPREEFVYMAKLAEQAERYEEMVEFMEKVSASAESEELTVEERNLLSVAYKNVIGARRASWRIISSIEQKEESRGNEDHVAVIRDYRSKIEAELSNICDGILKLLDTRLVPSAASGDSKVFYLKMKGDYHRYLAEFKTGADRKEAAESTLSAYKAAQDIANTELPPTHPIRLGLALNFSVFYYEILNSPDRACSLAKQAFDEAIAELDTLGEESYKDSTLIMQLLRDNLTLWTSDMQDDGADEIKEAAPKGDGEQN

SEQ ID NO: 457 - protein, 708 aa, Oryza sativa
MPFSYAAAASGSASSSRKPVPVAAAAARRPAPSPAAAAAPAPSPSNPSAVSDSDPSSYSSSGEETDLTASDPAAASVISSYLSVAGDGADLSKVGIFLSSAARRRSPPCLICFDPIRPSDPVWSCSASCFALLHLHCIQSWAHQSSSAAPSPTWGCPKCRFPYPKSQTPTSYLCFCSKTVDPAPDPWILPHSCGDVCGRRLNADRDSGCEHNCLLLCHPGPCPPCPAIVPNAMCFCGSHRETRRCSHQRYSCSGKCNKRLGCGIHRCPVDCHDGPCPPCAVRGKHKCECGETMEERLCSERVFQCKRECGGMLQCGKHSCERGCHAGKCGGCPLQGRRTCPCGKKDYPSLDCDAEAATCGSTCEKVLGCGRHKCPERCHRGSCVETCRLVITKSCRCGGLKKEVPCYQELTCERKCQRLRNCGRHACRRRCCEGDCAPCPEPHKCHYGACPPCKLICGEELSCGHRCKLRCHGPIAPPNPEFTLKPIKRKKGKHIDSTPGTPCPPCQEVVLVPCFGHHLGQERAILCSKRRQFPCQNLCENYRIVPICAQKYVTLVNVRCACNNLKKEWICQDVLKEYRQSGRDPKQIPKNQYAVGLLACGEDCVKKVKAADSELHLRKIQEIKTPAVEVENVPKRRKRRNRGQESVESSKFQEIKAVALKFLLVIFLCIIVVAGLYLLWKGVYRLSDWMNDMEEQRARQRHLKPGRL

SEQ ID NO: 458 - protein, 379 aa, Oryza sativa
MVEVEEVSNKMQVQMRLHPAAAAEEEDADLPLPALFDKASHLHSLASSSSLDQEGIRKGVDLLRRCDEMVSKVGLFSSNETKDDISTANLKYLLVPYYLGEMTERVAQEDRIPVLKASQDHLKEFISICEALELISEDELEISRQKNLIPWQIEEHRRLHGSSAKRLQKQSSRIKERKERRRRHESSCLSAPIELGGDLLRMMEKEREGMVSYYLIGSIEGFDLLDMLKKEEEIVPAVKEGKRRMVMHLLVKCLMNVQKGLKHGTIMLPTVHHTPNQLIQSLVQLTSERERMAAQVFQPSYRLPTMSIEEAGLREMKMMEKWQERTAKMIQESNSAWHKDGSRSAQEDEDAEEEKARGWDDWKDDNPRGAGNKKLTPCG

SEQ ID NO: 459 - protein, 267 aa, Saccharomyces cerevisiae
MSTSREDSVYLAKLAEQAERYEEMVENMKTVASSGQELSVEERNLLSVAYKNVIGARRASWRIVSSIEQKEESKEKSEHQVELICSYRSKIETELTKISDDILSVLDSHLIPSATTGESKVFYYKMKGDYHRYLAEFSSGDAREKATNASLEAYKTASEIATTELPPTHPIRLGLALNFSVFYYEIQNSPDKACHLRKQAFDDAIAELDTLSEESYKDSTLIMQLLRDNLTLWTSDMSESGQAEDQQQQQQHQQQQPPAAAEGEAPK

SEQ ID NO: 460 - protein, 406 aa, Oryza sativa
MAAAATTSSHLLLLSRQQAAASLQCGLSFRRQPGRLAGGSSAPSVRCMAAVDTASAPAATEASKKSSYEITTLTTWLLKQEQAGTIDGEMTIVLASISTACKQIASLVQRAPISNLTGVQGAVNVQGEDQKKLDVVSNEVFSNCLKSSGRTGVIASEEEDVPVAVEESYSGNYIVVFDPLDGSSNIDAAVSTGSIFGIYSPNDECLADIADDQNLDQVEQRCIVSVCQPGSNLLAAGYCMYSSSVIFVLTIGTGVYVFTLDPMYGEFVLTQEKVQIPKAGKIYAFNEGNYALWDDKLKSYMDSLKEPGPSGKPYSARYIGSLVGDFHRTLLYGGIYGYPRDQKSKNGKLRLLYECAPMSFIVEQAGGKGSDGHQRILDIMPTEIHQRVPLYIGSVEEVEKVEKFLA

SEQ ID NO: 461 - protein, 363 aa, Escherichia coli
FAGAIHLSATLRLFVKIVAVALLHKHCRESFMKTLGEFIVEKQHEFSHATGELTALLSAIKLGAKIIHRDINKAGLVDILGASGAENVQGEVQQKLDLFANEKLKAALKARDIVAGIASEEEDEIVVFEGCEHAKYVVLMDPLDGSSNIDVNVSVGTIFSIYRRVTPVGTPVTEEDFLQPGNKQVAAGYVVYGSSTMLVYTTGCGVHAFTYDPSLGVFCLCQERMRFPEKGKTYSINEGNYIKFPNGVKKYIKFCQEEDKSTNRPYTSRYIGSLVADFHRNLLKGGIYLYPSTASHPDGKLRLLYECNPMAFLAEQAGGKASDGKERILDIIPETLHQRRSFFVGNDHMVEDVERFIREFPDA

SEQ ID NO: 462 - protein, 388 aa, Synechocystis PCC6803
MDSTLGLEIIEVVEQAAIASAKWMGKGEKNTADQVAVEAMRERMNKIHMRGRIVIGEGERDDAPMLYIGEEVGICTREDAKSFCNPDELVEIDIAVDPCEGTNLVAYGQNGSMAVLAISEKGGLFAAPDFYMKKLAAPPAAKGHVDIDKSATENLKILSDCLNRSIEELVVVVMDRPRHKELIQEIRNAGARVRLISDGDVSAAISCAFSGTNIHALMGIGAAPEGVISAAAMRCLGGHFQGQLIYDPEVVKTGLIGESREGNLERLASMGIKNPDQVYNCEELACGETVLFAACGITPGTLMEGVRFFHGGVRTQSLVISSQSSTARFVDTVHMKGKPQSNPTALISLSATIPKKVKTWGNTSPFPLSPEVQTLGDLCFGWVIVTGV

SEQ ID NO: 463 - protein, 347 aa, Synechocystis PCC6803
MTVSEIHIPNSLLDRDCTTLSRHVLQQLNSFGADAQDLSAIMNRIALAGKLIARRLSRAGLMADVLGFTGETNVQGESVKKMDVFANDVFISVFKQSGLVCRLASEEMEKPYYIPENCPIGRYTLLYDPIDGSSNVDINLNVGSIFAIRQQEGDDLDGSASDLLANGDKQIAAGYILYGPSTILVYSLGSGVHSFILDPSLGEFILAQENIRIPNHGPIYSTNEGNFWQWDEALRDYTRYVHRHEGYTARYSGALVGDIHRILMQGGVFLYPGTEKNPDGKLRLLYETAPLAFLVEQAGGRASDGQKRLLDLIPSKLHQRTPAIIGSAEDVKLVESFISDHKQRQGN

SEQ ID NO: 464 - protein, 434 aa, Saccharomyces cerevisiae
MATLEELDAQTLPGDDELDQEILNLSTQELQTRAKLLDNEIRIFRSELQRLSHENNVMLEKIKDNKEKIKNNRQLPYLVANVVEVMDMNEIEDKENSESTTQGGNVNLDNTAVGKAAVVKTSSRQTVFLPMVGLVDPDKLKPNDLVGVNKDSYLILDTLPSEFDSRVKAMEVDEKPTETYSDVGGLDKQIEELVEAIVLPMKRADKFKDMGIRAPKGALMYGPPGTGKTLLARACAAQTNATFLKLAAPQLVQMYIGEGAKLVRDAFALAKEKAPTIIFIDELDAIGTKRFDSEKSGDREVQRTMLELLNQLDGFSSDDRVKVLAATNRVDVLDPALLRSGRLDRKIEFPLPSEDSRAQILQIHSRKMTTDDDINWQELARSTDEFNGAQLKAVTVEAGMIALRNGQSSVKHEDFVEGISEVQARKSKSVSFYA

SEQ ID NO: 465 - protein, 1729 aa, Saccharomyces cerevisiae
MVASTKRKRDEDFPLSREDSTKQPSTSSLVRNTEEVSFPRGGASALTPLELKQVANEAASDVLFGNESVKASEPASRPLKKKKTTKKSTSKDSEASSANSDEARAGLIEHVNFKTLKNGSSLLGQISAITKQDLCITFTDGISGYVNLTHISEEFTSILEDLDEDMDSDTDAADEKKSKVEDAEYESSDDEDEKLDKSNELPNLRRYFHIGQWLRCSVIKNTSLEPSTKKSKKKRIELTIEPSSVNIYADEDLVKSTSIQCAVKSIEDHGATLDVGLPGFTGFIAKKDFGNFEKLLPGAVFLGNITKKSDRSIVVNTDFSDKKNKITQISSIDAIIPGQIVDLLCESITKNGIAGKVFGLVSGVVNVSHLRTFSEEDLKHKFVIGSSIRCRIIACLENKSGDKVLILSNLPHILKLEDALRSTEGLDAFPIGYTFESCSIKGRDSEYLYLALDDDRLGKVHSSRVGEIENSENLSSRVLGYSPVDDIYQLSTDPKYLKLKYLRTNDIPIGELLPSCEITSVSSSGIELKIFNGQFKASVPPLHISDTRLVYPERKFKIGSKVKGRVISVNSRGNVHVTLKKSLVNIEDNELPLVSTYENAKNIKEKNEKTLATIQVFKPNGCIISFFGGLSGFLPNSEISEVFVKRPEEHLRLGQTVIVKLLDVDADRRRIIATCKVSNEQAAQQKDTIENIVPGRTIITVHVIEKTKDSVIVEIPDVGLRGVIYVGHLSDSRIEQNRAQLKKLRIGTELTGLVIDKDTRTRVFNMSLKSSLIKDAKKETLPLTYDDVKDLNKDVPMHAYIKSISDKGLFVAFNGKFIGLVLPSYAVDSRDIDISKAFYINQSVTVYLLRTDDKNQKFLLSLKAPKVKEEKKKVESNIEDPVDSSIKSWDDLSIGSIVKAKIKSVKKNQLNVILAANLHGRVDIAEVFDTYEEITDKKQPLSNYKKDDVIKVKIIGNHDVKSHKFLPITHKISKASVLELSMKPSELKSKEVHTKSLEEINIGQELTGFVNNSSGNHLWLTISPVLKARISLLDLADNDSNFSENIESVFPLGSALQVKVASIDREHGFVNAIGKSHVDINMSTIKVGDELPGRVLKIAEKYVLLDLGNKVTGISFITDALNDFSLTLKEAFEDKINNVIPTTVLSVDEQNKKIELSLRPATAKTRSIKSHEDLKQGEIVDGIVKNVNDKGIFVYLSRKVEAFVPVSKLSDSYLKEWKKFYKPMQYVLGKVVTCDEDSRISLTLRESEINGDLKVLKTYSDIKAGDVFEGTIKSVTDFGVFVKLDNTVNVTGLAHITEIADKKPEDLSALFGVGDRVKAIVLKTNPEKKQISLSLKASHFSKEAELASTTTTTTTVDQLEKEDEDEVMADAGFNDSDSESDIGDQNTEVADRKPETSSDGLSLSAGFDWTASILDQAQEEEESDQDQEDFTENKKHKHKRRKENVVQDKTIDINTRAPESVADFERLLIGNPNSSVVWMNYMAFQLQLSEIEKARELAERALKTINFREEAEKLNIWIAMLNLENTFGTEETLEEVFSRACQYMDSYTIHTKLLGIYEISEKFDKAAELFKATAKKFGGEKVSIWVSWGDFLISHNEEQEARTILGNALKALPKRNHIEVVRKFAQLEFAKGDPERGRSLFEGLVADAPKRIDLWNVYVDQEVKAKDKKKVEDLFERIITKKITRKQAKFFFNKWLQFEESEGDEKTIEYVKAKATEYVASHESQKADE

SEQ ID NO: 466 - protein, 995 aa, Oryza sativa
MGAANFAHSLADKPKQMPERLANTIFTSCASTLPKCSPSIDVLHIGHIKEHFSAEVIWHHKHYGQILPGDAYQNDSSQPSTSGSSSSLSAVWDQTTCSSAMRTLPMDSFSTVNGQNLSTNNKSLYPTTGQGPLLQQYIECEMKQETWSRSLEQSDQSNITTGNRDLYHAQIHPYINGEHKRDRCIQMKEKLGHTSDHEGFSREKSSNLSNHFMHHQQGFMTNYGACSPVSKTVDRAEQTSNSTVSKPTSPASDGSSGKHYPAKRLKVDVPHLVHVNEMEASKEQQPAANETYASAETVQSEVTNSPTKSPCCTSLGDNIACTDNVHGMDMVRLSGSAVQTEEEFRRENSDIEMKDAKVDLLDQTLSGDSLRARKRRGASVLYALTSEELKDHLCTLNHDTSQSKVPTEELLSVEGLPDQNTCNLCGMERLLFEPPPRFCALCFKIINSTGSYYVEVENGNDKSSICGRCHHLSSAKAKYQKRFSYAETDAEAEWWVQCDKCKAWQHQICALFNPKIVDPEAEYTCAKCFLKEKDNEDVDSLEPSTILGARELPRTRLSDHIEQRLSERLVQERQQRAIASGKSVDEVVPGVEGLTVRVVSSADRTLQVQPRFKDFFKKEQYPGEFPYKSKAILLFQKNEGVDVCLFAMYVQEYGSACPSPNQRHVYLAYIDSVKYFRPEIKSASGEALRTFVYHEILIGYLDFCKKRGFVSCSIWTCPSTKRDDYVLYCHPTIQKMPKSDKLRSWYQNLVKKAVKEGVVVERNTLYDFFLQPTNECKTNISAAWLPYCDNDFWPGEAERLLEKKDDDTSQKKETQLGRLLRVAKRDDRKGNLEDILLVHKLGERLRTMKEDFLMLCLQQFCKHCHHPIVSGSSWVCTSCKNFFLCERCYAEELNTPLKDRHPATTKQKHAFERIEEEPLPETDDVDPTMESKNCSSMVYDVIPVPVVEEVAICVYSCGNCCSRTHCFVTMQTVQLPDAGKVCITRNIDLPSGVVK

SEQ ID NO: 467 - protein, 833 aa, Oryza sativa
MVVVDASEFGAEGFDPKRWINAALDARHPSEPLDRFLADAEERLRSAADDAAAALERDSADALRRVPLACRDALRLRDDAVSLRSHLASVLQSLSQAEGSSAESITALARIDTVKQRMEAAYATLQDAAGLAQLSQSVEDVFSSGDLPKAAETLATMRHCLSAVGEVAEFANVRKQLEVLEERLDDMVQPRLVDALSNRKVDAVQDLRGILIRIGRFKSLEVQYTKIHVKPLKKLWEDFDLKQRAKRVEMEKYGGESINSLSFASWLPNFYDETLLYLEQEWKWCLTAFPEEYKSLVPKVLVETMSELNSSFVSRVNLATGDAVPETRSVAKGILDVLSGDLPKSTKLQNKHLGALIDLHNMTGTFARNIQHLFSESDLLVLLNTLKAIYSPYETFKARYGQMERALLSAEMAGIDIRGAIARGVGAQGIELSETVRRMEESIPQIIVLLEAAVERCISLTGGSEADELVLALDDIMLQYISNLQETLKSLRIVCGVDNTAHSDSSKKEAGLEKKEAQRLVDVSEEEEWSIVQGALQILTVADCLTSRTSVFEASLRATLARIGTNFSISGFGSSLDKSTAANGDENAEVPITGRAALDIAAIRLTDLPDKSKKLFTVLEQANNISVIQSKDPRFHALPLTSQRVAAFSDTVNELVYDVLISKVRQRLNEVARLPIWSSVEEPGGLPLPSFSAYPQAYVTSVGEYLLTLPQQLEPLAEGISGGEAGNEEAQFFATEWIFKVAEGATALFMEQLRGIHYITDRGAQQLAADIEYLSNVLSALSMPIPPFLATFHTCISTPRDQVRDLIKSDGGSQLDLPTAHLVCKIRRISSSD

SEQ ID NO: 468 - protein, 243 aa, Zea mays
MASADLLRKEEEFYSSLFDSAKGDGVKSRSQVIERKIESLEDMATKVSNRRSRRWLNDRLLIELVPRLHVEEIKGLFAPPPWGEELPLSAFCRTSVSDWEAFRSIDMDAEARLMQHMKRSSEKQRTHVDEDELIALNAWRRIGRQTREAIKKKFLPDLLQIYEEQVRAFIEGTGDSDVLVLNVQDPFQRLLLHGVCEFYNVTSMTTSSVRDGKPWKSTTIKKRHVTGLPPRITLVSFLRMRKN

SEQ ID NO: 469 - protein, 201 aa, Zea mays
MSRHPEVKWAQRIDKVYITVQLPDAKDAKVNLEPDGVFTFSGSVGTNLYELKLDLNDKVNVEASKISVGVRSIFCIVEKAEAKWWKKLVRDDQRAPHFVKVDWDKWVDEDDDGADVNLDGMDFSNFGGMGGMGGMGGMGDMAGLGGLGGMGGMGGMGGMGMDDFEDDSDEEEVSKPQAAGHAAEAEKTESAEAKTESAQSS

SEQ ID NO: 470 - protein, 553 aa, Zea mays
MDEDFEMPPAGADEMMGDDEMGDFGGDEGPVMKVGEEKEVGKEGLKKKLLKEGEGWETPEVGDEVEVHYTGTLLDGTKFDSSRDRGEPFKFKLGQGQVIKGWDQGIKTMKKGENAIFTIPPELAYGASGSPPTIPPNATLQFDVELLSWTSVKDICKDGGIFKKILKEGEKWENPKDPDEVLVKYEARLEDGTVVSKSEGVEFTVKDGYFCPALAKAVKTMKKAEKVLLTVKPQYGFGEKGRPAAGEEGAVPPNASLLIDLELISWKTVTEIGDDKKILKKVLKEGEGYERPNEGAVVEVKIIGKLQDGAVFTKKGHDEEPFKFKTDEEEVIAGLDRAVLNMKKGEVALVTIPPEYAFGSTESKQDLAVVPPNSTVIYEVELISFVKDKESWDLNNEEKIEAAGKKKEEGNALFKSGKYARASKRYEKAAKYIEYDTSFSEDEKKQSKQLKISCNLNNAACKLKLKDYKEAAKLCTKVLELDSQNVKALYRRVQAYIQLADLELAEADIKKALEIDPDNRDVKLEYKILKEKIKEYNKKDAKFYSNMFAKMTK

SEQ ID NO: 471 - protein, 589 aa, Saccharomyces cerevisiae
MSLTADEYKQQGNAAFTAKDYDKAIELFTKAIEVSETPNHVLYSNRSACYTSLKKFSDALNDANECVKINPSWSKGYNRLGAAHLGLGDLDEAESNYKKALELDASNKAAKEGLDQVHRTQQARQAQPDLGLTQLFADPNLIENLKKNPKTSEMMKDPQLVAKLIGYKQNPQAIGQDLFTDPRLMTIMATLMGVDLNMDDINQSNSMPKEPETSKSTEQKKDAEPQSDSTTSKENSSKAPQKEESKESEPMEVDEDDSKIEADKEKAEGNKFYKARQFDEAIEHYNKAWELHKDITYLNNRAAAEYEKGEYETAISTLNDAVEQGREMRADYKVISKSFARIGNAYHKLGDLKKTIEYYQKSLTEHRTADILTKLRNAEKELKKAEAEAYVNPEKAEEARLEGKEYFTKSDWPNAVKAYTEMIKRAPEDARGYSNRAAALAKLMSFPEAIADCNKAIEKDPNFVRAYIRKATAQIAVKEYASALETLDAARTKDAEVNNGSSAREIDQLYYKASQQRFQPGTSNETPEETYQRAMKDPEVAAIMQDPVMQSILQQAQQNPAALQEHMKNPEVFKKIQTLIAAGIIRTGR

SEQ ID NO: 472 - protein, 385 aa, Saccharomyces cerevisiae
MSSVNANGGYTKPQKYVPGPGDPELPPQLSEFKDKTSDEILKEMNRMPFFMTKLDETDGAGGENVELEALKALAYEGEPHEIAENFKKQGNELYKAKRFKDARELYSKGLAVECEDKSINESLYANRAACELELKNYRRCIEDCSKALTINPKNVKCYYRTSKAFFQLNKLEEAKSAATFANQRIDPENKSILNMLSVIDRKEQELKAKEEKQQREAQERENKKIMLESAMTLRNITNIKTHSPVELLNEGKIRLEDPMDFESQLIYPALIMYPTQDEFDFVGEVSELTTVQELVDLVLEGPQERFKKEGKENFTPKKVLVFMETKAGGLIKAGKKLTFHDILKKESPDVPLFDNALKIYIVPKVESEGWISKWDKQKALERRSV

SEQ ID NO: 473 - protein, 229 aa, Zea mays
MAAARRLSLPLVLLVVLAVAGRAAAQDYDFFYLVLQWPGAYCDTKQSCCYPKSGKPAADFGIHGLWPNRDDGTYPQNCSPDNAFNPSKVSDLMSSLRAKWPTLACPSNDGLRFWGHEWEKHGTCAADVFDEHGYFQAALRLRDQLGVLGALTSAGVKPDGGYYTLSQIKGAIRQGTGFEPYVECNRDEAGNSQLYQLYFCVDAAGDSFVDCPVLPSGRPCGNRIEFPAF

SEQ ID NO: 474 - protein, 701 aa, Zea mays
MRLSSSLQDLPTFTRIDALERGSSVGSDLSSGRPKPVRMLQRDGAVASFSKERTPPSSPTNRKKCMRAAGCAIALILLVFFAYGSWRYFHVFLSEGRSEYYVVLDCGSTGTRVYVYEWHINHNDANAFPIVLKPLGNAPKKKSGKLTRLYQRMETEPGLSKLVHNESGLKKAIEPLLQMAEKLIPRHAHKHTPLFLYATAGVRKLPSADSEWLLDKSWDILNNSSFLCSRDRVKIISGMDEAYYGWIALNHNMDMLGTSSSKMTYGSLDLGGSSLQVTFENDKSVQDETSIRLSIGSVEHHLSAYSLTGYGLNDAFDKSVAHLVKRLGGVASNGKVQVKHPCLQTGFKEDYICSYCHPLKQDGSPSVGEKNSGKEKQGIAVELVGAPQWNECSALAKVTVNLSEWSSASPGLDCNIHPCALASNFPRPYGQFFAISGFYVVFKFFNLTADATLGDVQKRGQEFCEKPWKVAKSSVPPQPFVEQYCFRAPYISSLLREGLQIKDSQVIIGSGSITWTHGVALLEAGQALSSRLDIQGYRILHREINPNILIVLFLISIVLVICAILCVSNSIPRSFRKSYLPIHRHNSGGSSVLGMGLPFKHLLWNPISSGDGRTKTPLSPTVAGSDPHPFAGLGGSSVELMESSRQSLGAYHSYSVGSLGQMQFSSGVRNPSRGQTTLQSRRSQSREDLSSSLADIHFPKV

SEQ ID NO: 475 - protein, 467 aa, Saccharomyces cerevisiae
MFKSVVYSILAASLANAGTIPLGKLADVDKIGTQKDIFPFLGGAGPYYSFPGDYGISRDLPEGCEMKQLQMVGRHGERYPTVSLAKTIKSTWYKLSNYTRQFNGSLSFLNDDYEFFIRDDDDLEMETTFANSDDVLNPYTGEMNAKRHARDFLAQYGYMVENQTSFAVFTSNSKRCHDTAQYFIDGLGDQFNITLQTVSEAESAGANTLSACNSCPAWDYDANDDIVNEYDTTYLDDIAKRLNKENKGLNLTSTDASTLFSWCAFEVNAKGYSDVCDIFTKDELVHYSYYQDLHTYYHEGPGYDIIKSVGSNLFNASVKLLKQSEIQDQKVWLSFTHDTDILNFLTTAGIIDDKNNLTAEYVPFMGNTFHRSWYVPQGARVYTEKFQCSNDTYVRYVINDAVVPIETCSTGPGFSCEINDFYDYAEKRVAGTDFLKVCNVSSVSNSTELTFYWDWNTTHYNASLLRQ

SEQ ID NO: 476 - protein, 533 aa, Glycine max
MAGELGVLNALDVAKTQWYHFTAIVIAGMGFFTDAYDLFCISLVTKLLGRLYYTEPGAPKPGSLPPRVQASVTGVALCGTLAGQLFFGWLGDKMGRKRVYGLTLILMVVCSLASGLSFGSTPEGVMASLCFFRFWLGFGIGGDYPLSATIMSEYANKKTRGAFIAAVFAMQGFGILAGGVVALIVSYAYDQKYKLPSYEQNPEASLDPAFDYVWRIVLMFGAVPAALTYYWRMKMPETARYTALVAKNAKQAAADMSKVLQVELEAEEEKVKKLTENESNKYGLFTKEFVKRHGLHLLGTTTTWFLLDIAFYSQNLFQKDIFSAIGWIPPAKEMNAIHEVYKIARAQTLIALCSTVPGYWFTVALIDYMGRFAIQLLGFFFMTVFMFALAIPYDHWSEKENRIGFVVMYSFTFFFANFGPNSTTFVVPAEIFPARLRSTCHGISAAAGKAGAIVGAFGFLYAAQSKDPSKTDAGYPTGIGIKNSLIMLGVINFIGMLFTLLVPESKGKSLEELSGENGENDAEHAVSARTVPV

SEQ ID NO: 477 - protein, 541 aa, Zea mays
MARGGDGLQVLSALDAAKTQWYHFTAIIVAGMGFFTDAYDLFCISLVTKLLGRIYYTDTSKDNPGSLPPNVAAAVNGVAFCGTLAGQLFFGWLGDKLGRKSVYGMTLMLMVICSVASGLSFGHTPTGVMATLCFFRFWLGFGIGGDYPLSATIMSEYANKKTRGAFIAAVLAMQGFGILAGGIVTLVISAAFRAGYPAPAYRDDHFNSTVPQADYVWRIILILGAAPAMLTYYWRMKMPETARYTALVAKNAKQAAADMSRVLQTEIVDEQEKLDEMVTAESNTFGLFSREFARRHGLHLVGTSTTWFLLDIAFYSQNLFQKDIFTSINWIPKANTMSALEEVFRISRAQTLIALCGTVPGYWFTVALIDVVGRFAIQLLGFFMMTVFMLGLAIPYHHWTTPGNHIGFVVMYAFTFFFANFGPNSTTFIVPAEIFPARLRSTCHGISAASGKAGAIIGAFGFLYAAQNQDKSKADAGYPAGIGVRNSLFVLAASNLLGFILTFLVPESKGKSLEEMSGEADDAEDDAVGTRAVRPSGTQMV

SEQ ID NO: 478 - protein, 429 aa, Xylella fastidiosa
MSDLDKVTLNAGETSLVLPVLKPTLGNGCVDIAKLTKETGLFTYDSGFTATASCKSAITYIDGEKGVLLYRGYPIEQLAEHSSFLEVAYLLMNGELPRKDEFAKFDDEITHHTMMHESLKNFLGGFHYDAHPMAMLAASVASLSAFYHDTLDLNDLEQRRLAAIRLIAKVPTLAAAAHRYSIGWPIRYPRNNLGYVERFLHMMFEVPSEPLQLNPVVTKALDLLFILHADHEQNASTSTVRLVGSTGANPYASVAAGITALWGPAHGGANEAVLKMLEEIGDAKNVDLVIAKAKTKDKNSPFRLMGFGHRVYKHFDPRAKIIREMAHTVLGELGVNDPLLEVALKLEEAALKDDYFVQRKLYPNVDFYSGIIYKAINIPLEMFTVMFAIARTAGWVSHWLEQQVDPEMKISRPRQIYTGHGERDYKDAR

SEQ ID NO: 479 - protein, 427 aa, Escherichia coli
MADTKAKLTLNGDTAVELDVLKGTLGQDVIDIRTLGSKGVFTFDPGFTSTASCESKITFIDGDEGILLHRGFPIDQLATDSNYLEVCYILLNGEKPTQEQYDEFKTTVTRHTMIHEQITRLFHAFRRDSHPMAVMCGITGALAAFYHDSLDVNNPRHREIAAFRLLSKMPTMAAMCYKYSIGQPFVYPRNDLSYAGNFLNMMFSTPCEPYEVNPILERAMDRILILHADHEQNASTSTVRTAGSSGANPFACIAAGIASLWGPAHGGANEAALKMLEEISSVKHIPEFVRRAKDKNDSFRLMGFGHRVYKNYDPRATVMRETCHEVLKELGTKDDLLEVAMELENIALNDPYFIEKKLYPNVDFYSGIILKAMGIPSSMFTVIFAMARTVGWIAHWSEMHSDGMKIARPRQLYTGYEKRDFKSDIKR

SEQ ID NO: 480 - protein, 472 aa, Oryza sativa
MAFFRGLTAVSRLRSRVAQEATTLGGVRWLQMQSASDLDLKSQLQELIPEQQDRLKKLKSEHGKVQLGNITVDMVLGGMRGMTGMLWETSLLDPDEGIRFRGLSIPECQKVLPTAVKDGEPLPEGLLWLLLTGKVPTKEQVDALSKELASRSSVPGHVYKAIDALPVTAHPMTQFTTGVMALQVESEFQKAYDKGMSKSKFWEPTYEDCLNLIARLPAVASYVYRRIFKGGKTIAADNALDYAANFSHMLGFDDPKMLELMRLYITIHTDHEGGNVSAHTGHLVGSALSDPYLSFAAALNGLAGPLHGLANQEVLLWIKSVIGETGSDVTTDQLKEYVWKTLKSGKVVPGFGHGVLRKTDPRYTCQREFALKYLPEDPLFQLVSKLYEVVPPILTELGKVKNPWPNVDAHSGVLLNHFGLSEARYYTVLFGVSRSIGIGSQLIWDRALGLPLERPKSVTMEWLENHCKKVAA

SEQ ID NO: 481 - protein, 503 aa, Zea mays
MDRADPARGRLAVLSSHLRGAGAEEAAGLERSPVSAPAPGPRAGALAVVDGRTGKRHEVKVSEDGTVRATDFKKITTGKDDKGLKIYDPGYLNTAPVRSSICYIDGDEGILRYRGYPIEELAESSSFVEVAYLLMYGNLPTQSQLAGWEFAISQHSAVPQGLLDIIQSMPHDAHPMGVLASAMSTLSVFHPDANPALQGQDLYKSKQVRDKQIVRVLGKAPTIAAAAYLRLAGRPPVLPLNTLSYSENFLYMLDSLGDRTYKPNPRLARALDILFILHAEHEMNCSTAAVRHLASSGVDVFTALSGGVGALYGPLHGGANEAVLKMLNEIGSMENIPDFIVGVKNRKRKMSGFGHRVYKNYDPRAKVIRKLADEVFSIVGRDPLIEVAIALEKAALSDEYFIKRKLYPNVDFYSGLIYRAMGFPTEFFPVLFAIPRMGGWLAHWKESLDDPDTKIIRPQQVYTGFWLRHYTPVRERVLSSQSEELGQVATSNATRRRRAGSAL

SEQ ID NO: 482 - protein, 513 aa, Glycine max
MSKTTTSSEQTARNRLATLAAHLLPSDATSAAAILHPHRLSAPTGDLPPANLKGTLTVVDERTGKKYQIEVTPDGTVRASDFKKISSGKNDKGLKLYDPGYLNTAPVISRISYIDGDAGILRYRGYPIEDLAEKSTFTEVSYLILYGNLPSESQLAEWEFALSQHSAVPQGVLDMIESMPHDAHPMGMLVNAMSALSVFHPDANPALKGLDIYNSKQVRDKQIARVIGKITTIAAAINLRLAGRPPVLPSNKLSYTENFLYMLDSFGNRSYKPNPRLTRALDIIFVLHAEHEMNCSTSAVRHLSSSGVDVYTAIAGAVGALYGPLHGGANEAVLKMLSEIGTVENIPAFIEGVKARKRKLSGFGHRVYKNYDPRAKVLRKLTEEVFSIVGRDPLIEIAVALEKIALSDEYFIKRKLYPNVDFYSGLIYRAMGFQPEFFTVLFAIPRMAGYLAHWRESLDDPDTKIMRPQQVYVGEWLRHYAPINQRTASSNTDKLGQLAVSNASKRRLAGSGA

SEQ ID NO: 483 - protein, 252 aa, Zea mays
MMLRVSASPAAAVANHLSGGAAATTAPARVTAQRSGVSLSAAAAAGKGKEVLSGVVFQPFEEIKGELALVPQSPDRSLARHKFVDDCEAAINEQINVEYNASYAYHSLFAYFDRDNVALKGFAKFFKESSDEEREHAEKLMEYQNKRGGRVRLQSIVAPLTEFDHPEKGDALYAMELTLALEKLVNEKLHSLHGVATRCNDPQLIDFIESEFLEEQVEAINKVSKYVAQLRRVGNKGHGVWHFDQMLLQEGA

SEQ ID NO: 484 - protein, 265 aa, Zea mays
ANAHAPTRHIQMMLRVSPSPAAAVPTQLSGAPATPAPVVRVAAPRGVASPSAGAACRAAGKGKEVLSGVVFQPFEEIKGELALVPQSPDKSLARHKFVDDCEAALNEQINVEYNASYAYHSLFAYFDRDNVALKGFAKFFKESSDEEREHAEKLMEYQNKRGGRVRLQSIVTPLTEFDHPEKGDALYAMELALALEKLVNEKLHNLHGVATRCNDPQLTDFIESEFLEEQVEAINKISKYVAQLRRVGKGHGVWHFDQMLLEEEA

SEQ ID NO: 485 - protein, 171 aa, Escherichia coli
PLWSTIMLKPEMIEKLNEQMNLELYSSLLYQQMSAWCSYHTFEGAAAFLRRHAQEEMTHMQRLFDYLTDTGNLPRINTVESPFAEYSSLDELFQETYKHEQLITQKINELAHAAMTNQDYPTFNFLQWYVSEQHEEEKLFKSIIDKLSLAGKSGEGLYFIDKELSTLDTQN

SEQ ID NO: 486 - protein, 195 aa, Zea mays
MASHQDKASYQAGETKARTEEKTGQAVGATKDTAQHAKDRAADAAGHAAGKGQDAKEATKQKASDTGGYLGKKTDEAKHKAGETTEATKQKASETTEATKQKAGETTEAARQKAADAMEAAKQKAAEAGQYAKDTAVSGKDKSSGVIQQATEQVKSAAAGAKDAVMSTLGMGGDDKQGDANTNTNKDSSTITRDH

SEQ ID NO: 487 - protein, 364 aa, Glycine max
MVKSNENGSGSVSVPPFLKKCYDMVEDRNTDSIIRWSDGGDSFVISDITQFSVTLLPTYFKHNNFSSFIRQLNIYGFRKIDTDCWEFANENFVRGQKHLLKNIRRRKHPHSADQQKALPQQDNCDEPSQEAPYHGLWKEVENLKLDKNSLTQELVKLRQHQESAENKLLLLSDRLQGMEKHQQQMLSFLVMVVQSPGFMVQLLHPKENNWHLAESWNILDQDKQDDKPVASDGMIIKYKPPVGEKLKPVVPLSPGFEKQTEPELSAEGLKDLCVSSEFLKVLLDEKLSPLENHSPFLLPDLPDDGSWEQLFLGSPFMGNIQDSNKESEGHTNGGMEMEPTISETPNENSRTFESMIVEMEKTRE

SEQ ID NO: 488 - protein, 300 aa, Glycine max
MAPPLEHNGVSTSGDSQRSIPTPFLTKTYQLVDDHTIDDVISWNDSGSSFIVWNTTAFAKDLLPKYFKHNNFSSFVRQLNTYGFRKVVPDRWEFSNEYFRRGEKRLLCEIQRRKILSASPPPAGATATVAVPSPLPLSAIPTAKPIVSPSNSAEEQVLSSNSSPARAPVELLDENERLRKENILLTKELVKMRSLCNNIFNLMSNYANAQADGSSAAAAKRCSGEDAVEEMNPKLFGVAIGKKRAREEEGHGAKYDTALSLHQPFHADVKSEALDLPGRGENKKTPWLNQCHRANQRVCN

SEQ ID NO: 489 - protein, 368 aa, Glycine max
MGEAKGKEEEVLASVHSTVFKESESLDGKCVKIEGYDFNRGVNYPLLLSSMVTTGFQASNLGDAIQVVNQMLDWRLVDEPVAEDCSDQERDLEYRKSVTCKVFLGFTSNLISSGVRDTVRFLLQHRMVDVVVTTTGGIEEDLIKCLAPTYKGDFSLPGAYLRSKGLNRIGNLLVPNDNYCKFEDWIIPIFDQMLGEQNNENVLWTPSKLIARLGKEIKNESSYLYWAYKNNIPVFCPGLTDGSLGDMLYFHSFRNPGLIVDIVQDIRAMNGEAVHASPRKTGMIILGGGLPKHHICNANMMRNGADYAVFINTAQEYDGSDSGARPDEAVSWGKIRDSAQTVKVHCDATIAFPLLVAETFASKVKPPH

SEQ ID NO: 490 - protein, 310 aa, Chlamydomonas reinhardtii
MRSAVLQRGQARRVSCRVRADGSGVDSLPSTSASSSARPLIDRRQLLTGAAASVITFVGCPCPLCKPGEAKAAAWNYGEVAGPPTWKGVCATGKRQSPINIPLNTSAPKVDAEMGEFDFAYGSFEKCDVLNTGHGTMQVNFPAGNLAFIGNMELELLQFHFHAPSEHAMDGRRYAMEAHLVHKNKSTGNLAVLGIMLEPGGLIKNPALSTALEVAPEVPLAKKPSPKGINPVMLLPKKSKAGTRPFVHYPGSLTTPPCSEGVDWFVFMQPIKVPDSQILDFMRFVGDNKTYATNTRPLQLLNSRLVEYEL

SEQ ID NO: 491 - protein, 264 aa, Nostoc PCC7120
MSSTLYRRQLLKLLGMSVLGTSFSSCVTSPARAKTVNWGYIGKVGPEHWGELSPDFALCQIGRKQTPIDLQIADVKDVHSSSQDLLVTNYQPTALHLINNGKTVQVNYQPGSYLKYAHQKFELLQFHFHHFSEHRVDGKLYDMELHLVHRSKSGDLAVMGIFLQAGAFNPTLQIIWDATPQNQGTDKRIEDINIDASQFLPAQHRFFTYSGSLTTPPCSENVLWCVMATPIEASPAQIAKFSQMFPQNARPVQPLNDRLVIEAI

SEQ ID NO: 492 - protein, 358 aa, Chlamydomonas reinhardtii
MSSDAMTINESLMEVEHTPAVHKRILDILPGISGGVARVMIGQPFDTIKVRLQVLGQGTALAAKLPPSEVYKDSMDCIRKMVKSEGPLSFYKGTVAPLVGNMVLLGIHFPVFSAVRKQLEGDDHYSNFSHANVLLSGAAAGAAGSLISAPVELVRTKMQMQRRAALAGTVAAGAAASAGAEEFYKGSLDCFKQVMSKHGIKGLYRGFTSTILRDMQGYAWFFLGYEATVNHFLQNAGPGVHTKADLNYLQVMAAGVVAGFGLWGSMFPIDTIKSKLQADSFAKPQYSSTMDCLKKVLASEGQAGLWRGFSAAMYRAIPVNAGIFLAVEGTRQGIKWYEENVEHIYGGVIGPATPTAAQ

SEQ ID NO: 493 - protein, 467 aa, Synechococcus PCC7942
MTVWQTLTFAHYQPQQWGHSSFLHRLFGSLRAWRASSQLLVWSEALGGFLLAVVYGSAPFVPSSALGLGLAAIAAYWALLSLTDIDLRQATPIHWLVLLYWGVDALATGLSPVRAAALVGLAKLTLYLLVFALAARVLRNPRLRSLLFSVVVITSLFVSVYGLNQWIYGVEELATWVDRNSVADFTSRVYSYLGNPNLLAAYLVPTTAFSAAAIGVWRGWLPKLLAIAATGASSLCLILTYSRGGWLGFVAMIFVWALLGLYWFQPRLPAPWRRWLFPVVLGGLVAVLLVAVLGLEPLRVRVLSIFVGREDSSNNFRINVWLAVLQMIQDRPWLGIGPGNTAFNLVYPLYQQARFTALSAYSVPLEVAVEGGLLGLTAFAWLLLVTAVTAVRQVSRLRRDRNPQAFWLMASLAGLAGMLGHGLFDTVLYRPEASTLWWLCIGAIASFWQPQPSKQLPPEAEHSDEKM

SEQ ID NO: 494 - protein, 242 aa, Zea mays
  unsure (1)..(242): unsure at all Xaa locations
MMEGGSRADGRNPNQLRPFTCTGNPLHRAHGSARWAQGDTVVLAAVYGPKPGTRKGENPEKASIEVVWKPKTGQIGRQEREYEMTLKRTLQSICLLTVHPNTTTSVVLQVVGDDGSLMPCAINASCAALAFAGIPMKHLAVAISCGVMDNGVVILDTSRAEEQQARSFAHLVFPNSRKSVESKDPTQRDEESERGLITCITHGAMSEDXLFQLHREGCHGVLEDLGFHEEDTAEGGVQGCLT

SEQ ID NO: 495 - protein, 1286 aa, Saccharomyces cerevisiae
MSEGFSSSSIQELYQSLKEITNNADVELFEDRITKLDFESTDEPKHANDIIKDRFLRPSNALPWSLLDMVQDVPHTSSPEDCSGKLDYKELLKVPDPINRTSYQFKRTGLEGKISGYKEEVDLKEVANANASNSLSITRSINHNQNSVRGSTAQLPFTPGGIPMKSVKTDSEQNGSSTMANATKLLHKDGQGLFDIPEGMNRGIKPMDSPAENEDQNGQFKELKQLNEIDNELDIRIEANEAKLKEEEKSAKSISEEIMEEATEETTADNADDAEIDELLPIGIDFGRTKPVSKSVPVKKEWAHVVDLNHKIENFDELIPNPARSCPFELDTFQKEAVYHLEQGDSVFVAAHTSAGKTVVAEYAIAMAHRNMTKTIYTSPIKALSNQKFRDFKETFDDVNIGLITGDVQINPDANCLIMTTEILRSMLYRGADLIRDVEFVIFDEVHYVNDQDRGVVWEEVIIMLPQHVKFILLSATVPNTYEFANWIGRTKQKNIYVISTPKRPVPLEINIWAKKELIPVINQNSEFLEANFRKHKEILNGESAKGAPSKTDNGRGGSTARGGRGGSNTRDGRGGRGNSTRGGANRGGSRGAGAIGSNKRKFFTQDGPSKKTWPEIVNYLRKRELLPMVVFVFSKKRCEEYADWLEGINFCNNKEKSQIHMFIEKSITRLKKEDRDLPQILKTRSLLERGIAVHHGGLLPIVKELIEILFSKGFIKVLFATETFAMGLNLPTRTVIFSSIRKHDGNGLRELTPGEFTLAGRAGRRGLDSTGTVIVMAYNSPLSIATFKEVTMGVPTRLQSQFRLTYNMILNLLRIEALRVEEMIKYSFSENAKETLQPEHEKQIKVLQEELQTIEYKSCEICDNDIEKFLELMLAYKEATVNLMQEMVKSPSILHILKEGRLVAFRDPNDCLKLGFVFKVSLKDAVCVIMTFTKPYKLPNGEPNHLIYFPKADGYRRRNFPKFQKTDFYMEEVPVTAIEVITKRKFAAPLGKVIKKDVAALNEFNAETNNILDGKTLKEAINIEKQGLKIHQILLDRTNIRDEIFKLKSIKCPNLSQHIVPKFKAHVIKKKIEELYHLMSDQNLSLLPDYEKRLAVLKDTEFIDQNHNVLLKGRVACEINSGYELVLTELILDNFLGSFEPEEIVALLSVFVYEGKTREEEPPIVTPRLAKGKQRIEEIYKKMLCVFNTHQIPLTQDEAEFLDRKRFAMMNVVYEWARGLSFKEIMEMSPEAEGTVVRVITWLDEICREVKTASIIIGNSTLHMKMSRAQELIKRDIVFAASLYL

SEQ ID NO: 496 - protein, 1432 aa, Saccharomyces cerevisiae
MSDIKQLLKEAKQELTNRDYEETIEISEKVLKLDPDNYFAHIFLGKALSSLPASNNVSSNRNLERATNHYVSAAKLVPDNLLAWKGLFLLFRTTEVVPDILSYDEYFDLCGQYADALLKQEQSQVELINDIKLLKKTHPDCQKAFYQHLKPGSLMAETIGRHLSTPQDALLNLIKILSNIETTEIGKTLSQNRLKLKASDPDYQIKLNSFSWEIIKNSEIDQLYNQLVNILADDQKRSEIENQWLEYRIKVLKSMPLDVKKDFFTKVKEMVEDMVLVNHQSLLAWQKYFEWTDYEDLDNMDAPLIIKYFKKFPKDPLAMILYSWLSSKLSKYDIKSLESANKPPEGHKKTEKETDIKDVDETNEDEVKDRVEDEVKDRVEDEVKDQDEEAKEDEEEDLDDIEIGLLEEEVVTVLTENIVKCKNNILAHRILCQYYLLTKEYEAALPYIKNGISLIAYNIKDLGVHLPLTKREFSLDLATVYTYVDAPKDHNAALKLYDNILSGDFSNIQAKMGKGIIFIERKNWKDAMTLLTQVHEQSPNNLEVLSELSWSKAHMGYMDEALAGLDTVIKGIKGMDLRSIDFRALNLWRQAKVYIMKHASINDAKQENVKCAFKLLIQSIKILDTFAPGFSTLGDIYCHYYKDHLRAFKCYFKAFDLDAGDYTAAKYITETYASKPNWQAASSIASRLIKGEKAKAELRSNNWPFRVVGIAHLEKQEESDSIEWFQSALRVDPNDVESWVGLGQAYHACGRIEASIKVFDKAIQLRPSHTFAQYFKAISLCDVGEYLESLDILEKVCQEAATEESFQIGLVEVLMRCSLDLYSQGFLLKSVSIAKDTIERIKIIISELKCENQQVWIYLSQVLRLFIWIESKVDTLPVESLVSIFENSQFSGSEEIDSVDNIKIDTLLDSTTDDNVSIACKFLILASKYSVSDQKFTDIAGTVRASYWYNIGISELTAFITLKEPQYRDAAIFAFKKSIQLQSNISETWIGLGIATMDINFRVSQHCFIKATALEPKATNTWFNLAMLGLKKKDTEFAQQVLNKLQSLAPQDSSPWLGMALILEEQGDIIGSSKLFAHSFILSNGRSKAAQFMYAKNVLENHINNGDDERDIETVEKLTTASIALEQFFKKSPDSQFALQCALLTLERLHHYENANELANRLIGILEKKFEKTQDERELFNFAIIKGQFARIHLGLGNFELSIENADLSQGIISESSDEKSMKTKISNHICLGLSYFFLNDFDQTLNQFQELLSISKDSKHLVVLIAKVLYDVGESDTKEIALQELTEYIATSGADLLVTLTIAAMSILDDKREDLSIILEELKALPLSKQIIDKHKDAPYLIEEITKRLYRNDTGKQVWQRSAYFFPNNLKVWERLDKNIQRRIASNGQNKVTAEEMSKLYCESKNLRSIQRGMFLCPWNVTAVKALNECF

SEQ ID NO: 497 - protein, 292 aa, Saccharomyces cerevisiae
MACNFQFPEIAYPGKLICPQYGTENKDGEDIIFNYVPGPGTKLIQYEHNGRTLEAITATLVGTVRCEEEKKTDQEEEREGTDQSTEEEKSVDASPNDVTRRTVKNILVSVLPGTEKGRKTNKYANNDFANNLPKEGDIVLTRVTRLSLQRANVEILAVEDKPSPIDSGIGSNGSGIVAAGGGSGAATFSVSQASSDLGETFRGIIRSQDVRSTDRDRVKVIECFKPGDIVRAQVLSLGDGTNYYLTTARNDLGVVFARAANGAGGLMYATDWQMMTSPVTGATEKRKCAKPF

SEQ ID NO: 498 - protein, 246 aa, Saccharomyces cerevisiae
MSRLEIYSPEGLRLDGRRWNELRRFESSINTHPHAADGSSYMEQGNNKIITLVKGPKEPRLKSQMDTSKALLNVSVNITKFSKFERSKSSHKNERRVLEIQTSLVRMFEKNVMLNIYPRTVIDIEIHVLEQDGGIMGSLINGITLALIDAGISMFDYISGISVGLYDTTPLLDTNSLEENAMSTVTLGVVGKSEKLSLLLVEDKIPLDRLENVLAIGIAGAHRVRDLMDEELRKHAQKRVSNASAR

SEQ ID NO: 499 - protein, 747 aa, Saccharomyces cerevisiae
MSLLEQLARKRIEKSKGLLSADQSHSTSKSASLLERLHKNRETKDNNAETKRKDLKTLLAKDKVKRSDFTPNQHSVSLSLKLSALKKSNSDLEKQGKSVTLDSKENELPTKRKSPDDKLNLEESWKAIKEMNHYCFLKNDPCINQTDDFAFTNFIIKDKKNSLSTSIPLSSQNSSFLSLKKHNNELLGIFVPCNLPKTTRKVAIENFNRPSPDDIIQSAQLNAFNEKLENLNIKSVPKAEKKEPINLQTPPTESIDIHSFIATHPLNLTCLFLGDTNAGKSTLLGHLLYDLNEISMSSMRELQKKSSNLDPSSSNSFKVILDNTKTERENGFSMFKKVIQVENDLLPPSSTLTLIDTPGSIKYFNKETLNSILTFDPEVYVLVIDCNYDSWEKSLDGPNNQIYEILKVISYLNKNSACKKHLIILLNKADLISWDKHRLEMIQSELNYVLKENFQWTDAEFQFIPCSGLLGSNLNKTENITKSKYKSEFDSINYVPEWYEGPTFFSQLYLLVEHNMNKIETTLEEPFVGTILQSSVLQPIAEINYVSLKVLINSGYIQSGQTIEIHTQYEDFHYYGIVSRMKNSKQILETNTKNNISVGLNPDILEVLVKIHNTEDFTKKQFHIRKGDIIIHSRKTNTLSPNLPNTLKLLALRLIKLSIQTHALSDPVDLGSELLLYHNLTHNAVKLVKILGTNDISINPNQSLIVEVEIIEPDFALNVIDSKYITNNIVLTSIDHKVIAVGRIACQ

SEQ ID NO: 500 - protein, 826 aa, Oryza sativa
MGSDVGPSTARLNGSCRHGPRAGVPCRSWAGYSAAVLGPARLGPAHLARYTSRLQSSSPQRPKPPPPSPRYRQRRLPSLRPSSSGGRAACRPSPRDRQRRLPSAVPPPPASVAASHQRRPVGVPQAPARDHQSSPLPELARLPCVSRMPRKVVSGPDYDDEYNDDYDEYDEDYDDYGGTGHSDDIQHPTKEKESSKKSSSMVPVLWRCSMCMFDNHESMVYCEMCGVFRESFMKSAKDGSIKVHGIPSDFGTPSMPKSDSTKMPVNTRTTDFGGDPEIKNASISHEKVGSTQYASVGSSSGAGKKVKHIALPEDVPVERTAQLISDHFQLKEDQSSRATSSAQNEDVAQKLSSDIQKLGLEKNEVDTAKPYLPEEYKPEKWMFANEESGVLSQLNLAIVGHVDSGKSTLSGRLLHLLGRISKKDMHKNEKEAKEKGKGSFAYAWAMDESSEERERGVTMTVAVAYLETNKYRVVLLDSPGHKDFVPNMISGATQADAAILVVDACTGSFEAGMDGEGGKSVGQTKEHAQLIRSFGVEQLIVAVNKMDAIGYSKERFEFIKVQLGSFLRACNFKDSSVTWIPLSAVENQNLIKIPSDVRLTSWYQGFCLLDAIDSLQLPSRDVSKPLILPICDVIKSQSTGQLAAFGKLETGAIRIGSKVLISPCGEVATVKSIERDSNSCDIARAGDNVAVSLQGIDGSKLIAGGILCNPGFPVPVSNFLELRVLVLDVTIPILIGYQVEFHIHHVKEAARVTKIVALLDKAGKPSKTAPRFLKSKQNAVVQVTLDAPVCVEEFSKCRALGRAFLRSGGSTIAVGVVTRVLGQDQN

SEQ ID NO: 501 - protein, 243 aa, Synechocystis PCC6803
MTGKVYLVGAGPGDPEYLTLQAQQCLQSAEVLIYDALIDPRILDLVPANCDRIAVGKRGGAESTPQATINQLLVEHCQQGRKVIRLKSGDPFVFGRAASELDALERSGCDYAVLPGLSTALAAPLLAGIPITDPVLSRGFAVYTVHEPDALNWEALAQLETLILLMGSRHLLTIGHELIRHGRSPDSPVALIQWAGHPQQTVLESSLSRMAQQWGDQPLSPCVIVIGEVVRLRKYWAHYRYDG

SEQ ID NO: 502 - protein, 257 aa, Xylella fastidiosa
MSVTLVGAGAGDAGLLTLNALRALNEADIILYDRLVSDTVLQVARRDAEQIEVGKSATGHSVRQEDIHSLMLQHARAGQRVVRLKGGDPFVFGRGGEELEFLRTHNIPYEVIPGITAALACAAYAGIPLTHRDHAQSLCLITAHCQSSLDTLDWAALAQERQTLAFYMGVAGLPTIQQRLCEAGRAETTPFALIENGARAQQRVLTGTLKTLAHTAQTYAVRPPALLILGEVTTLAEHLHWFGTAPLSAPCPPALIL

SEQ ID NO: 503 - protein, 423 aa, Zea mays
MALAVRTPRFQPRPASISAPTTPASTSLAAGNARPRPCAGAAVRASPFTEATSSSRYRRDAWSYAADGSSNSASPSSAAAAAAGRRDDEIALQLPELRRLLDVLRASRGRGAEEGGGPGEVALVGTGPGDPELLTLKAVRAIEAADLVLYDRLVSNDVLDLVGEGARLLYVGKTAGYHSRTQEEIHELLLSFAEAGANVVRLKGGDPLVFGRGGEEMDFLQQQGIKVEVIPGITSASGIAAELGIPLTHRGVATSVRFLTGHSRNGGTDPLYVAGNAADPDTTLVVYMGLSTLPSLAPKLMKHGLPPDTPAVAVERGTTPQQRTVFASLKDLVDEVKSADLVSPTLIIIGKVVSLSPFWVESSEHDALKVQSSYANEADDNRFSWFLVTGQYLRNARSQIWEHRFDLVYTETSQEAWILNGGW

SEQ ID NO: 504 - protein, 491 aa, Zea mays
MAPSPPRRAALLLTTVLLLAAAGSTPGATAAGIFQVRRKFTAGVGGGAGANISALRAHDGTRHGRLLAAADLPLGGLGLPTDTGLYYTEIKLGTPPKHYYVQVDTGSDILWVNCITCEQCPHKSGLGLDLTLYDPKASSTGSMVMCDQAFCAATFGGKLPKCGANVPCEYSVTYGDGSSTIGSFVTDALQFDQVTRDGQTQPANASVIFGCGAQQGGDLGSSNQALDGILGFGEANTSMLSQLTTAGKVKKIFAHCLDTIKGGGIFSIGDVVQPKVKTTPLVADKPHYNVNLKTIDVGGTTLQLPAHIFEPGEKKGTIIDSGTTLTYLPELVFKEVMLAVFNKHQDITFHDVQGFLCFQYPGSVDDGFPTITFHFEDDLALHVYPHEYFFANGNDVYCVGFQNGASQSKDGKDIVLMGDLVLSNKLVIYDLENRVIGWTDYNCSSSIKIKDDKTGATSTVNSHDLSSGWKFHWHMSPVLLLVTTVCSYLIC

SEQ ID NO: 505 - protein, 510 aa, Zea mays
MAQLAVRSLLLSLLLVSPVVASPGIVKLNSSSTLFGIEFPPFNTAVAATGCDSKLVAADEAGDEQKQPASSSPSLQLRMKHRSAEGGRTRKESFLDKAEKDAVRIETMHRRAARSGVARMPASSSPRRALSERMVATVESGVAVGSGEYLIDVYVGTPPRRFRMIMDTGSDLNWLQCAPCLDCFEQRGPVFDPAASSSYRNVTCGDQRCGLVAPPEAPRACRRPAEDSCPYYYWYGDQSNTTGDLALESFTVNLTAPGASRRVDGVVFGCGHRNRGLFHGAAGLLGLGRGPLSFASQLRAVYGHTFSYCLVEHGSDAGSKVVFGEDYLVLAHPQLKYTAFAPTSSPADTFYYVKLKGVLVGGDLLNISSDTWDVGKDGSGGTIIDSGTTLSYFVEPAYQVIRQAFVDLMSRLYPLIPDFPVLNPCYNVSGVERPEVPELSLLFADGAVWDFPAENYFVRLDPDGIMCLAVRGTPRTGMSIIGNFQQQNFHVVYDLQNNRLGFAPRRCAEV

SEQ ID NO: 506 - protein, 478 aa, Zea mays
MSSPAVRRVVLLSSLLCAGALGFLPCSHAAAVAPGYVAVSAASFVPSSTCSSPDRVPPHRRNGTSAVLRLTHRHGPCAPSRASSLAAPSVADTLRADQRRAEYILRRVSGRAPQLWDSKAAAAVATVPASWGYDIGTLNYVVTASLGTPGVAQTMEVDTGSDLSWVQCKPCAAAPSCYSQKDPLFDPAQSSSYAAVPCGGPVCAGLGIYAASACSAAQCGYVVSYGDGSNTTGVYSSDTLTLSASSAVQGFFFGCGHAQSGLFNGVDGLLGLGREQPSLVEQTAGTYGGVFSYCLPTKPSTAGYLTLGVGGPSGAAPGFSTTQLLPSPNAPTYYVVMLTGISVGGQQLSVPASAFAGGTVVDTGTVVTRLPPTAYAALRSAFRSGMASYGYPTAPSNGILDTCYNFAGYGTVTLPNVALTFGSGATVTLGADGILSFGCLAFAPSGSDGGMAILGNVQQRSFEVRIDGTSVGFKPSSC

SEQ ID NO: 507 - protein, 268 aa, Glycine max
QGQGSSAGSQRQNKGFRTRRKGEDKSASKSPGIYNSATADNKTGSKVGEYADYGSQKAKETKDATKEKAGEYTDYASQKAKETKDKTMEKAGEYTDYASQKAKETKDKTMEKAGEYTDYASQKAKEAKDKTMEKGGEYKDYAAEKAKEGKDATVNKMGEYKDYTAEKAKEGKDTTLGKLGELKDSAADAAKRAVGYLSGKTEETKEKVSETAEATANKAAEMKEATREKAAGTAEAAKNKAAEVKDRAAETAEAAKNKTAETAEAAKQ

SEQ ID NO: 508 - protein, 226 aa, Glycine max
MASYQKHYDDQGRKVDEYGNVEKQTDEYGNPVHAASVTYVATRTAAGGYSDDINKQHDTTNAYGVDTGRQHSSGGYDGDTNKHHGTTGGYNDDTNRHHGTTGVYGIDTDRQQHGTTGGYAGDTGRQHGNIGGPYYGTNTADTGTGPRSGTTGGTGYGGTGGTDYGTTGGTGYGSGTGYGVNTGGAHTEAGYRKEHRQHDQSHGDQNEKKGIMDKIKEKLPGGHSDK

SEQ ID NO: 509 - protein, 167 aa, Zea mays
MEYGQQGQRGHGATGHVDQYGNPVGGVEHGTGGMRHGTGTGGMGQLGEHGGAGMGGGQFQPAREEHKTGGILHRSGSSSSSSSEDDGMGGRRKKGIKEKIKEKLPGGHKDDQHATATTGGAYGQQGHTGSAYGQQGHTGGAYATGTEGTGEKKGIMDKIKEKLPGQH

SEQ ID NO: 510 - protein, 290 aa, Zea mays
MEDERNTQQHQGGEAQQDAADQVDVKDRGLLDSLLGRKKHDDDQEKKKQTDELATGMEKVTVSEPEKHGHKEEEHEVVGEKKEGLLAKLHRTSSSSSSSSDEEEEAIDENGEIIKRKKKKMGLKEKLKEKLPGHKDGHHTAAPSPAPAPVETHAHHQEEAHRPHVVPTPAPPPPPHVHQHDHGVVVQDDVKTGTPPHAPEEEKKGLLDKIKEKLPGGHNKKPEAAAAAAPAPPVHAPAPAPQAENVSSPDGKEKKGLLGKIMDKIPGYHKSSAEEADHKADAAGEHRTSS

SEQ ID NO: 511 - protein, 168 aa, Saccharomyces cerevisiae
MSNLLNKFADKLHGNDHDERYEDDNDDQTRQQRHEKHQQREFRNQGSKADPYGEENQGNFPQRQQPQSNLGGNTQFGGNDFQQQTTDYTAGTGGGTYTQTYRETNTQGQLDDDEDDDFLTSGQQQKQGRTRGAQSNRYQSSNIGSGRRDLSGSGNDEYDDDSGNQGVW

SEQ ID NO: 512 - protein, 84 aa, Saccharomyces cerevisiae
MTRTNKWTEREGKADPKYFSHTGNYGESPNHIKKQGSGKGNWGKPGDEIDDLIDNGEIPPVFKKDRRGSNLQSHEQKFENVQKE

SEQ ID NO: 513 - protein, 159 aa, Saccharomyces cerevisiae
MSNMMNKFAEKLQGNDDSHQKGKNAKSSNKERDDMNMDMGMGHDQSKGMKMGHDQSGTKMNAGRGIANDWKTYEHENMYVFGALTKSSYFFNGLFMNCLCLCSLYSKSISAYFSEFSSTNIYKSYLRLPSVLYYVCMMHTMMPNQLDAVGIQSSESLLM

SEQ ID NO: 514 - protein, 128 aa, Saccharomyces cerevisiae
MSANDYYGGTAGEKSQYSRPSNPPPSSAHQNKTQERGYPPQQQQQYYQQQQQHPGYYNQQGYNQQGYNQQGYNQQGYNQQGYNQQGYNQQGHQQPVYVQQQPPQRGNEGCLAACLAALCICCTMDMLF

SEQ ID NO: 515 - protein, 109 aa, Saccharomyces cerevisiae
MSDAGRKGFGEKASEALKPDSQKSYAEQGKEYITDKADKVAGKVQPEDNKGVFQGVHDSAEKGKDNAEGQGESLADQARDYMGAAKSKLNDAVEYVSGRVHGEEDPTKK

SEQ ID NO: 516 - protein, 510 aa, Zea mays
AFKPTNLSNCTQSAIHCRGRSNLLRASSMASSDHGSTTAPKDVPGSYGLPLVGAVRDRLDFYYFQGQDKYFESRVERYGSTVVRMNVPPGPFMARDPRVVAVLDAKSFPVLFDMDKVEKKDLFTGTYMPSTSLTGGYRVCSYLDPSEPTHTKVKQLLFSLLLSRKDDVIPTFRSNFSSLLATVEAELAKGGKAEFNKLNDVTSFDFIGEAYFGVRPSATDLGKGGPTKAAKWLIWQLHPLVTLGLPMVLEEPLLHTFHLPPFLVKGDYRALYKYFSTVAKQALDTAEGLGLSREEACHNLLFATTFNSYGGLKVLFPGLLANVASGGEKLHERLVAEIRGAVADAGGKVTLAAVERMELAKSVVWESLRLDPPVKFQYGHAKKDLLVESHDAVFQVRKGEMLFGYQPCATKDPRVFGDTAGDFVPDRFLGEEGSKLLQYVYWSNGRETENPSVDNKQCPGKNFVVLVGRLLLVELFLRYDTFTAEVGKELLGTSVIFTGVTKATSGPGSE

SEQ ID NO: 517 - protein, 591 aa, Zea mays
MGGEAEGGERRLGRVLSFGIPDTALGLVMGYVEDPWDRDAISLVCRHWCRVDALSRKHVTVAMAYSTTPERLFRRFPCLESLKLKAKPRASMFNLISDDWGGSASPWIRQLSATFHFLKKLHLRRMIVSNEDINILVRAKAHMLVALKLDRCSGFSTPSIALVARSCRKLETLFLEESTIDEKENDEWIRELATSNSVLETLNFFLTDLRASPEYLTLLVRNCQRLKTLKISECFMPDLVSLFRTAQTLQEFAGGSFEEQGQPVASRNYENYYFPPSLHHLSLLYMGTNDMQILFPYATALKKLDLQFTFLSTEDHCQIVQRCSNLETLEVRDVIGDRGLQVVAQTCKKLHRLRVERGDDDQGGLEDEQGRISQVGLMAIAQGCPELTYWAIHVSDITNAALEAVGTCSKNLNDFRLVLLDREAHITELPLDNGVRALLRGCTKLRRFAFYVRPGALSDVGLGYVGEFSKSIRYMLLGNVGESDNGIIQLSKGCPSLQKLEVRGCLFSEHALALAALQLKSLRYLWVQGFRSSPTGTDIMAMVRPFWNIEYIVPDQDEPCPEHKRQILAYYSLAGRRTDCPPSVTLLYPAF

SEQ ID NO: 518 - protein, 598 aa, Zea mays
MSEEDEDQPPAKRPSPSPPADQVLDNVLETVLQFLDAPRDRSAASLVCRSWHSAESATRESVAVRNLLAVSATRTARRFPNARSLLLKGRPRFADFNLLPHGWDASAFRPWAAAVAAGAFPALTSLYLKRIPVTDADLDLLSRSLPASFRDLTLHLCDGFTSRGLASIASHCRGLRVLDVVECDMAEEQEVVDWVAAFPQEPSNLESLSFECYEPPVAFAALEALVERSPRLRRLGVNLHVSLGQLCRLMAHAPRLSHLGTGSFRPADGGEEGTGFGEVVSAFVAAGRARTLVSLSGFRDLAQEYLPTIAVVCAHLKSLDLSYSAVTPNQILMFIGQCYNLETLWVLDSVRDEGLDAVGISCKKLQSLRVLPLNAHEDADELVSEVGLTAISRGCPALRSILYFCQTMTNAAVVDMSRNCPELKVFRLCIMGRHQPDHATGEPMDEGFGAIVQNCSKLTRLSTSGQLTDRAFEYIGRHGKSLRTLSVAFAGNSDVALQYILQGCPKLEKLEIRDCPFGDAGLFAGMHHFYNMRFVWMSGCNLTLQGCKEVAQVLPRMVVELINGQSDENERNESVDILYMYRSLDGPREDVPPFVKIL

SEQ ID NO: 519 - protein, 616 aa, Zea mays
ISDEPAPRCSRFAPRSRPMGGEVPEPRRLSRALSFGCGGVPEEALHLVFGYMDDPRDREAASLVCRLWHRIDALSRKHVTVGFCYAVEPARLLARFPRLESLALKGRPRAAMYGLIPEDFGAYAAPWVAELAAPLDCLKALHLRRMTVTDEDIAVLVHARGHMLQALKLDKCSGFSTDALRLVARSCRSLRTLFLEECIIEDEGSEWLHELAVNNSVLVTLNFYMTELKVEPADLELLAKNCKSLISLKMGDCDLSDLIGFFQTSKALQEFAGGAFFEVGEYTKYEKVIFPPRLCFLGGLTFMGKNEMPVIFPYSTMLKKLDLQFTFLTTEDHCQLIAKCPNLSVLEVRNVIGDRGLEVVAATCKKLRRLRIERGDDDPGQEEQGGVSQIGLTAVAVGCRELEYIAAYVSDITNGALESIGTFCKNLYDFRLVLLDKQKKITDLPLDNGVRALLRNCVKLRRFAFYLRPGGLSDVGLGYIGLYSGNIQYMLLGNVGESDNGLIQFATGCTNLRKLELRGCCFSERALAVAVLQMPSLRYIWVQGYRASRTGQDLMLMARPYWNIEFAPPIPESAYRVMADGQPCVDTHAQVLAYYSLAGRRPDCPQWLVTLHPASL

SEQ ID NO: 520 - protein, 660 aa, Zea mays
MSREAQKLDCTAAGGGIGVLSLDLLGQVLEHLREPRDRKTCRLVSRAFERAEAAHRRALRVLRREPLPRLLRAFPALERLDLSACASLDDASLAAAVADAGGGLAGLRSVCLARANGVGWRGLEALVAACPKLAAVDLSHCVSAGDREAAALAAASELRDLRLDKCLAVTDMGLAKVAVGCPKLEKLSLKWCREISDIGIDLLAKKCPELRSLNISYLKVGNGSLGSISSLERLEELAMVCCSGIDDEGLELLSKGSDSLQSVDVSRCDHVTSEGLASLIDGRNFLQKLYAADCLHEIGQRFLSKLARLKETLTLLKLDGLEVSDSLLQAIGESCNKLVEIGLSKCSGVTDGGISSLVARCSDLRTIDLTCCNLITNNALDSIADNCKMLECLRLESCSLINEKGLKRIATCCPNLKEIDLTDCGVDDAALQHLAKCSELRILKLGLCSSISDRGIAFISSNCGKLVELDLYRCNSITDDGLAALANGCKRIKLLNLCYCNKITDTGLGHLGSLEELTNLELRCLVRVTGIGISSVAIGCKNLIELDLKRCYSVDDAGLWALARYALNLRQLTISYCQVTGLGLCHLLSSLRCLQDIKMVHLSWVSIEGFEMALRAACGRLKKLKMLCGLKTVLSPELLQMLQACGCRIRWVNKPLVYKD

SEQ ID NO: 521 - protein, 394 aa, Glycine max
MSDHLPREVLTEILSRLPVRSLLRFRSTSKSWKSLIDSQHLNWLHLTRSLTLASNTSLILRVDSDLYQTNFPTLDPPVSLNHPLMCYSNSITLLGSCNGLLCISNVADDIAFWNPSLRQHRILPYLPVPRRRHPDTTLFAARVCGFGFDHKTRDYKLVRISYFVDLHDRSFDSQVKLYTLRANAWKTLPSLPYALCCARTMGVFVGNSLHWVVTRKLEPDQPDLIIAFDLTHDIFRELPLPDTGGVDGGFEIDLALLGGSLCMTVNFHKTRIDVWVMREYNRRDSWCKVFTLEESREMRSLKCVRPLGYSSDGNKVLLEHDRKRLFWYDLEKKEVALVKIQGLPNLNEAMICLGTLVPPYFLPRQICRKPRALGCERPRKTRDDFLSQGFKLTL

SEQ ID NO: 522 - protein, 563 aa, Glycine max
MGQSVSSAAVASRRERDQGHRSVNSSKTRFTASVSPMAGYSSGAAEEGENHRVEAVADESTDYISDLPNECLASVFQFLSSADRSRCSLVCRRWLQIEGQSRHRLSLNAELDLFPAIPSLFSRFDSVTKLALKCDRRSVSIRDDALVLISQRCPNLTRLKLRACRELTDAGMEAFAKNCKGLKKLSCGSCTFGSKGMNAVLDNCAALEELSVKRLRGIADTAAAEPIGPGVAAASLKTVCLKELYNGQCFGTLILGAKNLKTLKLFRCSGDWDRLFQLLVDRVTKIVEVHLERLQISDVGLQAIANYSSLEILHLVKTPECSDIGLVAIADRCKLLRKLHIDGWKANRIGDEGLIAVAKGCPNLLELVLIGVNPTKASLEMLASNCQNLERLALCGSDSVGDPEISCIAAKCVALKKLCIKSCPVSDQGMEALGNGCPNLVKVKVKKCKGVTPEGGDWLRRTRGSVAVNLDTGEAELQEASASDGGAQDNGVEFPQMPAQIAAASSSTRSSSSRFALMSARISAAALRSTRSGSSRLGLLPTRISAASTFRRWSGGSTSARHG

SEQ ID NO: 523 - protein, 317 aa, Zea mays
MAATVSSFPVVNMEKLETEERATAMEVIRDGCENWGFFELLNHGISHELMDEVERLTKAHYATFREAKFQEFAARTLEAGEKGADVKDVDWESTFFVRHLPASNLADLPDVDDRYRQVMEQFASEIRKLSERLLDLLCENLGLEPGYLKAAFAGSDGPTFGTKVSAYPPCPRPDLVDGLRAHTDAGGIVLLFQDDQVSGLQLLRGGEWVDVPPMRHAIVANVGDQLEVITNGRYKSVMHRVLTRPDGNRMSVASFYNPGADAVIFPAPALVGAAEEDRAEAAYPSFVFEDYMNLYVRHKFEAKEPRFEAMKSAIATA

SEQ ID NO: 524 - protein, 487 aa, Oryza sativa
MVSQVVAEEKPQLLSKKAGCNSHGQDSSYFLGWQEYEKNPFDPVSNPSGIIQMGLAENQLSFDLLEEWLEKNPHALGLRREGGGASVFRELALFQDYHGLPAFKNALARFMSEQRGYKVVFDPSNIVLNAGATSANEALMFCLADHGDAFFIPTPYYPGFDRDLKWRTGAEIVPVHCASANGFRVTRAALDDAYRRAQKRRLRVKGVLITNPSNPLGTASPRADLETIVDFVAAKGIHLISDEIYAGTAFAEPPAGFVSALEVVAGRDGGGAGVSDRVHVVYSLSKDLGLPGFRVGAIYSANAAVVSAATKMSSFGLVSSQTQYLLAALLGDRDFTRSYVAENKRRIKERHDQLVDGLREIGIGCLPSNAGLFCWVDMSHLMRSRSFAGEMELWKKVVFEVGLNISPGSSCHCREPGWFRVCFANMSAKTLDVAMQRLRSFVDSATGGGDNAALRRAAVPVRSVSCPLAIKWALRLTPSIADRKAER

SEQ ID NO: 525 - protein, 359 aa, Synechocystis PCC6803
MRLEISSPQTKLPYPKTEELPFTLQELRNAIPADCFEPSVVRSLGYFFLDVGLIAGFYALAAYLDSWFFYPIFWLIQGTLFWSLFVVGHDCGHGSFSKSKTLNNWIGHLSHTPILVPYHGWRISHRTHHANTGNIDTDESWYPVSEQKYNQMAWYEKLLRFYLPLIAYPIYLFRRSPNRQGSHFMPGSPLFRPGEKAAVLTSTFALAAFVGFLGFLTWQFGWLFLLKFYVAPYLVFVVWLDLVTFLHHTEDNIPWYRGDDWYFLKGALSTIDRDYGFINPIHHDIGTHVAHHIFSNMPHYKLRRATEAIKPILGEYYRYSDEPIWQAFFKSYWACHFVPNQGSGVYYQSPSNGGYQKKP

SEQ ID NO: 526 - protein, 585 aa, Saccharomyces cerevisiae
MLHRHGSKQKNFENIAGKVVHDLAGLQLLSNDVQKSAVQSGHQGSNNMRDTSSQGMANKYSVPKKGLPADLSYQLIHNELTLDGNPHLNLASFVNTFTTDQARKLIDENLTKNLADNDEYPQLIELTQRCISMLAQLWHANPDEEPIGCATTGSSEAIMLGGLAMKKRWEHRMKNAGKDASKPNIIMSSACQVALEKFTRYFEVECRLVPVSHRSHHMLDPESLWDYVDENTIGCFVILGTTYTGHLENVEKVADVLSQIEAKHPDWSNTDIPIHADGASGGFIIPFGFEKEHMKAYGMERWGFNHPRVVSMNTSGHKFGLTTPGLGWVLWRDESLLADELRFKLKYLGGVEETFGLNFSRPGFQVVHQYFNFVSLGHSGYRTQFQNSLFVARAFSFELLNSSKLPGCFEIVSSIHESIENDSAPKSVKDYWEHPQAYKPGVPLVAFKLSKKFHEEYPEVPQAILSSLLRGRGWIIPNYPLPKATDGSDEKEVLRVVFRSEMKLDLAQLLIVDIESILTKLIHSYEKVCHHIELASEQTPERKSSFIYEMLLALASPQDDIPTPDEIEKKNKLKETTTRNYRGTC

SEQ ID NO: 527 - protein, 498 aa, Zea mays
HASSDAWVSMDYLAAAVPVTLALGVGAILLVLRWTYCRRRTSAEEARLPPGSRGLLFLGETLHYLAASSTPGVLPPFFQRRLERYGPIFRTNLVGEDLVVSLDAELNAHVLKQEERGFQIWYPPSFMRVFGADNITAKLGVLHRHMRTLVLRLFGHQTVRSVLLHDVQRSARDELRSWLGRPDVEVRTATSRMIFGVTANKLISHDDAASGGTLWRCFHDWTSGLLSFPVSIPGTTFYRCMQGRKKVMTMLKQQLVERRRNAAERETTEDFFDLVIDELNKPDPMMDESTALDLLFTMLFASHETTSMVLTVILKYLTDNPKALQELTEEHERILESRADPGSDLTWEEYRSMKFTSHVIHESLRLANIALAMFRKANQDVHINGYTIPKGSKIMMCALASHLNTEVYEDPSVFNPWRWKDIPEPVGTSKDFMAFGGGLRLCAGAEFSKMQMAMFLHYLVTNYSWKPVSGGTMLFYPGLQFPEGFHIQLLPKIPNVVP

SEQ ID NO: 528 - protein, 499 aa, Zea mays
MAFFLALVCILILLAIASYVQYTRWQKGKGRFGGHGRSAPLKLPPGSMGWPYLGETLQLYSQDPSFFFASKQKRYGEIFKTHLLGCPCVMLASPEAARFVLVTQAHLFKPTYPRSKERMIGPSALFFHQGDYHLRLRKLVQGALGPDALRALVPEVEAAVRSTLASWDAGHVRSTFHAMKTLSFDVGIVTIFGGRLDERRKAELRKNYSVVEKGYNSFPNSLPGTLHYKAMQARRRLHGVLCDIMRERRGQAQAAGTGLLGCLMRSRGDDGAPLLSDEQIADNVIGVLFAAQDTTASALTWIVKYLHDHPKLLEAVRAEQAAVREATGGGRQPLAWAHTKSMALTHRVILESLRMASIISFTFREAVADVEYKGFLIPKGWKVMPLFRNIHHSPDYFQDPHKFDPSRFQVAPRPSTFLPFGHGVHACPGNELAKLEMLVLIHHLVTGYRWQIVGSSDEVEYSPFPVPKHGLPVRLWRQNNPVDRKGRETDDDHVERIFI

SEQ ID NO: 529 - protein, 518 aa, Zea mays
MCPVRGGGCSWPASVVGSVTAALLLAAVIVRLFVPRACSSGIIKGRRQVGAGAAGGARLPAGSLGWPLLGETLAFIRAAYSPRPESFVEKRRVLYGKVFKSHLWGSPAVVSSDPEVSRAVLQADASAFVPWYPRSLMELMGQSSILVLGGGLQRRVHGLAGAFFKSPQLKAQVTLDMQRRVGRAMDMWGRRHRSMGDDDSGGMPVRVQNEAKSIVFEILVRALIGLEEGDKMQYLRQQFQEFIAGLISLPVKLPGTQLYRSLKAKKRMTKLIKTIIQEKRKKMMSEGDEDLRGGTHPRDMIDVLLGNGNDELSDELISDNMIDFMIPAEDSVPVLITLAVKYLSECPLALQQLEEENMELKRQKSGAGETLEWTDYMSLAFTQHVITETLRMGNIINGIMRKAVRDVEVRGHLVPKGWRVLVYFRAVHLDAAVHDDPHAFNPWRWKERPDVVAMSGFTPFGGGQRLCPGLDLARLEASIFLHHLVTNFRWVAEEDTVVNFPTVRLKRGMPIAVTPRTC

SEQ ID NO: 530 - protein, 503 aa, Zea mays
MDAGGPPPLFLLGAVLAAALGWLLVVWRAAAGRRRSASARLPPGSTGLPLIGETLRLIAAYKSPNPEPFIDERVARHGSGVFTTHVFGERTVFSADPAFNRLLLAAEGRAVSCSYPSSIATLLGPRSLLLTSGPAHKRLHSLTLTRLGRPASPPLLAHIDRLVLATMRGWDRPGAGAMRLLDEAKKITFNLTVWQLVSIEPGPWTESVRREYVKLVDGFFSIPFPFASLLPFTVYGQALKARKKVAGALREVVRKRMDDKAEDDCGASKKNGEKKDMVEELLEAEGGSFSVEEMVDFCLSLLVAGYETTSVLMTLAVKFLTETPTALAQLKEEHDSIRGVKGKGQALEWSDYKSMPFTQCVISETLRVANLISGVFRRANTDIHFKGHVIPKGCKIFASFRAVHLSLDHYENARTFDPWRWQQGKSKLQSAEGASLFTPFGGGPRLCPGYELARVVVSVFLHHLVTRFSWEEAEEDRIVFFPTTRTLKGYPIILRRRPDCDDL

SEQ ID NO: 531 - protein, 519 aa, Zea mays
MLGVGMAAAVLLGAVALVLADAAARRAHWWYREAAEAVLVGAVALVVVDAAARRAHGWYREAALGSARRARLPPGEMGWPLVGGMWAFLRAFKSGKPDAFIASFVRRFGRTGVYRSFMFSSPTVLVTTAEGCKQVLMDDDAFVTGWPKATVALVGPRSFVAMPYDEHRRIRKLTAAPINGFDALTGYLPFIDRTVTSSLRAWADHGGSVEFLTELRRMTFKIIVQIFLGGADQATTRALERSYTELNYGMRAMAINLPGFAYRGALRARRRLVAVLQGVLDERRAARAKGVSGGGVDMMDRLIEAQDERGRRLDDDEIIDVLVMYLNAGHESSGHITMWATVFLQENPDMFARAKAEQEAIMRSIPSSQQGLTLRDFRKMEYLSQVIDETLRLVNISFVSFRQATRDVFVNGYLIPKGWKVQLWYRSVHMDPQVYPDPTKFDPSRWEGHSPRAGTFLAFGLGARLCPGNDLAKLEISVFLHHFLLGYKLARTNPRCRVRYLPHPRPVDNCLAKITRVGS

SEQ ID NO: 532 - protein, 470 aa, Zea mays
MGAFLLFVCLLAPVVVLACAVRGRKRRASSAAAGGKALPLPPGSMGWPYVGETFQLYSSKNPNVFFARKQNRYGPIFKTHILGCPCVMVSSPEAARFVLVTQAHLFKPTFPASKERMLGPQAIFFQQGDYHAHLRRLVSRAFSPEAIRGSVPAIEAIALRSLESWDGRLVNTFQEMKLYALNVALLSIFGEEEMRYIEELKQCYLTLEKGYNSMPVNLPGTLFHKAMKARKRLGAVVAHIIEARREGERQRGSDLLASFLDDREALTDAQIADNVIGVIFAARDTTASVLTWMVKFLGDHPAVLKAVIEEQQEIARSKGSSGEPLTWADTRRMRTTSRVIQETMRVASILSFTFREAVEDVEYQGYLIPKGWKVMPLFRNIHHSPDHFPCPEKFDPSRFEVAPKPNTFLPFGNGTHSCPGNELAKLEMLVLFHHLATKYRWSTSKSESGVQFGPFALPLNGLPMTFVRKD

SEQ ID NO: 533 - protein, 1319 aa, Oryza sativa
LSLSFFQYHVCLFTLLLCFIPITALAESDIKNLFALRKAIAVGKGFLHNWFELETPPCNWSGISCVGLTVVAIDLSSTPLYVDFPSQIIAFQSLVRLNVSGCGFSGELPEAMVNLQHLQHLDLSDNQLGGPLPASLFDLKMLKVMVLDNNMFSGQLSPAIAHLQQLTVLSISTNSFSGGLPPELGSLKNLEYLDIHTNAFSGSIPASFSNLSRLLYLDANNNNLTGSIFPGIRALVNLVKLDLSSNGLVGAIPKELCQLKNLQSLILSDNELTGSIPEEIGNLKQLEVLNLLKCNLMDTVPLSIGNLEILEGLYISFNSFSGELPASVGELRNLRQLMAKSAGFTGSIPKELGNCKKLTTLVLSGNNFTGTIPEELADLVAVVLFDVEGNRLSGHIPDWIQNWSNVSSISLAQNMFDGPLPGLPLHLVSFSAESNRLSGSIPAKICQGTFLQILRLNDNNLTGSIDETFKGCKNLTELSLLDNHLHGEIPEYLALLPLVSLDLSHNNFTGMIPDRLWESSTILDISLSDNQLTGMITESIGKLLSLQSLSIDRNYLQGPLPRSIGALRNLTALSLSGNMLSEDIPIQLFNCRNLVTLDLSCNNLTGHIPKAISHLTKLNTLVLSRNRLSGAIPSELCVAFSRESHSELEYVQHIGLIDLSRNRLTGHIPRAINNCSILVELHLQDNLLSGTIPVELAELRNITTIDLSSNALVGPVLPWPVPLASLQGLLLSNNRLSGSIPSGIGNILPQITMLDLSGNALTGTLPLDLLCKESLNHLDVSDNNISGQIPFSCHEDKESPIPLIFFNASSNHFSGSLDESISNFTKLTYLDLHNNSLTGRLPSAIARVTSLYYLDLSSNDFSGTIPCGICGMFGLTFANFSGNRDGGTFTLADCAAEEGGVCAANRVDRKMPDHPFHVLEATICCIATAIVIVLVVILVVYLRRRRKMLRRRQFVLVPAGDNAMADHETTLSNNLLGRRRMKKREPPSINLATFEHAPVRVTVDEIMRATGNFDGMHVVGDGGFGTVYRAELPGGRRVAVKRLHGVGRRFQGGEREFRAEMETVGKVRHPNLVPLLGYCAAGDERFLVYEYMEHGSLEDRLRGGGGAALGWPERLTICGGAARGLAFLHHGFVPHVIHRDVKSSNVLLGEGLQPRVSDFGLARIISACETHVSTVLAGTLGYIPPEYALAMRCTAKGDVYSFGVVMLELLTGRPPTWSSAEVTAEGDDERGGGGSLVGWVRWMAARGRGGEVFDACLPVSGAEREQMARVLDVARDCTADEPWRRPTMAEVARRVGAIEAMEYGPLVVAVSSGEPPAMP

SEQ ID NO: 534 - protein, 402 aa, Glycine max
  unsure (1)..(402): unsure at all Xaa locations
FGSSPNPPFLNKNKKIKKNPSISWTSMTSLSTHHTYSRKQKSLGLLCTNFLSLYNKEGVRLVGLDDAASRLGVERRRIYDIVNVLESVGVLTRKAKNQYTWKGFCAIPAALQELKDEGLKENPGSFDDSNDNAKVSDDEEEEEETFPNINIGSQSEKENPDYTATVKSSKNENRREKSLALLTQNFVKLFVCSNFEMISLDEAAKLLLGNANNRTKVRRLYDIANVLSSMNLIEKTHTTNTRKPAFRWLGVRGKTWGGSVDLAQNSNVKESRKRMFGTDIGNISFKRNKVDLSMDGQNSKMQNQHENISPRAQLEKIIIKKDAKQTSESYQFGPFAPAYVPKVGTSENNSVKKVHDWDSLAQEHRPQYQNQGXALKDLFSHYMEAWKSWYSEAAGKKSTKTL

SEQ ID NO: 535 - protein, 1043 aa, Zea mays
MFTPQGKGWTGWSTPTPANQRSGGGAPAASAPLGKGKGRVAELEQELHEYQYNMGLLLIEKKEWAAKFEEISEVLTQKEEILKREQAAHLNAISEYERREENMRKALGVEKQCVADLEKALRDIRAEIAEVKFTSEKKITDAQSLEASLEEKSLEIEGKLHAADAKLAEANRKKSQADRDLEEAEARQRRLEKEKLYFETERKAREKQLKEQEESLQEWEKKLKESQNRLNELQRSINEREERANKNDQLFKIKQDELEEARRTVEAAKVTLKVKEDDINKRLNELHLQEKDADSKRSALEEQGKKLDEREAKVTNREKEGLQKLLEDHQVELESKRRDFELELERERKSFDQNMTQKQADLLKREKDVKSLEAKLSKSEQALNDKKKSMENLQNDLDAKSKALKSWDESLKNDEKRLLKEKQQMDHEREQLETYKLELEKIKSALEAEKEKISEEQNNLKLTAQERQEHSLLIAKLKKEIEEYRMRSNSLSEEMEDLRKQRQKFEEEWEQLDEKRALLVEEDKRLNIERMNLERWRDNEEKRLNDMKLKMDEEYKQQLESLERKEKALSDDMKHKQMENDEFLKGERADVQRKLQLKRHELEMEMEQKQATKEKELEEKENELNKKIDFVENKLRHAIELNESKIEKLLLEKREVQMERELLLEERKKTETDKADIRRDIESLHSLSKSLKERREAYNRDRSRLIELFEKYKACKNCGISIFEGLDSLLLKDSAEIEHPSLAVEGDDHALTTDTSGPDTGTLVNSGGRFSLLQKCSRLFKFSPRKKGEQSSEQPSERNISFGARLEEATQSDGDYVPTPVYEIAHDSFNAEDELPSDGETRENEESERHDIADNAQMESSVGVADNSIDILGTKSFDGANDMAVEATIVSVDQNGEDSVVPAEAGVEPETSEQGRRQQNQRGRRKGGMKRTRSVNAVVEDAKMILGEVFEEKTDDQGDTVKVGATRKRRFAGATISEQDEEGSEAHSESVSLGGQRRKRRQTAGAVTDAPGERRYNLRHSRAANAGAATAQADKKKIFKSKK

SEQ ID NO: 536 - protein, 436 aa, Oryza sativa
MDSVVRTHIGHMLKMIHFCSMFLITFSDYKIQAILSSQQKRKAPEESDVAESSDCMITSPGFAVSPMLTPVSGKAVKTSKSKTKNNKAGPQTPTSNVGSPLNPPTPVGTCRYDSSLGLLTKKFINLLKQAPDGILDLNNAAETLEVQKRRIYDITNVLEGIGLIEKTLKNRIRWKGLDDSGVELDNGLSALQAEVENLSLKEQALDERISDMREKLRGLTEDENNQRWLYVTEDDIKGLPCFQNETLIAIKAPHGTTLEVPDPDEAGDYLQRRYRIVLRSTMGPIDVYLVSQFDEKFEDLGGGATPSGHANVPKHQPTEVFNTTNAGVGQCSNSVAVDNNIQHSQTIPQDPSASHDFGGMTRIIPSDIDTDADYWLISEGDVSITDMWKTAPDVQWDESLDTDVFLSEDVRTPSSHNQQPSAVGGPQMQVSDMHKP

SEQ ID NO: 537 - protein, 321 aa, Zea mays
MAPAVSAAASAAMRQALRDRQILDAVGTGAAALSLAGSSFIVICYLLFRELRKFSFKLVFYLAVSDMFCSLFTILGGPSNAFYCFAHDYSAHFFCVASFLWTTTISFTLHRTVVKHKTDVEEFGSIFHLYVWGTSLSTTVLRSIGSDYGRPGTWCWIQQGSMAKVLHLITFYLPLWGAILYNGFTYYEVNRMLNNATQMAAGISDRSNQSDIRADRKAFNRWGYYPLILIGSWAFATINRLYDFANPGHRIVWLSFLDVGFAGLMGLFNSIAYGLNSSVRRAISERIDTFLPERIKRSLPALSRLRSQQENELTSLIVEGN

SEQ ID NO: 538 - protein, 506 aa, Glycine max
MSGGGEEGATLEFTPTWVVAAFCTVIVAISLAAERLLHYGGKFLKAKDQKPLYEALQKIKEELMLLGFISLLLTVTQNGITKICVRPSLTLHMLPCNLHDAPANHESHFQTFFPGTARRLLSGEHSTPESASKIGYCSRKHKVPLLSVEALHHLHIFIFVLAVVHVSFSVLTVVFGGARIRQWKHWEDSIAKQNYETDRVLKPKVTQVHQHDFIRGRFAGFGKDSAIVGWLLSFLKQFYGSVTKSDYVTLRHGFIMTHCRTNPKFNFHKYMIRALEDDFKQVVGISWYLWLFVVIFLLLNINGWHTYFWIAFIPVILLLAVGTKLEHIITQLAHEVAEKHAAIEGDLVVQPSDDHFWFHRPRVVLFLIHFILFQNAFEIAFFFWIWVTYGFDSCIMGQVRYIVPRLVIGVFIQVLCSYSTLPLYAIVTQMGTHYKRAIFNDHLQQNIVGWAQKAKKRKGLKADGNPGQGSSQESANTGIQLGSIFKKATAPGDSSSAPKADGISSV

SEQ ID NO: 539 - protein, 598 aa, Glycine max
MYSSKFRKLFCSVLFSWLCFGGLAMAAGESSSSSRDLDQTPTWAVAAVCTVFILVSIALEKSLHKVGTWLGQKKKKALLEALEKVKAELMILGFISLLLTFGQSYIVRICIPEKLADNMLPCPYKYKEDKKASDSEEEHRRKLLSYERRYLAADTTSFKCSREGHEPLLSVNGLHQLHILVFFLAVIHVLYSAITMMLGRLKIRGWKAWEAETSTHNYEFANAASRFRLTHETSFVRAHSSFLTRIPIFFYIRCFFRQFYRSVNKTDYLTLRNGFITVHLAPGSKFNFQKYIKRSLEDDFKVVVGVSPILWASVVVYLLINVNGWHTVLWAALIPVVIILAVGTKLQAILANMALEITERHAVVQGMPLVQGSDKYFWFGQPQLVLHLIHFALFQNAFQITYILWIWYSFGLRNCFRTDYKLAVVKVALGILMLCLCSYITLPLYALVTQMGSRMKTAIFDEQTNKALKKWHMAAKKKQGGAVTLGKSSARIMDGSPIGNSSTVHSTGPTLHRFKTTGHSTRSSSTAYEDQDQDHEYESDGVELSPLASQTTSFIVRVDHGDQQQAEHRQDSEGETNSSSEGEFSFVKPDPVEIRTTT

SEQ ID NO: 540 - protein, 390 aa, Oryza sativa
MSVLTCVFDNMGSSCSRSHSLSEAETTKNAKSADIDRRILQETKAEQHIHKLLLLGAGESGKSTIFKQIKLLFQTGFDEAELRSYTSVIHANVYQTIKILYEGAKELSQVESDSSKYVISPDNQEIGEKLSDIDGRLDYPLLNKELVLDVKRLWQDPAIQETYLRGSILQLPDCAQYFMENLVRLAEAGYVPTKEDVLYARVRTNGVVQIQFSPVGENKRGGEVYRLYDVGGQRNERRKWIHLFEGVNAVIFCAAISEYDQMLFEDETKNRMMETKELFDWVLKQRCFEKTSFILFLNKFDICEKKIQKVPLSVCEWFKDYQPIAPGKQEVEHAYEFVKKKFEELYFQSSKPDRVDRVFKIYRTTALDQKLVKKTFKLIDESMRRSREGT

SEQ ID NO: 541 - protein, 109 aa, Glycine max
MASETASSADEETVVVVSAAAGAGGTDKRGKHRILAELKRLDQESKFLQEELEELEKTENVSTICTELLQNIDTRPDPLLPEVHGPVNLLWDRWFEGPQDPQACRCWIL

SEQ ID NO: 542 - protein, 271 aa, Triticum sp.
MLLLNPASEAAAAALDSIRQQLLEEPMAPARPAYCRSASFGSLVADQWSESLPFRPNDADDMVVYGALRDAFSCGWLPDGSFAAVKPEPLPSPDSYDGCCLGSFLASPPGLDAPWAEEAEVAATASRGKHFRGVRQRPWGKFAAEIRDPAKNGARVWLGTFDSAEDAAVAYDRAAYRMRGSRALLNFPLRIGSEIAAAAGQKRPSPQPASPDSPPPSSSAPGSSKRRKRGEAAAESMSMALVPPPPVQAPVQLTLPVQPWLATGAVQQLVS

SEQ ID NO: 543 - protein, 442 aa, Sorghum bicolor
MAGSSSMDTEAAGQQLKHGSGYSIPATAHAVDTDSWQQVSLLMVIGFNCAYVLSFSNLMMVPLGWAWGVACLLLVGAAAWYANWLLAGLHFVDGQRFIRYRDLMGFVFGRNMYYITWFLQFTTLLLCNMGFILLGARALKAINSEFTHTPARLQWFVTATGFIYFAFAYFVPTISAMRNWLATSAALTLAYDVALLAILIRDGKSNKQKDYNVHGTQAEKVFNALGAVAAILVCNTSGLLPEIQSTVREPAVRGMRRALLLQYTAGAAGYYGISVAGYWAYGSAVSEYLPNELGGPRWAAVLINATAFLQSIVSQHLFTVPIHEAMDTRLQRLDEGMFSRYNLTRRLCARGLVFGFNVFVTALFPFMGDFVNLVGSFALVPLTFTFPSMAILKIKGKSGGRCNRLWHWGIIVFSSVLCVATTAAAVRLIFNNARIYHFFADM

SEQ ID NO: 544 - protein, 475 aa, Oryza sativa
MASGQKVVKPMEVSVEAGNAGEAAWLDDDGRARRTGTFWTASAHIITAVIGSGVLSLAWAIAQLGWVAGPAVMLLFAFVIYYTSTLLAECYRTGDPATGKRNYTYMDAVRANLGGAKVTFCGVIQYANLVGVAIGYTIASSISMRAIRRAGCFHHNGHGDPCRSSSNPYMILFGAVQIVFSQIPDFDQIWWLSIVAAVMSFTYSGIGLSLGIVQTISNGGIQGSLTGISIGVGVSSTQKVWRSLQAFGDIAFAYSFSNILIEIQDTIKAPPPSEAKVMKSATRLSVATTTVFYMLCGCMGYAAFGDAAPDNLLTGFGFYEPFWLLDVANVAIVVHLVGAYQVFVQPIFAFVERWASRRWPDSAFIAKELRVGPFALSLFRLTWRSAFVCLTTVVAMLLPFFGNVVGLLGAVSFWPLTVYFPVEMYIAQRGVPRGSARWVSLKTLSACCLVVSIAAAAGSIADVIDALKVYRPFSG

SEQ ID NO: 545 - protein, 856 aa, Zea mays
MAQQMASVHLNDTTVVDAKPLRTLTPMFPAPLGLHTFTPQNSPSVVCVTPFGPYGGGTELGMPAVPPMFAAPVPAAGAEPSQRQPHTANMNGGDTELGMPAVPPMFAAPAPAAGAEPNQGQPHTANMNGTAVNSSVTSLQTPSAATQESGKRKRGRPKRVPDTTVSSAPSAPLAPTISPVPSLPVVTPVPSAPQELNTIVSLTPSSDAPQESGKRKRGRPKRIQDVPVMVPLTSQGDSTSVIQTLPGSSVHESGTRRGRPKRLQDSSDIVTPIDSKDSESSPQPPIAAPAESGKRKRGRPKRIDGSVTPSSHSVFSIDDDAVDTMKRGRPRKIDTKLLQFPSLFSDDPRQTADNVLMMFDALRRRLMQMDDVKQAAKQQPNLKAGSIMNNAELRVNKDKRIGEVPGVEVGDMFYFRIEMCLVGLNSQSMAGIDYMSAKFGNEEDPVAISVVSAGVYDNTGDDPDVLVYTGHGMSGKDDQKLERGNLALERSLHRGNPIRVIRSVKDLTCPTGKIYIYDGLYKIKEAWVEKGKSGFNVFKHKLLREPGQPDGIAVWKKTEKWRENPSSRDHVILLDISYGVENNPVCLVNEVDDEKGPSRFTYTTNLTYGNSLSSMRKMQGCKCISVCLPGDNNCSCTHRNAGDLPYSASGILVSRMPVLYECGDSCTCSQNCRNRVVQKGTQIRFEVFKTGDRGWGLRSWDPIRAGTFICEYAGEIIDINRVNGEDDYIFETSPLEQNLRWNYAPELLGEPSLSDSNETPKQLPIVISAKRTGNIARFMNHSCSPNVFWQPVLYDHGDEGYPHIAFFAIKHIPPMTELTYDYGQNQRNSIQMGTHSGFRKSKSCLCWSPKCRGSFG

SEQ ID NO: 546 - protein, 542 aa, Zea mays
MSARDSNHSYKCSDDSQMPYYNNSAPVGENGRIHMAENSLGHHYSSSDIGSQRINNSNPQVFEAQYCTLESSSANGVYPAQSSTSSHSISPLSGSPLSQHDSHSDHTYSSPPSASCLTEVAGLLIKQKELENSIVGPGLDISSDCSRSLLQAHVPVRPDNWRQLLGINGGDLMQVVIACGKAVAENDVFATELLISELGHLVSVSGDPMQRLGAYMLEGIVARLSSSGSMLYKSLKCKEPTSSELMSYMHLLYEICPFYKFGYMSANGAIAEAIKGENFVHIIDFQIAQGSQWVTLLQALAARPGGPPYIRITGIDDSNSAYARGGGLDIVGRTLCDVANSCGLPFEFNAVPAASHEVELQHLAIRHGEIIAVNFAYQLHHVPDESVSTENHRDRIIRMIKSINPRVVTLVEQESNTNTAPFFPRYMETLNYYTAMFESIDVALPRDDRRRMSAEQHCVARDIVNLIACEGAERVERHELFGKWKSRFAMAGFRPYPLSSVVNNTINTLLHTYNSYYRLEERDGVLYLGWKNRVLVVSSAWC

SEQ ID NO: 547 - protein, 194 aa, Zea mays
MVMVSGGGGNAWAKEMTLRRRIASIFNKTQEHFPTLKDYNDYLEEVEDMTFNLIEGIDVEEIEAKIARYQQENAEQIYLSRAKRAEDLAAALKASRMNPVKAEANDTAAGSSQGISGGAGVQGQYAPAAVLGGVAQPRPTGMAPQLIGSGSDPLQGDDEETRRLRAERAARAGGWTAELSKRRALEEAFSAIFI

SEQ ID NO: 548 - protein, 140 aa, Oryza sativa
MRKYRVAGLVAALLVLHSLATPSAQAEAHRAGGEGEEKMSSDGGPVLGGVEPVGNENDLHLVDLARFAVTEHNKKANSLLEFEKLVSVKQQVVAGTLYYFTIEVKEGDAKKLYEAKVWEKPWMDFKELQEFKPVDASANA

SEQ ID NO: 549 - protein, 250 aa, Oryza sativa
MRVAATTRPASSSAAAPLPLFLLLAVAAAAAALFLVGSASLAMAGHVLGGAHDAPSAANSVETDALARFAVDEHNKRENALLEFVRVVEAKEQVVAGTLHHLTLEALEAGRKKVYEAKVWVKPWLDFKELQEFRNTGDATTFTNADLGAKKGGHEPGWRDVPVHDPVVKDAADHAVKSIQQRSNSLFPYELLEIVRAKAEVVEDFVKFDILMKLKRGNKEEKFKAEVHKNLEGAFVLNQMQQEHDESSSQ

SEQ ID NO: 550 - protein, 109 aa, Sorghum bicolor
MAEAHSGRRVGMVGDVRDAPEGHENDLEAIELARFAVDEHNSKTNAMLEFERLVKVRHQVVAGTMHHFTVQVKEAGGGKKLYEAKVWEKVWENFKQLQSFQPVGDAAVA

SEQ ID NO: 551 - protein, 369 aa, Zea mays
MEGGRDVFLGAAARAPPPPPSCPFHGSATATRSGGAQMLSFSSNGVAGLGLCSGASKMQGVLSRVRRPFTPTQWMELEHQALIYKHFAVNAPVPSSLLLPIKRSLNPWSSLGSSSLGWAPFRSGSADAEPGRCRRTDGKKWRCSRDAVGDQKYCERHIKRGCHRSRKHVEGRKATPTTADPTMAVSGGSLLHSHAVAWQQQGKSSAANVTDPFSLGSNRNLLDKQNLGDQFSVSTSMDSFDFSSSHSSPNQAKVAFSPVAMQHEHDQLYLVHGAGSSAENVNKSQDGQLLVSRETIDDGPLGEVFKGKSCQSASADILTDHWTSTRDLRPPTGVLQMSSSNTVPAENHTSNSSYLMARMANSQTVPTLH

SEQ ID NO: 552 - protein, 621 aa, Zea mays
MSPNLDSAIKSQVPALLLRRLFGASRRDEAKQLQRTPAPVGRRRVFVQTETGCVLGMDLDRGDNAHTVKRRLQLAFNMPTGGTSLTFGDRVLENDLSFLRPDSPLLLTRNSINRSCSTPCLCPVSKDFEHKDCSGLVEMLGCSSSCARVKRLVDDVVTAIRSGVDPVPISSGLGGSYYFRNVLGDRVAIVKPTDEEPFAPNNPKGFVGRALGQPGLKRSVRVGETGFREVAAFLLDHDNFANVPATALVKITHSIFNINCPVNGGNLAPAHDQQQQVNSKIASFQQFIAHDFDASDHGTSSFPVAAVHRIGILDIRIFNTDRHAGNVLVRKLNGGTGRFGCQTELFPIDHGMCLPENLEDPYFEWIHWAQASIPFSEEELEYIRNLDPRKDVQMLRRELPMIREACLHVLALCTIFLKEAAAFGLCLAEIGEMMTREFRGMEEEPSQLELMCMEARKRVAEWEPFSATAEHGEDTDFQFSVDMLGEYSDVVRSPRFNGSGSKVSSFRSPLSKLVESVDEGSDGHEDQNESDRVLYAGWNTSSVPSKAMGHSGNASKSAMNRSADEQLPSSMCFVRLSDMSADEWDVFLEKFQELLKETLHESARAAAGQRMKQRLGTSCKF

SEQ ID NO: 553 - protein, 370 aa, Zea mays
MAAGAGGGELEALEGVRSIVLKPSESLDESRFTRIAGADFNDPAIGLQGLLASLASTGFQASNLGDAIDVVNQMLDWRLSHEKPSEDCDEAELDPKYRASVKCKIFLGFTSNLVSSGIRDIIRFLAQHHMVDVIVTSAGGIEEDLIKCLAPTYRGDFSLPGALLRSKGLNRIGNLLVPNDNYCKFENWIMPLFDQMLQEQSTENVWTPSKVIARLGKEINDESSYLYWAYKNNIPVYCPALTDGSLGDMLFCHAVRNPGLIIDIVQDIRLMNGEAIHATPRKTGIIVLGGGLPKHHICNANMFRNGADYAVYINTAQEFDGSDSGAHPDEAVSWGKIKGSAKPVKVHCDASIAFPLLVAATFARKVHNSK

SEQ ID NO: 554 - protein, 630 aa, Zea mays
MKREYQDAGGSGGDMGSSKDKMMAAAAGAGEQEEEDVDELLAALGYKVRSSDMADVAQKLEQLEMAMGMGGVGGAGATADDGFVSHLATDTVHYNPSDLSSWVESMLSELNAPPAPLPPATPAPRLASTSSTVTSGAAAGAGYFDLPPAVDSSSSTYALKPIPSPVAAPSADPSTDSAREPKRMRTGGGSTSSSSSSSSSMDGGRTRSSVVEAAPPATQASAAANGPAVPVVVVDTQEAGIRLVHALLACAEAVQQENFSAAEALVKQIPMLASSQGGAMRKVAAYFGEALARRVYRFRPPPDSSLLDAAFADLLHAHFYESCPYLKFAHFTANQAILEASAGCRRVHVVDFGIKQGMQWPALLQALALRPGGPPSFRLTGVGPPQPDETDALQQVGWKLAQFAHTIRVDFQYRGLVAATLADLEPFMLQPEGDDTDDEPEVIAVNSVFELHRLLAQPGALEKVLGTVRAVRPRIVTVVEQEANHNSGTFLDRFTESLHYYSTMFDSLEGAGAGSGQSTDASPAAAGGTDQVMSEVYLGRQICNVVACEGAERTERHETLGQWRSRLGGSGFAPVHLGSNAYKQASTLLALFAGGDGYRVEEKDGCLTLGWHTRPLIATSAWRVAAAAAP

SEQ ID NO: 555 - protein, 561 aa, Zea mays
MSFVRQADPSVSCAETTYIHKFVPPGPVFPAQRFVSGTDLLHHGPQPYNAEGYKQSGFNGTAPHAFQSFYNTDSYAESHFNEAPYSPAIFDISQQNSQSLSDNQASDLVEFDEDEMRVKLQELEHALLDDGDEIFFDLSGSINDEWNDNIKTNNEWVNTMKNIVSPDSPKEASPESSICCLDNNVGEARNPKQLLFDCAEAISENSIDEAQSIIAELRQKVAIQGEPSQRLAAYLVEGLAATLQSSGKGIYRALRCKEAPTLYQLSAMQILFEICPCFRLGFMAANYAILEACKGEDVVHIIDFDINQGSQYITLIQFLKNNSNKPRLLRITGVDDPESVHRAVGGLNVVGQRLEKLAEDCEVRFEFRAVAANIEDLTPGMLGRRPGEALIVNFAFLLHHLPDESVSIMNQRDRLLRMVKGLRPKLVTLVEQDANTNTTPFPSRFREVYDYYSALFDSLDATLPRESPDRMNVERQCLAREIVNILACEGPDRVERYEVAGKWRARMAMAGFVSSPFNSGAIDGIRSLLKSYCDKYRFEKVQDGLHFGWGDKTLVFSSAWQ

SEQ ID NO: 556 - protein, 162 aa, Zea mays
MASPSSSPSRKALSKIACSRLQKELAEWQVNPPAGFKHRVTDDLQRWVIDVAGAAGTLYTGETYKLQVDFPEHYPMEAPQVIFLHPAPMHPHIYSNGHICLDILYDSWSPAMTVSSICISILSMLSSSPEKQRPADNDRYVKNCRNGRSPKETRWWFHDDTV

SEQ ID NO: 557 - protein, 232 aa, Zea mays
MAPSLLGGFTKSLAMTVLSEIGDKTFFAAAILAMRHPRKLVLAGCLTALIVMTALSASLGWVAPNLISRKWTHHLTTLLFFLFGIWSLWEGFKEDGDSEELAEVEAELDAAFKSNKGESKNKFKANDDMKKQQRPFLMQFFSPIFLKAFSITFFGEWGDKSQIATIGLAADENPFGVVLGGIIAQALCTTAAVLGGKSLASQISEKMVELSSGVLFLLFGIMSLLSGPEGEL

SEQ ID NO: 558 - protein, 429 aa, Oryza sativa
MSSPPPAAAAAMAVDDADDDQLASMSTEDIVRATRLLDNETRVLKDELQRTNLEVESYKEKIKENQEKIKLNKQLPYLVGNIVEILEMNPEDEAEEDGANIDLDSQRKGKCVVLKTSTRQTIFLPVIGLVDPEKLKPGDLVGVNKDSYLILDTLPSEYDSRVKAMEVDEKPTEDYNDIGGLEKQIQELVEAIVLPMTHKDRFQKLGIRPPKGVLLYGPPGTGKTLMARACAAQTNATFLKLAGPQLVQMFIGDGAKLVRDAFQLAKEKSPCIIFIDEIDAIGTKRFDSEVSGDREVQRTMLELLNQLDGFSSDERIKVIAATNRADILDPALMRSGRLDRKIEFPHPSEEARARILQIHSRKMNVNPDVNFEELARSTDDFNGAQLKAVCVEAGMLALRRDATEVTHEDFNEGIIQVQAKKKSSLNYYA

SEQ ID NO: 559 - protein, 213 aa, Oryza sativa
MSRHPEVKWAQRIDKVYITVQLADAKDAKVNLEPEGVFSFSATAGTDGNLYESKLELNDKVNVEESKISVGVRSIFCIVEKAEAKWWKKLVRDDQKAPHFVKVDWDKWVDEDDDGADVNVDGMDFSNFGGMGGMGGMGGMGDMMGGMGGMGGMGGMAEMMGGMGGMGGMGGMGGMDEFEDESDDEEEVSKPQDAEKAAEAGKSQESDAKAETS

SEQ ID NO: 560 - protein, 165 aa, Zea mays
MSSSGPLLATGTHHTGRQPEVLWAQRSEKIFLTISLPDAKDVVLKTDPKGLFNFSAVVHGEPFSFTLELFDSILSEGSKTKTKMGLRNIICSIQKEKKGWWKRLLKSEEKHPYIKVDWNKWCDEDEESEFSGDSDGGFDEANEGDESDDDDGMLYLPDLEKLRGK

SEQ ID NO: 561 - protein, 173 aa, Oryza sativa
MSRHPSTKWAQRSDKVFLTIELPDARDVKLNLKPEGQFIFSAKGPADDTPYELDLELFDAVNVEESKAAVAARSICYLIKKAESKWWPRLLKKEGKPPVFLKVDWDKWQDEDDEDIGLGDFGDMDFSKLGMGGPDDDLEDDDEDDTADSANKDDEDIKAEGSGEQEAAGEAKP

SEQ ID NO: 562 - protein, 176 aa, Zea mays
MSRHPITKWAQRSDRVFLTIELPDAQDVKLNLKPEGHFNFSAKGSDDLRYEFDIELFDAVNVEESKAAIAPRTICYLIKKAKSGWWPRLLKQEGKPPVFLKVDWDKWQDEDDEDAGFNDFGGMDFSKLDIGGADDDDIGDDEDDVVESANKDEEGGKTEESKEEEAAPAAAEEVKP

SEQ ID NO: 563 - protein, 339 aa, Oryza sativa
MARRSSSRACAAMATAAVFALLAATATASGLVRVEHPAKSDGSLSLLVVGDWGRKGTYNQSRVAEQMGKVGEKLNIDFVISTGDNFYEDGLTGVDDQAFEESFTDIYTAKSLQKPWYLVLGNHDYRGDVLAQLSPVLRKIDQRFICMRSFIVNAEIVDFFFIDTTPFQLKYWTRPKDHHYDWRGVAPRQKYITNLLKDMDEAMKKSTAKWKIAVGHHTIRSVSDHGDTKELLQLLLPVLKVNGIDFYINGHDHCLEHISSRDSPIQYFTSGGGSKAWRGVLQPNSDKLQFFYDGQGFMSLQINQDQADFIFYDVSGNILYKWSKSKANYLQPSTYITEA

SEQ ID NO: 564 - protein, 348 aa, Zea mays
MAPPAHDRLRRLVLLLVVATAAAALLLAPTTADAALPRVQHTPTKADGSLAILVVGDWGRRGQFNQTLVAQQMGVVGQKLDIDFVISTGDNIYDDGIANTSDPLFKESFSNIYTANSLQKPWYLVLGNHDYTGNALAQLDPAIRKVDSRYTAIAKSFIVNSGVADFFLVDTTPFIVHYWNNTKFDWRGVAPRDTYIANLLKDLKCALTASKAPWKIVVGHHPISSACGHGNNTELEELLLPVLRTHGVDMYLNGHDHCLQRVSSRDSRLQLLTSGGGSKAWAGKFKPTLDKVEFLYDGQGFMSMRLSRTEARLAFFDVAGSVLHCWTMHAQKLKTTTTTTAAAAAAGH

SEQ ID NO: 565 - protein, 256 aa, Oryza sativa
MKLAVVAVAALLLAAGVASADEFDFFYLVQQWPGSFCDTQAGCCFPDTGKPAAEFGIHGLWPNYAKCRPAAGAVADDDDGVVEMVVDGGAAVERHHRRRQKCWPEYCDDGNKLRPWEIKDLVAELDANWPTLSCKGGKSFEFWSYEWKKHGTCSGMGQHGYFAAALELKKRHDLAAVLAGAGIVPSDDESYSLGSIRDAIAAATGAVPNLECNRDAAGETQLFQVYQCVDRSGKKLVDCQLPMQGKCRDKVKLPTF

SEQ ID NO: 566 - protein, 278 aa, Zea mays
MTMATKAACVLAVWVLVASGLCDLGSARAPLGSKPQREFDYFALSLQWPGTICASTRHCCATNGCCRSEPLQTFTIHGLWPDYDDGTWPSCCRRTQFEMDKILPLKEVLDKYWPSLYCSKSGTCFSGKGLFWAHEWEKHGTCSAPVVQDELQYFTLALDLYSKYNVTEMLSSGGIQVSNGKEYALSDVIDTIKHAFGGSPQIVCKRGSIEELRLCFDKELKPRDCLTTSLANGSVSKSKHCPRYITLPTYDPLVLANSTVEIMTQFDEFDVPAALYTA

SEQ ID NO: 567 - protein, 270 aa, Zea mays
  unsure (1)..(270): unsure at all Xaa locations
MASCRMALLLGLLLLVVASPAIADDDSGIYYQLALMWPGAYCEQTSAGCCKPTTGVSPARDFYITGFTVLNATTDAAVTGCSNKVPYDPNLITGIQGLNQYWSNIRCPSNNGQSSWKNAWKKAGACSGLSEKDYFETALSFRSRINPLVRLKAKGIEPDFGLYGLKAITKVFKSGINATPVIQCSKGPFDKYMLFQLYFCAAGNGTFIDCPAPQQYTCSKEILFHPFKKWMLKQQLNQDDDPFQLPGVAXWTTDTPYRRLCLRFCQVCME

SEQ ID NO: 568 - protein, 229 aa, Zea mays; identical to SEQ ID NO: 473

SEQ ID NO: 569 - protein, 185 aa, Zea mays
MEDGSAPRRSTPPARRSRSAEFHNFSERRRRDKINEKLKALQELLPNCNKTDKVSMLDEAIDYLKSLQLQLQMLVMGKGMSPVVPLELQQYMHYITADPAQLPPLRPSGQQHRQFQITQANPQRQSNVESDFLSQMQNLHSSEPPQNFLRPPKLQLYTPEQRGGLPSTSHNTGWISGSSSYNFME

SEQ ID NO: 570 - protein, 199 aa, Zea mays
MAATAMDHDGGDDVVTPGELLGNSLTLAAGRGAYADGRSVRASVTGRRRIVPPAPASDDQRSTVEVVGHKAHGAVPQPGSVVIARVTKVMARMASADIMCVDSKAIREKFTGMIRQQDVRATEIDKVDMYQSYRPGDIVKAMVLSLGDARAYYLSTAKNELGVVSAQSIAGGTLVPISWTEMQCDLTGQIEQRKVAKVE

SEQ ID NO: 571 - protein, 287 aa, Zea mays
MVGLSEGEKHFIRGGIAQDVRTDGRRRLQFRSLSVQTGVIPQANGSARVRLGATEIIASVKAELGKPSILHPDKGKVAIFVDCSPTAEPLFEGRGSEELSAELSVSLQRCLLGGKSGAGAAIDLSSLIVVDGKVCWDLYIDGLVVSSDGNLLDALAVAIKVALSDTGIPKVNVSVSAASDEEPEVDVSDEEFLQFDTSGVPVIITLTKVGRHYIVDATSEEESQMSSAVSVSVNRHGQICGLTKRGGAGLDPSVIFDMISVAKHVSQQFISLLDSEIAAAEAEEEAQ

SEQ ID NO: 572 - protein, 256 aa, Oryza sativa
MSREENVYMAKLAEQAERYEEMVEYMEKVAKTVDVEELTVEERNLLSVAYKNVIGARRASWRIVSSIEQKEEGRGNEEHVTLIKEYRGKIEAELSKICDGILKLLDSHLVPSSTAAESKVFYLKMKGDYHRYLAEFKTGAERKEAAESTMVAYKAAQDIALADLAPTHPIRLGLALNFSVFYYEILNSPDKACNLAKQAFDEAISELDTLGEESYKDSTLIMQLLRDNLTLWTSDLTEDGGDEVKEASKGDAGEGQ

SEQ ID NO: 573 - protein, 260 aa, Oryza sativa
MSPAEASREENVYMAKLAEQAERYEEMVEFMEKVAKTTDVGELTVEERNLLSVAYKNVIGARRASWRIISSIEQKEESRGNEAYVASIKEYRSRIETELSKICDGILKLLDSHLVPSATAAESKVFYLKMKGDYHRYLAEFKSGAERKEAAENTLVAYKSAQDIALADLPTTHPIRLGLALNFSVFYYEILNSPDRACNLAKQAFDDAIAELDTLGEESYKDSTLIMQLLRDNLTLWTSDNAEDGGDEIKEAAKPEGEGH

SEQ ID NO: 574 - protein, 206 aa, Oryza sativa
MAEVEAAPIAAAETPEVAAAEGAAAAKAPHKLHRQWAFWYDIQSKPKPGAAWGTSLRKAYTFDTVEEFWGLYDQIFRPSKVTVNADFHLFKAGVEPKWEDPECANGGKWTVPCSRKTTLENMWLETLMALIGEQFDESEEICGVVASVRQRGDKLALWTRTASNEAVQVNIGKKWKEIVDYNDKMVYSFHDDAKREKPSRGGRYNV

SEQ ID NO: 575 - protein, 227 aa, Oryza sativa
MAEEHETRPPSAGRPPSSGRGRADDADEREEGEIADDDSGHAPPQANPAAPHPLEHAWTFWFDNPQGKSKQATWGSSIRPIHTFSTVEDFWSLYNNIHHPSKLVVGADFHCFKNKIEPKWEDPICANGGKWTFSCGRGKSDTMWLHTLLAMIGEQFDYGDEICGAVVSVRGKQERIAIWTKNAANEAAQISIGKQWKEFLDYKDSIGFIVHDDAKKMDKGLKNRYTV

SEQ ID NO: 576 - protein, 210 aa, Sorghum bicolor
MAEVEVPAAAVATTIPEAAEATEGGAAAEAKGPHKLHRQWTFWYDIQSKPKPGAAWGTSLKKAYTFDTVEEFWSLYDQIFRPSKLSGNADFHLFKAGVEPKWEDPECANGGKWTVPCNRKATFENMWLETLMALIGEQFDETEDICGIVASVRARGDKLALWTRTASNEAVQVNIGKKWKDVIDYNDKITYTFHDDSRREKPSRGGRYTV

SEQ ID NO: 577 - protein, 220 aa, Sorghum bicolor
MADEIDTRPASAGSRGRPAHATEDDDREEGEIADDTPAPALPVTHPLEHSWTFWFDNPQGKNKQAAWGSSIRPIHTFSTVEDFWGLYNNIHHPSKLVIGADFHCFKNKIEPKWEDPICANGGKWTISCGRGKSDTLWLHTLLAMIGEQFDYGDEICGAVVSVRGKQERIAIWTKNAANEAAQISIGKQWKEFLDYKDSIGFIVHDDAKKADKGPRNRYTV

SEQ ID NO: 578 - protein, 352 aa, Oryza sativa
MADSPSPRLDEEDAFGRDFNSSPSPTAPPARSGEKRPFGDLDDDDEDVFASKKGKTKVEESAPGAATGMILSLRESLQNCKDNLASCQVEREAAKSEVQKWHSAFQNIPAVPAGTNPDPVSVVSYLNNLKSSEESLKEQLEKAKKREAAFIVTFAKREQEIAELKSAVRDLKTQLRPPSMQTRRLLLDPAIHEEFTRLKNLVEEKEKKIKELQDNVAAVNFTPSSKHGKMLMAKCRTLQEENEEIGAMASEGKIHELGMKIAVLKTRNNELRNQFNELYKHMDGLTNDVERSNEMVAILQDELETKDVELRRLKEMLAQKEATDENKIPQENDVAGDDIVAAAESQPIKVET

SEQ ID NO: 579 - protein, 554 aa, Zea mays
MADTPTSRMVHPFGDVPRQTPKQFLYSGNPQHLCHPYQSAPDTHVVPQRCYTVRSQSHSPNNAGSQDHETHKQYTLESSAASGCSRHGSPSSQSVHAGSGSPVSHDDSHSGSTNGHGSPVSASCVTGEDPTDLKQKLKDLEAVMLGTSETDPEIVNSLEISAANQLSLEPEEWEHMVSMPRGNLKELLIACARAVERNNSYAIDLMIPELRKMVSVSGEPLERLGAYMVEGLVARLAASGSSIYKALKCKEPRSSDLLSYMHFLYEACPYFKFGYMSANGAIAEAIKGEDRIHIIDFHIAQGAQWVSLLQALAARPGGPPFVRVTGIDDSVSAYARGGGLELVGRRLTHIAGLYKVPFQFDAVAISGSEVEEEHLGVVPGEAVAVNFTLELHHIPDETVSTANHRDRILRLVKGLSPKVLTLVEQESNTNTAPFAQRFAETLDYYTAIFESIDLALPRDDRERINIEQHCLAREIVNLVACEGEERVERHEVFGKWKARLMMAGFSPSPLSALVNATIKTLLQSYSPDYKLAERDGVLYLGWKNRPLIVSSAWH

SEQ ID NO: 580 - protein, 492 aa, Zea mays
MDPYKHRPSSGSNSSFWTTNSGAPVWNNNSALTVGQRGPILLEDYHLIEKLAQFDRERIPERVVHARGASAKGFFEVTHDVSHLTCADFLRAPGVQTPVIVRFSTVVHERGSPETLRDPRGFAVKFYTREGNFDLVGNNMPVFFIRDGMKFPDMVHAFKPNPKTNLQENWRIVDFFSHHPESLHMFTFLFDDVGIPLNYRHMEGFGVNTYTLINRDGKPHLVKFHWKPTCGVKCLLDNEAVTVGGTCHSHATKDLYDSIAAGNYPEWKLYIQTIDLDHEDKFDFDPLDVTKTWPEDIIPLQPVGRMVLNKNVDNFFAENEQIAFCPAIIVPGIHYSDDKLLQTRIFSYADTQRHRLGPNYLMLPVNAPKCAHHNNHHDGFMNFMHRDEEVNYFPSRFDPARHAEKVPIPPRVLTGCREKCIIQKENNFKQAGERYRSFDPARQDRFIQRWVDALTDPRVTHEHRTIWISYWSQCDAALGQKLASRLNLKPSM

SEQ ID NO: 581 - protein, 496 aa, Zea mays
ITMDPTKFRPSSSHDTTVTTTNAGAPVWNDNEALTVGPRGPILLEDYHLIEKVAHFARERIPERVVHARGASAKGFFECTHDVTSLTCADFLRAPGVRTPVIVRFSTVIHERGSPETIRDPRGFAVKFYTREGNWDLLGNNFPVFFIRDGIKFPDVIHAFKPNPRSHVQEYWRVFDFLSHLPESLHTFFFLFDDVGVPSDYRHMEGFGVNTYTFVSAAGKAQYVKFHWKPTCGVRCILTDEEAALVGGRNHSHATQDLYDSIAAGSFPEWTLYVQVMDPDTEEQYDFDPLDDTKTWPEDLLPLRPVGRLVLDRNVDNFFNENEQLAFGPGLVVPGIYYSDDKMLQCRVFAYADTQRYRLGPNYLMLPVNAPRCAHHNNHYDGAMNFMHRDEEVDYYPSRHAPLRQAAPPTPLPPRPVAGRREKATIRKPNDFKQPGERYRSWDADRQDRFVRRFADSLGHPKVSQELRSIWIDLLAKCDASLGMKIATRLNMKPNM

SEQ ID NO: 582 - protein, 289 aa, Zea mays
MAAPMVDAEYLRQVDRARRHLRALISNKGCAPIMLRLAWHDAGTYDLKTKTGGANGSIRYEEEYTHGSNAGLKIAIDLLEPIKAKNPKITYADLYQLAGVVAVEVTGGPTVEFIPGRRDSSVCPREGRLPDAKKGAPHLRDIFYRMGLSDKDIVALSGGHTLGRAHPERSGFDGAWTKEPLKFDNSYFLELLNEESEGLLKLPTDKALLSDPEFRRYVELYAKDEDAFFKDYAESHKKLSELGFTPRSTAPSKSDLPTAAVLAQSAFGVAVAAAVVIAGYLYEASKKAK

SEQ ID NO: 583 - protein, 447 aa, Zea mays
MDEEYDVIVLGTGLKECIISGLLSVDGLKVLHMDRNDYYGGESSSLNLTKLWNRFKGNDSPPEHLGVSKEYNVDMVPKFMMANGALVRVLIRTSVTKYLNFKAVDGSFVYNNGKIHKVPATDVEALKSNLMGLFEKRRARKFFIYVQDYEEDDPKSHEGLDLNKVTTREVISKYGLEDDTVDFIGHALALHRDDSYLDEPAIDTVKRMKLYAESLARFQGGSPYIYPLYGLGELPQAFARLSAVYGGTYMLNKPECKVEFDESGKAYGVTSEGETAKCKKIVCDPSYLPDKVKKVGRVARAICIMKHPIPDTKDSHSVQIILPKKQLKRKSDMYVFCCSYAHNVAPKGKFIAFVSTEAETDKPEIELKPGIDLLGPVEETFFDIYDRYEPVNNPDDDCCFLTNSYDSTTHFETTVKDVLALYNKITGKELDLSVDLNAASATEQEAA

SEQ ID NO: 584 - protein, 458 aa, Glycine max
MDEEYDVIVLGTGLKECILSGLLSVDGLKVLHMDRNDYYGGESTSLNLIQFELRNDDFLCPPLQLWKRFRGDDKPPPHLGASRDYNIDMNPKFIMANGNLVRVLIHTDVTKYLYFKAVDGSYVFNKGKVHKVPANDMEALKSPLMGLFEKRRARKFFIYVQNYNESDPKTHEGMDLTRVSTKELIAKYGLDDNTIDFIGHALALHSDDRYLAEPALDTVKRMKLYAESLARFQGGSPYIYPLYGLGELPQAFARLSAVYGGTYMLNKPECKVEFDEEGKVVGVTSEGETAKCKKVVCDPSYLPGKVRKVARVARAIAIMSHPIPSTDDSHSVQIILPQKQLGRKSDMYLFCCSYTHNVAPKGKFIAFVSTEAETDQPAIELKPGIDLLGPVDEIFFDIYDRYEPVNEPTLDNCFISTSYDATTHFESTVDDVLNMYTLITGKVIDLSVDLSAASAAEE

SEQ ID NO: 585 - protein, 247 aa, Zea mays
MSSAVEAISCPKVDVPAGPEPGEPAKEAAPPAEHCDTAPNGKCAPRCHGEEEEEEEDEEDEEKAPKAIDLGPMVSIKEQLEKDKDDESLRRWKEQLLGGVDLNSVGETLEPDVKIMSLSILSPGRPDIVLPLPVEPNGKGVWFTLKEGSPYRLKFTFSVSNNIVSGLRYTNTVWKTGLKVDRAKEMLGTFSPQLEPYTYVTPEDTTPSGMFARGSYSARTKFLDDDRKCYLEINYTFDIRREWPSTS

SEQ ID NO: 586 - protein, 132 aa, Zea mays
MAQVRGSARGTGSGSSAAALALVLLCALLRGEFAESAVYTVGDRGGWSFNTASWPNGKRFRAGDVLVFRYDARAHNVVPVSAAGYSSCSAPEGARALATGNDRVTLRRGANYFICSFPGHCQAGMKVAVTAA

SEQ ID NO: 587 - protein, 127 aa, Zea mays
MAEGRGSARAIGAMAFAVACCYCCVAIADAATTYYVGDSNGWSFSSPSWPNGKHFRAGDTLVFRYIPWIHNVVAVDEDGYNGCTTPPGSRTYTSGADSVTLARGDNFFICTRFGHCNLGMKLVVYAA

SEQ ID NO: 588 - protein, 127 aa, Glycine max
MSQGRGSASLPIVVTVVSLLCLLVLLERADAATYTVGGPGGWTFNTNAWPKGKRFRAGDILIFNYDSTTHNVVAVDRSGYNSCKTPGGAKVFSSGKDQIKLARGQNYFICNYPGHCESGMKVAINAV

SEQ ID NO: 589 - protein, 182 aa, Zea mays
MLCPCMHHVLVYNVSGTFVRSSACISQYLVKEKSSDPARPAGSCVAAFQYSSAHSVLEVSEADHGACSASNPLRSHQGQSTTIPLTKAGTRYFICGAPGHCASGMKVAITVSGGGGGGSSSADNTATPSGPSVRAMNTKPAFGLRSGGATTTDESDSSAAGSGARLAMGLLFGAAGLAAIMG

SEQ ID NO: 590 - protein, 195 aa, Zea mays
MAATSRLALALLLAALVAAWQLPAAAVAANYTVGDEKGWNPDVDYTAWVKKHKPFYKGDWLIFEYQNGRSDVVQVDEVGYDNCDKANALSSYSKGHTYAFQLKDAKDYYFICSYGYCYNGMKLHVTAKSSSSSSSSSSGSDSSSSSSDDDSSSPSPPAKKSKAKTSAAPPPSLLAATPMAAAAAAAAALLLNRML

SEQ ID NO: 591 - protein, 350 aa, Zea mays
MERERQAVARNRKVVLRGYIDRAPREEDMELVDGGAVELRVPEGGGGPAVLVKNLYLSCDPYMRGRMRDFRNSYIPPFKPGSPIEGFGVGRVVDSTHPGFSAGDVVSGMTGWEDYSLITKPEQLRKIQQSDIPLSYHLGLLGMPGFTAYVGFYEICSPKKGEFVFVSAASGAVGQIVGQLAKLHGCYVVGSAGTDQKVELLKEKFGFDAAFNYKEEPDLTAALKRHFPEGIDIYFENVGGPMLDAVLLNMRVHGRIAVCGMVSQHGVTAPAGIHNLFSLISKRIEMKGFIQSDYVHLFPQFVDDITRHYRDGKIVYVEDMSVGLESGPASFVGLFSGKNVGKQVVCVSRD

SEQ ID NO: 592 - protein, 342 aa, Glycine max
MTQVRNKQVVLRDYVTGFPKESDMNIVEGTIILKVPEGSNDVLLKNLYLSCDPYMRLLMAKDRSFGDGSFTLASPLKGYGVSQVLESGRPDYKKGDLVWGITKWEEYSLVPSSLIHFKIEHTDVPLSYYTGILGMPGMTAYAGFFEVGSPKKGDTVFVSAASGAVGQLVGQFAKLTGCYVVGSAGSKEKVDLLKNKLGFDEAFNYKEEPDLNAALKRYFPEGIDIYFENVGGKTLDAVLPNMKFHGRIPVCGMISQYNLTQFDGVTNLANLIFKRVKMEGFIATDFYHLYPKFLEFVLPHIREGKVVYVEDIAEGLEKGPAALVGLYTGRNVGKQVVVVTHE

SEQ ID NO: 593 - protein, 358 aa, Zea mays
MATTATNRRVILKEYVEGYPREEHMELLQGAEVPLRLTGAEPAGSVLVRNLYLSCDPYMRPKMSRPLRESYTAAFVPGDTITGYGVARVVDSSDPRLAPGDLVWGITGWEDYSVVTPPATRLLSKISHHGVGEGAGVPLSYYTGILGMPGLTAYVGFHEICAPKKGETVFVSAASGAVGQLVGQFARLAGCHVVGSAGSREKVELLKTRFGFHDAFNYKEEPDLGAALKRCFPDGIDIYFENVGGAMLDAVLLNMRVHGRIAVCGLISQYNLADGEKDAVRNLAAVISKRLRLQGFIEPDHKHLYPQYEAWVLPYIRDGTLAYVEDVAEGLESAPKALIGLFHGRNVGKQLVRVADDE

SEQ ID NO: 594 - protein, 335 aa, Zea mays
MADLIKAVDIRGGKGERDALFINPQTPKPSPTEGQALVRVKAFGINRMDIVQRRGFYPLPPQAPATLGVEFSGTIESLGPGDHGAFKQGDEVFGLAYGGAYAEYLAVSTRMLLHKPSSMDFVTCAGIPETWITATQALHLVLGFTKGKSILWHAGASGVSIAGIQLSKIAGASQVFATAGSQEKCDFITSKLGATAAFNYKTQDWAEEIKKHTDGNGVDYIVDFVGASYFQQNQTAAARDGRIVLLGTLGGVKIPEADISQILYKRLRIEGSTLRSRDEEYQGKLRDRLEEYLPDFESGKLKILVDKVLPWEEIQEAHKHMEEAKNLGKIICTIS

SEQ ID NO: 595 - protein, 525 aa, Emericella nidulans
MSPLNGVARSFPRPFQAVTRRPFRVVQPAIACPSNSRSFNHSRSLRSTGSQSPAPSPRDSSNPALSFPCLDAQEAKSALLSARSLGSGPEPSYTAGHHERFHSDEPLLLDWGGLLPEFDIAYETWGQLNEKKDNVILLHTGLSASSHAHSTEANPKPGWWEKFIGPGKTLDTDKYFVICTNVLGGCYGSTGPSTVDPSDGKKYATRFPILTIEDMVRAQFRLLDHLGVRKLYASVGSSMGGMQSLAAGVLFPERVGKIVSISGCARSHPYSIAMRHTQRQVLMMDPNWARGFYYDSIPPHSGMKLAREIATVTYRSGPEWEKRFGRKRADPSKQPALCPDFLIETYLDHAGEKFCLEYDANSLLYISKAMDLFDLGLTQQLATKKQRAEAQAKISSGTNTVNDASCSLTLPEQPYQEQPSASTSAEQSASASETGSAPNDLVAGLAPLKDHQVLVIGVASDILFPAWQQREIAETLIQAGNKTVEHIELGNDVSLFGHDTFLLDVRTSEAQFASSVLVGSHIIVQ

SEQ ID NO: 596 - protein, 241 aa, Synechocystis PCC6803
ILFICCSDSRVDPNLITQSEVGDLFVIRNAGNIIPPYGAANGGEGAAMEYALVALEINQIIVCGHSHCGAMKGLLKLNSLQEKLPLVYDWLKHTEATRRLVLDNYSHLEGEDLIEVAVAENILTQLKNLQTYPAIHSRLHRGDLSLHGWIYRIEEGEVLAYDGVLHDFVAPQSRINALEPEDEYALHPNSPLISYDAFKVPGKERPGREKATESPAPQLSPLPGFGHLPREQAERIYRGSR

SEQ ID NO: 597 - protein, 200 aa, Synechocystis PCC6803
MTEVLRVGQPAPDFTATAIVDQSFQTVKLSTYRGKYLVLFFYPLDFTFVCPTEIIAFSDRHSEFTALDTEVVGISVDSEFSHLAWIQTERKMGGIGNINYPLVSDLKKEISQAYNVLEPDAGIALRGLFIIDREGILQYATVNNLSFGRSVDETLRVLKAIRHVQSHPNEVCPVDWQEGDKTMIPDPEKAKTYFETVAEP

SEQ ID NO: 598 - protein, 196 aa, Saccharomyces cerevisiae
MVAEVQKQAPPFKKTAVVDGIFEEISLEKYKGKYVVLAFVPLAFSFVCPTEIVAFSDAAKKFEDQGAQVLFASTDSEYSLLAWTNLPRKDGGLGPVKVPLLADKNHSLSRDYGVLIEKEGIALRGLFIIDPKGIIRHITINDLSVGRNVNEALRLVEGFQWTDKNGTVLPCNWTPGAATIKPDVKDSKEYFKNANN

SEQ ID NO: 599 - protein, 261 aa, Saccharomyces cerevisiae
MFSRICSAQLKRTAWTLPKQAHLQSQTIKTFATAPILCKQFKQSDQPRLRINSDAPNFDADTTVGKINFYDYLGDSWGVLFSHPADFTPVCTTEVSAFAKLKPEFDKRNVKLIGLSVEDVESHEKWIQDIKEIAKVKNVGFPIIGDTFRNVAFLYDMVDAEGFKNINDGSLKTVRSVFVIDPKKKIRLIFTYPSTVGRNTSEVLRVIDALQLTDKEGVVTPINWQPADDVIIPPSVSNDEAKAKFGQFNEIKPYLRFTKSK

SEQ ID NO: 600 - protein, 176 aa, Saccharomyces cerevisiae
MSDLVNKKFPAGDYKFQYIAISQSDADSESCKMPQTVEWSKLISENKKVIITGAPAAFSPTCTVSHIPGYINYLDELVKEKEVDQVIVVTVDNPFANQAWAKSLGVKDTTHIKFASDPGCAFTKSIGFELAVGDGVYWSGRWAMVVENGIVTYAAKETNPGTDVTVSSVESVLAHL

SEQ ID NO: 601 - protein, 260 aa, Glycine max
MACSATSASLFSANPTPLFSPKPSLSLHLNPLPTRPSPSLTRPSLSLTRPSHSRRSFVVKASSSELPLVGNTAPDFEAEAVFDQEFINVKLSDYIGKKYVVLFFYPLDFTFVCPTEITAFSDRHAEFEALNTEILGVSVDSVFSHLAWIQTDRKSGGLGDLNYPLISDVTKSISKSYGVLIPDQGIALRGLFIIDKEGVIQHSTINNLAIGRSVDETKRTLQALQYVQENPDEVCPAGWKPGEKSMKPDPKLSKDYFAAV

SEQ ID NO: 602 - protein, 214 aa, Glycine max
MASLTVPNHCVPTLLRTHSLNYPSSQNLPLPSAPSNSQFFGLKLSHSSFSTIPSSSSSLKGSIFAKVTKGSKPPNFTLKDQNGKNVSLSNFKGKPVVVYFYPADETPGCTKQACAFRDSYEKFKKAGAVVVGISGDDAASHKAFASKYKLPFTLLSDEGNKVRKEWGVPGDFFGSLPGRETYVLDKNGVVQLVYNNQFQPEKHIGETLKILQSL

SEQ ID NO: 603 - protein, 240 aa, Zea mays
MAAAPFAIAGRLSPVARLPVRAWRPAHGFASSGRARSLAVASAAQENRDNSVDVQVSQNGGNRQQGNAVQRRPRRATALDISPSPFGLVDPMSPMRTMRQMLDTMDRLFDDAVGFPMGTRRSPATTGDVRLPWDIVEDEKEVKMRIDMPGLARDEVKVMVEDDTLVIRGEHKKEEGAEGGSGGDGDGWWKQRSVSSYDMRLALPDECDKSKVRAELKNGVLLVTVPKTEVERKVIDVQVQ

SEQ ID NO: 604 - protein, 208 aa, Zea mays
MSRRAAALLLACLVAVTAAALADGALLPWFGDGRRGLDEAAVTDVGLLAADPFRILEHVPFGFDRDDVAMVSMARVDWRETPDAHEIVVDVPGMRREDLRIEVEDNRVLRVSGERRRAEERKGDHWHREERSYGRFWRRFRLPENADLDSVAASLDSGVLTVRFRKLAPEQIKGPRVVGIAGGDGGAEAKESIGTGAGDGHQTKKVEL

SEQ ID NO: 605 - protein, 221 aa, Zea mays
MGPYSTAVAVSASPVLQASSLLTRARGSWRPTVAALRLSASVKCRRRALTVTCALPEKERPAAFNIPPTALLCPVPPPDGKERWDIKEEDDRVTLWLQVPGLSASDIEVTTSEDVLEIKRRVVAPQQPAPVDAHGVGAFHIRLLLTKEYDGSNVTADLKAGMLEVTVHKNPQRPGERAVMMGATKPPPEPRQNEESSTNQRSSTARKETGTPMGRQNPNGV

SEQ ID NO: 606 - protein, 165 aa, Zea mays
MDGRMFGLETPLMVALQHLLDVPDGDAGAGGDKASGAAAGGGPTRTYVRDARAMAATPADVKELPGAYAFVVDMPGLGTGDIRVQVEDERVLVISGERRREEREDAKYLRMERRMGKFMRKFVLPDNADMDKISAVCRDGVLTVTVEKLPPPEPKKPKTIEVKVA

SEQ ID NO: 607 - protein, 154 aa, Zea mays
MSLVRRGSVFDPFSVDLFDPFDSVFRSIVPSSSSAAAASETAAFASARIDWKETPEAHVFKADLPGVKKEEVKVEVEDGNVLLISGQRSREKEDKGDKWHRVERSSGQFVRRFRLPENAKTEEVRAALENGVLTVTVPKAEVKKPEVKSIQISG

SEQ ID NO: 608 - protein, 208 aa, Zea mays
MSTVTSCTFLSLGSPVRPAVSSARPAAAAVASRRRPRSLSVCCEAGRKGDHNPKTDLHPFNIPAFVLVHPVAPREERWQLEEDADKVNLWFEVPGQSKDDLTVEIDEDVLVIKKRKELVGQRSPAGGGVAEYGSQSQQQSRRGTADGKELPAAQQGQAGEVVYARMLLPAGYSRDGVQAELKSGVLRVTVVKVTERARRKIDVPIQVK

SEQ ID NO: 609 - protein, 799 aa, Saccharomyces cerevisiae
MSTIYRESDSLESEPSPTPTTIPIQINMEEEKKDAFVKNIDEDVNNLTATTDEEDRDPESQKFDRHSIQEEGLVWKGDPTYLPNSPYPEVRSAVSIEDDPTIRLNHWRTWFLTTVFVVVFAGVNQFFSLRYPSLEINFLVAQVVCYPIGRILALLPDWKCSKVPFFDLNPGPFTKKEHAVVTIAVALTSSTAYAMYILNAQGSFYNMKLNVGYQFLLVWTSQMIGYGAAGLTRRWVVNPASSIWPQTLISVSLFDSLHSRKVEKTVANGWTMPRYRFFLIVLIGSFIWYWVPGFLFTGLSYFNVILWGSKTRHNFIANTIFGTQSGLGALPITFDYTQVSQAMSGSVFATPFYVSANTYASVLIFFVIVLPCLYFTNTWYAKYMPVISGSTYDNTQNKYNVTKILNEDYSINLEKYKEYSPVFVPFSYLLSYALNFAAVIAVFVHCILYHGKDIVAKFKDRKNGGTDIHMRIYSKNYKDCPDWWYLLLQIVMIGLGFVAVCCFDTKFPAWAFVIAILISLVNFIPQGILEAMTNQHVGLNIITELICGYMLPLRPMANLLFKLYGFIVMRQGLNLSRDLKLAMYMKVSPRLIFAVQIYATIISGMVNVGVQEWMMHNIDGLCTTDQPNGFTCANGRTVFNASIIWSLPKYLFSSGRIYNPLMWFFLIGLLFPLAVYAVQWKFPKFKFAKHIHTPVFFTGPGNIPPSTPYNYSLFFAMSFCLNLIRKRWRAWFNKYNFVMGAGVEAGVAISVVIIFLCVQYPGGKLSWWGNNVWKRTYDNDYKKFYTLKKGETFGYDKWW

SEQ ID NO: 610 - protein, 520 aa, Zea mays
MAAAPPPKADELQPFPPKEQLPGVAFCITSPPPWPEAILLGFQHFVVMLGTTVIIPSALVPQMGGGNEEKARVVQTILFVAGINTLFQTLFGTRLPVVMGGSYVFVGPTISIVLAGRYSNEADPHEGALLVASTIQIILGFSGLWRNVVKLLSPLAAVPLVSLVGFGLYELGFPGVAKCVEVGLPELLLLVVFSQYLPQVLDFGKSVFSRFSVLFTVAIVWLYAYILTIGGAYKNSPPKTQVHCRVDRSGLISGAPWISVPYPFQWGAPTFDAGEAFAMMMTSFIALVESTGAFIGASRYASATMIPPSIISRGVGWQGIGLLLDSFFGTANGTSVSVENIGLLALTRIGSRRVVQISAGFMIFFSVLGKFGALFASIPLPVFAGMYCLFFAYVGGVGLSLLQFCNLNSFRTKFIMGFAFFMGLSVPQYFNEYTAVASYGPVHTGARWFNDMINVPFTSKPFVAGLVAYILDNTLQVKESAVRKDRGNHWWEKFRSFKKDARSQEFYSLPFNLNKFFPSV

SEQ ID NO: 611 - protein, 533 aa, Zea mays
MAGGGAATPPKQEELQPHPVKDQLPSVSYCITSPPPWPEAVILGFQHYIVMLGTSVIIPSALVPQMGGGNEEKARVIQTLLFVAGINTLCQSFFGTRLPAVMGGSYTIVAPTISIIMAGRYSNEADPREKFLRTMRGTQGALIIASTIQIVLGFSGLWRNVVKLLSPLSAVPLVSLAGFGLYELGFPGVAKCVEIGLPEIILMLIFSQYLPHAVHAAKPVFDRFSVIFTIAIVWLYAYILTVSGAYKNARTKTQLHCRVDRSGLVGGAPWISVPYPFQWGAPTFDAGESFAMMVAAFVALVESSGAFIAVSRYASATMIPPSVLGRGIGWQGIGTLLGAFFGTANGTAVSVENAGLLALTHVGSRRVVQISAGFMIFFSVLGKFGAIFASIPLPIFAALYCILFAYIGACGLSFLQFCNLNSFRTKFIMGFSLFMGLSVPQYFNEYTSVAGYGPVHTGARWFNDMINVPFSSKPFVAVLVAFLLDNTIQVRDSGVRRDRGYHWWDKFRSFKTDSRSEEFYSLPFNLNKFFPSV

SEQ ID NO: 612 - protein, 480 aa, Zea mays
MSFRSIVRDVRDGFGSLSRRSFEVTLASIYGLTGHHKGKTQSSSHVLDDSPSIIRESRWANLPPELIRDIIRRLEADESTWPARKHVVCFAAVCRTWREMCKEIVLSPEFCGKLTFPVSLKQPGPRDGNTMVQCFIKRNKSKSTYHLYLCLSNVVTSESGKFLLSAKRHRKTTCTEYTISMDSGNISRSKRTYIGKIRSNFLGTRFLIYDTQPPYNGAVVPPAGRTSRRFNSTKVSPKLPSVSYNIAQVSYELNVLGTRGPRRMRCIMHSIPASSVEPGGTVPGQPEQIVPRALEDSFRSTASFSQSFRSTASFSKSIMDSSMDFNSARFSDIAGSSARFTGVPGSSARFAGVPGSSARFSGIAGARLDNDEESETKERPLVLRNKPPRWHEQLQCWCLNFRGRVTIASVKNFQLIAAATPPPAGAPTPSQPAPSDPDKVILQFGKVARDMFTMDYRYPLSAFQAFAICLSSFDTKLACE

SEQ ID NO: 613 - protein, 370 aa, Zea mays
  unsure (1)..(370): unsure at all Xaa locations
MPRDGAQAAPPPERGEMDEVVEADPDTEAEDQEERWARLLPELLSDVVRRVEASGGERWPARKDVVSCACVCRRWREAAVSVVRPPAESGKITFPSSLKQVDXGFPYMASSAPGPRERPMQCFIKRNKNNSTFYLYLGFTSSPVDKGKFLMAARRFRRGPHTEYIISLDAEDLSQGSNAYMGKLRSDFWGTNFKIYDSKPPYDGAKASSSRSSRRFGSRRISPQVSAGNYEVGQVSYKYNLLKSRGPRRMYCTLECPSAQETWENSLKTKFRRPLGPTTLRNKAPRWHEHLQCWCLNFHGRVTVASVKNFQLVAAADPSEPTTNVDDETVLLQFGKVDSDMFTMDYRQPLSAFQAFAISLSSFGTKLACE

SEQ ID NO: 614 - protein, 454 aa, Glycine max
MASSRPANVGILAMDIYFPPTCVTQDALEGHDGVSKGKYTIGLGQDCMAFCSEVEDVISMSLTVVTSLLEKFNVDPKQIGHLAVGSETVIDKSKSIKTFLMQVFEASGNTDIEGVDSTNACYGGTAALFNCVNWVESSSWDGRYGLVVCTDTAVYAEGPARPTGGAAAIAMLVGPDAPIAFESKLRGSHMSHAYDFYKPNLASEYPIVDGKLSQTCYLMALDSCYRLYCEKFEKLEGRPFSMSDSDYFVFHSPYNKLVQKSFGRLYFNDFLRNASFVDEVARETLAPYASLSGDESYQSRDLEKANQQAAKHLYDAKVQPSTLIPKQVGNMYTASLYAAFASLLHNKNSSLVGKRVVMFSYGSGLTATMFSFQLQEGQHPFNLSNIVTVMNVSDKLKQRVEIPPEKFVETLKIMEHRYGGKDFVTSKDCSYLTPGTFYLTNVDSMYRRFYAKKD

SEQ ID NO: 615 - protein, 491 aa, Saccharomyces cerevisiae
MKLSTKLCWCGIKGRLRPQKQQQLHNTNLQMTELKKQKTAEQKTRPQNVGIKGIQIYIPTQCVNQSELEKFDGVSQGKYTIGLGQTNMSFVNDREDIYSMSLTVLSKLIKSYNIDTNKIGRLEVGTETLIDKSKSVKSVLMQLFGENTDVEGIDTLNACYGGTNALFNSLNWIESNAWDGRDAIVVCGDIAIYDKGAARPTGGAGTVAMWIGPDAPIVFDSVRASYMEHAYDFYKPDFTSEYPYVDGHFSLTCYVKALDQVYKSYSKKAISKGLVSDPAGSDALNVLKYFDYNVFHVPTCKLVTKSYGRLLYNDFRANPQLFPEVDAELATRDYDESLTDKNIEKTFVNVAKPFHKERVAQSLIVPTNTGNMYTASVYAAFASLLNYVGSDDLQGKRVGLFSYGSGLAASLYSCKIVGDVQHIIKELDITNKLAKRITETPKDYEAAIELRENAHLKKNFKPQGSIEHLQSGVYYLTNIDDKFRRSYDVKK

SEQ ID NO: 616 - protein, 571 aa, Zea mays
  unsure (1)..(571): unsure at all Xaa locations
MDLHQLLKYRLTGANVYYEFPTENNLANTPWPASPLKSEFSSSSYTPLSSQLECDNLSALSNTPDNQSSTETISAQPISPLEVDSSFKQAAILRENTQVRPDPLYTTSRHNMQHALREIETVLMAPDADDAATSTKHEIEEHKPAQLMRQRSRTWSHESRQPSPGVVRTQLASGYPTASYEFRPEKRLRELREDPQSMVKQLLTKCAEALSEERIEEFLNLVQQARGVVSITGEPIQRLGAYLLEGLVARHANSGTNIYRALKCREPESNELLSYMKILYNICPYSKFGYMAANGAIAEALRNEDRIHIIDFQIAQGTQWITLIQALAARPGGPPHVRITGIDDPVSEYARGEGLDLVGKMLKSMSEEFRIPLEFTPLPGIYATQVTKEMLDIRSGEALAVNFTLQLHHTPDESVDVNNPRDGLXPDGERPVSEGDHACGAGVAHQHDPVLDAVHRDLGLLFGHVRVNRXRTCHGTTRSGSTWSSTVLPRXIVNIIACEGKDRVERHELLGKWRSRLTMAGFRPYPLSSYVNSVIRKLLACYSDKYTLEEKDGAMLLGWKNRKLISASAWH

SEQ ID NO: 617 - protein, 429 aa, Zea mays
MASAGISGSGDDDAGGKLLADRYQKGEVLGEGTYGVVFKAFDTKTGNTVAVKRIWVGKDKKEGVNFTTLREIRLLKELKGPNIIELIDCFPYKENLHLVFEFMETDLEALIKDKNIILSPADTKSYLQMLLKGLSFCHKKWVIHRDMKPNNLLIGADGQLKLADFGLARMFGSPGRNFTHQVFARWYRAPELLFGSKQYGSGVDIWAAGCIFAELLTRRAFLQGSSDIDQLGKIFAALGTPKSSQWPDMVYLPDYVEYQYVAAPPLRTLLPMASDDALDLLSKMLTYDPKARISAQQALEHRYFSSLPAPTRPSQLLRSRWKGDQGNNKMPDLNLQHGPLVLSPPRKLRRVIAHEWMEGMHRADKVDEHPSGMRHTDDMPSQKSSRIPMSVDVGAVFGTRPAPRPTLNSADKSRLKRKLDMDPEFGFAE

SEQ ID NO: 618 - protein, 933 aa, Zea mays
RVVVFEQLKCTREGLSSSEGQQRLEIFGPNRLEEKKESKVLKFLGFMWNPLSWVMEMAAIMAIALANGGGKPPDWQDFVGIIVLLVINSTISFIEENNAGNAAAALMANLAPKTKVLRDGRWGEQEAAILVPGDIISIKLGDIVPADARLLEGDALKVDQSALTGESLPVTKGPGDEVFSGSTCKQGEIEAVVIATGVHTFFGKAAHLVDSTNQVGHFQQVLTAIGNFCICSIGVGILVEIIVMFPIQHRKYRSGIENLLVLLIGGIPIAMPTVLSVTMAIGSHKLSQQGAITKRMTAIEEMAGMDVLCSDKTGTLTLNKLSVDKNLVEVFCKGVDKDHVLLLAARASRTENQDAIDAAMVGMLADPKEARAGIREIHFLPFNPVDKRTALTYIDADGNWHRVSKGAPEQILDLCHCKEDLRRKVHSIIDKYAERGLRSLAVARQEVPEKNKESPGGPWQFVGLLPLFDPPRHDSAETIRKALVLGVNVKMITGDQLAIGKETGRRLGMGTNMYPSSALLGQNKDATLEALPVDELIEKADGFAGVFPEHKYEIVKRLQEKKHIVGMTGDGVNDAPALKKADIGIAVADATDAARSASDIVLTEPGLSVIISAVLTSRCIFQRMKNYTIYAVSITIRIVLGFMLIALIWQYDFSPFMVLIIAILNDGTIMTISKDRVKPSPLPDSWKLKEIFATGIVLGSYLALMTVIFFWAMHKTDFFSDKFGVRSIRDSEHEMMSALYLQVSIVSQALIFVTRSRSWSFVERPGLLLVTAFLLAQLVATFLAVYANWGFARIKGIGWGWAGVVWLYSIVFYFPLDLLKFFIRFVLSGRAWDNLLENKTAFTTKKDYGREEREAQWATAQRTLHGLQPPEASSNTLFNDKSSYRELSEIAEQAKRRAEIARLRELNTLKGHVESVVKLKGLDIDTIQQNYTV

SEQ ID NO: 619 - protein, 649 aa, Zea mays
MARFEVNGKSVQGVDLLRRRHWPSRLDFWPFLALYALWLLLAVPALDFTDALIILAALSAAHILTFLFTAWFVDFRAFVGYSKVKDIHAANTCKVTPAKFSGSKEIVPLHKQKNVASTSAAGETEEIYFDFRKQRFIYSAEKDNFLKLRYPTKELIGHYGKGTGYGTEAKISTAVDKWGRNVFEYPQPTFQKLMKEQIMEPFFVFQVFCVALWCLDAYWYYSLFTLFMLFLFESTMAKNRLKTLTELRRVKVDSQIVLTYRCGKWVKVPGTELLPGDIVSIGRSTSGEDRSVPADMLLLAGSAIVNEAILTGESTPQWKVSIAGRGPDDMLSIRRDKNHILFGGTKVLQHTADKSVNLRSPDGGCLAFVLRTGFETSQGKLMRTILFSTERVTANNKESGLFILFLLFFAIIASGYVLVKGLEDPTRSRYKLLLSCSLIITSVIPPELPMELSIAVNTSLIALARHGIFCTEPFRIPFAGKVDICCFDKTGTLTSDDMEFQGIVTSEGDDLISDANKLPLRTQEVLSSCHALVFVDNKLVGDPLEKAAIKGIDWIYTSDEKAMSKKPGGQPVQIVHRYHFASHLKRMSVIVRIQQKFYAFIKGAPETIQEKLVDLPAAYVETYKKYTRQGSRVLALAYKLLPEMPVSFC

SEQ ID NO: 620 - protein, 1355 aa, Saccharomyces cerevisiae
MNDDRETPPKRKPGEDDTLFDIDFLDDTTSHSGSRSKVTNSHANGYYIPPSHVLPEETIDLDADDDNIENDVHENLFMSNNHDDQTSWNANRFDSDAYQPQSLRAVKPPGLFARFGNGLKNAFTFKRKKGPESFEMNHYNAVTNNELDDNYLDSRNKFNIKILFNRYILRKNVGDAEGNGEPRVIHINDSLANSSFGYSDNHISTTKYNFATFLPKFLFQEFSKYANLFFLCTSAIQQVPHVSPTNRYTTIGTLLVVLIVSAMKECIEDIKRANSDKELNNSTAEIFSEAHDDFVEKRWIDIRVGDIIRVKSEEPIPADTIILSSSEPEGLCYIETANLDGETNLKIKQSRVETAKFIDVKTLKNMNGKVVSEQPNSSLYTYEGTMTLNDRQIPLSPDQMILRGATLRNTAWIFGLVIFTGHETKLLRNATATPIKRTAVEKIINRQIIRLFTVLIVLILISSIGNVIMSTADAKHLSYLYLEGTNKAGLFFKDFLTFWILFSNLVPISLFVTVELIKYYQAFMIGSDLDLYYEKTDTPTVVRTSSLVEELGQIEYIFSDKTGTLTRNIMEFKSCSIAGHCYIDKIPEDKTATVEDGIEVGYRKFDDLKKKLNDPSDEDSPIINDFLTLLATCHTVIPEFQSDGSIKYQAASPDEGALVQGGADLGYKFIIRKGNSVTVLLEETGEEKEYQLLNICEFNSTRKRMSAIFRFPDGSIKLFCKGADTVILERLDDEANQYVEATMRHLEDYASEGLRTLCLAMRDISEGEYEEWNSIYNEAATTLDNRAEKLDEAANLIEKNLILIGATAIEDKLQDGVPETIHTLQEAGIKIWVLTGDRQETAINIGMSCRLLSEDMNLLIINEETRDDTERNLLEKINALNEHQLSTHDMKSLALVIDGKSLGFALEPELEDYLLTVAKLCKAVICCRVSPLQKALVVKMVKRKSSSLLLAIASGANDVSMIQAAHVGVGISGMEGMQAARSADIALGQFKFLKKLLLVHGSWSYQRISVAILYSFYKNTALYMTQFWYVFANAFSGQSIMESWTMSFYNLFFTVWPPFVIGVFDQFVSSRLLERYPQLYKLGQKGQFFSVYIFWGWIINGFFHSAIVFIGTILIYRYGFALNMHGELADHWSWGVTVYTTSVIIVLGKAALVTNQWTKFTLIAIPGSLLFWLIFFPIYASIFPHANISREYYGVVKHTYGSGVFWLTLIVLPIFALVRDFLWKYYKRMYEPETYHVIQEMQKYNISDSRPHVQQFQNAIRKVRQVQRMKKQRGFAFSQAEEGGQEKIVRMYDTTQKRGKYGELQDASANPFNDNNGLGSNDFESAEPFIENPFADGNQNSNRFSSSRDDISFDI

SEQ ID NO: 621 - protein, 1258 aa, Schizosaccharomyces pombe
MARDVDNKQNAKRISRDEDEDEFAGESMVGRTLDNPFLGEDEFEDIFGSESQYISSSGQNSTNPFLADTRIENSPLGSESKANQLNKQGTNVNHIEIPLRDFNDPTQPESFLPPPKNTFTSRIKKIKNLFKKEKKQVKPEDLGPRQIILNDYSANHFLHNAVSTCKYSAFTFLPKFLKEQFSKYANLFFLFTAVVQQIPGITPVNRYTTIGPMLIVLSVSGIKEIMEDIKRKKQDQELNESPCYVLQGTGFVEKQWKDVVVGDIVKIVSETFFPADLVLLSSSEPEGLCYIETANLDGETNLKIKQALPETAGLLKPVELGQLSGEVKSEQPNNNLYTFDATLKLLPSDRELPLSPDQLLLRGAQLRNTPWVYGIVVFTGHESKLMKNTTETPIKRTSVEKQVNSQILFLLCIFVFLCFASSLGALIHRSVYGSALSYVKYTSNRAGMFFKGLLTFWILYSNLVPISLFVTFELVRYIQAQLISSDLDMYNEETDTPAACRTSSLVEELGQVGYIFSDKTGTLTRNQMEFRQCTIAGVAYADVIPEDRQFTSEDLDSDMYIYDFDTLKENLKHSENASLIHQFLLVLSICHTVIPEYDESTNSIKYQASSPDEGALVKGAASIGYKFLARKPHLVTVSIFGKDESYELLHICEFNSTRKRMSIVFRCPDGKIRLYVKGADTVIMERLASDNPYLQTTIHHLEDYATVGLRTLCIAMREVPEDEYQRWSTVFETAASSLVDRAQKLMDAAEEIEKDLILLGATAIEDRLQDGVPDTISTLQTAGIKIWVLTGDRQETAINIGMSCKLIDEDMGLVIVNEETKEATAESVMAKLSSIYRNEATTGNVESMALVIDGVSLTYALDFSLERRFFELASLCRAVICCRVSPLQKALIVKMVKRNTGEVLLAIGDGANDVPMIQAAHVGVGISGMEGLQAVRSSDFSISQFCYLKKLLLVHGSWCYQRLSKLILYSFYKNIALYMTQFWYAFCNAFSGQVIFESWSISLYNVLFTVLPPVVIGIFDQFVSAGQLFQYPQLYQLGQRSEFFNLKRFWSWITNGFYHSLLLFLCSIAVFYYDGPNKDGLASGHWVWGTTLYAAILATVLGKAALISNHWTQYTVIATLGSFLLWIVFMPIYAVAAPAIGFSKEYYGIIPHLYGNLKFWASLLVLPTIALMRDFVWKYSSRMYYPEEYHYVQEIQKYNVTDYRPRIVGFHKAIRKIRQMQRMRKQRGYAFSQGEEDQSRILDAYDTTHTRGAYGEMR

SEQ ID NO: 622 - protein, 1185 aa, Oryza sativa
MASGRPLLDASPRPTQQPPASSLLPPPQPEPPLRADRLAFSLEVPDPFRREPDPSSAASQRGEEEGGGEEESRAVVVGEPSSSEAAAGFAGNGVRTAKYSVLTFLPRNLFEQFRRLSYVYFLAITVLNQLPQVAVFGRGASVLPLAFVLFVTAVKDAYEDLRRHRSDRQENNRLARVLLAPPAAGEFAPKKWKHIRVGDVVRVASSETLPADMVLLATSDPSGVAHVQTVNLDGETNLKTRYAKQETQLRFSQDGGIGGVLHCERPNRNIYGFQANLEIDGKRVSLGPSNIVLRGCELKNTTWAIGVVVYAGKETKVMLNSSGAPSKRSRLETQLNRETVILSIMLIGMCTTASVLAGIWILNHRGDLEFTQFFREKDYTTGKNYNYYGMGMQIFITFLMAVIVYQVIIPISLYISMELVRLGQAYFMGADRDLYDESSRSKFQCRALNINEDLGQIKYVFSDKTGTLTENKMEFQCASIRGVDYCSGKDSCGYSVVVWLLIFWFWTVDDLLWTPKMAVKIDHRLLKLLRGGGTDEETKLVLEFFLALAACNTIVPLVLDTRDSKQKLIDYQGESPDEQALVYAAASYGIVLVERTSGYVVIDVLGDRQRFDILGLHEFDSDRKRMSVIVGCPDKTVKLYVKGADSSLFGITKNSLDLDIVRATEAHLHKYSSFGLRTLVIGMRELSQPEFEEWQLAYENASTSVLGRGNLLRSVAANIENNIRILGATGIEDKLQDGVPETIESLRQADIKVWILTGDKQETAISIGYSCKLLTNDMTQIVINNNSKESCKRSLEEAHATIKKLRIASTGTQSPELASESAGVTLALIVDGNSLVYILETELQEELFKVARECSVVLCCRVAPLQKAGIVALIKNRTDDMTLAIGDGANDVSMIQMADVGVGISGQEGRQAVMASDFAMGQFRFLVPLLLVHGHWNYQRMSYMILYNFYKNATFVLVLFWYVLYTAFTLTTAITEWSSLLYTVLYTSLPTIVVGILDKDLSKETLLAYPKLYGSGQRDEKYNVNLFVLNMLEALWQSLVVFYMPYFAYRQSTIDMSSLGDLWALAPVIVVNMLLAMDIFRWNWIVHAFVWGTIAATTICLFVIDSIWFLPGYGAIFHIMGTGLFWLLLLIIVVAAMVPHFVIKAFTEYFTPSDIQVAREIEKFENVNQVNRSEVPMTRLHDPRR

SEQ ID NO: 623 - protein, 392 aa, Oryza sativa
METVAAASYTRGAATRSPACCAAMSFSQSYRPKAARPPSTFYGESLRVNTARSLPSGRQSKAASRAALSTRCEIGDSLEEFLTKATPDKNLIRLLICMGEAMRTISFKVRTASCGGTACVNSFGDEQLAVDMLADKLLFEALEYSHVCKYACSEEVPELQDMGGPVDGGFSVAFDPLDGSSIVDTNFTVGTIFGVWPGDKLTGVTGGDQVAAAMGIYGPRTTYIIALKDCPGTHEFLLLDEGKWQHVKDTTTIGEGKMFSPGNLRATFDNPEYDKLINYYVKEKYTLRYTGGMVPDVNQIIVKEKGIFTNVTSPTAKAKLRLLFEVAPLGFLIEKAGGYSSDGKQSVLDKVINNLDERTQVAYGSKNEIIRFEETLYGSSRLTAGATVGAAA

SEQ ID NO: 624 - protein, 339 aa, Oryza sativa
MDHEADAYRTDLMTITRYVLNEQSRNPEARGDLTILLSHIVLGCKFVASAVNKAGLAKLIGLAGETNVQGEEQKKLDVLSNEVFVKALVSSGRTCVLVSEEDEEATFVDPALRGKYCVCFDPLDGSSNIDCGVSIGTIFGIYMIKDKENVTLEDVLQPGKNMVAAGYCMYGSSCTLVLSTGNGVNGFTLDPSLGEFILTHPDIKIPKKGKIYSVNEGNAKNWDEPTAKFVEKCKFPKDGSSPKSLRYIGSMVADVHRTLLYGGVFLYPADKKSPNGKLRVLYEVFPMSFLMEQAGGQSFTGKERALDLVPTKIHERSPIFLGSFEDVEEIKGLYAAQAK

SEQ ID NO: 625 - protein, 393 aa, Triticum sp.
METVAAAGYARGAATRSPACCAAMSFSQSYRPKAARPATSFYGESLRANTARTSFPAGRQSKAASRAALTTRCAIGDSLEEFLTKATPDKNLIRLLICMGEAMRTIAFKVRTASCGGTACVNSFGDEQLAVDMLADKLLFEALEYSHVCKYACSEEVPELQDMGGPVEGGFSVAFDPLDGSSIVDTNFTVGTIFGVWPGDKLTGVTGGDQVAAAMGIYGPRTTFVVALKDCPGTHEFLLLDEGKWQHVKDTTSIGEGKMFSLGNLRATFDNPDYDKLVNYYVKEKYTLRYTGGMVPDVNQIIVKEKGIFTNVTSPTAKAKLRLLFEVAPLGFLIEKAGGHSSDGKQSVLDKVISVLDERTQVAYGSKNEIIRFEETLYGSSRLAASATVGATA

SEQ ID NO: 626 - protein, 383 aa, Chlorella sorokiniana
MQATAVATAAPAARVATTGKAATGVKAAPRVAVRAAGASASSSFATGARLSAKASRTAARRAAVAAQAKIGDTLEEFLLEATPDPKLRQLMMSMSEAIRTIAYKVRTASSGGTASVNSFGDEQLAVDLLADKLLFEALKYSGCCKLACSEEVPEPLDLGGEGFSVAFDPLDGSSIVDTNFSVGTIFGVWPGDKLTGITGRQQAAAGMGIYGPRTVFCIALKDAPGCHEFLLQDDGKWLHVKETETIGEGKMFSPGNLRATFDNPAYEKLIAYYIGEKYTLRYTGGMVPDVFQIIVKEKGVFTNVISPSTKAKLRLLFEVAPLALLVEKAGGASSCDGLCVSGLDVEVKQHDQRTQICYGSKGEVRRFEEYMYGNSPRFSEVTA

SEQ ID NO: 627 - protein, 371 aa, Glycine max
VQVSRHGLWDLHLEMKERQRWRAEEDALLRSYVKQYGPREWNLVSQRMNTYLNRDAKSCLERWKNYLKPGIKKGSLTEEEQRLVIHLQAKYGNKWKKIAAEVPGRTAKRLGKWWEVFKEKQQREKKEINRIADPINNSKYEHILESFAEKLVKERPSPSFVMAASDGAFLLTDTPAPASSLRPSWLSNSSSAAAIGPSSLSVKLSLSSSTVATPPFSWLPPERGPDNAPFVLGNVSALHGAIPTLSDSMHMSQMVEHCKELGEGHRALATHKKEAAWRLSRVELQLESEKANRRREKIEEFEAKIKALQEEEKAALGRIEAEYREQLAALRRDAENKEQKLAEQWDAKHLRFTRLLEQLGCRAGLLEPNAR

SEQ ID NO: 628 - protein, 376 aa, Glycine max
RFQVPSNWLWDLHLEMKDRQRWRAEEDALLRAYVKQYGPREWNLVSQRMNTPLNRDAKSCLERWKNYLKPGIKKGSLTEEEQRLVINLQATHGNKWKKIAAQVPGRTAKRLGKWWEVFKEKQQRETKGNNCTIDPINDSKYEHILESFAEKLVKERPSTSTSTSFVMATSNSSFLHADAPAPAPALLPSWLSNSNGTAPVRPPSPSVTLSLSPSTVAAPPPWMQPPVRGQDNASPLVLGNVAPHGAVLAFGENMVMSELVECCKELDEVHHALAGHKKEAAWRLSRVELQLESEKAGRRREKMEEIEAKIKALREEQTAALDRIEAEYREQLAGLRRDAESKEQKLAEQWAAKHLRLTKFLEQVGCRSRLTEPNGR

SEQ ID NO: 629 - protein, 351 aa, Zea mays
MDQSFGNLGAGAGSSSGGSNSKAAAAAVSSSSFLQLPLSTASPAYYGAPLALLHHAAAAPSSSQQHQQQQHHHHYARHGAEMSAAEAEAIKAKIVAHPQYSALLAAYLDCQKVGAPPDVLERLTAMAAKLDARPPGRHEPRDPELDQFMEAYCNMLVKYREELTRPIDEAMEFLKRVEAQLDCISGGGGSSSARLSLADGKSEGVGSSEDDMDPNGRENDPPEIDPRAEDKELKYQLLKKYSGYLSSLRQEFSKKKKKGKLPKEARQKLLHWWELHYKWPYPSETEKIALAESTGLDQKQINNWFINQRKRHWKPSEDMPFVMMEGFHPQNAAALYMDGPFMADGMYRLGS

SEQ ID NO: 630 - protein, 308 aa, Glycine max
MDGMYGVPAEYADKALMTPENLIFPPDYHHDFLAAGRIPLFGSDEFFSSSAGIHRQQEDDVAATTVMKAKIASHPHYPRLLQAYIECQKVGAPPEIARLLEEIRRENDPCKSDAVSSSTCFGADPELDEFMEAYCDMLVKYKSDLARPFDEATTFLNKIEMQLSHLCTGASVSNVSDDGGVSSDEDLSTGDGDAQDGQLKGEDRELKDRLLRKFGSHIGTLKLEFSKKKKKGKLPKEARQALLQWWNVHYKWPYPTEADKIELAKSTGLDQKQINNWFINQRKRHWKPSENMQFSMMENFNGRILADE

SEQ ID NO: 631 - protein, 311 aa, Glycine max
MEAVYRLKPLLDVVRVGNATTSEMRLDSTANCYLQLEAPQPQENNNVTDSSSDMSDRIIKIQIANHPLYPDLLSAYIECQKVGAPPELACLLEEIGRESHRMNARREIGEGPELDHFMETFCQVLHRYKEELSRPFNEATLFLGDMESQLSNLCNETLTKSSDNNNRSDEVASGASEEELSCGEMEAFEDNVSSVTCPSDQRLKEMLLRKYSGHFSGLRKEFLKRRKKGKLPKDARMALMGWWNTHHRWPYPTEEEKVKLSEITGLDQKQINNWFINQRKRHWKPTEDMRFAVMDGLRGGGGGGIGGPMLF

SEQ ID NO: 632 - protein, 420 aa, Glycine max
MDKDKSLGLPPPSGRYSGYSSTGSVFNVKSEPSPSSSTTLYPPLAPGTTSSESSHFGHGLSTDSSGFSHDISRMPDNPPRNRGHRRAHSEILTLPDDISFDSDLGVVGGGDGPSFSDDAEEDLLSMYLDMDKFNSSSATSTFQMVEPSNAVGASASTPASGAPTSSTENVVIGTNERPRVRHQHSQSMDGSTTIKPEMLVSGSEDMSAADSKKAMSAAKLAELALIDPKRAKRIWANRQSAARSKERKMRYIAELERKVQTLQTEATSLSAQLTLLQRDTNGLNSENNELKLRLQTMEQQVHLQDALNDALKEEIQHLKILTGQAMPPNGGPMMNFASFGGGQQFYPNNHAMHTLLAAQQFQQLQIHPQKQQQHQFQQLQQQQREQHQQSIDLKMREATPTPCPKDNASSDVNPSGAKDC

SEQ ID NO: 633 - protein, 287 aa, Glycine max
MAIQDQNGFFRSQGGPPEGGGVSLSSGHSVTHIQLNDQFSCGNDYALKVRKPYTITKQRERWTDEEHKKFLEALKLYGRAWRRIEEHVGTKTAVQIRSHAQKFFSKVLHDPTGNNTNTVESIEIPPPRPKRKPMHPYPRKLVETPNKEISIPEQPMKSNSLKSSDFDQENQSPKSVLSGVGSDSLGSSDSDTPNGSLSPMSSISGFHTSSFTRAKPKTTTSEEEAGMDTDSTHDEKPLMKFKLPPNGCVSIKEDNTAEESSGRTFKLFGMTLFVTDTCKPSPTIEEC

SEQ ID NO: 634 - protein, 446 aa, Oryza sativa
MAPPSAMNTSRAEEKAIDDWLPITSSRNAKWWYSAFHNVTAMVGAGVLSLPFAMSELGWGPGVAAMIMSWVITLYTLWQMVEMHECVPGRRFDRYHELGQHAFGDKLGLWIVVPQQLIVEVGVCIVYMVTGGKSLKKFHDLVAPPSAPPIRTSYFIVIFGCLHLVLSQLPNFNSITGVSLAAAVMSLSYSTIAWAASLHHHNHNNGAAAGGVDYSLTAATPAGRTFNFLSALGDVAFAYAGHNVVLEIQATIPSTPERPSKGPMWRGVVLAYGVVAVCYLPVAFAGYYVFGNAVDDNVLITLERPAWLIAAANIFVVVHVVGSYQIYAMPVFDMLETFLVKKLRFKPGMPLRLIARSLYVLFTMFVAIAVPFFGGLLGFFGGFAFAPTTYFLPCIMWLSIMKPKRFGLSWCINWFCIIIGVLLSVFAPIGGLRSIIVNAQSYKFFS

SEQ ID NO: 635 - protein, 446 aa, Zea mays
MQEQDVDDGGGRTTQQQEKSIDDWLPINSSRKAKWWYSAFHNVTAMVGAGVLGLPYAMSELGWGPGIAVMILSWIITLYTLWQMVEMHEMVPGKRFDRYHELGQHVFGDRLGLWIVVPQQLAVEVSLNIIYMVTGGQSLKKFHDVICDGGRCGGDLKLSYFIMIFASVHLVLSQLPNFNSISAVSLAAAVMSLSYSTIAWGASLHRGRREDVDYHLRATTTPGKVFGFLGGLGDVAFAYSGHNVVLEIQATIPSTPDKPSKKAMWKGAFVAYVVVAICYFPVTFVGYWAFGSGVDENILITLSKPKWLIALANMMVVVHVIGSYQVYAMPVFDMIETVLVKKMRFAPSLTLRLIARSVYVAFTMFLGITFPFFGGLLSFFGGLAFAPTTYFLPCIMWLKVYKPKRFGLSWFINWICIVIGVLLLILGPIGGLRQIILSATTYKFYQ

SEQ ID NO: 636 - protein, 473 aa, Oryza sativa
MDQHQLDEENQRAALFHSSAPSSSLGADGEEERETVPLLSCKMADDKSDTVQVSEDTAHQISIDPWYQVGFILTTGVNSAYVLGYSASIMVPLGWIGGTCGLILAAAISMYANALLAHLHEVGGKRHIRYRDLAGHIYGRKMYSLTWALQYVNLFMINTGLIILAGQALKAIYVLFRDDGVLKLPYCIALSGFVCALFAFGIPYLSALRIWLGLSTVFSLIYIMIAFVMSLRDGITTPAKDYTIPGSHSDRIFTTIGAVANLVFAYNTGMLPEIQATIRPPVVKNMEKALWFQFTVGSLPLYAVTFMGYWAYGSSTSSYLLNSVKGPIWIKTVANLSAFLQTVIALHIFASPMYEFLDTRFGSGHGGPFAIHNIMFRVGVRGGYLTVNTLVAAMLPFLGDFMSLTGALSTFPLTFVLANHMYLTVKQNKMSIFRKCWHWLNVVGFSCLSVAAAVAAVRLITVDYSTYHLFADM

SEQ ID NO: 637 - protein, 523 aa, Zea mays
MAGGGIVNTGGGKDYPGKLTLFVLLTCIVAATGGLIFGYDIGISGGVTSMNPFLEKFFPEVYRKKQEAKTNQYCKYDNQLLQTFTSSLYLAALVASFFAATVTRAVGRKWSMLVGGLTFLVGAALNGAAQNIAMLIIGRILLGVGVGFANQSVPVYLSEMAPARLRGMLNIGFQLMITIGILAAELINYGTNKIKAGYGWRVSLALAAVPAAIITLGSLFLPDTPNSLLERGHPEEARRMLRRIRGTDDIGEEYADLVAASEEARQVRHPWRNILRRRYRAQLTMAVAIPFFQQLTGINVIMFYAPVLFDTLGFKNDASLMSSVITGLVNVFATVVSIVTVDRVGRRKLFLQGGAQMIVCQLIVGTLIAAKFGTSGTGDIAKGYAAVVVVFICAYVAGFAWSWGPLGWLVPSEIFPLEIRPAGQSINVSVNMFFTFCIAQAFLTMLCHFKFGLFYFFAGWVVIMTVFIAFFLPETKNVPIEEMVLVWKSHWFWKRFIADEDVHVGIGNNHPAKNGSDTKGADA

SEQ ID NO: 638 - protein, 518 aa, Glycine max
MPAVGGINTGGGKEYPGSLTLFVTVTCIVAAMGGLIFGYDIGISGGVTSMDPFLLKFFPSVFRKKNSDKTVNQYCQYDSQTLTMFTSSLYLAALLSSLVAATVTRKFGRKLSMLFGGLLFLVGALINGFAQHVWMLIVGRILLGFGIGFANQSVPLYLSEMAPYKYRGALNIGFQLSITVGILVANVLNYFFAKIKGGWGWRLSLGGAMVPALIITVGSLVLPDTPNSMIERGDREKAKAQLQRIRGIDNVDEEFNDLVAASESSSQVEHPWRNLLQRKYRPHLTMAVLIPFFQQLTGINVIMFYAPVLFSSIGFKDDAALMSAVITGVVNVVATCVSIYGVDKWGRRALFLEGGVQMLICQAVVAAAIGAKFGTDGNPGDLPKWYAIVVVLFICIYVSAFAWSWGPLGWLVPSEIFPLEIRSAAQSINVSVNMLFTFLIAQVFLTMLCHMKFGLFLFFAFFVLIMTFFVYFFLPETKGIPIEEMGQVWQAHPFWSRFVEHDDYGNGVEMGKGAIKEV

SEQ ID NO: 639 - protein, 510 aa, Zea mays
MPGGAFLLNGSGGGMADYGGGLTVPVVVTCLMAASGGLIFGYDIGISGGVSEMEDFLNKFFPGLLKRTARANKDVYCIYNNQALTAFTSSLYAFGMVGTLLASRVTRRLGRQAVMLIGGGLFLAGALVNAAAANIAMLIVGRMLLGLGLGFSGQATPVYLAEVSPPRWRGGFISAFPLFISVGYLVANLINYGTSRIPGWGWRLSLGLASVPAAVMVVGAAFIPDTPSSLVLRGKHDDARAALQRVRGKGVDIGPEFADILAAAENDRRNEEGAFRRILRREYRPYLVMAVAFPVFLNLTGVAVTAFFSPILFRTVGFESDAALMGAVILGLMNIGGILASGFAMDRYGRKLLFMIGGALMFTCQVAMASIIGSHLGNGSKMPKGYAVTVLVVALIFSASFSWSWGALYWTIPGEIYPVEVRSAGQGAAVALNLGLNFLQAQFFLAMLCCFKYGTFLFYASWLVVMTAFAVAFVPETKGVPLESMAHVFARHWYWGRFVKDHQKLGEEST

SEQ ID NO: 640 - protein, 580 aa, Glycine max
MEGGGVEVDASAFRECLSLSWKNPYVLRLAFSAGIGGLLFGYDTGVISGAILYIRDDFKAVDRKTWLQEAIVSMALAGAIVGAAVGGWINDRFGRRKAILLADTLFFIGSAVMAAATNPSILIVGRVFVGLGVGMASMASPLYISEASPTRVRGALVSLNGFLITGGQFLSYLINLAFTKAPGTWRWMLGAAVVPALIQIVLMMMLPESPRWLFRKGREEEGKEILRKIYPPQEVEAEINTLRESVEIEIKEAEATDNISIVKMLKTKTVRRGLYAGMGLQIFQQFVGINTVMYYSPTIVQLAGFASNRTALLLSLVTSGLNAFGSILSIYFIDRTGRKKLVLFSLCGVVFSLVVLTVVFHQSTTHSPMVSALETSHFNNTCPDYHSAANPGGWDCMKCLKASPNCGFCASGANKLLPGACLISNDTTKDQCHEEDRLWYTVGCPSKFGWLAIVGLALYIIFFSPGMGTVPWVVNSEIYPLRYRGICGGMASTSNWVSNLIVAQSFLSLTQAIGTSWTFMIFIFITIAAIIFVIIFVPETKGLPMEEVEKMLEGRDLNFKFWQRSSHCGEEVPPQKTQSN

SEQ ID NO: 641 - protein, 547 aa, Zea mays
TITTVIKKMMRCAATGGGCVASWSGDRRLPAVNPCSVRMPTGNDGWCAGLRSRAADLAGLEMANLRGGVGGLFRASPRYGRLQATAAVDPEDIPLEKVQVKSSGHVLPYVGVACLGAILFGYHLGVVNGALEYLAKDLGIAENAVLQGWVVSTSLAGATLGSFTGGSLADKFGRTRTFILDAVPLALGAFLSATAQDIRTMIIGRLLAGIGIGVSSALVPLYISEISPTEIRGTLGTVNQLFICIGILAALLAGLPLAGNPAWWRTMFGIAVVPSILLAVGMAFSPESPRWLFQQGKVTQAELAVKRLYGKEMVTEIMFDLRASGQSSSESEAGWFDLFSKRYWKVVSVGAALFLFQQLAGINAVVYYSTSVFRSAGIASDVAASALVGAANVFGTMVASSLMDKQGRKSLLITSFSGMGASMLLLALSFTWKALAPYSGTLAVVGTVLYVLSFALGAGPVPALLLPEIFASRIRAKAVALSLGMHWVSNFFIGLYFLSVVSKFGISNVYLGFASVCALAVLYIAGNVVETKGRSLEEIERELSVAE

SEQ ID NO: 642 - protein, 533 aa, Zea mays
MAGAGAAANGGRNKYAVLDRSEERQTDARTERRRRPLAPESERGRRERFVYACAVFASLNAVLLGYDVGVMSGAIIYMQKDLHITEFQQEILVGCLSVVSLLGSLSGGRTSDAIGRKWTMGLGAIVFQIGATIMTFAPSFTVLMIGRLLAGVGIGFGAMVSGVYIAEISPAGARGTLTSLPEICINFGILLGYVSNYAFSGLSEHINWRIMLGVGILPSVFIGFALFVIPESPRWLMMEKRVSEARAVLLQISESEAEAEERLAEIEEAAGLMKSMKSEDKEVWRELLNPSPAVRRMLYAGCGIQLFQQITGIDATVYYSPTIFKDAGIKSDQELLAATVAVGFTKTVFILVAIFLIDRVGRKPLLYVSTIGMTICLFLLGVALTLQNHAVGLMSPRVGIDLAIFAVCGNVAFFSIGMGPICWVLSSEVFPLRLRAQGSALGQVGGRVSSGLVSMSFLSMARAISVAGMFFVFAAISTISVLFVYFCVPETKGKTLEQIEMMFESGDEWGGGEIELEDTQHLIPSIKKSVPLG

SEQ ID NO: 643 - protein, 481 aa, Glycine max
MAIEKHEDVESGYLHEPFIQPEDAAAACKENGSDKSVKNGSIGMVLLSTLVAVCGSFTFGTCVGYSAPTQAAIRADLNLSLAEFSMFGSLVTIGAMLGAITSGRITDFIGRKGAMRISTGFCITGWIAVFFSKGSYSLDFGRFFTGYGIGVISYVVPVYIAEIAPKNLRGGLATTNQLLIVTGGSVSFLLGSVINWRELALAGLVPCICLLVGLCFIPESPRWLAKVGREKEFQLALSRLRGKDADISDEAAEILDYIETLQSLPKTKLLDLFQSKYVHSVVIGVGLMACQQSVGINGIGFYTAEIFVAAGLSSGKAGTIAYACIQIPFTLLGAILMDKSGRRPLVMVSAAGTFLGCFVAAFAFFLKDQSLLPEWVPILAFAGVLIYIAAFSIGLGSVPWVIMSEIFPIHLKGTAGSLVVLVAWLGAWVVSYTFNFLMSWSSPGTLFLYAGCSLLTILFVAKLVPETKGKTLEEIQACISS

SEQ ID NO: 644 - protein, 511 aa, Glycine max
MEAPSLTKPNDPTKPSNTSSTLSLEGGPGEASPLRKMFAVASIAAGIQFGWALQLSLLTPYVQLLGVPHAAASFIWLCGPISGLVVQPIVGYYSDHCTSRFGRRRPFILGGALAVAIAVFLIGYAADIGHSAGDDITKKTRPRAVGVFVIGFWILDVANNMLQGPCRAFLADLAAGDQQKTRIANGFFSFFMAVGNVLGYAAGSYSGLHKIFPFTETKACDVFCANLKSCFFFSILLLLFLATVALLYVKDKQVEAIPLDDATQPSCFFQLFGALKELKRPMWMLMLVTAVNWVGWFPYFLFDTDWMGREVYGGTAGEDAYAKGVRVGSLGLMVNAVVLGFMSLAVEPLGKMVGGVKRLWAIVNFILAIGFGMTVVITKVAEHQRRMNPAAVGHPSEGVVVGSMVFFGVLGVPLAITFSVPFALASIYCSASGAGQGLSLGVLNLAIVVPQMVVSALSGPWDSLFGGGNLPAFMVGAAAAALSAIMAIVLLPTPKPADEAKASSMMAGGFH

SEQ ID NO: 645 - protein, 508 aa, Zea mays
MAGDGMEVSASGGGGGNKQPQISLLGLFLACMVAGGVQYGWALQLSLLTPYVQTLGIPHALTSVMWLCGPIAGLLVQPCVGLYSDKCTSKLGRRRPFIFTGCIIICISVIVIGFSSDIGYALGDTTEDCNVYTGKRLHAALFFVMGFWLLDFSNNTVQGPARALMADLAGSHGPSTANAIFVSWMAIGNILGYSSGSTDKWHTWFPFLQTRACCEACANLKAAFLVSVVFLGLSTVVTMIFAREVPLDPAAAAKQDEAGESSGPFAVFKGMKNMPPGMPQVLIVTGLTWLSWFPFILFDTDWMGREMYHGRPDGSPEEVARFQEGVRQGAFGLLLNSVVLGASSFLIEPMCRKLTAKVVWVMSSFLVCVAMALVTVLSSWSLGDIGGNVQDAAAVDKGLKTTALAIFVFLGFPFAVLCSVPFAVTAQLAAAKGGGQGLCTGVLNISIVVPQMVIAIGSGPWDELFGKGNIPAFGLAAVFAFTAAVAGIIMLPKQPKTSFRSVSMGGGH

SEQ ID NO: 646 - protein, 521 aa, Zea mays
MPGAVIVHHHTRYKTYPGEVTGIAIFSCFIASVAGCIFGYDIGLTSGLTSTEPFLVKFFPSIYEEMKRQVVVNQYCKFDSQVLTLFSSSLFLAATVATFFAGPMTRAFGRKWTLFAAASAYVVGACIGGVSVNFPMLLTGRVLVGSGVGISIQAAPLYISEVAPAQQRGMLNILFQLMITVGILTANMTNYLASKVSGGWGWRIPVTFGAIPAAVIALGALAIPDTPASLVERGDTATARKTLSQIRGVGDVREEFDDLAAASEDAKAVQCPWRELFFGGKYKPQLTFALLIPFFQQLTGINVIMFYAPVLFKTVGFKQNATLVSSVITGLVNVFSTFVAIATADKIGRRALFLQGGTQMIISQILVGTFIGLQFGMSGTGDISEQYAMCIVLFVCVYVAGFAWSWGPMGWLVPSEIYPLAVRSAAMSVTVAVNMFFTAFIGQIFLTLLCHLRFGLFYFFGAWVLLMTLFIAMLLPETKSVPVEEMAHVWKKHWFWRKFVIDTGNDARNAEMRKRIALEMS

SEQ ID NO: 647 - protein, 514 aa, Zea mays
MAGGVVVNAAGGKTYPGRMTPFVFFTCLVASSGGLIFGYDIGISGGVTSMASFLKEFFPSVYAKAAANKDTNQYCKFDSQLLTLFTSSLYLAALATSFVAASVTRVFGRKWSMFCGGVTFLAGSALNGAATDVMMLIMGRILLGVGVGFANQSVPLYLSEMAPAKLRGMLNIGFQLMTTIGILAANLINFWTAGIEGGWGWRIGLGLAGVPALIITLGALVLPDTPNSLIARGFNDDAKAVLVKIRGTDDVQDEYDDMVAASEEANAIEHPWRNILERRYRPQLTVAALIPFFQQLTGINVIMFYAPVLFLTIGFGDDASLMAAVITGLVNMFATVVSIVCVDRLGRRALFLQGGTQMFVSQIVVGTLIALQFGTAGVGEMSRSNAWLLVLFICLYVAGFAWSWGPLGWLVPSEVFALEVRSAGQSIAVCVNMLLTFIIGQAFLSMLCSLKFGLFYFFAGWMFIMTTFIALFLPETKGVPIEEMNLVWSRHWFWGKYVNVDTQHGGASPRSNGV

SEQ ID NO: 648 - protein, 521 aa, Glycine max
MLLELALGLLVLALFLHLRPTPTAKSKALRHLPNPPSPKPRLPFIGHLHLLKDKLLHYALIDLSKKHGPLFSLYFGSMPTVVASTPELFKLFLQTHEATSFNTRFQTSAIRRLTYDSSVAMVPFGPYWKFVRKLIMNDLLNATTVNKLRPLRTQQIRKFLRVMAQGAEAQKPLDLTEELLKWTNSTISMMMLGEAEEIRDIAREVLKIFGEYSLTDFIWPLKHLKVGKYEKRIDDILNKFDPVVERVIKKRREIVRRRKNGEVVEGEVSGVFLDTLLEFAEDETMEIKITKDHIKGLVVDFFSAGTDSTAVATEWALAELINNPKVLEKAREEVYSVVGKDRLVDEVDTQNLPYIRAIVKETFRMHPPLPVVKRKCTEECEINGYVIPEGALILFNVWQVGRDPKYWDRPSEFRPERFLETGAEGEAGPLDLRGQHFQLLPFGSGRRMCPGVNLATSGMATLLASLIQCFDLQVLGPQGQILKGGDAKVSMEERAGLTVPRAHSLVCVPLARIGVASKLLS

SEQ ID NO: 649 - protein, 336 aa, Glycine max
MENSTEESHLRSENSVTYESPYPIYGMSFSPSHPHRLALGSFIEEYNNRVDILSFHPDTLSVTPHPSLSFDHPYPPTKLMFHPRKPSPSSSSDLLATSGDYLRLWEIRDNSVDAVSLFNNSKTSEFCAPLTSFDWNDIDPNRIATSSIDTTCTIWDIERTLVETQLIAHDKEVYDIAWGEARVFASVSADGSVRIFDLRDKEHSTIIYESPHPDTPLLRLAWNKQDLRYMATILMDSNKVVILDIRSPTTPVAELERHRGSVNAIAWAPHSSTHICSAGDDTQALIWELPTLASPTGIDPVCMYSAGCEINQLQWSAAQPDWIAIAFANKMQLLKV

SEQ ID NO: 650 - protein, 1121 aa, Zea mays
MEGAAAAEVGGGGEDVQIKGAKESGQPAAAAQQPPPLPSGSEALEMPATPLPRDMDWSEHFSFFTSPGGFAGSSEGARGLASVGLSNSESRPDSVTQRGVDHGAEERVEELTLKNCISADAAQPEASAGGSTSGGDRPAVIKGLWGNFTRMARRTSYLASRENAALSYGDIASSRAGDASSRENLATSLANNIISRNNDVSGNEAPTSRVGYVNNEFKTPFHSQQILLSPWSNQDNALKVSSFSNRILDQMRSKTVAPPSGVLGSPLKSKSKGKGVAYQRAREEIRVQANARPRDPLDKIPTIPTSIHDSVARVDMLFSTSGDVSKSHSEGTSLRELIKPGRQTMSKFEKLHLFKQILDLVDNCHAQGFTLQHLRPSYFTILSSNQVKYIGSYTTQDLPTSIKQEFAREDLVSRKRAFGHRIDYQDSNGHGNLMLKHQKVGEQGLVAVRRLANTFLTDKIRDNQIEDNDPGISRQENFSYTTREHFKFVESYGSNMSSAQHVSSSGTQQPAFELRNIEESWYKSPEELSQFKGTPPSNIYSLGVLLFELFCCSETWEMHCAAMSNLRQRILPPNFLSESPKEAGFCLWLLHPDPCSRPKAKEILGCDLINEGRDLSLLDKSPVSISEDDTESSLLLNFLSQLKEEKEMQAAKLSAELGSLQTDITEIDRRHSAGMRLSLEDMDVLPSSSLPGASVSALQGALLSGLLPASCKSSIYEERVMRNLVQLENAYYSMRSSVDTCETNVIKRPDNEALRVRENFHQRHSDSDAKGEKTDRLGCFFDGLCKYARHNRFEVRGILKNADVLSSPNVICSLSFDRDEEYFAAAGVSKKIKIFEFDALLNDRVDIHYPLVEMPSKSKLSCVCWNSYIKNYLASTDYDGTVQLWDAGSGQGFTQFTEHRKRAWSVSFSQVDPTKLASGSDDCCVKVWSINQKNSIDTIRNVANVCCVQFSPYSSRMLAFGSADYKIYCYDLRNTRIPWCTISGHGKAVSYVRFLDPETLISASTDNTLKIWDLNQTNCSGLSADSCSLTLNGHSNEKNFVGLSVHDGYITCGSETNEVFSYYKDFPMPITSHRFGSIDPITGQVTNEDNQQFVSSVCWRGKSNMVVAANSSGSIKVLELV

SEQ ID NO: 651 - protein, 242 aa, Zea mays
KNGFVQDLDDESGGMRGSGGRGTKRSRTAEVHNLSERRRRDRINEKMRALQELIPNCNKIDKASMLDEAIEYLKTLQLQVQMMAMGSGLCIPPMLLPRAMQLQIPSIAHFHHLGMGLGYGMGVLDMNSTAAVPFQPIPGAHYTCPMIPGTPPQGLGIGMPGTNTMPVFGVPGQAIHPSASSVQPFPSLAGLPVRPNLAPQVPAVMANMVQEQQQGVATQQQQSLNNEAQQKANTGDPQILQK

SEQ ID NO: 652 - protein, 315 aa, Glycine max
  unsure (1)..(315): unsure at all Xaa locations
MTVEKEDLGLSLSLSFPQNPPTHLHLNLVSSSPSSHNPQKPSWNDPFTSSAGSSFLRGIDVNRLPSVVDCEEEAGVSSPNSTVSSVSGKRSEREEANGEENDTDRACSRGIISDEEDAETSRKKLRLSKDQSIILEESFKEHNTLNPKQKLALAKQLGLRARQVEVWFQNRRARTKLKQTEVDCEFLKRCCENLTVENRRLQKEVQELRALKLSPQFYMHMTPPTTLTMCPSCERVAVPPSSAVDPAMRHHHVPPTQPRAFPIGXMGHRCRHYPAQALRCPPSQILTRRNKMTKFEKKKTVVIVGSHELCVQSVV

SEQ ID NO: 653 - protein, 637 aa, Zea mays
MLGRAAALSAPRWRGGVPDLRAALRSGGNLLFALFVAAVLAFTLLAAFHSPDDPLLHPSSHQLTDFLTSATSTSTFLTDDSVLRTGEDFNSSSTGAAGEVAAGGVEVVAEAVPFIKLSEVGAEAEKTEPETERAVTVDTDAATGEGAAVAEETAVAEAVSCDTEAPVDCTGDRELFNLLMRAAIERFPDLHFYRFGRPVAVPGSPMECDLAWRFRPAADAIGTGRTTYYKDYRRFTLTRDVNTCSLVVDTVGEYHSGVGAKRNGRRKGKKGKKGKQDAPVTDFVPVKTQIRLDENTANNEAAGAAAEPVFVVGEAVNDSLPVVASESDFSRGKYLIYIGGGERCKSMNHFIWGFLCALGEAQFLNRTLVMDLNVCLNARYTSSGKDEERDFRLYFDFEHLKQSASVIDQSQFWQDWGQWHKKDRLKNFYTEDIRMTPMKLRDIKDTLIMRKFGNVEPDNYWSRVCEGETEGIIKRPWHFLWKSRRLMEIVSAIASRMNWDFDSVHVVRGEKAQNTQLWPNLDRDTSPDSLLMALNDKVGAGRYLYIATNEPDKSFFNPLKEKYKTHFLDDFKYLWDENSEWFTETKELSNGQPVEFDGYMRIAVDTEVFLRGKRHVETFNELTRDCKDGVNTCSASS

SEQ ID NO: 654 - protein, 593 aa, Glycine max
MAVDSEVPRAERSAKALQFIEEVTKNTDSVQERVLTEILTQNAETEYLKRFGLNGATDRDTFKSKVPVVTYEDLQPDIQRIANGDSSPILCSHPISEFLTSSGTSAGERKLMPTIHEEMDRRQLLYSLLMPVMNQYVSDLDKGKALHFLFIKAEAKTPGGLVARPVLTSYYKSEQFRKRPFDPYNVLTSPNEAILCPDSFQSMYTQMLCGLIMRHEVLRVGAVFASGLLRAIRFLQLNWEQLSHDILTGTLNPKITEPSIKERMSKILKPDPQLAAFIKNECSVENWERIIVRIWPNTKYLDVIVTGAMAQYIPTLDYYSGGLPKPCTMYASSECFFGLNLKPMSEPSDVSYTILPNMGYFEFLPHDDSSPVTLSKDSPPRLVELADVELGKYYELIITTYSGLCRYRVGDILQVTGFHNSDPQFRFVRRKNVLLSIDSDKTDEAELQKAIENASELLKEFNTSVVEYTSFADTKSIPGHYVIYWELMMKDSSHPPTNQVLNQCCLVMEESLNSVYRQGRVADNSIGPLEIRVVKNGTFEELMDYAISRGASINQYKVPRCVSFTPIMELLDSRVVSFHFSPAAPHWTPERRR

SEQ ID NO: 655 - protein, 371 aa, Zea mays
MGSGGANTAPLLTPYKMGKFDVTHRVVLAPLTRQRSYGNVPQPHAILYYQQRATKGGLLIAEATGVSDTAQGYKDTPGIWTHEQVEAWKPIVDGVHQKGGIFFCQIWHVGRVSNSTFQPNGQAPISSTDKPLKPQVRANGIDVATFAVPRRLETDEIPLVVNDFRVAARNAIEAGFDGVEIHGAHGYLIDQFLKDGVNDRTDKYGGSLENRCRFALEVTQAVVDEIGADKVGIRLSPFASYSEAPDSDPEALGMYMANALNEFGILYCHMVEPRMVKLGEKFETPYSLRPIRDAFRGTFIVAGGYGREDGNRAISTGYADLVAFGRLFLANPDLPRRFEVDAPLNKYNRDTFYIPDPVVGYTDYPFLSSDV

SEQ ID NO: 656 - protein, 404 aa, Zea mays
  unsure (1)..(404): unsure at all Xaa locations
MASTDRSTPAEDEQQQKRPSLFSPYQMPRFRLTHRXASIAVVLAPMTRCRAPDAIPGPALAEYYAQRSTEGGLLISEGTIISPSGPGFPRVPGIYNQEQTDAWRKVVDAVHAKGAIFFCQLWHVGRASHQVYQPGAAAPISSTDKPISSRWRILMPDGSYGKYPTPRRLATSEIPEIVEQYRQAAVNAIKAGFDGIEIHGAHGYLIDQFLKGGINDRTDEYGGSLSNRCRFLLEVTRAVVSAIGADRVAVRVSPAIDHLDAYDSNPLQLGLAVVERLNALQQEAGRLAYLHVTQPRYTAYGQTESGQHGSAEEESRLMRAVRGAYRGTFMCSGGYTRELGVEAIESGDADLVSYGRLFIANPDLVERFRRDAPLNKYVRKTFYTPDPVVGYTDYTFLGQPKARM

SEQ ID NO: 657 - protein, 373 aa, Zea mays
MVQQAAKEVIPLLTPYKMGQFELSHRVVLAPLTRCRSYGNVPQPHAAVYYSQRATRGGLLIAEATGVSATAQGFPESPGIWTQEQVEAWKPIVDAVHRKGAIFVCQIWHVGRVSTNELQPNGDAPISSTDKQISPDAKSGTAYSKPRRLRTDEVPGIVDDFRRAARNAIQAGFDAVEIHGAHGYLLEQFMKDSCNDRTDQYGGSLENRCRLAVEVVDAVVREVGARRVGIRLSPFVDFVDCVDSDPVALGHYMVQQLNRHSGLLYCHMVEPRITAHGRRQIPHGLLPFRKAFHGTFIAAGGYDREEGNKVVAEGYADLVAYGKLFLANPDLPRRFELDVALNKYDRSTFYTQDPIVGYTDYPFFEEEDGKNER

SEQ ID NO: 658 - protein, 504 aa, Zea mays
MLPSFVSPTASAAASVTPPPRPIPGSYGPPVLGPLRDRLDYFWFQSQDEFFRKRAAAHRSTVFRTNIPPTFPFFVGVDPRVVAIVDAAAFTALFDPDLVDKRDILIGPYNPGAGFTGGTRVGVYLDTQEEEHARVKTFAMDLLHRSARTWSADFRASVGAMLDAVDAEFGKDDGSDKKPSASYLVPLQQCIFRFLCKAFVGADPSADWLVDNFGFTILDIWLALQILPTQKIGLVQPLEELLIHSFPLPSFLIWPGYYVLYRFIEKHGAEAVAYAEAQHGIGKKDAINNMLFVLGFNAFGGFSVFLPFLVAKVGGAPALRERLRDEVRRAMVGKGKDGEFGFATVREGMPLVRSTVYEMLRMQPPVPLQFGRARRDFVLRSHGGAAYQVSAGEVLCGYQPLAMRDPEVFERPEEFVPERFLGDDGARLLQHLFWSNGPETAQPGPGNKQCAAKEVVVDTACMLLAELFRRYDDFEVEGTSFTKLVKRQASPSVAQAAAAAGAQQ

SEQ ID NO: 659 - protein, 374 aa, Oryza sativa
MALLMDPGAGGPLTESEKADLDAIAAIKESAAAEYKEKGNRLVKMGRSHYADAVDCYTKAIAQMEPLPPPPVPSPDASVLFANRAHVNLLLGNHRRALDDAARAVQLSPSNVKAYYRAAKAAIALGLLPEAAAFCRRGIEQDPANEELKKLLAQVDAQQSEQDRHRAKVAQAVSAAKDIVAAIEKRGLKLGKAAYQELTGVKKPKLDEQGVLHWPVLLLYPEVMSSDFIEDFPETDTFVPHLDVMFSESSPPLPWDDKHAYTRDAVELYYQAGVGTVLSKSEILKILLEGTMDSKSLPESLLDEEDGENDDGKSSTITSSDKGSVKWINVKEGKTLQEVLQHKDFIIPAIPVFFVVSRKSTFYRKFKAGNWSLP

SEQ ID NO: 660 - protein, 353 aa, Zea mays
MAKYGEGDKRWIVEERADGTNVHNWHWAERDCIEWSRARLSSLLAGLTVLDGEDGLTLRTVALDNLDGEAYVNIRKGKVIPGYELSLTLSWEAEAASESGAVKVAGTAEVPYLADENADEDPDLHITVRGDETPLALRAKDAFLSRGKPMVLEKIREFVAAMAKGGPAKDELDSKKTPAKVAAAAPGAAPAKKEEVVAPAPAAGKKKAKGKDKEGFKTIKMTETFYCRSKDIYEILMDENRWKGFTQSNAKISREVGGEFSLFDGCITGVNEDLQEGKLIAQKWRFGSWPDGLYSSVRLMLDEPESGVTVIKLKQTGVPEEDKYGNSTVVENTERGWRDLIFQRIRGMFGFGI

SEQ ID NO: 661 - protein, 581 aa, Zea mays
MADEAKAKGNAAFSAGRFEEAARHFTDAIALAPDNHVLYSNRSAALASLHRYSDALADAQKTVDLKPDWAKGYSRLGAAHLGLGDAASAVAAYEKGLELDPSNEGLKAGLQDAKKAAAAPPRRGSSGPDAIGQMFQGPELWSKIASDPSTRAYLNEPDFMHMMREVQRNPSSISMYLSDPRMMQVLSLMLNVKIQRPEASEPSQSTPPPPKQQQQQQTPPSETKARDVEPEPEAEPMDLTDEEKDRKQTKAAAQKEKELGNAAYKKKDFEVAIQHYTKALELDDEDISYLTNRAAVYIEMGKYDECIKDCDKAVERGRELRADFKMISRALTRKGTALVKLAKTSKDFDIAIETFQKALTEHRNPDTLKKLNEAEKAKKELEQQEYYDPKLADEEREKGNEFFKEQKYPEAIKHYTEALKRNPKDPRVYSNRAACYTKLGAMPEGLKDAEKCLELDPTFTKGYTRKGAIQFFMKEYDKAVETYQAGLKHDPNNQELLDGVKRCVEQINKANRGEISQDELQERQNKAMQDPEIQNILTDPIMRQVLIDFQENPSAAQEHLKNPGVMQKIQKLVSAGIVQMR

SEQ ID NO: 662 - protein, 399 aa, Emericella nidulans
MDASKLRELRDFVEACKKNPSLLADPNLSFFRDYLQSLGAKIPAAAPSFESPKRSSMDDIDDDGDDDDDLDMRDPTPERDELDEEIVESDLELEGEIVQSDHDDPPQKMGNPSVEVTEENRDASQEAKGKAMEAISEGKLEDAIEHLTNAIVLNPLSAIMYGTRASVFIKMKKPAAAIRDANAALEINPDSAKGYKTRGMAYAMLGKWEEAAHDLHTASNMDYDEEINAVLKKVEPNAHKIVEHRRKYERLRKEREEKRAQRDRLRQRAEAQAAYDKAKRKEQSSSRSSGGASPRGFPGGMPGGGFPRGMPGGGFPGGGMPGGFPGGGMPGGFPGGVPGNVDMSKILNDPDLMAAFSDPEVMAALQDVMNNPANFAKHQANPKVGPIIAKMMAKFNGSQ

SEQ ID NO: 663 - protein, 273 aa, Oryza sativa
MSPAADSAASKRQAELLKQEGNAFFKKDRISAAIDAYTGAIALCPKVAVYWTNRALCYKRRNEWVRAEEDCRTAIQLDSHSVKAHYMLGLALLNKDELAEGIKELEKSLELGRGAHPASYMVEEIWQELSKAKYIEWENLSSERVRQLHKLKEACKEALRNYNSLDNPPAYVPEEQLNELEEVFRNARKSDIPTEVPDHLCCKITLDIFRDPVITPSGITYERAVILDHLHRVGKFDPVTRETLEPHQLVPNLAIKEAVHAFLSEHGWAYRMR

SEQ ID NO: 664 - protein, 275 aa, Zea mays
MAPAAPYGGAESQRQADLLKQEGNAFFRKERLSAAIDAYTGAITLCPNVAVYWTNRALCYRKRNEWTRVEEDCRTAIQLDSQSVKAHYMLGLSLVNSQRLSEGIKSLEKSLELGRGAHPASYMVEEIWQELSKAKYIEWESLSRDRTCQLQKLKVACKEALTSYNSLDNPAAGAPVEQLNELEEVFKKAAKTDTPAEVPDHLCCKITLDIFRDPVITPSGITYERAVLLDHLQTVGRFDPVTREALEPHQLVPNLAIKEAVHAFLSEHGWAYKIR

SEQ ID NO: 665 - protein, 196 aa, Triticum sp.
MGRGRSEIKRIDNPTQRQSTFYKRRDGLFKKARELAVLCDADLLLLLFSASGKLYQYLAPTVPSVKEFVERYEASRHTKVWSDIRQERRRELEKVAKMCDLLEKELRFMTVDDGERYTVPSLAALEHNLEAAMHKVRSEKDRKIGGEMSYLENMIRGKQAERYGLCDKLAHAQSLKVVEGGSTSLNNGLDLKLGFN

SEQ ID NO: 666 - protein, 225 aa, Zea mays
MARERREIRRIESAAARQVTFSKRRRGLFKKAEELAVLCDADVALVVFSATGRLSQFASSSVNDIVDKYSTHSKNLGKSHQQPSIDLNVEQSKYSGLNEQLAEETNGLRQMRGEDLEGLSVEELHRMERKLEAGLHRVISTKDQLFMQQIGELLQKGTQLEDENRRLKEQMPQVLTAGTMVVAAAAENILTEDGQSSESVMTALHSGSSLDCDDGSDISLKLSLP

SEQ ID NO: 667 - protein, 245 aa, Zea mays
MGRGKVQLKRIENKINRQVTFSKRRSGLLKKAHEISVLCDAEVALIIFSTKGKLYEYSTDSCMDKILERYERYSYAEKVLISAEYETQGNWCHEYRKLKAKVETIQKCQKHLMGEDLETLNLKELQQLEQQLESSLKHIRTRKSQLMVESISALQRKEKSLQEENKVLQKELAEKQKDQRQQVQRDQTQQQTSSSSTSFMLREAAPTTNVSIFPVAAGGRVVEGAAAQPQARVGLPPWMLSHLSC

SEQ ID NO: 668 - protein, 247 aa, Zea mays
MASADLLRREEEFYSSLFDSAKGDGARSRSQLIERKIEALEDMATRVSNRRSRKWFNDRLLIELVPRLYVEEIKGLFAPPPWGEQVPLSAFYRANVGEWDSFRSIDMDAEARLMQHMKKSLEKPRNHVDEGESIALNAWHRIDRHTREAIKRNFLPDLLGIYEERVRAFIEDASDKDALVLNVQDPFQRLLLHGVCEFYNVSSTTTSSVREDGRPWKATTIKKRQGTGVPSRITLVSFLRMKKNGSQ

SEQ ID NO: 669 - protein, 669 aa, Zea mays
MKVANGLSLRKSNGRFKSKLMMELVKQWREHQANMRCMNLSKRNNNIYVGAEGANITSPNDSNIWPTSALVAKNSNPRYVLASKCASQPPTMWLENSLNTSSGFKCSKLSIVRNALPSKTPKASVSWKSKDDSNAIPRHLEQSHCKKTSRATRTHFKAMPNLIHKAKNVDTSNLNDGTSGSSWRGQSDSYKGEDINIGKECTKTSELLKSREASRKSNILVVDRKDPNKDEPDKVKGIQDEVMTKEEGVKGHTCEGRATCWSCLKQANTTKTNDAPNLGSLLVGNEHMQGLMSNLRDNSSHLFEKNHSRHQRDDPCEYRETNLKFPNRIQSVGGNGKTNDVTSRRKRLLLEEKASAHVQNDLTYGPMKRRRYIEANEDEEEQNDLTYGPMKRRRYIEANEDEEDYVGDHHPVHIEDATTELTPQDSISKHCVERQCYCCSKPIDIPRWSGTFKIDGKEHISLAGHLSSKSCEKVWKLSSLPKVVQVTKVPRMAVWPKIFKASEPSGDNIGLYFFPPEMRHDEELDQLVNEVMDKDLILRAIIGEAEMLIFPSVLLPERYQTFQTKHYLWAAFKAKEDKGDAIVEEEVEKGNCVSNQPDKVQSDNASFPSNHGLDRPSMEAPPQSSSSVFGIVVRQAPNLEPEVKRFIQEMERKGALVTVMRGEAIGGGP

SEQ ID NO: 670 - protein, 310 aa, Saccharomyces cerevisiae
MTTSILDTYPQICSPNALPGTPGNLTKEQEEALLQFRSILLEKNYKERLDDSTLLRFLRARKFDINASVEMFVETERWREEYGANTIIEDYENNKEAEDKERIKLAKMYPQYYHHVDKDGRPLYFEELGGINLKKMYKITTEKQMLRNLVKEYELFATYRVPACSRRAGYLIETSCTVLDLKGISLSNAYHVLSYIKDVADISQNYYPERMGKFYIIHSPFGFSTMFKMVKPFLDPVTVSKIFILGSSYKKELLKQIPIENLPVKYGGTSVLHNPNDKFYYSDIGPWRDPRYIGPEGEIPNIFGKFTVTS

SEQ ID NO: 671 - protein, 327 aa, Zea mays
MAAEASAVQQLAGLLDQVDAPLKKTFENVHQGYPTETLLRFLKAREWHVNKAHRMLEDSLNWRMQNEIDSILEKPIIPVDLYRSIRDTQLIGLSGYSKEGIPVFAVGVGLSTYDKASVNYYVQSHIQINEYRDRFILPTVTKKYGRPITTCIKVLDMTGLKLSALHQMKIVTAISTVDDLNYPEKTETYYIVNAPYIFSACWKVVKPLLQERTRKKVHVLRGCGRDELLQIMDYSSLPHFCRQEGSGSSKHSSGDADNCFSLDHPFHQELYSFIQEQALNQELIKQGSLHVKIPEQDPEDAKIVEVIEAEFHKLGVQNGSANGIDQA

SEQ ID NO: 672 - protein, 251 aa, Zea mays
MASAAGGGAAGEGEWLKVSQLRPMVEAQDPNAKAVDNLTLRRFLRARDHDVDKASAMFLKFLKWRREAAPGGSVPEEQVRRELSQDKLCMGGVDRAGRPILVAFAARHFSAGRDMAEFKSFVVYFFDKICARIPRGQEKFLCIVDLKGWGYSNCDVRAYIAAIEILQNYYPERLGKALMIHVPYIFMKAWKMIYPFIDTNTRDKFVFVEDKSLQETLRREIDEGQLPEFLGGKMDVIPLKDYGVQQQPQAV

SEQ ID NO: 673 - protein, 296 aa, Zea mays
MFRRKHGSDFNSDDAEQREAKISELKAALGTLSARGEKYCSEACLRRYLEARNWNVAKSRKMLEESLKWRAAYKPEDIRWPDVSVEAETGKMYRASFRDREGRTVVVMKPTKQNTSSHEGQIRFLVYTLENAIFSLPEGQEKMVWLIDFTGWTVSHASPIKTCRETANILQNHFPERLAIGFLFNPPKVFEAFYKVIKIFLDPKSVEKVNFVYEKDEESMKVMYKYIDPEVLPVEFGGKSNVVYNHEEYSELMRQDDIKTASFWAVDAKTNHANPAINGTLVPEVAPQSSLAAKAS

SEQ ID NO: 674 - protein, 256 aa, Glycine max
MEAVRAGREGAIGLGQGDGVAKDSTETELTKIRLLRAIVETRDPSSKEEDDFMIRRFLRARDLDVEKASAMLLKYLKWRNSFVPNGSVSVSDVPNELAQDKVFMQGHDKIGRPILMVFGGRHFQNKDGLDEFKRFVVYVLDKVCASMPPGQEKFVGIAELKGWGYSNSDVRGYLSALSILQDYYPERLGKLFIVNAPYIFMKVWQIVYPFIDNKTKKKIVFVEKNKVKSTLLEEMEESQVPEIFGGSLPLVPIQDS

SEQ ID NO: 675 - protein, 370 aa, Glycine max
MKVAQVLHMNGGVGHASYANNSLLQQKVICLTKPIREEAITSLYCNTVPRSLAVADLGCSSGPNTLLVVSEFIKIVEKLCRELNHKSPEYKVFLNDLPGNDFNNIFKSLDSFKKKLCDEMESGIGPCYFSGVPGSFYGRVFPNQSLHFVHSSYSLHWLSKVPEGVDNNRGNVYIGSTSPTNVARAYYEQFQRDFSLFLKCRAEELVKGGRMVLTFLGRRSDDPSSKDGGYVWELMATALNDMVLQGIIKEEQLDTFNIPLYTPSPSEVKLEVLKEGSFASNRLEVSEVNWNAFDDWNALEFESERSDTLSDGGYNVAQCMRAVAEPMLVSHFGEAIIEEVFSRYQQILTDRMSKEQTKCINVTVLLTRKA

SEQ ID NO: 676 - protein, 382 aa, Zea mays
MKVERDLHMSRGDGEDSYASNSRLQEKSILKTRPVLHKAVAAAHALSLSSGGPGGGAMVVADLGCSSGPNTLLVVSEVLAAVAMVAGGSAQPQHVQFFLNDLPGNDFNLVFRSLDLLKNKKLAAKDRREESLLPPYYVAGLPGSFYTRLFPDHCVHLFHSSYCLMWRSKVPDELAGGAVLNEGHMYIWETTPQAVVALYRRQFQEDMSLFLRLRHRELVPGGHMVLAFLGRKKSKDVLRGEVSYTWGLLAQALQSLVKQGRVKKDKLDSFNLPFYAPSMDEVRDVITRSQAFDITHIQLFESNWDPHDDDDVEMKMEEDVAAVQSGVNVARSIRAVIGPLIARHFGEHILDDLFELHAKNVAVHLQKVKTKYPVIVVSLQAK

SEQ ID NO: 677 - protein, 382 aa, Zea mays
MSMRIERDLHMATGNGETSYTKNSRIQEKAMFQMKSVLEEATRAVCTALLPQTMVVADLGCSSGPNTLRFVTEVTRIIAHHCKLEHNRRHDHPLQLQFFLNDLPGNDFNNLFQLIEQFNKSSTTHKGDAATEALQPPCYISGLPGSYYTRIFPSESVHLFHSLFCLQWRSQAPEQLKGTQKSCLDIYITKTMSPSMVKLFQQQFQKDFSLFLRLRYEELVSGGQMVLTFIGRKHEDVFTGESNHLYGLLAQSLKSLVDEGLVEKEKLESFYLPIYSPSVGEVEAIVKQLGLFNMNHVKVFEINWDPYDDSEGDDVHNNIESGENVAKCLRAVMEPLVASQFGERILDKLFKEYARRVAKHLENEKTKHAVLVLSIKKAIIHV

SEQ ID NO: 678 - protein, 677 aa, Zea mays
MALPSMSLVAKGVLPFSARTSSGVTQRPVSVTASLEHKTSDARRKFLKLALGNLGVGLPTLLGAKKALADEQGVSSSRMSYSRFLEYLDKDRVKKVDLFENGTIAIVEAISPELGNRVQRVRVQLPGLSQELLQKLREKNIDFAAHSNQEDSGSLLFNLIGNLAFPLILIGGLFLLSRRAQGGLGGPNGPGFPLGFGQSRAKFQMEPNTGVTFDDVAGVDEAKQDFMEVVEFLKKPERFTAVGARIPKGVLLVGPPGTGKTLLAKAIAGEAGVPFFSISGSEFVEMFVGVGASRVRDLFKKAKENAPCIVFVDEIDAVGRQRGTGIGGGNDEREQTLNQLLTEMDGFEGNTGIIVIAATNRADILDSALLRPGRFDRQVSVDVPDVRGRTEILKVHGSNKKFDSDVSLDVIAMRTPGFSGADLANLLNEAAILAGRRGRTAISSKEIDDSIDRIVAGMEGTVMTDGKSKSLVAYHEVGHAICGTLTPGHDPVQKVTLVPRGQARGLTWFIPMDDPTLISRQQLFARIVGGLGGRAAEEVIFGEPEVTTGAAGDLQQITGLAKQMVVTFGMSEIGPWSLMEGGAQSGDVIMRMMARNSMSEKLAEDIDSAVKQLSDEAYEIALRHIRNNREAIDKIVEVLIEKETVTGDEFRAILSEFAEIPVENRVPPATPAAALPA

SEQ ID NO: 679 - protein, 450 aa, Hordeum vulgare subsp. vulgare
MAMPPAEKVIVVDANPSKNGHGDEIDDLPVADATSHQIGVDPWYQVAFVLTTGVNSAYVLGYSGSLMVPLGWVGGTVGLLLAAAVSMYANALLGRLHLLGGKRHIRYRDLAGHIYGPKMYRLTWAMQYVNLFMINTGFIIIAGQALKALYLLISNDGAMKLPYCIAVSGFVCALFAFGIPYLSALRIWLGFSTVFSLTYIVAACTLSLKDGMRSPPRDYSIQGDPSSRVFTTIGAAASLVFAYNTGMLPEIQATVRAPVVKNMEKALWFQFTAGCVPLYAIIVIGYWAYGNQTTTYLLNNVHGPVWIKAVANLSAFLQTVIALHIFASPMYEYLDTRFGSKVGGPFAMHNVIFRVGVRGGYLAVNTLMAAMLPFLGDFMSLTGALSTFPLTFVLANHMYLVSNRQRLSSLQKSWHWLNIVFFTILSITAAIAALRLIARDSKEYHIFADV

SEQ ID NO: 680 - protein, 276 aa, Auxenochlorella protothecoides
CFAYSFSSILVEIQDTLRQPPKAAKTMSKATNVSVTASFAFYFVVAIGGYASLGNDVPSYILGGLQGPEWVIFVANLCVLLHMWSAYQIYAHPMFDTLESHVKAFKLRQAKAKGDAELPAKVEELKRMSLAARQGSAAGTKTMDDTAPAAPPAANPLCRLSRVSAMAGEKLQRLSQNAAMYRVSTGFADTSVPSNDDHFVLPWWQRLITRRMYVVRTTLIAAIMPFFGAMAGLVGALAFFPLTSSSPSAAGAPCTSPLGGSITCCTSSSSAWRWCA

SEQ ID NO: 681 - protein, 453 aa, Atriplex hortensis
MSSYDPENAATNGVPPVKNDNSNHQQQHQQTVVVPETAHQISTDSWLQVGFVLTTGINSAYVLGYSGAIMVPLGWIPAVLGLIAATLISLYANSLVAKLHEYGGKRHIRYRDLAGFIYGPKAYSLTWALQYINLFMINTGFIILAGSSIKAAYHLFTDDPALKLPYCIIISGFVCALFAIGIPHLSALRIWLGVSTFFGLIYIIIAIALSLKDGINSPPRDYSVPTERGKVFTTIGAAANLVFAFNTGMLPEIQATVRKPVVGNMMKGLYFQFTAGVVPMYAIVFIGYWAYGNKTDSYLLNNVHGPVWLKALANISTFLQTVIALHIFASPMYEYLDTRFGITGSALNPKNLGSRVLIRGGYLAVNTFVAALLPFLGDFMSLTGAISTFPLTFILANHMYFKAKRNKLSMAMKIWLWINIVFFSCMAVASFIAALRLIATDSKQYHVFADLEG

SEQ ID NO: 682 - protein, 186 aa, Brassica napus
HDFVPPQPAFKCFDDDGRLKRTGTVWTASAHIITAVIGSGVLSLAWAIAQLGWVAGPAVMLVFSLVTLYSSTLLSDCYRTGDAVSGKRNYTYMGAVRSILGGFKFKICGLIQYLNLFGIAVGYTIAASISMMAIKRSNCFHKSGGKDPCHMSSNPYMIIFGVTEILLSQVPDFDHIWWISIVAAVM

SEQ ID NO: 683 - protein, 184 aa, Brassica napus
PYMAVFGIIQIFFSQIPNFHKLSFLSLMAAVMSFAYASIGIALAIAPVAGGKVGKTNMTGTVVGVDVTAAQKIWRSFQAVGDIAFAYAYATVLIEIQDTLRSSPAENKAMKRASFVGVSTTTFFYILCGCLGYAAFGNKAPGDFLTDFGFYEPFWLIDFANACIAVHLIGAYQVFAQPIFQFVE

SEQ ID NO: 684 - protein, 223 aa, Brassica napus
SGPVWTARAHIITAVIGSGVLSLAWAIGQLGWIAGPAVMFLFSFVTYFSSTLLSDCYRTGDPVSGKRNYTYMDAVQSILGTVNKTYISFTQYVLGCFTLSGSVVLTGGFRFKICGLIQFLNLFGITVGYTIAASISMMGVSLSQQEVSLATKKGVKTPFNLVKAFRAIKRSNCFHESGGKNPCHMSSNPYMIMFGVTEILLSQIKDFDQIWWLSIVAAIMSFT

SEQ ID NO: 685 - protein, 509 aa, Vicia faba
MLQRSRTLPSKIYQGVIEERKDGRHYIELEPLPKMETETKPITIQSKCLDDDGRVKRTGTFWTASAHIITAVIGSGVLSLSWAIAQLGWAVGPVVMVLFAVVNLYTSTLLTQCYRSDDSVAGPRNYTYTDAVKSILGGKKFKICGVIQYVNLFGVAIGYTIAASVSMMAIKRSNCYHESHGNDPCHMSSNVYMIAFGIAEVILSQIPDFDQVWWLSIVAAIMSFTYSAVGLGLGVAKVAENGTFHGRLMGISIGTVTPAGTVTGTQKVWRSLQALGAMAFAYSFSIILIEIQDTIKSPPAEHKTMKKATMLSIMVTTVFYILCGSMGYAAFGDHVPGNLLTGFGFYNPYWLLDIANFAIVVHLVGAYQVFSQPFFAFVEKWSAHKWPKNKFVTEEYDIPIPCIGVYKLNLFRLIWRTIFVLLTTLIAMLLPFFNDVVGLLGAFGFWPLTVYFPIDMYISQKKIGRWTNRWLGLQMLSGCCLIISTLAAVGSIAGVVLDLKTYKPFKTSY

SEQ ID NO: 686 - protein, 481 aa, Vicia faba var. minor
MVVEKNASNNHHQTFYVSIDQQIDSKFFDDDGRVKRTGTSWTASAHVITAVIGSGVLSLAWAIAQLGWIAGPIVMFLFAWVTYYTSVLLCECYRNGDPVNGKRNYTYMEVVHSNLGGFQVQLCGLIQYLNLVGVAIGYTVASAISMMAIVRSNCFHRSGGKDPCHMNSNIYMIAFGAVQIIFSQIPDFDQLWWLSIVAVVMSFTYSTIGLGLGIGKVIENKKFAGTITGINDVTKAQKTWGSLQALGDIAFAYSFSMILIEIQDTIKAPPPSESKTMKKATLISVIVTTFFYMLCGCFGYAAFGNSSPGNLLTGFGFYNPFWLLDIANAAIVIHLIGAYQVYCQPLFAFVENYTAKRFPDSDFVNKDVKIPIPGLDRYKLNLFRLVWRTVYVILTTLISMLLPFFNDIVGLLGAIGFWPLTVYFPVEMYIIQKKIPKWSTKWICLQLLSGACLIITIAATIGSIAGLILDLKVFKPFKTIY

SEQ ID NO: 687 - protein, 475 aa, Vicia faba var. minor
MTMEEKEEHSTEAAVTSHNDSKLFDDDDRVKRTGTVWTTSSHIITAVVGSGVLSLAWAIAQLGWIIGLSVMIFFSLITWYTSSLLSECYRTGDPHFGKRNYTFMEAVHTILGGFYDTLCGIVQYSNLYGTAVGYTIGASISMMAIKRSNCFHSSGGKDGCRISSNPYMISFGVIQIFFSQIPDFHEMWWLSIVAAIMSFTYSLIGLGLAIAKVAENGSFKGSITGVSIGTVTEAQKVWGVFQSLGNIAFAYSYSQILIEIQDTIKSPPSEMKTMKQATKISIGVTTIFYMLCGGMGYAAFGDLSPGNLLTGFGFYNPYWLIDIANAALIIHLVGAYQVYAQPLFAFVEKIMIKRWPKIKKEYKLTIPGFRPYHLNLFRLIWRTIFVITTTFISMLIPFFNDVLGLIGAAGFWPLTVYFPVEMYIKQKKITKWSYKWISMQTLSVICFVVSVVAFVGSVSSIVVDLKKYKPFTTDY

SEQ ID NO: 688 - protein, 486 aa, Vicia faba var. minor
MVENISRTNLSYRGDTGGIEEAIDDAPLQTDSKFYDDDGRVKRTGTVWTTCSHIITGVIGSGVLSLAWSVAQMGWIAGPATMIFFSIITLYTSSFLADCYRSGDTEFGKRNYTFMDAVHNILGGPSVKICGVVQYLNLFGSAIGYNIAAAMSMMEIRKSYCVHSSHGEDPCHVSGNAYMIAFGVAQLFFSQIPDFHNTWWLSIVAAVMSFFYSTIALALGISKVAETGTVMGSLTGISIGTVTPAQKVWGVFQALGNIAFAYSYSFILLEIQDTIKSPPSEGKAMKKAAKLSIGVTTTFYLLCGCTGYAAFGDAAPGNLLAGFGVSKAYILVDMANAAIVVHLFGAYQVYAQPLFAFVEKEAGKKWPKIDKGFEVKIPGLPVYNQNIFMLVWRTIFVIVPTLIAMLIPFFNDVLGVIGALGFWPLTVYFPVEMYIIQKKIPKWSRKWICLEIMSTFCLFVSVVAGLGSLIGVWIDLKKYKPFSLEN

SEQ ID NO: 689 - protein, 161 aa, Narcissus pseudonarcissus
LKKGSSTDQDVEVYRGEEFDDDGRPRRTGTVWTASAHIITAVIGSGVLSLAWSMSQLGWIAGSVTLFLFSIVTFFTSSLLTDCYRSPDPVHGKRNYTYMSAVKSNLGSTKVWFCGICQYVILVGTAIGYTITASISAAAISKSGCFHKKGHEADCAVSDSL

SEQ ID NO: 690 - protein, 154 aa, Narcissus pseudonarcissus
KVMKKASFIGVSTTTTFYLLCGCLGYAAFGNKAPGNILTGFGFYEPFWLVDIANLCIIIHLVGAYQVFSQPIFSAVETWITNRHPNINFLNHDRVLVIGKCFRYKINLFRLIWRTLFVIACTFIAILMPFFNDILGFLGAVGFWPLTVYFPTEM

SEQ ID NO: 691 - protein, 486 aa, Ricinus communis
MVENTAAKNHPHQVFDVSINMQTQVVGSKWLDDDGRTKRTGTVWTASAHIITAVIGSGVLSLAWAIAQLGWIAGPAVMFLFSLVTYYTSTLLSACYRSGDPVNGKRNYTYMDAVRTNLGGAKVKLCGFVQYLNLFGVAIGYTIASSISMMAIKRSNCFHKSGGKNPCHINANPYMIAFGIAEIIFSQIPDFDQLWWLSILAAVMSFTYSTIGLGLGIAQVVENGKAMGSVTGISIGANVTPTQKIWRSFQALGDIAFAYSYSIILIEIQDTVRSPPSESKTMKKATLISVAVTTLFYMLCGCFGYAAFGDMSPGNLLTGFGFYNPYWLLDIANVAIVVHLVGAYQVYCQPLFAFVEKAAAQRYPDSGFITKDIKIPVPGFRPFNLNLFRSVWRTLFVVFTTVISMLLPFFNDIVGLLGALGFWPLTVYFPVEMYIAQKKIPKWSTRWLCLQILSAACLVITIAAAAGSIAGVVGDLKSVKPFQTSY

SEQ ID NO: 692 - protein, 466 aa, Ricinus communis
MPPQAGSKWYDDDGKLKRTGTVWTASAHIITAVIGSGVLSLAWAVAQLGWVAGPAVMFLFSLVTYYTSTLLSACYRTGDPVNGKRNYTYMDAVRSNLGGAKFKICGYVQYVNLIGVAIGYTIASSISMMAVKRSNCFHKSEAKNPCHMKCQSLHDCILEVVESSSSQIPDFDQTMGGLSIVAAIMSFTYSTIGLGLGIAEVTKNGKAMGSMTGISIGTVTETQKIWRSFQALGDIAFAYSYSLILIEIQDTIRSPPAESKTMRKATLISVSVTTLFYMLCGCFGYAAFGDMSPGNLLTGFGFYNPYWLLDIANVAIVVHLVGAYQVYCQPLFAFVEKAAVQRFPDSEFILKDIKIPIPGCKPYNLNLFRMVWRTVFVIFTTVISMLLPFFNDIVGLLGALGFWPLTVYFPVEMYIAQKKIPKWSTRWLCLQILSAACLIITIAAAAGSIAGVIVDLKTVKPFQTTY

SEQ ID NO: 693 - protein, 284 aa, Ricinus communis
AIAQLGWVAGPVILMAFSFITFFTSTLLADSYRSPDPVTGKRNYTYMDAVRANLGGWKVTFCGISQYANLVGITVGYTITASISMVAVKRSNCFHRHGHAAKCHTSNNPYMIIFACIQIILSQIPNFHKLSWLSVLAAVMSFAYSSIGLGLSIAKVAGGEHVRTSITGTTVGVDVTAAQKIWRAFQSIGDIAFAYAYSTVLIEIQDTIKSGPPENKAMKKASFVGIVTTTMFYILCGCIGYAAFGNDAPGNFLTGFGFYEPFWLIDIANVCIAIHLIGAYQVFS

SEQ ID NO: 694 - protein, 284 aa, Ricinus communis
AIAQIGWIAGPAVMFLFSLVTYYTSTLLSACYRSGDPVNGKRNYTYMDAVRTNLGGAKVKLCGFVQYLNLFGVAIGYTIASSISMMAIKRSNCFHKSGGKNPCHINANPYMIAFGIAEIIFSQIPDFDQLWWLSILAAVMSFTYSTIGLGLGIAQVVENGKAMGSVTGISIGANVTPTQKIWRSFQALGDIAFAYSYSIILIEIQDTVRSPPSESKTMKKATLISVAVTTLFYMLCGCFGYAAFGDMSPGNLLTGFGFYNPYWLLDIANVAIVVHLVGAYQVFA

SEQ ID NO: 695 - protein, 465 aa, Oryza sativa (japonica cultivar-group)
MNKNAAPEDVESGEHERTGTVWTATAHIVTAVIGSGVLALAWSVAQLGWVAGPLALAGFACVTYYTSTLLANAYRAPHPVTGTRNRTYMDAVRSYLSPREVFMCGIAQYVNLWGTMVGYTITATISMVAIRRSDCIHRNGAGAAARCDNTSATVLMLAFSIVQVVLSQFPGLEHITWLSVVAAVMSFAYSFIGLGLSVAEWVSHGGHLSGRIQGATAASSSKKLWNVLLALGNIAFAYTFAEVLIEIQDTLKPSPPENKTMKKAAMYGIGATTIFYISVGCAGYAAFGSDAPGNILTASGMGPFWLVDIANMCLILHLIGAYQVYAQPIFATMERWISSRWPEAKFINSEYTVNVPLIQRGSVTVAPYKLVLRTVVVIATTVVAMMIPFFNAVLGLLGAFSFWPLTVYFPISMHIAQEKITRGGRWYLLQGLSMVCLMISVAVGIGSVTDIVDSLKVATPFKTVS

SEQ ID NO: 696 - protein, 462 aa, Nicotiana sylvestris
MVASPDNNAADGRTVKNKRPIDEWLPITSSRNGQNGGYSAFHNVTAMVGAGVLGLPYAMSELGWGPGVTVMVVSWVITLYTLWQMVECKKCPGMLAGTCIDDHKLAVSNVFGNKLGLWIVVPQQLVVEVGIDIVYMVTGGKSFQKSIVLVCKDNCKDIKLTYYIMIFASVHFVLSHLPNFNAISGVSLVAAIMSLSYCTIAWGASIVLGVQPDVEYEYRAENTGEGIFNFFSGLGEVAFAYAGHNVVLEIQATIPSTPEKPSKGPMWKGVLVAYIIVALCYFPVAIIGYWIFGNSVSNNILISLEKPTWLIVLANAFVVITLLGAYQLYAIPVFDMLETYLVRKLKFKPTWYLRFMTRNLYVAFTMFVGIIFPFLWGLLGFLGGFAFAPTTYFLPCIMWLSIYKPKRWGLSWTSNWICIIVGVMLTVLAPIGGLRTIIIQAKDYNFFYWDSLSGSLAFGKKG

SEQ ID NO: 697 - protein, 469 aa, Solanum tuberosum
MAPEFQKNAMYVSNELENGDVQKNFDDDGREKRTGTLLTASAHIITAVIGSGVLSLAWAIAQLGWVAGPAVLFAFSFITYFTSTLLADCYRSPGPISGKRNYTYMDVVRSHLGGVKVTLCGIAQYANLVGVTIGYTITASISMVAVKRSNCFHKNGHEASCSIESYPYMIIFAVIQIVLSQIPNFHKLSWLSILAAVMSFTYASIGLGLSIAKASGVGHHVKTALTGVVVGVDVSGTEKVWRSFQAIGDIAFAYAYSTVLIEIQDTLKSSPSESKVMKRASLAGVSTTTLFYVLCGTIGYAAFGNNAPGNFLTGFGFYEPFWLIDFANVCIAVHLVGAYQVFCQPLYGFVEGRCSERWPDSKFITSEYAMQVPWCGTYNLNLFRLVWRTTYVIVTAVIAMIFPFFNDFLGLIGAASFYPLTVYFPIEMYIAQRKIPKYSFTWVWLKILSWTCLISITCCSCWIDPGTCH

SEQ ID NO: 698 - protein, 385 aa, Solanum tuberosum
HIITAVIGSGVLSLAWAIAQLGWVAGPAVLFAFSFITYFTSTLLADCYRSPGPISGKRNYTYMDVVRSHLGGVKVTLCGIAQYANLVGVTIGYTITASISMVAVKRSNCFHKNGHEASCSIESYPYMIIFAVIQIVLSQIPNFHKLSWLSILAAVMSFTYASIGLGLSIAKASGVGHHVKTALTGVVVGVDVSGTEKVWRSFQAIGDIAFAYAYSTVLIEIQDTLKSSPSESKVMKRASLAGVSTTTLFYVLCGTIGYAAFGNNAPGNFLTGFGFYEPFWLIDFANVCIAVHLVGAYQVFCQPLYGFVEGRCSERWPDSKFITSEYAMQVPWCGTYNLNLFRLVWRTTYVIVTAVIAMIFPFFNDFLGLIGAASFYPLTVYFPVE

SEQ ID NO: 699 - protein, 376 aa, Solanum tuberosum
HIITAVIGSGVLSLAWATAQLGWVAGPTVLLLFFFVTYYTSALLSDCYRTGDPVTGKRNYTYMDAVRANLGGFQVKICGVIQYANLFGVAIGYTIAASISMVAVNRSNCFHKQGHRAACNVSSTPYMIIFGVMEIIFSQIPDFDQISWLSIVAAVMSFTYSTIGLGLGVAQVAETGKIEGSLTGISIGTEVTEMQKIWRSFQALGAIAFAYSYSLILIEIQDTLKSPPAEAKTMKRATLISVAVTTVFYMLCGCFGYAAFGDQSPGNLLTGFGFYNPYWLLDIANVAIVVHLVGAYQVYCQPLFAFVEKTATEWYPDSKIITKEIDVPIPGFKPFKLNLFRLVWRTIFVIITTVISMLMPFFNDVVGILGAFGFWP

SEQ ID NO: 700 - protein, 379 aa, Nepenthes alata
AVIGSGVLSLAWAIAQLGWVAGPAVLIAFSAITYFTSTMLADCYRAPDPVTGKRNYTYMDVVKAYLGGRKVQLCGLAQYGNLVGVTIGYTITASISMVAVKRSNCFHKHGHRDGCHTSNNPFMIAFACIQIVFSQIPNFHELFMASPIVAAAMSFAYSSIGIGLSIAKVAGGAHARTSLTGVAVGIDVTSTEKVWRTLQAIGDIAFAYAYANVLVEIQDTLKSSPPENKVMRRASLIGGRPPHSFYVLCGCMGYAAFVYDAPGNFLTGFGFYEPFWLIDFANVCIAIHLIGAYQVFGQPIFAFVEGWCRDMWPENKFITREHPIEVPFVGVYYLNLFRLVWRTTYVIITAIVAMLFPFFNDFLGLIGAASFWPLTVYFP

SEQ ID NO: 701 - protein, 377 aa, Nepenthes alata
AVIGSGVLSLAWAIAQLGWIAGPAVMLLFSFVIYYTSILLADCYRVDDPIFGNRNYTYMDAVRSNLGGVKVKVCGLIQYLNLIGVAIGYTIAASISMMAIRRSNCFHNSGAKKPCHMSSNPYMIMFGILEIILSQIPDFDQIWWLSIVAAVMSFTYSTIGLSLGIAQVAANKAFKGSLTGISIGAVTQTQKIWRSFQALGDIAFAYSYSIILIEIQDTVKSPPSEAKTMKKASLISIVVTTAFYMLCGCMGYAAFGDIAPGNLLTGFGFYNPFWLLDIANAAIVVHLVGAYQVYCQPLFAFVEKSASGKWPKNAFINKGIKIQIPGFGAYDLNIFRLAWRTAFVITTTIISMLLPFFNDIVGILGAFGFWPFTVYFP

SEQ ID NO: 702 - protein, 376 aa, Nepenthes alata
AVIGSGVLSLAWATAQLGWIAGPTAMLLFSFITFYTSRLLADCCRSGDSFTGERNPTYMDAVRSNLGGIQVKICGLVQYANLFGVSIGYTIAASISMMAIKRSNCFHASDDKNPCQYPASPFMIIFGLTEIIFAQIPDFHRLWWLSIVAAVMSFTYSTVGVSLGIAQVAENGKIKRSLTGISIGTVSQAQRIWRRFQALGDIAFAYSYSLVLVEIQDTIKSPPSEIKTMKKATVMSIAVTTLIYLLCGCMGYAAFGDLAPGNLLTGFGFYNPYWLLDLANAAIVVHLLGAYQVCCQPIFAFIETTASNAFPDNEFITKEVEIPIPGFKPYKLNLFRLVWRTSFVGVTTTISILLPFSNGVVGLLGALAFWPLTVYY

SEQ ID NO: 703 - protein, 651 aa, Oryza sativa
  unsure (1)..(651): unsure at all Xaa locations
MDSYRAYQQFQEPDILAYIYGITCQTIQRTITIHQRPVTGTGALPFYYCNVASRETETDQRDAFSSQSWKKASISAGNHRPAAHCVDRARTMIPHTRTCPANLSIGYRGRHLLQVCVVSFGYIIKIKIKFKFWANDEVLARQTHCIRTLPNGVRKSRTGALYWSKTRPHPSSPTLPHGTPAGLADNMNKNAAPEDVESGEHERTGTVWTATAHIVTAVIGSGVLALAWSVAQLGWVAGPLALAGFACVTYYTSTLLANAYRAPHPVTGTRNRTYMDAVRSYLSPREVFMCGIAQYVNLWGTMVGYTITATISMVAIRRSDCIHRNGAGAAARCDNTSATVLMLAFSIVQVVLSQFPGLEHITWLSVVAAVMSFAYSFIGLGLSVAEWVSHGXXHLSGRIQGATAASSSKIWNVLLALGNIAFAYTFAEVLIEIQDTLKPSPPENKTMKKAAMYGIGATTIFYISVGCAGYAAFGSDAPGNILTASGMGPFWLVDIANMCLILHLIGAYQVYAQPIFATMERWISSRWPEAKFINSAYTVNVPLIQRGSVTVAPYKLVLRTVVVIATTVVAMMIPFFNAVLGLLGAFSFWPLTVYFPISMHIAQEKITRGGRWYLLQGLSMVCLMISVAVGIGSVTDIVDSLKVATPFKTVS

SEQ ID NO: 704 - protein, 476 aa, Oryza sativa
  unsure (1)..(476): unsure at all Xaa locations
FKFWANDEVLARQTHCIRTLPNGVRKSRTGTVWTATAHIVTAVIGSGVLALAWSVAQLGWVAGPLALAGFACVTYYTSTLLANAYRAPHPVTGTRNRTYMDAVRSYLSPREVFMCGIAQYVNLWGTMVGYTITATISMVAIRRSDCIHRNGAGAAARCDNTSATVLMLAFSIVQVVLSQFPGLEHITWLSVVAAVMSFAYSFIGLGLSVAEWVSHGXXHLSGRIQGATAASSSKIWNVLLALGNIAFAYTFAEVLIEIQDTLKPSPPENKTMKKAAMYGIGATTIFYISVGCAGYAAFGSDAPGNILTASGMGPFWLVDIANMCLILHLIGAYQVYAQPIFATMERWISSRWPEAKFINSEYTVNVPLIQRGSVTVAPYKLVLRTVVVIATTVVAMMIPFFNAVLGLLGAFSFWPLTVYFPISMHIAQEKITRGGRWYLLQGLSMVCLMISVAVGIGSVTDIVDSLKVATPFKTVS

SEQ ID NO: 705 - protein, 518 aa, Lilium longiflorum
ASHQAMEVQSMPVTPRSGTPRVTPPISAPPSQLHSPSLTRSPLLGPATPRASRLTPLASPIRKAIVSMRGYLEEVGHVTRLDPQDEWLPITQSRNGNSYYSAFHTLSSGIGFQALVVPVAFTFLGWLWGIVLLSVGFCWQLYTLWLLVELHESVPGTRYSRYLHLAKDTFGEKLGKFMALVPIIYLSAGTCSALIIVGGSTMKGFFQIVCGPTCRYMPLTTVEWYLVFVCLAVVLAQLPHLNSIAGVSLIGAVTAVTYCTMIWVISVRKGKIPNISYEAVDTSWDVARVLSILNAIGIIAFAFRGHNLVLEIQGTMPSTQKHPARVPMWRGVKVAYVLIAFCLFPVALIGFWSYGNQIPPNGVLTALNQFHSHDTSRTILGLTTLLVVINCLSSFQIYAMPIFDNMEAGYTSKKNKPCPQWLRSGFRAFFGAVAFLISSAFPFLPQLAGLIGAVALPVTFAYPCFMWIVIKKPERFGVMWWLNWCLGCLGMGLSVVLVVAGVWRLVETGVNISFFDPQ

SEQ ID NO: 706 - protein, 447 aa, Avicennia marina
MESQGREDVVGCSGAGGRVHSDGHIDIEIPETAHQISNDSWFQAGFVLTTGINSAYVLGYPGAVMVPLGWIGGVIGLILATVVSLHANALVAKLHDFGGKRRIRYRDLAGSIYGGKAYSITWGMQYVNLVMINVGYIILAGNSLKAVYLLFRDDHVMKLPHFIAIAGLACGLFAISVPHLSALRNWLAFSTLFSMIYIVGGIALAIKDGFKAPPRDYSIPGTKTSRIFTTIGASANLVFSFNTGMLPEIQATVRPPVVENMMKGLYFQFTVGVVPMYAIIFAGYWAYGSTTSSYLLNNVHGPIWLKTTTNISAFLQSVIALHIFASPMYEFLDTKYGIKGSALAVRNLSFRILVRGGYVAMTSLVSALLPFLGDFMSLTGALSTFPLTFILANHMYLVANRNKMSLLQKNWHWLNVVLFSCMAVAAAVAALRLIAVDSRTYHVFADI

SEQ ID NO: 707 - protein, 446 aa, Avicennia marina
MDVRGGEDVTGGSGAGRKVHSEDMAVEVPETAHQISNDSWLQAGFVLTTGVNSAYVLGYSGAVMVPLGWIGGVVGLILATLVSLHANALVAQLHEYGGKRHIRYRDLAGRIYGRRAYSVTWGMQYVNLFMINVGFVILAGNSLKAVYTLFRHDHVMKLPHFIAIAAIACGLFAISIPHLSAMRIWLAFSMFFSLVYIIVGFALSLKDGIEAPPRDYTLPEKGADKVFTIIGAAAELVFSFNTGMLPEIQATVRPPVIGNMMKALYFQFTVGVVPMYSIIFVGYWAYGSKTTSYLLNNVHGPIWLMTVANIAAFLQSVISLHIFASPMYEIWIPDLESKEVLWPIRNLSFRVVVRGGYVATTAFVSALLPFLGDFMSLTGAISTFPLTFILANHMYLVAKGNKLSPLHKTGLWLNIGFFGCLAVAAAVAALREIVVDSKTYHLFADI

SEQ ID NO: 708 - protein, 442 aa, Arabidopsis thaliana
MTATEAKNRKINVGDGDDVVDIEIPDTAHQISSDSWFQVAFVLTTGINSAYVLGYSGTIMVPLGWIGGVVGLLIATAISLYANTLIAKLHEFGGRRHIRYRDLAGFIYGRKAYHLTWGLQYVNLFMINCGFIILAGSALKAVYVLFRDDHTMKLPHFIAIAGLICAIFAIGIPHLSALGVWLGVSTFLSLIYIVVAIVLSVRDGVKTPSRDYEIQGSSLSKLFTITGAAANLVFAFNTGMLPEIQATVRQPVVKNMMKALYFQFTAGVLPMYAVTFIGYWAYGSSTSTYLLNSVNGPLWVKALANVSAILQSVISLHIFASPTYEYMDTKYGIKGNPFAIKNLLFRIMARGGYIAVSTLISALLPFLGDFMSLTGAVSTFPLTFILANHMYYKAKNNKLNAMQKLWHWLNVVFFSLMSVAAAIAAVRLIAVDSKNFHVFADL

SEQ ID NO: 709 - protein, 442 aa, Arabidopsis thaliana
MTATEAKNRKINVGDGDDVVDIEIPDTAHQISSDSWFQVAFVLTTGINSAYVLGYSGTIMVPLGWIGGVVGLLIATAISLYTNTLIAKLHEFGGRRHIRYRDLAGFIYGRKAYHLTWGLQYVNLFMINCGFIILAGSALKAVYVLFRDDHTMKLPHFIAIAGLICAIFAIGIPHLSALGVWLGVSTFLSLIYIVVAIVLSVRDGVKTPSRDYEIQGSSLSKLFTITGAAANLVFAFNTGMLPEIQATVRQPVVKNMMKALYFQFTAGVLPMYAVTFIGYWAYGSSTSTYLLNSVNGPLWVKALANVSAILQSVISLHIFASPTYEYMDTKYGIKGNPFAIKNLLFRIMARGGYIAVSTLISALLPFLGDFMSLTGAVSTFPLTFILANHMYYKAKNNKLNAMQKLWHWLNVVFFSLMSVAAAIAAVRLIAVDSKNFHVFADL

SEQ ID NO: 710 - protein, 439 aa, Arabidopsis thaliana
MDTSEARNRKVVAVEQFDLEVPETAHQISSDSWFQVAFVLTTGINSAYVLGYSGTVMVPLGWIGGVVGLILATAISLYANTLIAKLHEFGGKRHIRYRDLAGFIYGKKMYRVTWGLQYVNLFMINCGFIILAGSALKAVYVLFRDDSLMKLPHFIAIAGVVCAIFAIGIPHLSALGIWLGVSTILSIIYIIVAIVLSAKDGVNKPERDYNIQGSSINKLFTITGAAANLVFAFNTGMLPEIQATVKQPVVKNMMKALYFQFTVGVLPMYAVTFIGYWAYGSSTSTYLLNSVSGPVWVKALANISAFLQSVISLHIFASPTYEYMDTKYGVKGSPLAMKNLLFRTVARGSYIAVSTLLSALLPFLGDFMSLTGAISTFPLTFILANHMYLVAMNDELSLVQKLWHWLNVCFFGLMSLAAAIAAVRLISVDSKNFHVFADV

SEQ ID NO: 711 - protein, 436 aa, Arabidopsis thaliana
MNSKNRINNVGEDVDIEIPDTAHQISSDSWFQAAFVLTTSINSAYVLGYSGTVMVPLGWIGGVVGLILATAISLYANTLVAKLHEFGGKRHIRYRDLAGFIYGRKAYCLTWVLQYVNFFMINCGFIILAGSALKAVYVLFRDDHAMKLPHFIAIAGLICAVFAIGIPHLSALGIWLAVSTILSLIYIVVAIVLSVKDGVKAPSRDYEIQGSPLSKLFTITGAAATLVFVFNTGMLPEIQATVKQPVVKNMMKALYFQFTVGVLPMFAVVFIGYWAYGSSTSPYLLNNVNGPLWVKALANISAILQSVISLHIFASPTYEYMDTKFGIKGNPLALKNLLFRIMARGGYIAVSTLLSALLPFLGDFMSLTGAVSTFPLTFILANHMYYKAKNNKLSTLQKLWHWLNVVFFSLMSVAAAIAALRLIAIDSKNFHVFADL

SEQ ID NO: 712 - protein, 436 aa, Arabidopsis thaliana
MNSKNRINNVGEGVDIEIPDTAHQISSDSWFQAAFVLTTSINSAYVLGYSGTVMVPLGWIGGVVGLILATAISLYANTLVAKLHEFGGKRHIRYRDLAGFIYGRKAYCLTWVLQYVNLFMINCGFIILAGSALKAVYVLFRDDHAMKLPHFIAIAGLICAVFAIGIPHLSALGIWLAVSTILSLIYIVVAIVLSVKDGVKAPSRDYEIQGSPLSKLFTITGAAATLVFVFNTGMLPEIQATVKQPVVKNMMKALYFQFTVGVLPMFAVVFIGYWAYGSSTSPYLLNNVNGPLWVKALANISAILQSVISLHIFASPTYEYMDTKFGIKGNPLALKNLLFRIMARGGYIAVSTLLSALLPFLGDFMSLTGAVSTFPLTFILANHMYYKAKNNKLNTLQKLCHWLNVVFFSLMSVAAAIAALRLIALDSKNFHVFADL

SEQ ID NO: 713 - protein, 452 aa, Arabidopsis thaliana
MTDPPRPDPFPVTRLDSDAGALFVLQSKGEWWHAGFHLTTAIVGPTILTLPYAFRGLGWWLGFVCLTTMGLVTFYAYYLMSKVLDHCEKSGRRHIRFRELAADVLGSGLMFYVVIFIQTAINTGIGIGAILLAGQCLDIMYSSLFPQGTLKLYEFIAMVTVVMMVLSQLPSFHSLRHINCASLLLSLGYTFLVVGACINLGLSKNAPKREYSLEHSDSGKVFSAFTSISIIAAIFGNGILPEIQATLAPPATGKMLKGLLLCYSVIFFTFYSAAISGYWVFGNNSSSNILKNLMPDEGPTLAPIVVIGLAVIFVLLQLFAIGLVYSQVAYEIMEKKSADTTKGIFSKRNLVPRLILRTLYMAFCGFMAAMLPFFGDINAVVGAFGFIPLDFVLPMLLYNMTYKPTRRSFTYWINMTIMVVFTCAGLMGAFSSIRKLVLDANKFKLFSSEVVD

SEQ ID NO: 714 - protein, 452 aa, Arabidopsis thaliana
MTDPPRPDPFPVTRLDSDAGALFVLQSKGEWWHAGFHLTTAIVGPTILTLPYAFRGLGWWLGFFCLTTMGLVTFYAYYLMSKVLDHCEKSGRRHIRFRELAADVLGSGLMFYVVIFIQTAINTGIGIGAILLAGQCLDIMYSSLFPQGTLKLYEFIAMVTVVMMVLSQLPSFHSLRHINFASLLLSLGYTFLVVGACINLGLSKNAPKREYSLEHSDSGKVFSAFTSISIIAAIFGNGILPEIQATLAPPATGKMLKGLLLCYSVIFFTFYSAAISGYWVFGNNSSSNILKNLMPDEGPTLAPIVVIGLAVIFVLLQLFAIGLVYSQVAYEIMEKKSADTTKGIFSKRNLVPRLILRTLYMAFCGFMAAMLPFFGDINAVVGAFGFIPLDFVLPMLLYNMTYKPTRRSFTYWINMTIMVVFTCAGLMGAFSSIRKLVLDANKFKLFSSEVVD

SEQ ID NO: 715 - protein, 423 aa, Arabidopsis thaliana
MTDPPRPDPFPVTRLDSDAGALFVLQSKGWWLGFVCLTTMGLVTFYAYYLMSKVLDHCEKSGRRHIRFRELAADVLGSGLMFYVVIFIQTAINTGIGIGAILLAGQCLDIMYSSLFPQGTLKLYEFIAMVTVVMMVLSQLPSFHSLRHINCASLLLSLGYTFLVVGACINLGLSKNAPKREYSLEHSDSGKVFSAFTSISIIAAIFGNGILPEIQATLAPPATGKMLKGLLLCYSVIFFTFYSAAISGYWVFGNNSSSNILKNLMPDEGPTLAPIVVIGLAVIFVLLQLFAIGLVYSQVAYEIMEKKSADTTKGIFSKRNLVPRLILRTLYMAFCGFMAAMLPFFGDINAVVGAFGFIPLDFVLPMLLYNMTYKPTRRSFTYWINMTIMVVFTCAGLMGAFSSIRKLVLDANKFKLFSSEVVD

SEQ ID NO: 716 - protein, 422 aa, Arabidopsis thaliana
MGGEERSGDGEKRGEEVVDAGSLFVLKSKGWAAGISCLVGGAAVTFYSYTLLSLTLEHHASLGNRYLRFRDMAHHILSPKWGRYYVGPIQMAVCYGVVIANALLGGQCLKAMYLVVQPNGEMKLFEFVIIFGCLLLVLAQFPSFHSLRYINSLSLLLCLLYSASAAAASIYIGKEPNAPEKDYTIVGDPETRVFGIFNAMAIIATTYGNGIIPEIQATISAPVKGKMMKGLCMCYLVVIMTFFTVAITGYWAFGKKANGLIFTNFLNAETNHYFVPTWFIFLVNLFTVLQLSAVAVVYLQPINDILESVISDPTKKEFSIRNVIPRLVVRSLFVVMATIVAAMLPFFGDVNSLLGAFGFIPLDFVLPVVFFNFTFKPSKKSFIFWINTVIAVVFSCLGVIAMVAAVRQIIIDANTYKLFADV

SEQ ID NO: 717 - protein, 440 aa, Arabidopsis thaliana
MVSSSPVSPSKETDRKSGEKWTAEDPSRPAKWWYSTFHTVTAMIGAGVLSLPYAMAYLGWGPGTFVLAMTWGLTLNTMWQMVQLHECVPGTRFDRYIDLGRYAFGPKLGPWIVLPQQLIVQVGCNIVYMVTGGKCLKQFVEITCSTCTPVRQSYWILGFGGVHFILSQLPNFNSVAGVSLAAAVMSLCYSTIAWGGSIAHGRVPDVSYDYKATNPGDFTFRVFNALGQISFAFAGHAVALEIQATMPSTPERPSKVPMWQGVIGAYVVNAVCYFPVALICYWAFGQDVDDNVLMNLQRPAWLIAAANLMVVVHVIGSYQVFAMPVFDLLERMMVNKFGFKHGVVLRFFTRTIYVAFTLFIGVSFPFFGDLLGFFGGFGFAPTSFFLPSIMWLIIKKPRRFSVTWFVNWISIIVGVFIMLASTIGGLRNIIADSSTYSFYA

SEQ ID NO: 718 - protein, 446 aa, Arabidopsis thaliana
MVAQAPHDDHQDDEKLAAARQKEIEDWLPITSSRNAKWWYSAFHNVTAMVGAGVLGLPYAMSQLGWGPGIAVLVLSWVITLYTLWQMVEMHEMVPGKRFDRYHELGQHAFGEKLGLYIVVPQQLIVEIGVCIVYMVTGGKSLKKFHELVCDDCKPIKLTYFIMIFASVHFVLSHLPNFNSISGVSLAAAVMSLSYSTIAWASSASKGVQEDVQYGYKAKTTAGTVFNFFSGLGDVAFAYAGHNVVLEIQATIPSTPEKPSKGPMWRGVIVAYIVVALCYFPVALVGYYIFGNGVEDNILMSLKKPAWLIATANIFVVIHVIGSYQIYAMPVFDMMETLLVKKLNFRPTTTLRFFVRNFYVAATMFVGMTFPFFGGLLAFFGGFAFAPTTYFLPCVIWLAIYKPKKYSLSWWANWVCIVFGLFLMVLSPIGGLRTIVIQAKGYKFYS

SEQ ID NO: 719 - protein, 809 aa, Arabidopsis thaliana
MGEGKMEHRRKVLVTAGCLGSGYLLYKLYNSHTRRLADLERELAHERENDEIIKTQLSSVLIKTDPLDFSSYGFSNGPVLFVLLFRMKAHFESIQMIVDSTTLPHAMQFLSIRISEEIDVSHVMDRLNQGKGMLSPPEKLQLWDELKILSFTRMVLSLWSVTMLSLYIRVQVNILGRHLYVDTARALGSSHLLEEVDLIDRDDEQKFLSSADFLVTNAMPSLISDMQGSAEEVLKGKQLKDVITTRVLQETVMQIVDVFMSTGSPHHWVDYLMMPQDTKLSRTTSDSSDEAVSKFHQLMVETREVLISTEFTNIVEISLKCFTDVLVEEMETQTEAGGLATGKPLAKVLPQIEKTMNVITAEPSKNRFLQIIRDLPEIDELERQKEIDDWLPITSSRNAKWWYSTFHNVTAMVGAGVLGLPFFMAQLGWGPGIAVLILSWIITLYTLWQMVEMHEMVPGKRFDRYHELGQFAFGERLGLYIIVPQQIIVEVGVCIVYMVTGGQSLKKFHEIACQDCSPIRLSFFIMIFASSHFVLSHLPNFNSISGVSLVAAVMSLSYSTIAWTATAAKGVQEDVQYGYKSGTTASTVLSFFTGLGGIAFAYAGHNVVLEIQATIPSTPSNPSKGPMWRGVVVAYVVVALCYFPVALVGYGVFGNAVLDNVLMSLETPVWAIATANLFVVMHVIGSYQIFAMPVFDMVETFLVKKLNFKPSTVLRFIVRNVYVALTMFIGIMIPFFGGLLAFFGGFAFAPTSYFLPCIMWLLIYKPKRFSLSWWTNWVCIVLGVVLMILSSIGGLRQIIIQSKDYSFFS

SEQ ID NO: 720 - protein, 453 aa, Arabidopsis thaliana
MYIQMTDGVPPPPEQSSLDHRIDELERQKEIDDWLPITSSRNAKWWYSTFHNVTAMVGAGVLGLPFFMAQLGWGPGIAVLILSWIITLYTLWQMVEMHEMVPGKRFDRYHELGQFAFGERLGLYIIVPQQIIVEVGVCIVYMVTGGQSLKKFHEIACQDCSPIRLSFFIMIFASSHFVLSHLPNFNSISGVSLVAAVMSLSYSTIAWTATAAKGVQEDVQYGYKSGTTASTVLSFFTGLGGIAFAYAGHNVVLEIQATIPSTPSNPSKGPMWRGVVVAYVVVALCYFPVALVGYGVFGNAVLDNVLMSLETPVWAIATANLFVVMHVIGSYQIFAMPVFDMVETFLVKKLNFKPSTVLRFIVRNVYVALTMFIGIMIPFFGGLLAFFGGFAFAPTSYFLPCIMWLLIYKPKRFSLSWWTNWVCIVLGVVLMILSSIGGLRQIIIQSKDYSFFS

SEQ ID NO: 721 - protein, 441 aa, Arabidopsis thaliana
MEKSQSSPTKDASTKQKNVDDWLPITSSRNAKWWYSAFHNVTAMVGAGVLSLPYAMSNLGWGPGVTIMIMSWLITFYTLWQMVQMHEMVPGKRFDRYHELGQHAFGEKLGLWIVVPQQLIVEVGVDIVYMVTGGKSLKKIHDLLCTDCKNIRTTYWIMIFASIHFVLAHLPNFNSISIVSLAAAVMSLSYSTIAWATSVKKGVHPNVDYSSRASTTSGNVFNFLNALGDVAFAYAGHNVVLEIQATIPSTPEKPSKIAMWKGVVVAYIVVAICYFPVAFVCYYIFGNSVDDNILMTLEKPIWLIAIANAFVVVHVIGSYQIYAMPVFDMLETFLVKKMMFAPSFKLRFITRTLYVAFTMFVAICIPFFGGLLGFFGGFAFAPTTYYLPCIMWLCIKKPKKYGLSWCINWFCIVVGVILTILAPIGGLRTIIISAKNYEFFS

SEQ ID NO: 722 - protein, 441 aa, Arabidopsis thaliana
MGNSEMSASEVAAAKQKNVDDWLPITSSRNAKWWYSAFHNVTAMVGAGVLSLPYAMSNLGWGPGVTIMVMSWIITLYTLWQMVEMHEIVPGKRLDRYHELGQHAFGEKLGLWIVVPQQLIVEVGVDIVYMVTGGASLKKVHQLVCPDCKEIRTTFWIMIFASVHFVISHLPNFNSISIISLAAAVMSLTYSTIAWAASVHKGVHPDVDYSPRASTDVGKVFNFLNALGDVAFAYAGHNVVLEIQATIPSTPEMPSKVPMWRGVIVAYIVVAICYFPVAFLGYYIFGNSVDDNILITLEKPIWLIAMANMFVVIHVIGSYQIFAMPVFDMLETVLVKKMNFNPSFKLRFITRSLYVAFTMIVAICVPFFGGLLGFFGGFAFAPTTYYLPCIMWLVLKKPKRFGLSWTANWFCIIVGVLLTILAPIGGLRTIIINAKTYKFFS

SEQ ID NO: 723 - protein, 446 aa, Arabidopsis thaliana
MVAQAPHDDHQDDEKLAAARQKEIEDWLPITSSRNAKWWYSAFHNVTAMVGAGVLGLPYAMSQLGWGPGIAVLVLSWVITLYTLWQMVEMHEMVPGKRFDRYHELGQHAFGEKLGLYIVVPQQLIVEIGVCIVYMVTGGKSLKKFHELVCDDCKPIKLTYFIMIFASVHFVLSHLPNFNSISGSFSCCCRYVSQLLNNRMGIISKQRCSRRRSIRLQSENNSRYVFNFFSGLGDVAFAYAGHNVVLEIQATIPSTPEKPSKGPMWRGVIVAYIVVALCYFPVALVGYYIFGNGVEDNILMSLKKPAWLIATANIFVVIHVIGSYQIYAMPVFDMMETLLVKKLNFRPTTTLRFFVRNFYVAATMFVGMTFPFFGGLLAFFGGFAFAPTTYFLPCVIWLAIYKPKKYSLSWWANWVCIVFGLFLMVLSPIGGLRTIVIQAKGYKFYS

SEQ ID NO: 724 - protein, 450 aa, Arabidopsis thaliana
MPKYLDQNDEENKGRSTDNNNHRQMDYNDWLPVTASREAKWYYSAFHNVTAMVGAGVLGLPFAMSQLGWGPGLVAIIMSWAITFYSLWQMVQLHEAVPGKRLDRYPELGQEAFGPKLGYWIVMPQQLLVQIASDIVYNVTGGKSLKKFVELLFPNLEHIRQTYYILGFAALQLVLSQSPDFNSIKIVSLLAALMSFLYSMIASVASIAKGTEHRPSTYGVRGDTVASMVFDAFNGIGTIAFAFAGHSVVLEIQATIPSTPEVPSKKPMWKGVVVAYIIVIICYLFVAISGYWAFGAHVEDDVLISLERPAWLIAAANFMVFIHVIGSYQVFAMIVFDTIESYLVKTLKFTPSTTLRLVARSTYVALICLVAVCIPFFGGLLGFFGGLVFSSTSYFLPCIIWLIMKRPKRFSAHWWCSWVAIVTGISIAILAPIGGMRHIILSARTYKLFS

SEQ ID NO: 725 - protein, 455 aa, Arabidopsis thaliana
MAGIPDHIQDQHLVEEDQPFDLEDWLPITASRNANWYYSAFHNVTAIVGAGVLGLPYAMSELGWGPGVVVLILSWVITLYTLWQMIEMHEMFEGQRFDRYHELGQAAFGKKLGLYIIVPLQLLVEISVCIVYMVTGGKSLKNVHDLALGDGDKCTKLRIQHFILIFASSQFVLSLLKNFNSISGVSLVAAVMSVSYSTIAWVASLRKGATTGSVEYGYRKRTTSVPLAFLSALGEMAFAYAGHNVVLEIQATIPSTPENPSKRPMWKGAVVAYIIVAFCYFPVALVGFKTFGNSVEESILESLTKPTALVIVANMFVVIHLLGSYQVYAMPVFDMIESVMIRIWHFSPTRVLRFTIRWTFVAATMGIAVGLPYYSALLSFFGGFVFAPTTYFIPCIMWLILKKPKRFSLSWCMNWFCIIFGLVLMIIAPIGGLAKLIYNIQKGTLPNSRCNLPKH

SEQ ID NO: 726 - protein, 479 aa, Arabidopsis thaliana
MAGIPDHIQDQHLVEEVYAFYDFVTLKNFILKEFLLLYLQDQPFDLEDWLPITASRNANWYYSAFHNVTAIVGAGVLGLPYAMSELGWGPGVVVLILSWVITLYTLWQMIEMHEMFEGQRFDRYHELGQAAFGKKLGLYIIVPLQLLVEISVCIVYMVTGGKSLKNVHDLALGDGDKCTKLRIQHFILIFASSQFVLSLLKNFNSISGVSLVAAVMSVSYSTIAWVASLRKGATTGSVEYGYRKRTTSVPLAFLSALGEMAFAYAGHNVVLEIQATIPSTPENPSKRPMWKGAVVAYIIVAFCYFPVALVGFKTFGNSVEESILESLTKPTALVIVANMFVVIHLLGSYQVYAMPVFDMIESVMIRIWHFSPTRVLRFTIRWTFVAATMGIAVGLPYYSALLSFFGGFVFAPTTYFIPCIMWLILKKPKRFSLSWCMNWFCIIFGLVLMIIAPIGGLAKLIYNIQKGTLPNSRCNLPKH

SEQ ID NO: 727 - protein, 434 aa, Arabidopsis thaliana
MPKYLDQNDEENKGRSTDNNNHRQMDYNDWLPVTASREAKWYYSAFHNVTAMVGAGVLGLPFAMSQLGWGPGLVAIIMSWAITFYSLWQMVQLHEAVPGKRLDRYPELGQEAFGPKLGYWIVMPQQLLVQIASDIVYNVTGGKSLKKFVELLFPNLEHIRQTYYILGFAALQLVLSQSPDFNSIKIVSLLAALMSFLYSMIASVASIAKGTEHRPSTYGVRGDTVASMVFDAFNGIGTIAFAFAGHSVVLEIQATIPSTPEVPSKKPMWKGVVVAYIIVIICYLFVAISGYWAFGAHVEDDVLISLERPAWLIAAANFMVFIHVIGSYQVFAMIVFDTIESYLVKTLKFTPSTTLRLVARSTYVALICLVAVCIPFFGGLLGFFGGLVFSSTSYFLPCIIWLIMKRPKRFSAHWWCSWVSLSFLIKRGLVTQSN

SEQ ID NO: 728 - protein, 519 aa, Arabidopsis thaliana
MDERPETELISIPATPRVSTPEILTPSGQRSPRPATKPSSATWTPTSFISPRFLSPIGTPMKRVLVNMKGYLEEVGHLTKLNPQDAWLPITESRNGNAHYAAFHNLNAGVGFQALVLPVAFAFLGWSWGILSLTIAYCWQLYTLWILVQLHEAVPGKRYNRYVELAQAAFGERLGVWLALFPTVYLSAGTATALILIGGETMKLFFQIVCGPLCTSNPLTTVEWYLVFTSLCIVLSQLPNLNSIAGLSLIGAVTAITYSTMVWVLSVSQPRPATISYEPLSMPSTSGSLFAVLNALGIIAFAFRGHNLVLEIQSTMPSTFKHPAHVPMWRGAKISYFLIALCIFPISIGGFWAYGNLMPSGGMLAALYAFHIHDIPRGLLATAFLLVVFSCLSSFQIYSMPAFDSFEAGYTSRTNKPCSIWVRSGFRVFFGFVSFFIGVALPFLSSLAGLLGGLTLPVTFAYPCFMWVLIKKPAKYSFNWYFHWGLGWLGVAFSLAFSIGGIWSMVTNGLKLKFFKPPN

SEQ ID NO: 729 - protein, 519 aa, Arabidopsis thaliana
MDERPETELISIPATPRVSTPEILTPSGQRSPRPATKPSSATWTPTSFISPRFLSPIGTPMKRVLVNMKGYLEEVGHLTKLNPQDAWLPITESRNGNAHYAAFHNLNAGVGFQALVLPVAFAFLGWSWGILSLTIAYCWQLYTLWILVQLHEAVPGKRYNRYVELAQAAFGERLGVWLALFPTVYLSAGTATALILIGGETMKLFFQIVCGPLCTSNPLTTVEWYLVFTSLCIVLSQLPDLNSIAGLSLIGAVTAITYSTMVWVLSVSQPRPATISYEPLSMPSTSGSLFAVLNALGIIAFAFRGHNLVLEIQSTMPSTFKHPAHVPMWRGAKISYFLIALCIFPISIGGFWAYGNLMPSGGMLAALYAFHIHDIPRGLLATAFLLVVFSCLSSFQIYSMPAFDSFEAGYTSRTNKPCSIWVRSGFRVFFGFVSFFIGVALPFLSSLAGLLGGLTLPVTFAYPCFMWVLIKKPAKYSFNWYFHWGLGWLGVAFSLAFSIGGIWSMVTNGLKLKFFKPPN

SEQ ID NO: 730 - protein, 451 aa, Arabidopsis thaliana
MKGIPSSSNQILNQDLVEDQSFELEDWLPITASRNANWYYSAFHNVTAIVGAGVLGLPYAMSELGWGPGVVVLILSWVITLYTFWQMIEMHEMFEGKRFDRYHELGQAAFGKKLGLYIVVPLQLLVETSACIVYMVTGGESLKKIHQLSVGDYECRKLKVRHFILIFASSQFVLSLLKNFNSISGVSLVAAVMSMSYSTIAWVASLTKGVANNVEYGYKRRNNTSVPLAFLGALGEMAFAYAGHNVVLEIQATIPSTPENPSKRPMWKGAIVAYIIVAFCYFPVALVGFWTFGNNVEENILKTLRGPKGLIIVANIFVIIHLMGSYQVYAMPVFDMIESVMIKKWHFSPTRVLRFTIRWTFVAATMGIAVALPHFSALLSFFGGFIFAPTTYFIPCIIWLILKKPKRFSLSWCINWICIILGVLVMIIAPIGGLAKLMNALKQPDSSCKST

SEQ ID NO: 731 - protein, 418 aa, Arabidopsis thaliana
MKTLRDLQDQSFELEDWLPITASRNANWYYSAFHNVTAIVGAGVLGLPYAMSELGWGPGVVVLILSWVITLYTFWQMIEMHEMFEGKRFDRYHELGQAAFGKKLGLYIVVPLQLLVETSACIVYMVTGGESLKKIHQLSVGDYECRKLKVRHFILIFASSQFVLSLLKNFNSISGVSLVAAVMSMSYSTIAWVASLTKGVANNVEYGYKRRNNTSVPLAFLGALGEMAFAYAGHNVVLEIQATIPSTPENPSKRPMWKGAIVAYIIVAFCYFPVALVGFWTFGNNVEENILKTLRGPKGLIIVANIFVIIHLMGSYQVYAMPVFDMIESVMIKKWHFSPTRVLRFTIRWTFVAATMGIAVALPHFSALLSFFGGFIFAPTTYFIPCIIWLILKKPKRFSLSWCINWASGTPPFGLFVN

SEQ ID NO: 732 - protein, 493 aa, Arabidopsis thaliana
MGETAAANNHRHHHHHGHQVFDVASHDFVPPQPAFKCFDDDGRLKRTGTVWTASAHIITAVIGSGVLSLAWAIAQLGWIAGPAVMLLFSLVTLYSSTLLSDCYRTGDAVSGKRNYTYMDAVRSILGGFKFKICGLIQYLNLFVIAIGYTIAASISMMAIKRSNCFHKSGGKDPCHMSSNPYMIVFGVAEILLSQVPDFDQIWWISIVAAVMSFTYSAIGLALGIVQVAANGVFKGSLTGISIGTVTQTQKIWRTFQALGDIAFAYSYSVVLIEIQDTVRSPPAESKTMKKATKISIAVTTIFYMLCGSMGYAAFGDAAPGNLLTGFGFYNPFWLLDIANAAIVVHLVGAYQVFAQPIFAFIEKSVAERYPDNDFLSKEFEIRIPGFKSPYKVNVFRMVYRSGFVVTTTVISMLMPFFNDVVGILGALGFWPLTVYFPVEMYIKQRKVEKWSTRWVCLQMLTVACLVISVVAGVGSIAGVMLDLKVYKPFKSTY

SEQ ID NO: 733 - protein, 475 aa, Arabidopsis thaliana
MDAYNNPSAVESGDAAVKSVDDDGREKRTGTFWTASAHIITAVIGSGVLSLAWAIAQLGWVAGTTVLVAFAIITYYTSTLLADCYRSPDSITGTRNYNYMGVVRSYLGGKKVQLCGVAQYVNLVGVTIGYTITASISLVAIGKSNCYHDKGHKAKCSVSNYPYMAAFGIVQIILSQLPNFHKLSFLSIIAAVMSFSYASIGIGLAIATVASGKIGKTELTGTVIGVDVTASEKVWKLFQAIGDIAFSYAFTTILIEIQDTLRSSPPENKVMKRASLVGVSTTTVFYILCGCIGYAAFGNQAPGDFLTDFGFYEPYWLIDFANACIALHLIGAYQVYAQPFFQFVEENCNKKWPQSNFINKEYSSKVPLLGKCRVNLFRLVWRTCYVVLTTFVAMIFPFFNAILGLLGAFAFWPLTVYFPVAMHIAQAKVKKYSRRWLALNLLVLVCLIVSALAAVGSIIGLINSVKSYKPFKNLD

SEQ ID NO: 734 - protein, 493 aa, Arabidopsis thaliana
MGETAAANNHRHHHHHGHQVFDVASHDFVPPQPAFKCFDDDGRLKRTGTVWTASAHIITAVIGSGVLSLAWAIAQLGWIAGPAVMLLFSLVTLYSSTLLSDCYRTGDAVSGKRNYTYMDAVRSILGGFKFKICGLIQYLNLFGIAIGYTIAASISMMAIKRSNCFHKSGGKDPCHMSSNPYMIVFGVAEILLSQVPDFDQIWWISIVAAVMSFTYSAIGLALGIVQVAANGVFKGSLTGISIGTVTQTQKIWRTFQALGDIAFAYSYSVVLIEIQDTVRSPPAESKTMKKATKISIAVTTIFYMLCGSMGYAAFGDAAPGNLLTGFGFYNPFWLLDIANAAIVVHLVGAYQVFAQPIFAFIEKSVAERYPDNDFLSKEFEIRIPGFKSPYKVNVFRMVYRSGFVVTTTVISMLMPFFNDVVGILGALGFWPLTVYFPVEMYIKQRKVEKWSTRWVCLQMLSVACLVISVVAGVGSIAGVMLDLKVYKPFKSTY

SEQ ID NO: 735 - protein, 466 aa, Arabidopsis thaliana
MDVPRPAFKCFDDDGRLKRSGTVWTASAHIITAVIGSGVLSLAWAIGQLGWIAGPTVMLLFSFVTYYSSTLLSDCYRTGDPVSGKRNYTYMDAVRSILGGFRFKICGLIQYLNLFGITVGYTIAASISMMAIKRSNCFHESGGKNPCHMSSNPYMIMFGVTEILLSQIKDFDQIWWLSIVAAIMSFTYSAIGLALGIIQVAANGVVKGSLTGISIGAVTQTQKIWRTFQALGDIAFAYSYSVVLIEIQDTVRSPPAESKTMKIATRISIAVTTTFYMLCGCMGYAAFGDKAPGNLLTGFGFYNPFWLLDVANAAIVIHLVGAYQVFAQPIFAFIEKQLAARFPDSDLVTKEYEIRIPGFRSPYKVNVFRAVYRSGFVVLTTVISMLMPFFNDVVGILGALGFWPLTVYFPVEMYIRQRKVERWSMKWVCLQMLSCGCLMITLVAGVGSIAGVMLDLKVYKPFKTTY

SEQ ID NO: 736 - protein, 480 aa, Arabidopsis thaliana
MVVQNVQDLDVLPKHSSDSFDDDGRPKRTGTVWTASAHIITAVIGSGVLSLAWAVAQIGWIGGPVAMLLFSFVTFYTSTLLCSCYRSGDSVTGKRNYTYMDAIHSNLGGIKVKVCGVVQYVNLFGTAIGYTIASAISLVAIQRTSCQQMNGPNDPCHVNGNVYMIAFGIVQIIFSQIPDFDQLWWLSIVAAVMSFAYSAIGLGLGVSKVVENKEIKGSLTGVTVGTVTLSGTVTSSQKIWRTFQSLGNIAFAYSYSMILIEIQDTVKSPPAEVNTMRKATFVSVAVTTVFYMLCGCVGYAAFGDNAPGNLLAHGGFRNPYWLLDIANLAIVIHLVGAYQVYCQPLFAFVEKEASRRFPESEFVTKEIKIQLFPGKPFNLNLFRLVWRTFFVMTTTLISMLMPFFNDVVGLLGAIGFWPLTVYFPVEMYIAQKNVPRWGTKWVCLQVLSVTCLFVSVAAAAGSVIGIVSDLKVYKPFQSEF

SEQ ID NO: 737 - protein, 480 aa, Arabidopsis thaliana
MVVQNVQDLDVLPKHSSDSFDDDGRPKRTGTVWTASAHIITAVIGSGVLSLAWAVAQIGWIGGPVAMLLFSFVTFYTSTLLCSCYRSGDSVTGKRNYTYMDAIHSNLGGIKVKVCGVVQYVNLFGTAIGYTIASAISLVAIQRTSCQQMNGPNDPCHVNGNVYMIAFGIVQIIFSQIPDFDQLWWLSIVAAVMSFAYSAIGLGLGVSKVVENKEIKGSLTGVTVGTVTLSGTVTSSQKIWRTFQSLGNIAFAYSYSMILIEIQDTVKSPPAEVNTMRKATFVSVAVTTVFYMLCGCVGYAAFGDNAPGNLLAHGGFRNPYWLLDIANLAIVIHLVGAYQVYCQPLFAFVEKEASRRFPESEFVTKEIKIQLFPGKPFNLNLFRLVWRTFFVITTTLISMLMPFFNDVVGLLGAIGFWPLTVYFPVEMYIAQKNVPRWGTKWVCLQVLSVTCLFVSVAAAAGSVIGIVSDLKVYKPFQSEF

SEQ ID NO: 738 - protein, 485 aa, Arabidopsis thaliana
MKSFNTEGHNHSTAESGDAYTVSDPTKNVDEDGREKRTGTWLTASAHIITAVIGSGVLSLAWAIAQLGWIAGTSILLIFSFITYFTSTMLADCYRAPDPVTGKRNYTYMDVVRSYLGGRKVQLCGVAQYGNLIGVTVGYTITASISLVAVGKSNCFHDKGHTADCTISNYPYMAVFGIIQVILSQIPNFHKLSFLSIMAAVMSFTYATIGIGLAIATVAGGKVGKTSMTGTAVGVDVTAAQKIWRSFQAVGDIAFAYAYATVLIEIQDTLRSSPAENKAMKRASLVGVSTTTFFYILCGCIGYAAFGNNAPGDFLTDFGFFEPFWLIDFANACIAVHLIGAYQVFAQPIFQFVEKKCNRNYPDNKFITSEYSVNVPFLGKFNISLFRLVWRTAYVVITTVVAMIFPFFNAILGLIGAASFWPLTVYFPVEMHIAQTKIKKYSARWIALKTMCYVCLIVSLLAAAGSIAGLISSVKTYKPFRTMHE

SEQ ID NO: 739 - protein, 485 aa, Arabidopsis thaliana
MKSFNTEGHNHSTAESGDAYTVSDPTKNVDEDGREKRTGTWLTASAHIITAVIGSGVLSLAWAIAQLGWIAGTSILLIFSFITYFTSTMLADCYRAPDPVTGKRNYTYMDVVRSYLGGRKVQLCGVAQYGNLIGVTVGYTITASISLVAVGKSNCFHDKGHTADCTISNYPYMAVFGIIQVILSQIPNFHKLSFLSIMAAVMSFTYATIGIGLAIATVAGGKVGKTSMTGTAVGVDVTAAQKIWRSFQAVGYIAFAYAYATVLIEIQDTLRSSPAENKAMKRASLVGVSTTTFFYILCGCIGYAAFGNNAPGDFLTDFGFFEPFWLIDFANACIAVHLIGAYQVFAQPIFQFVEKKCNRNYPDNKFITSEYSVNVPFLGKFNISLFRLVWRTAYVVITTVVAMIFPFFNAILGLIGAASFWPLTVYFPVEMHIAQTKIKKYSARWIALKTMCYVCLIVSLLAAAGSIAGLISSVKTYKPFRTMHE

SEQ ID NO: 740 - protein, 466 aa, Arabidopsis thaliana
MDVPRPAFKCFDDDGRLKRSGTVWTASAHIITAVIGSGVLSLAWAIGQLGWIAGPTVMLLFSFVTYYSSTLLSDCYRTGDPVSGKRNYTYMDAVRSILGGFRFKICGLIQYLNLFGITVGYTIAASISMMAIKRSNCFHESGGKNPCHMSSNPYMIMFGVTEILLSQIKDFDQIWWLSIVAAIMSFTYSAIGLALGIIQVAANGVVKGSLTGISIGAVTQTQKIWRTFQALGDIAFAYSYSVVLIEIQDTVRSPPAESKTMKIATRISIAVTTTFYMLCGCMGYAAFGDKAPGNLLTGFGFYNPFWLLDVANAAIVIHLVGAYQVFAQPIFAFIEKQAAARFPDSDLVTKEYEIRIPGFRSPYKVNVFRAVYRSGFVVLTTVISMLMPFFNDVVGILGALGFWPLTVYFPVEMYIRQRKVERWSMKWVCLQMLSCGCLMITLVAGVGSIAGVMLDLKVYKPFKTTY

SEQ ID NO: 741 - protein, 476 aa, Arabidopsis thaliana
MVVQNVQDLDVLPKHSSDSFDDDGRPKRTGTVWTASAHIITAVIGSGVLSLAWAVAQIGWIGGPVAMLLFSFVTFYTSTLLCSCYRSGDSVTGKRNYTYMDAIHSNLGGIKVKVCGVVQYVNLFGTAIGYTIASAISLVTSCQQMNGPNDPCHVNGNVYMIAFGIVQIIFSQIPDFDQLWWLSIVAAVMSFAYSAIGLGLGVSKVVENKEIKGSLTGVTVGTVTLSGTVTSSQKIWRTFQSLGNIAFAYSYSMILIEIQDTVKSPPAEVNTMRKATFVSVAVTTVFYMLCGCVGYAAFGDNAPGNLLAHGGFRNPYWLLDIANLAIVIHLVGAYQVYCQPLFAFVEKEASRRFPESEFVTKEIKIQLFPGKPFNLNLFRLVWRTFFVMTTTLISMLMPFFNDVVGLLGAIGFWPLTVYFPVEMYIAQKNVPRWGTKWVCLQVLSVTCLFVSVAAAAGSVIGIVSDLKVYKPFQSEF

SEQ ID NO: 742 - protein, 466 aa, Arabidopsis thaliana
MDVPRPAFKCFDDDGRLKRSGTVWTASAHIITAVIGSGVLSLAWAIGQLGWIAGPTVMLLFSFVTYYSSTLLSDCYRTGDPVSGKRNYTYMDAVRSILGGFRFKICGLIQYLNLFGITVGYTIAASISMMAIKRSNCFHESGGKNPCHMSSNPYMIMFGVTEILLSQIKDFDQIWWLSIVAAIMSFTYSAIGLALGIIQVAANGVVKGSLTGISIGAVTQTQKIWRTFQALGDIAFAYSYSVVLIEIQDTVRSPPAESKTMKIATRISIAVTTTFYMLCGCMGYAAFGDKAPGNLLTGFGFYNPFWLLDVANAAIVIHLVGAYQVFAQPIFAFIEKQAAASFPDSDLVTKEYEIRIPGFRSPYKVNVFRAVYRSGFVVLTTVISMLMPFFNDVVGILGALGFWPLTVYFPVEMYIRQRKVERWSMKWVCLQMLSCGCLMITLVAGVGSIAGVMLDLKVYKPFKTTY

SEQ ID NO: 743 - protein, 476 aa, Arabidopsis thaliana
MVQNHQTVLAVDMPQTGGSKYLDDDGKNKRTGSVWTASAHIITAVIGSGVLSLAWATAQLGWLAGPVVMLLFSAVTYFTSSLLAACYRSGDPISGKRNYTYMDAVRSNLGGVKVTLCGIVQYLNIFGVAIGYTIASAISMMAIKRSNCFHKSGGKDPCHMNSNPYMIAFGLVQILFSQIPDFDQLWWLSILAAVMSFTYSSAGLALGIAQVVVNGKVKGSLTGISIGAVTETQKIWRTFQALGDIAFAYSYSIILIEIQDTVKSPPSEEKTMKKATLVSVSVTTMFYMLCGCMGYAAFGDLSPGNLLTGFGFYNPYWLLDIANAAIVIHLIGAYQVYCQPLFAFIEKQASIQFPDSEFIAKDIKIPIPGFKPLRLNVFRLIWRTVFVIITTVISMLLPFFNDVVGLLGALGFWPLTVYFPVEMYIAQKKIPRWSTRWVCLQVFSLGCLVVSIAAAAGSIAGVLLDLKSYKPFRSEY

SEQ ID NO: 744 - protein, 476 aa, Arabidopsis thaliana
MVQNHQTVLAVDMPQTGGSKYLDDDGKNKRTGSVWTASAHIITAVIGSGVLSLAWATAQLGWLAGPVVMLLFSVVTYFTSSLLAACYRSGDPISGKRNYTYMDAVRSNLGGVKVTLCGIVQYLNIFGVAIGYTIASAISMMAIKRSNCFHKSGGKDPCHMNSNPYMIAFGLVQILFSQIPDFDQLWWLSILAAVMSFTYSSAGLALGIAQVVVNGKVKGSLTGISIGAVTETQKIWRTFQALGDIAFAYSYSIILIEIQDTVKSPPSEEKTMKKATLVSVSVTTMFYMLCGCMGYAAFGDLSPGNLLTGFGFYNPYWLLDIANAAIVIHLIGAYQVYCQPLFAFIEKQASIQFPDSEFIAKDIKIPIPGFKPLRLNVFRLIWRTVFVIITTVISMLLPFFNDVVGLLGALGFWPLTVYFPVEMYIAQKKIPRWSTRWVCLQVFSLGCLVVSIAAAAGSIAGVLLDLKSYKPFRSEY

SEQ ID NO: 745 - protein, 154 aa, Cicer arietinum
VKGLTMCYAVILVTFYSAAVSGYWVFGNKSNSNILKSLLPDSGPTLAPTWVLGLAVIFVLLQLFAIGLVYSQVAYEVMEKKSADVKQGMFSKRNLIPRLILRTIYMIFCGFLAAMLPFFGDINGVVGAVGFIPLDFVLPNDSYTTKHTSLQNHP

SEQ ID NO: 746 - protein, 453 aa, Glycine max
  unsure (1)..(453): unsure at all Xaa locations
KESHAGGEERFCGGRGGGTHDADFRCXENLADAEIPDTAHQISTDSWFQVGFVLTTGINSAYVLGYSGTIMVPLGWAGGVVGLILATAISLYANALIARLHEYGGTRHIRYRDLAGFIYGRKAYSLTWALQYVNLFMINAGYIILAGSALKAAYVLFREDDGMKLPYFIAIAGFVCAMFAICIPHLSALGIWLGFSTVFSLVYIVIAFVLSIKDGIKSPPGDYSIPGTSTSKISTTIGASANLVFAYNTGMLPEIQATIRQPVVKNMMKALYFQFTVGVLPLYLVTFAGYWAYGSSTATYLMSDVNGPVWAKAMANIAAFLQSVIALHIFASPMYEYLDTKYGIKGSALAFKNLSFRVLVRGGYLTLNTFVSALLPFLGDFMSLTGAISTFPLTFILANHMYLVANENKLTSIQKLWHWINICFFAFMSAAATIAALRLIDLDSKTYHVFADI

SEQ ID NO: 747 - protein, 453 aa, Glycine max
  unsure (1)..(453): unsure at all Xaa locations
KESHAGGEERFCGGRGGGTHDADFRCXENLADAEIPDTAHQISTDSWFQVGFVLTTGINSAYVLGYSGTIMVPLGWAGGVVGLILATAISLYANALIARLHEYGGTRHIRYRDLAGFIYGRKAYSLTWALQYVNLFMINAGYIILAGSALKAAYVLFREDDGMKLPYCIAIAGFVCAMFAICIPHLSALGIWLGFSTVFSLVYIVIAFVLSINDGIKSPPGDYSIPGTSTSKIFTTIGASANLVFAYNTGMLPEIQATIRQPVVKNMMKALYFQFTVGVLPLYLVTFAGYWAYGSSTATYLMSDVNGPVWAKAMANIAAFLQSVIALHIFASPMYEYLDTKYGIKGSALAFKNLSFRVLVRGGYLTVNTFVSALLPFLGDFMSLTGAISTFPLTFILANHMYLVTNENKLTSTQKLWHWINICFFALMSAAAAIAALRLIDLDSKTYHVFADL

SEQ ID NO: 748 - protein, 443 aa, Glycine max
MGKGNMELETNKVYDYEDARGDVEVPDTAHQISTDSWFQVAFILTTGINSAFVLGYPGTVMVPLGWIGGVIGLILATMVSLYANALIAYLHELGGQRHIRYRDLAGFIYGKKAYNLTWVLQYINLFMINTGYIILAGSALKATYVLFRDDGLLKLPYCIAIGGFVCAMFAICIPHLSALGIWLGFSTVFSLAYIVISFVLSLKDGLQSPPRDYEIPGDGVSKIFTIIGASANLVFAFNTGMLPEIQATIRQPVVKNMMKALYFQFTVGVLPLYLVAFTGYWAYGSSTEVYLLNSVNGPVWVKASANITAFLQSVIALHIFASPMYEFLDTKYGIKGSALNAKNLSFRVVVRGGYLAFNTFVAAFLPFLGDFMSLTGAISTFPLTFILANHMYLKAKKDKLNSSQKLWHRFNIGFFAIMSLAATISAIRLISVDSKTYHVFADL

SEQ ID NO: 749 - protein, 461 aa, Glycine max
  unsure (1)..(461): unsure at all Xaa locations
KRLTLAVKNVSAAAAEEEEQVNMTLISNSDVESHADVQIPDTAHQISTDSWFQVGFVLTTGINSAYVLGYSGTIMVPLGWAGGVVGLILATAISLYANALIARLHEYGGTRHIRYRDLAGFIYGRKAYSLTWALQYVNLFMINAGYIILAGPALKATFVLIQXEDDGMKLPYFLGXIAGFGCAMFAICIPHLSALGIWLGFSTVFSLVYIVIAFVLSIKDGIKSPPRDYSIPGTSTSKISTTIGASANLVFAYNTGMLPEIQATIRQPVVKNMMKALYFQFTVGVLPLYLVTFAGYWAYGSSTATYLMSDVNGPVWAKAMANIAAFXLQSVIALHIFASPMYEYLXDTKYGIKGSALAFKNXSFRVXVRXGYLTLNTFVSALLPFLGDFMSLPGAISPFPLTFILANHMSLVANANKLTSIQKLWHWINICFFAFMSVAATIAALRLIDLDSKTYHVFADI

SEQ ID NO: 750 - protein, 275 aa, Glycine max
  unsure (1)..(275): unsure at all Xaa locations
KEERARASLSLXTSSXGQQEKGTQNDDYGLASAHAIDQDSWQQVGLMLVTSFNCGWILSFSNLVMWPLGWTWGIICLIVVGFYTAYANWLLAAFHFIDDRRFIRYRDLMGYVYGKSMYHLTWVFQFFTLLLGNMGFILLGGKALKAINSEFSXXSPLRLQYYIVITGAAYFLYSFFIPTISAMRNWLGASAVLTFTYIILLLIVLVKDGKSRSNRDYDLSGSEVSKVFNAFGAISAIIVANTSGLLPEIQVISLILFSLNKLIVLTQDXIKKKKK

SEQ ID NO: 751 - protein, 144 aa, Glycine max
  unsure (1)..(144): unsure at all Xaa locations
XGYVYXSMYHLTWVFQFLTLLLGNMGFILLGGKALKAINSEFSXXSPLRLQYYIVITGAAYFLYSFFIPTISAMRNWLGASAVLTFTYIILLLIXLVKDGKSRSNRDYDLSGNEVSKVFNAFGAISAIIVANTSGLLPEIQSTL

SEQ ID NO: 752 - protein, 456 aa, Glycine max
MGTLLPDEKSENPNALEQLQHQKDVDAGALFVLKSKGSWMHCGYHLTTSIVAPPLLSLPYAFTFLGWTAGILSLVIGALVTFYSYNLISRVLEHHAQMGMRQLRFRDMARDILGPGWGRYFVGPIQFAVCYGAVVACTLLGGQCMKAIYLLSNPNGTMKLYEFVIIFGCFMLILAQIPSFHSLRHINLVSLVLCLAYSAGATIGSIYIGDSSKGPEKDYSLKGDSVNRLFGIFNAIAIIATTYGNGIIPEIQATLAPPVKGKMLKGLCVCYLVLIVTFFSVSVSGYWAFGNESEGLILSNFVDNGKPLVPKWFIYMTNIFTITQLSAVGVVYLQPTNEVLEQTFGDPKSPEFSKRNVIPRVISRSLAIAISTTIAAMLPFFGDINSLIGAFGFIPLDFILPMVFYNLTFKPSKRSPVFWLNVIIVVAFSALGAIAAVAAVRQIVLDAKNYQLFANV

SEQ ID NO: 753 - protein, 445 aa, Glycine max
MAEPPKGDEEDGGAAFVLQSKGEWWHAGFHLTTAIVGPTILTLPYAFRGLGWGLGFMCLTVMGIVTFYSYFLMSKVLDHCEKSGRRHIRFRELAADVLGSGWMFYFVIFIQTAINTGVGVGAILLAGECLQIMYSNISPHGPLKLYHFIAMVTVIMIVLSQLPSFHSLRHINLCSLLFALGYTILVVGACIHAGTSENAPPRDYSLEPKKSARAFSAFTSMSILAAIFGNGILPEIQATLAPPATGKMVKGLFMCYSVIFVTFYSAAVSGYWVFGNKSNSNILKSLLPDSGPPLAPTWVLGLAIIFVLLQLFAIGLVYSQVAYEIMEKKSADVRQGMFSKRNLIPRIILRTIYMIFCGVLAAMLPFFGDINGVVGAIGFIPLDFILPMLLYNMEYKPPKSSFTYWINVSIMVIFTGAGMMGAFSSIRKLVLDANQFKLFSSDVVD

SEQ ID NO: 754 - protein, 451 aa, Glycine max
MGSLEVESTNGHTSSPHKKTEKSERERRIDEWLPITSKRNGKWWYSAFHNVTAMVGAGVLGLPYAMSELGWGPGVTILILSWIITLYTLWQMVEMHEMVPGKRFDRYHELGQYAFGEKLGLYIVVPQQLVVEIGVNIVYMVTGGTSLKKFHDTVCSNCKNIKLTFFIMIFASVHFVLSHLPDFNSITGVSLAAAVMSLSYSTIAWVASVHKGVQENVQYGYKAKSTSGTVFNFFNALGTVAFAYAGHNVVLEIQATIPSTPEKPSKVPMWRGVVVAYIVVAICYFPVALIGYWMFGNEVDSDILISLEKPTWLIAMANLFVVIHVIGSYQIYAMPVFDMIETVMVKKLNFEPSRMLRFVVRNVYVAFTMFIAITFPFFDGLLGFFGGFAFAPTTYFLPCIMWLAIHKPKRYSLSWFINWICIVLGLCLMILSPIGGLRTIIIKAKTYEFYS

SEQ ID NO: 755 - protein, 483 aa, Glycine max
  unsure (1)..(483): unsure at all Xaa locations
LLNTANNHRHKSAYTSQPWEPRLRRVEILLLQGEKRLLSQQQRLIKXTAEQKAIDDWLPITSSRNAKWWYSAFHNVTAMVGAGVLSLPSAMASLGWGPGVVILVLSWIITLYTLWQMVEMHEMVPGKRFDRYHELGQHAFGEKLGLWIVVPQQLICEVGVGLVYMVTGGKSLQKIHDLVCQHRKDCKNIKTTYFIMIFASVHFVLSHLPNFNAIFGSSLAAAIMSLSYSTIAWVASVDKRVHNHVDVAVEYGYKASTSAGNVFNFFNALGDVAFAYAGHNVVLEIQATIPSSPEKPSKGPMWRGVLIAYLVVALCYFPVALIGYWVFGNSVDDNILITLNKPTWLIVTANMFVVIHVIGSYQLYAMPVFDMIETVMVKQLRFKPTWQLRFVVRNVYVAFTMFVGITFPFFGALLGFFGGFAFAPTTYFLPCIIWLAIYKPKKFSLSWITNWICIIFGLLLMILSPIGGLRSIILNAKNYGFYQ

SEQ ID NO: 756 - protein, 440 aa, Glycine max
  unsure (1)..(440): unsure at all Xaa locations
IKMVSDSCPPLKEPXXSDKKWEEKGPPRNAKWWYSTFHAVTAMIGAGVLSLPYAMAYLGWVPGTLILLMSWCLTLNSMWQMIQLHECVPGTRFDRYIDLGRHAFGPKLGPWIVLPQQLIVQVGCDIVYMVTGGKCLKKFMEIACTNCTQIKQSYWILIFGGIHFFLSQLPNFNSVAGVSLAAAVMSLSYSTISWVACLARGRVENVSYAYKKTTSTDLMFRIFNALGQISFAFAGHAVALEIQATIPSTPEKPSKIPMWKGAIGAYVINAICYFPVALVGYWAFGRDVEDNVLMEFERPAWLIASANLMVFIHVVGSYQVYAMPVFDLIESMMVKRFKFPPGVALRLVARSAYVAFTLFVGVTFPFFGDLLGFFGGFGFAPTSYFLPSIMWLIIKKPKRFSTNWFINWISIYIGVCIMLASTIGGLRNIATDASTYKFYT

SEQ ID NO: 757 - protein, 375 aa, Glycine max
  unsure (1)..(375): unsure at all Xaa locations
XLELSWIITLYTLWQMVEMHEMVPGKRFDRYHELGQYAFGEKLGLYIVVPQQLVVEIGVNIVYMVTGGKSLQKFHDTVCDSCKKIKLTFFIMIFASVHFVLSHLPNFNSISGVSLAAAVMSLSYSTIAWAASAHKGVQENVEYGYKAKSTSGTVFNFFSALGDVAFAYAGHNVVLEIQATIPSTPEKPSKGPMWRGVVVAYIVVALCYFPVALIGYWMFGNTVEDNILISLEKPKWLIAMANMFVVIHVIGSYQIYAMPVFDMIETVMVKKLNFKPSMTLRFIVRNLYVAFTMFVAITFPFFGGLLGFFGGFAFAPTTYFLPCVMWLAIYKPRRFSMSWWANWICIVFGLLLMILSPIGGLRSIIISAKDYKFYS

SEQ ID NO: 758 - protein, 372 aa, Glycine max
  unsure (1)..(372): unsure at all Xaa locations
LSWIITLYTLWQMVEMHEMVPGKRFDRYHELGQYAFGEKLGLYIVVPQQLVVKIGVHSLYVFTGENSVKKLHDTVCQSCKNIKLTFFIMIFACVHFVLSHXRHXLQVLRISSFLTDMSYSYSTIAWAASAHKGVQENVEYGYKAKSTSGTVFNFFSALGDVAFAYAGHNVVLEIQATIPSTPEKPSKGPMWRGVVVAYIVVALCYFPVALIGYWMFGNTVEDNILISLEKPKWLIAMANMFVVIHVIGSYQIYAMPVFDMIETVMVKKLNFKPSMTLRFIVRNLYVAFTMFVAITFPFFGGLLGFFGGFAFAPTTYFLPCVMWLAIYKPRRFSMSWWANWICIVFGLLLMILSPIGGLRSIIISAKDYKFYS

SEQ ID NO: 759 - protein, 439 aa, Glycine max
MGHSEENSDVAARQKAIDDWLPVTGSRNAKWWSSAFHNLTAMVGAGVLSLPFAMSNMGWGPGATVLILSWVITLYTLWQMVEMHEMVPGKRFDRYHELGQHAFGDKLGLWIVVPQQVVVEVGTCIVYMVTGGKSLKKVHDTLCPDCKDIKTSYWIVIFASVNIVLAQCPNLNSISAISFVAAAMSLIYSTIAWGASINKGIEANVDYGSRATSSADAVFNFFSALGDVAFAYAGHNVVLEIQATMPSSEDTPSKKPMWRGVILAYIGVAFCYLPVAFIGYYMFGNSVDDNILITLERPAWLIAAANLFVFVHVVGGYQVFAMPVFDMIETYMVTKLNFPPSTALRVTTRTIYVALTMLIGICIPFFGSLLGFLGGFAFAPTSYFLPCIIWLKLKKPKKFGLSWTINWICIILGVMLMIVSPIGALRNIILSAKNYEFFS

SEQ ID NO: 760 - protein, 505 aa, Glycine max
  unsure (1)..(505): unsure at all Xaa locations
GSRXVSSFIIFSFFLSFGTLERKHHQQEQHPKDAWLPITESRNGNAYYAAFHILNSNIGFQALMLPVAFATLGWAWGTVCLSLAFVWQLYAIFLLVQLHESVPGIRHSRYLFLAMAAFGKKLGKVAALFPVMYLSGGTCVMIIITGGGTLKQLLKTLCDKTCNAHALSGAEWFLVFTCVAILIAQLPNLNSMAMVSLVGAVTSVTYCTLFWVLSVKNGRPNNVSYSSSLQSQEHTPVAKINGVLNAIGIIVLAFRGHNVLPEIQGTLPSNFEQTSKRPMRRGVSISYVLISMCMFPLAIAGFWAYGNQINDGGLLTSFPQFHKRQITKFSMGAIYVLVIIHCLTSFQIYAMPVFDNLEIRYTSIKNQRCPRLVRTCIRLFFGGLTFFISVTFPFLPRLSALLGSMTLVPITYAYPCFMWLSLKKPRPRGFVWCFNVALGCVGMLLSALLVAAAIRTLALNGLDANFFKPXQLILCHPTATSILPTIYFNLLLVIYRKSFLNMILQ

SEQ ID NO: 761 - protein, 77 aa, Glycine max
FMGDFVNFLGSFSLVPLTFMFPSMVFIKVKGRTARIEKKAWHWFNIVFSFLLTIATTISAIRLIVNNIQKYHFFADA

SEQ ID NO: 762 - protein, 114 aa, Glycine max
  unsure (1)..(114): unsure at all Xaa locations
MELETNKVYDYXXDARGDVEVPDTAHQISTDSWFQVAFILTTGINSAFVLGYPGTVMVPLGWIGGVIGLILATMVSLYANALIAYLHELGGQRHIRYRDLAGFIYGYLCSIQGX

SEQ ID NO: 763 - protein, 117 aa, Glycine max
  unsure (1)..(117): unsure at all Xaa locations
LAPTSLSLXTSIKGXQQQAAQNDDDGLDSAHAIDQDSWQQERLALVTSXNRGSILSCSKMVMWPLGWTWSIICLIVVGLYTAYADRLSSACDFIHDRRFIRYTDLMGYVYSKSMYHL

SEQ ID NO: 764 - protein, 166 aa, Glycine max
  unsure (1)..(166): unsure at all Xaa locations
INGTKFLATKNVGNCFPPPTLVHDXNSVKACPREFQTCSQFFXXIKKTVFFVCADSWFQVAFILTTGINSAFVLGYPGTVMVPLGWFGGVIGLILATAVSLYANALVAYLHELGGQRHIRYRDLAGFIYGKPHYXLLPSSLHFVRSFPFSLCSVFILISGKKAYNX

SEQ ID NO: 765 - protein, 119 aa, Glycine max
  unsure (1)..(119): unsure at all Xaa locations
XEFLDTKYGIKGSAMNVKNMSFRMVVRGGYLAFNTFVAAFLPFLGDFMSLTGAISTFPLTFILANHMYLKAKKDKLNSSQKLWHWLNIGFFSIMSLAATISAIRLIAIDSKTFHVFADL

SEQ ID NO: 766 - protein, 515 aa, Glycine max
GEKMGEAKEIWSAPITPRTASVVGTPVVASPPVSCPPSQLHSPSLTRSPLLHPEDGDAPRLTPLGSPVRKALRFTKLDPQDAWLPITESRNGNKYYAAFHTLCSGIGIQALVLPVAFTFLGWTWGIISMTLAFIWQLYTLWLLVNLHESVEQGVRYCRYLQLCGATFGEKLGKILALFPILYLSAGTCTTLIIIGGSTARTFYQVVCGETCTAKPMTTVEWYLVFTCVAVVLSQLPNLNSIAGVSLIGAVTAVGYCTAIWVTSVARGALKDVSYNPVRTGSSIENAFGVLNALGIIAFAFRGHNLILEIQSTMPSSEKHPSHVPMWKGVKVSYTIIAACLFPMAIGGYWAYGQLIPANGVLTALYQYHSRDVSRFVLGLTSFFVVVNGLCSFQIYGMPAFDDMESGYTARMKKPCPWWLRAFIRVFFGFLCFFIGVAVPFLSQLAGLIGGVALPVTFAYPCFMWLKTKKPKKLSLMWWLNWFLGTLGVALSAILVAASLYVIVDTGVNVSFFNPQ

SEQ ID NO: 767 - protein, 515 aa, Glycine max
GEKMGEAKEIWSAPITPRTASVVGTPVVASPPVSCPPSQLHSPSLTRSPLLHPEDGDAPRLTPLGSPMRKALRFTKLDPQDAWLPITESRNGNKYYAAFHTLCSGIGIQALVLPVAFTILGWTWGIITMTLAFIWQLYTLWLLVNLHESVEQGVRYCRYLQLCGATFGEKLGKILALFPILYLSAGTCTTLIIIGGSTARTFYQVVCGETCTAKPMTTVEWYLVFTCVAVVLSQLPNLNSIAGVSLIGAVTAVGYCTAIWVTSVARGALPDVSYNPVRTGNSVEDAFSVLNALGIIAFAFRGHNLILEIQSTMPSSEKHPSHVPMWKGVKVSYTIIAACLFPMAIGGYWAYGQLIPANGVLTALYQFHSRDVSRFVLGLTSFFVVVNGLCSFQIYGMPAFDDMESGYTTRMKKPCPWWLRAFIRVFFGFLCFFIGVAVPFLSQMAGLIGGVALPVTFAYPCFMWLKTKKPKKYSAMWWLNWFLGTLGVALSAILVAASLYVIIDTGVNVSFFNPQ

SEQ ID NO: 768 - protein, 174 aa, Glycine max
  unsure (1)..(174): unsure at all Xaa locations
TTEFISFWFLGSRWLQGLCLVGAGSHRDAALRRRRQPSCDTSNNGXKGTWDSRTTKSMNSRMPRGDRXIPKSRSXKISTDSWVSSGLLSLTTXGINSAFXVLGYPGTVMVPLGWIGGVIGLILATMVSLYANALIAYLHELGGQRHIRYRDLAGFIYGRTHKLLSSSLHFAMLX

SEQ ID NO: 769 - protein, 179 aa, Glycine max
  unsure (1)..(179): unsure at all Xaa locations
XFSVAISGYWAFGNESGASILANFIGETKPLLPKWFFLMTNIFILLQVMALTAVYLQPTNEMFEATFGDPKMGQFSMRNVVPRVVLRSLSVAAATVLAAMLPFFPDIMALFGAFGCIPLDFILPMVFYNMTFKPSKNTIMFWVNNVIAAASSILVVIGGIASIRQIVIDAKTYNLFADM

SEQ ID NO: 770 - protein, 520 aa, Glycine max
  unsure (1)..(520): unsure at all Xaa locations
MEERPEAELISIPATPRVSTPEILTPGQRSPRAASKEGKSWTPTSFISPRFLSPIGTPMKRVLVNMKGYLEEVGHLTKLNPQDAWLPITESRNGNAHYAAFHNLNAGVGFQALFLPVAFAYLGWSWGILSLTIAYCWQLYTLWILVQLHEAVPGKRYNRYVELAQAAFGERLGVWLALFPTVYLSAGTATALILIGGETMKLFFQIVCGPTCTSNPLTTVEWYLVFTSLSIVLSQLPNLNSIAGLSLIGAVTAITYSTMVWVLSVSQQRPPSISYEPLSLSQPSASVFLAMNALGIIAFSFRGHNLALEIQSTMPSTFKHPARVPMWKGAKVAYFFIAMCLFPIAIGGFWAYGNQMPPGGILTALYAFHSHDISRGILALAFLLVVFNCLSSFQIYSMPAFDSFEAGYTSRTNRPCSIWVRSGFRVFYGFVSFFIGVALPFLSSLAGLLGGLTLPVTFAYPCFMWVLIKQPPKYSFNWYFNWILGWLGVGFSLAFSIGGIWSIVNDGLKFKFFKPNXNFQ

SEQ ID NO: 771 - protein, 531 aa, Glycine max
  unsure (1)..(531): unsure at all Xaa locations
MEERPETELISIPATPRVSTPEILTPGQRSPRAASKEGKSWTPTSFISPRFLSPIGTPMKRVLVNMKGYLEEVGHLTKLNPQDAWLPITESRNGNAHYAAFHNLNAGVGFQALVLPVAFAYLGWSWGILSLTIAYCWQLYTLWILVQLHEAVPGKRYNRYVELAQAAFGERLGVWLALFPTVYLSAGTATALILIGGETMKLFFQIVCGPTCTSNPLTTVEWYLVFTSLSIVLSQLPNLNSIAGLSLIGAVTAITYSTMVWVLSVSQQRPPSISYEPLSLAQPSASVFLAMNALGIIAFSFRGHNLALEIQSTMPSTFKHPARVPMWKGAKVAYFFIAMCLFPIAIGGFWAYGNQMPPGGILTALYAFHSHDISRGILALAFLLVVFNCLSSFQIYSMPAFDSFEAGYTSRTNRPCSIWVRSGFRVFYGFVSFFIGVALPFLSSLAGLLGGLTLPVTFAYPCFMWVLIKQPPKYSFNWYFNWILGWLGVAFSLAFSIGGIWSIVNDGLKLKFFKPNXIFNNRPCKCTCTIW

SEQ ID NO: 772 - protein, 518 aa, Glycine max
  unsure (1)..(518): unsure at all Xaa locations
VEPSQTNHTKYKQRVTTHISFSFPFFLGTAHALSNRNXEMNSDQFQKNSMFVETPEDGGKNFDDDGRVRRTGTWITASAHIITAVIGSGVLSLAWAIAQMGWVAGPAVLFAFSFITYFTSTLLADCYRSPDPVHGKRNYTYSDVVRSVLGGRKFQLCGLAQYINLVGVTIGYTITASISMVAVKRSNCFHKHGHHVKCYTSNNPFMILFACIQIVLSQIPNFHKLWWLSIVAAVMSFAYSSIGLGLSVAKVAGGGEPVRTTLTGVQVGVDVTGSEKVWRTFQAIGDIAFAYAYSNVLIEIQDTLKSSPPENKVMKRASLIGILTTTLFYVLCGCLGYAAFGNDAPGNFLTGFGFYEPFWLIDFANICIAVHLVGAYQVFCQPIFGFVENWGKERWPNSQFVNGEHALNFPLCGTFPVNFFRVVWRTTYVIITALIAMMFPFFNDFLGLIGSLSFWPLTVYFPIEMYIKQSKMQRFSFTWTWLKILSWACLIVSIISAAGSIQGLAQDLKKYQPFKAQQ

SEQ ID NO: 773 - protein, 486 aa, Glycine max
MVEKSSRTNLGHHQDFGMEAYSIDGVSSQSESKFYDDDGHVKRTGNVWTTSSHIITAVVGSGVLSLAWAMAQMGWVAGPVVMIFFSAVTLYTTSLLADCYRCGDPVTGKRNYTFMDAVQSILGGYYDTFCGVVQYSNLYGTAVGYTIAASISMMAIKRSNCFHSSGVKNPCHVSSNPYMIGFGIIQILFSQIPDFHKTWWLSIVAAIMSFAYSTIGLALGIAKVAETGTFKGSLTGVRIGTVTEATKVWGVFQGLGDIAFAYSYSQILIEIQDTIKSPPSEAKTMKKSAKISIGVTTTFYMLCGFMGYAAFGDSAPGNLLTGFGFFNPYWLIDIANAAIVIHLVGAYQVYAQPLFAFVEKWASKRWPEVDTEYKVPIPGFSPYNLSPFRLVWRTVFVIITTIVAMLIPFFNDVLGLLGALGFWPLSVFLPVQMSIKQKRTPRWSSRWIGMQILSVVCLIVSVAAAVGSVASIVLDLQKYKPFHVDY

SEQ ID NO: 774 - protein, 259 aa, Glycine max
  unsure (1)..(259): unsure at all Xaa locations
XLEIVLAFRGHNVLPEIQGTLPSNFEQTSKRPMRRGVSISYVLISMCMFPLAIAGFWAYGNQINDGGLLTSFPQFHKRQITKFSMGAIYVLVIIHCLTSFQIYAMPVFDNLEIRYTSIKNQRCPRLVRTCIRLFFGGLTFFISVTFPFLPRLSALLGSMTLVPITYAYPCFMWLSLKKPRPRGFVWCFNVALGCVGMLLSALLVAAAIRTLALNGLDANFFKPXQLILCHPTATSILPTIYFNLLLVIYRKSFLNMILQ

SEQ ID NO: 775 - protein, 486 aa, Glycine max
MVEKSSRTNLGHHQDFGMEAYSIDGVSSQSESKFYDDDGHVKRTGNVWTTSSHIITAVVGSGVLSLAWAMAQMGWVAGPVVMIFFSAVTLYTTSLLADCYRCGDPVTGKRNYTFMDAVQSILGGYYDAFCGVVQYSNLYGTAVGYTIAASISMMAIKRSNCFHSSGGKSPCQVSSNPYMIGFGIIQILFSQIPDFHETWWLSIVAAIMSFVYSTIGLALGIAKVAETGTFKGSLTGVRIGTVTEATKVWGVFQGLGDIAFAYSYSQILIEIQDTIKSPPSEAKTMKKSAKISIGVTTTFYMLCGFMGYAAFGDSAPGNLLTGFGFFNPYWLIDIANAAIVIHLVGAYQVYAQPLFAFVEKWASKRWPEVETEYKIPIPGFSPYNLSPFRLVWRTVFVIITTFVAMLIPFFNDVLGLLGALGFWPLSVFLPVQMSIKQKRTPRWSGRWIGMQILSVVCFIVSVAAAVGSVASIVLDLQKYKPFHVDY

SEQ ID NO: 776 - protein, 462 aa, Glycine max
  unsure (1)..(462): unsure at all Xaa locations
MDGKKSLQITRSGTGAYDDDGHAKRTGNLQSAVAHIITAVIGSGVLSLAWSTSQLGWIGGPVALLCCAIVTYISSFLLSDCYRTPDPVTGKRNYSYMDAVRVYLGYKRTCVAGFLQFLTLYGTSIAYVLTTATSLSAILRSNCYHKKGHEAPCKYGGXXLYMALFGLVQIVMSFIPDLHNMAWVSVVAALMSFTYSFIGLGLGIATVIKNGRIMGSLTGIPTDKIADKFWLVFQALGDIAFAYPYSILLLEIQDTLESPPPENQTMKKASMVAIFITTFFYLCCGCFGYAAFGNDTPGNLLTGFGFFEPFWLIDLANACIILHLVGGYQIYSQPIYSTVDRWASRKFPNSGFVNNFYKVKLPLLPGFQLNLFRFCFRTTYVISTTGLAIFFPYFNQILGVLGAINFWPLAIYFPVEMYFVQNKIAAWSSKWIVLRTFSFACFLVTGMGLVGSLEGIVSAKLK

SEQ ID NO: 777 - protein, 491 aa, Glycine max
AHHTPTQIIETEMNPDQFQKNSMFVETPEDGGKNFDDDGRVKRTGTWITASAHIITAVIGSGVLSLAWAIAQMGWVAGPAVLFAFSFITYFTSTLLADCYRSPDPVHGKRNYTYSDVVRSVLGGRKFQLCGLAQYINLVGVTIGYTITASISMVAVKRSNCFHKHGHHDKCYTSNNPFMILFACIQIVLSQIPNFHKLWWLSIVAAVMSFAYSSIGLGLSVAKVAGGGEPVRTTLTGVQVGVDVTGSEKVWRTFQAIGDIAFAYAYSNVLIEIQDTLKSSPPENKVMKRASLIGILTTTLFYVLCGCLGYAAFGNDAPGNFLTGFGFYEPFWLIDFANICIAVHLVGAYQVFCQPIFGFVENWGKERWPNSHFVNGEHALKFSLFGTFPVNFFRVVWRTTYVIITALIAMMFPFFNDFLGLIGSLSFWPLTVYFPIEMYIKQSKMQKFSFTWTWLKILSWACLIVSIISAAGSIQGLAQDLKKYQPFKAQQ

SEQ ID NO: 778 - protein, 489 aa, Glycine max
  unsure (1)..(489): unsure at all Xaa locations
THLHSHIEAERGHWLVSEMGSMHIEXXPETFADGSKNFDDDGRAKRTGTWITASAHIITAVIGSGVLSLAWAIAQMGWVAGPAVLFVFSLITYFTSTLLADCYRSPDPVHGKRNYTYSEVVKANLGGRKFQLCGLAQYINLVGVTIGYTITASLSMGAVKKSNCLHKHGHQDECKVKDNAFMIAFACIQILLSQIPNFHKLSWLSIVAAVMSFAYSSIGLGLSIAKIIGGGHVRTTLTGVEVSGTEKVWKMFQAIGDIAFAYAFSNVLIEIQDTLKSSPPENKVMKRASLIGIMTTTLFYVLCGCLGYAAFGNDAPSNFLTGFGFYEPFWLIDFANVCIAVHLVGAYQVFVQPIFGFVEKWSKENWTESQFINGEHTLNIPLCGSYNVNFFRVVWRTAYVIITAVVAMLLPFFNDFLALIGALSFWPLTVYFPIEMYIKKSNMQRFSFTWTWLKILSWVCLIISIISLVGSIQGLSVSIKKYKPFQAEQ

SEQ ID NO: 779 - protein, 462 aa, Glycine max
  unsure (1)..(462): unsure at all Xaa locations
MDGKNSLQITRSGIGAYDDDGHAKRTGNLQSAVAHIITAVIGSGVLSLAWSTSQLGWIGGPFSLLCCAIVTYISSFLLSDCYRTPDPVTGKRNYSYMDAVRVYLGYKRTCVAGFLQFLTLYGTSIAYVLTTATSLSAILRSNCYHKKGHEAPCKYGGXXLYMALFGLVQIVMSFIPDLHNMAWVSVVAALMSFTYSFIGLGLGIATVIKNGRIMGSLTGIPTDKIADKFWLVFQALGDIAFAYPYSILLLEIQDTLESPPPENQTMKKASMVAIFITTFFYLCCGCFGYAAFGNDTPGNLLTGFGFFEPFWLIDLANACIILHLVGGYQIYSQPIYSTVDRWASRKFPNSGFVNNFYRVKLPLLPGFQLNLFRFCFRTTYVISTIGLAIFFPYFNQILGVLGAINFWPLAIYFPVEMYFVQQKIAAWSSKWIVLRTFSFACFLVTVMGLVGSLEGIVSAKLK

SEQ ID NO: 780 - protein, 484 aa, Glycine max
MVENGVGSKYLQQTLNVSIDMHQHGISKCFDDDGRPKRTGTVWTSSAHIITAVIGSGVLSLAWAIAQLGWIAGPIVMVIFSAITYYTSTLLADCYRTGDPVTGKRNYTYMDAIQSNFGGIKVKLCGLVQYVNLFGVAIGYTIAASTSMMAIERSNCFHKSGGKDPCHINSNMYMISFGIVEILFSQIPGFDQLWWLSIVAAVMSFTYSTIGLGLGIGKVIENGGVGGSLTGITIGTVTQTDKVWRTMQALGDIAFAYSYSLILIEIQDTVKSPPSESKTMKKASFISVAVTSIFYMLCGCFGYAAFGDASPGNLLTGFGFYNPYWLLDIANAAIVIHLVGSYQVYCQPLFAFVEKHAAQMFPDSDFLNKEIEIPIPGFHPYRLNLFRLVWRTIYVMLSTVISMLLPFFNDIGGLLGAFGFWPLTVYFPVEMYIIQKRIPKWSTKWICLQILSMTCLLMTIGAAAGSIAGIAIDLRTYKPFKTNY

SEQ ID NO: 781 - protein, 447 aa, Oryza sativa (japonica cultivar-group)
MAASSLDAEAAAAGQQDKAGSGSYTTAATAHQIDTDSWQQVGVLLVVGFNCAYVLSFSNLMMAPLGWGWGIACLLFIGAASWYANWLLAGLHVIDGQRFIRYRDLMGFVFGRKMYYITWFLQFITLILGNMGFILLGGRALKAIHAEFSSSHSPARLQWFIAATGFVYFAFAYFVPTISAMRNWLATSAALTVAYDVALIVILIKDGKSNKQKDYNVHGTQAEKVFGAFGAIAAILVCNTSGLLPEIQSTLRKPVVSNMRRALLLQYTAGAAVYYGISVAGYWAYGAAVSEYLPDQLSGPSWATVLINATAFLQSIVSQHLFTVPIHEALDTQMQRLDEGMFSRYNLGRRLLARGLVFGANAFVTALFPFMGDFVNLFGSFVLFPLTFMFPSMVVLKIKGKDEAGRWNRIWHWGIIVASSVLSVVTTAAAVRLIVHNASVYHFFADM

SEQ ID NO: 782 - protein, 457 aa, Oryza sativa (japonica cultivar-group)
MGAPSREDEEAKKMEAGGDTVGQKLDAGALFVLQSKGSWLHCGYHLTTSIVAPPLLSLPFAFASLGWAAGLICLVIGAAVTFYSYNLISLVLEHHAQQGRRQLRFRDMATDILGPGWGRFYIGPIQFLVCFGAVVACTLLAGQSMKAIYLIANPGGTIKLYVFVAIFGVFMMILAQMPSFHSLRHVNLISLVLCLAYSFCAVAACIYLGSSKGAPEKDYSIAGANTRDRVFGVFNAIAVIATTYGNGIIPEIQATVAAPVTGKMFKGLCLCYAVVVTTFFSVAISGYWAFGNQSQGTLLSNFMVGGRAVIPEWLLLIIELFTLLQLSAVAVVYLQPTNEVLEGLLSDPKAGQYAARNVAPRVLSRTAAVALGTTIAAMVPFFGDMNALIGAFGFLPLDFAVPAVFYNVTFKPSKKGAVFWLNTTIAVVFSALAVVASVAAVRQIILDANSYKLFANV

SEQ ID NO: 783 - protein, 516 aa, Oryza sativa (japonica cultivar-group)
MAHAAFDAEAGAAAKPPAADAGAAFVLESKGRSHPSTPRPPSARNARADSAVICGWVPSRGDLAGTWWHAGFHLTTAIVGPTVLTLPYALRGMGWALGLTVLTAVGAVTFYEYSLMSRVLEHCEARGRRHIRFRELAADVLGITINSPDPFLSTAPHHHTHMTFPCIAPWSGWMFYFVVIVQTAINTGVSIGTILLAADCLEIMYTSLSPNGPLKLYHFIIIVAVALAFLSQLPSFHSLRHINFASLLLSLGYTILVSAACIGAGLSKDAPGKDYTLSSSKSEQTFNAFLSISILASVYGNGILPEIQATLAPPAAGKMMKALVLCYSVIAFAFYIPSITGYWAFGSHVQSNVLKSLMPDTGPALAPTWLLGLAVLFVLLQLLAIGLVYSQVAYEIMEKSSADATRGKFSRRNVVPRLLLRTLYLAFCAFMAAMLPFFGDIVGVVGAVGFIPLDFVLPVVMYNIALAPPRRSPMFLANTAIMVVFSGVGAIGAFASIRKLVLDAGQFKLFSNNVVD

SEQ ID NO: 784 - protein, 478 aa, Oryza sativa (japonica cultivar-group)
MGEGRSGVGQAETSASSGDTSMAQGPVERQRRGSGAALGMTTAVVDDAGEGEANPRRAKWWYATFHSVTAMVGAGVLSLPYAMAHLGWGPGTAALVVSWGMTLYTLRLLIELHECVPGVRFDRYRDLGAHALGPRLGPWLVVPQQLIVQLGCDVVYMVIGGKCLMKFAESVSSWSRAPQLHHQSYWICIFGASQFLLSQLPSLDSITAVSLAAAAMSVGYSTISWAACLARGTPAAAEGGGGGVSYAYKDGTAADSVFRVCSALGQVAFAYAGHGVVLEIQATIPSTPTKPSRGAMWKGAVAAYLVTALCYFPVAIAGYWAFGRDVSDNVLVALRRPPWLVAAANMMVVVHVLGSYQVYAMPIFETLETILITRIRLPPGALLRLVARSAYVAFTLFVAVTFPFFGDLLGFFGGFGFTPTSYFLPCILWLKIKKPPRFSASWFANWGCIVVGVLLMIASTIGGLRSIIQDASTFQFYS

SEQ ID NO: 785 - protein, 424 aa, Oryza sativa (japonica cultivar-group)
MADQKVILAEPLLPGKEADFADDDDVEAQLTSYHTGASFSRTCLNLTNAVSGIGVLSMPYAVSQGGWLSLLLFVLVGAVCYYTGTLIERCMRADGSIASYPDIGQYAFGATGRRAVAFFMYVELYLVAISFLVLEGDNLDKLFPGATMEILGYQLHGKQLFIVLAAAVILPTTWLKNLGMLAYVSAAGLIASVALTASLIWAGVAETGFHRNSNTLNLAGIPTSLGLYFVCFTGHAVFPTIYSSMKNSKHFSKVLLISSVLCSLNYGLTAVLGYMIYGDDVQSQVTLNLPSGKLYTKIAIVMTLVNPLAKYALLVAPITAAVEERLSLTRGSAPARVAISTAILASTVVVASTVPFFGYLMSFIGSFLSVMATVLFPCLCYLKIYKADGIHRTEMVAIAGILLLGVFVAVTGTYTSLLQIIATF

SEQ ID NO: 786 - protein, 443 aa, Oryza sativa (japonica cultivar-group)
MAADKSPIDEALLHGKHEEALLHGKHEHVEQQLLPTSGGSFCITGASFGRSCLNLSNVISGIGMLSVPYALSQGGWLSLALFAMVGAICFYTGKLIYRCMRADRCVRSYPDIGYLAFGRYGRTAIGLIMYVELYLVAISFLILEGDNLDKLLPGTVVKILGYQVHGKQLFMLVAAAVILPTTWLKNLSMLAYVSAVGLVSSVALTVSLVWAGVADKGFHMAGSSILNLSGLPTALSLYFVCFAGHGVFPTVYSSMRARKDFPKVLLISSVLCSLNYAVTAVLGYKIYGEDVQAQVTLNLPTGKLYTRIAILTTLITPLAKYALVIQPVTTAIEEKLSTAAAAVAADAENNRLTRVLTSTTVVFSTVVLACTVPFFGYLMSFIGSSLNVTVAVLFPCLSYLKIYMPRGGVGRFEVAAIVGILVIGVCVAVIGTYTSLHQIIGTF

SEQ ID NO: 787 - protein, 442 aa, Lycopersicon esculentum
MATTSFHHPLLPNVHNDDELAIHIPSSAHQVSNDSWFQVGVVLSTGINSAFALGYAGLIMVPLGWVGGVVGLILSSAISLYASTLIAKLHEYGGRRHIRYRDLAGFMYGQTAYSLVWASQYANLFLINTGYVILGGQALKAFYVLFRDDHQMKLPHFIAVAGLACVLFAIAIPHLSALRIWLGFSTFFSLVYICIVITLSLKDGLEAPPRDYSIPGTKNSKTWATIGAAANLVFAYNTGMLPEIQATVREPVVDNMIKALNFQFTLGVIPMHAVTYIGYWAYGSSASSYLLNNVSGPIWLKGMANIAAFLQSIIALHIFASPTYEFLDTKYGVTGSALACKNLAFRIIVRGGYIAITAFLSALLPFLGDFMNLAGAISTFPLTFILPNHMYIVAKRKKLSFLKKSWHWLNIIFFSCIAVAAFVAALRFITVDSTTYHVFADL

SEQ ID NO: 788 - protein, 439 aa, Lycopersicon esculentum
MGEEKEVISHVITTPPFEVEVPKTLHQIGQDSWFQVGLVLTTTVNCAYALGYAGTIMVPLGWIGGVTGMVLSTIISLYASTLMAKIHQYGEKRHIRYRDLAGFMYGYRAYAIVWGLQYANLFLINIGFIILGGQALKAFYLLFREDHEMKLPYFIIIAGLACVFFAVSVPHLSALGVWMAVSTFLSIVYFSIAFALCLKDGINAPPRDYSIPGSSSSRTFTTIGAAASLVFVYNTGMIPEIQATVRAPVVDNMLKALYFQFTIGAVPVHAVTYMGYWAYGSKSSSYLLYNVSGPVWLRGLANIAAFFQSIITLHIFASPTYEYLDTKYRISGSVLAFRNLSFRTVVRGGYLAITIFLSALLPFLGDFMSFTGAISTIPLTFILPNHMYIVAMRKQISSLQKSWHWFNIVFFSCLAVAALVAAVRLIAMDSKTYHAFADL

SEQ ID NO: 789 - protein, 441 aa, Lycopersicon esculentum
MGNNRYNSPSREDKNDEEASVIIPETAHQVSNDSWFQVGVVLSMGVNSAYALGYSGTIMVPLGWIGGVVGLVMSTIVSLYASTIMAKLHEVGGKRHIRYRDLAGFLYGRTAYLLIWALQYANLFLINIGYVIMSGSALKAFYMLFRDDHMLKLPHFIAIAGVACILFAIATPHLSALRVWLGFSTLFMILYLAIAFVLSVQDGVKAPPRDYHIPGSGENKIWAIIGAIGNLFFAFNTGMIPEIQATIRQPVVGNMVKALNFQFTVGVVPMHAVTYIGYWAYGSVVSSYLLNNVHGPAWVLGVAHLSAFFQAIITLHIFASPTYEYLDTKYGVKGSALAPRNILFRLVVRGGYLVMTTFLSALLPFLGNFMSLTGAISTIPLTFILPNHMYIIAKKDKLNSLQKSWHWLNIVVFGCVSVAAFVAALKLTVVQTQTYHVFADL

SEQ ID NO: 790 - protein, 465 aa, Lycopersicon esculentum
MGSGAIDDSSKFDDDGRPKRTGTVLTTSAHIITAVIGSGVLSLAWATAQLGWIAGPVALIAFSAITWFASILLADCYRAPDGSRSYTYMDAVRAHLGGRKVQLCGLAQYSNLFGVTIGYAITTSISMVAIKRSNCFHRKGHDAGCHESNNPFIIIFGVMQILLSQIPNFHKLSFLSIIAAAMSFAYSFIGLGLSIAKIAKDGVSANTSLTGTIVGKDVSSRDKMWNTFSALGDIAFAYAFSIVLIEIQDTLKSHPPENKSMKKATFTGISVSTIFYLLCGLLGYAAFGNKAPGNFLTGFGFYEPFWLIDFANVCIVIHLVGAYQVFCQPIFGFVEGWSRQKWPESKFITKEYMINLSHLGLFNFNFYRLVWRTLYVVFTTILAMLFPFFNDFVGFIGAASFWPLTVYFPIQMYIAQAKIPKYSFTWIWLNILSFVCLIISLLAAAGSVRGLIKSLQEFEPFQSRS

SEQ ID NO: 791 - protein, 476 aa, Lycopersicon esculentum
MGDSTNFAAKHPVSINITESKLFDDDGRIKRSGSVWTASAHIITAVIGSGVLSLAWAVAQLGWIAGPIVMLLFSFVTYYTSSLLSDCYRSGDPLFGKRNYTYMDVVQANLSGLQVKICGWIQYVNLFGVAIGYTIASSISLMAVKRSDCFHKHGHKAPCLQPNTPYMIIFGVIEIIFSQIPDFDQIWWLSIVAAVMSFTYSTIGLGLGIAHVAETGKIGGSLTGVSIGTVTEMQKVWRTFQALGAIAFAYSYSLILIEIQDTIKSPPSEAKTMKNATIISVSVTTVFYMLCGCFGYAAFGDHAPDNLLTGFGFYDPYWLLDIANIAIFVHLVGAYQVYCQPLFAFIEKTAAEWYPNSKIITKNISVPIPGFKSYNIYLFRLVWRTIFVIISTIISMLLPFFSDIVGILGAFGFWPLTVYYPVEIYIVQKKIPKWSRKWFGLQILSVTCLIVSIAAAVGSFAGVVSDLKVYKPFKFT

SEQ ID NO: 792 - protein, 449 aa, Oryza sativa
  unsure (1)..(449): unsure at all Xaa locations
MAASSLDAEAAAAGQQDKAGSGSYTTAATAHQIDTDSWQQVGVLLVVGFNCAYVLSFSNLMMAPLGWGWGIACLLFIGAASWYGNWLLAGLHVIDGQRFIRYRDLMGFVFGRKMYYITWFLQFITLILGNMGFILLGGRALKAIHAEFSSSHSPARLQWFIAATGFVYFAFAYFVPTISAMRNWLATSAALTVAYDVALIVILIKDGKSNKQKDYNVHGTQAEKVFGAFGAIAAILVCNTSGLLPEIQSTLRKPVVSNMRRALLLQYTAGAAVYYGISVAGYWAYGAAVSEYLPDQLSGPSWATVLINATAFLQSIVSQHLFTVPIHEALDTQMQRLDEGMFSRYNLGRRLLARGLVFGANAFVTAXLFPFIGRFVNLXSGILTSXFPLTFMFPSMVHSKGKGLKSGRWNRIWHWGIIVASSVLSVVTTAAAVRLIVHNASVYHFFADM

SEQ ID NO: 793 - protein, 473 aa, Oryza sativa; identical to SEQ ID NO: 636

SEQ ID NO: 794 - protein, 473 aa, Oryza sativa; identical to SEQ ID NO: 636

SEQ ID NO: 795 - protein, 420 aa, Oryza sativa
  unsure (1)..(420): unsure at all Xaa locations
XAFDAEAGAAGPPPTPAPXFVLESKGWALGLTVLTAVGAVTFYEYSLMSRVLEHCEARGRRHIRFRELAADVLGSGWMFYFVVIVQTAINTGVSIGTILLAADCLEIMYTSLSPNGPLKLYHFIIIVAVALAFLSQLPSFHSLRHINFASLLLSLGYTILVSAACIGAGLSKDAPGKDYTLSSSKSEQTFNAFLSISILASVYGNGILPEIQATLAPPAAGKMMKALVLCYSVIAFAFYIPSITGYWAFGSHVQSNVLKSLMPDTGPALAPTWLLGLAVLFVLLQLLAIGLVYSQVAYEIMEKSSADATRGKFSRRNVVPRLLLRTLYLAFCAFMAAMLPFFGDIVGVVGAVGFIPLDFVLPVVMYNIALAPPRRSPMFLANTAIMVVFSGVGAIGAFASIRKLVLDAGQFKLFSNNVVD

SEQ ID NO: 796 - protein, 457 aa, Oryza sativa; identical to SEQ ID NO: 782

SEQ ID NO: 797 - protein, 508 aa, Oryza sativa
  unsure (1)..(508): unsure at all Xaa locations
SSYPCKAVRCKCVQRDASFFLTSTXIHGRHRRQPSAPLSLSGDEHHADAALRXRCSTSRPRPALAALASSPPPTPAPPSCXESKGKWWHAGFHLTTAIVGPTVLTLPYALRGMGWALGLVALTAVAAVTFYAYYLMSRVLDHCEAHGRRHIRFRELAADVLGSGWVFYLVVTVQTAINAGITIGSILLAADCLQIMYSDLAPNGPLKLYHFIIVVAVVLSLLSQLPSFHSLRYINLGSLLLSFGYTILVSAACIRAGALSDVPEKDYSLSSSNSEKTFNAFLSISILASVFGNGILPEIQATLAPPAAGKMMKALVLCYTVVLFTFYLPAITGYWAFGSQVQSNVLQSLMPDKGPSLAPTWLLGLAVVLVLLQLLAIALVYSQVAYEIMEKSSADAARGRFSRRNVAPRVALRTAYVAACAFVAAMLPFFGDIVGVVGAVGFIPLDFVLPVVMYNMALAPPRRSPVYLANVAIMVVFTGVGLIGAVASVRKLVLDAGQFKLFSGNVVD

SEQ ID NO: 798 - protein, 424 aa, Oryza sativa
  unsure (1)..(424): unsure at all Xaa locations
STSRPRPALAALASSPPPTPAPXFVLESKGWALGLVALTAVAAVTFYAYYLMSRVLDHCEAHGRRHIRFRELAADVLGSGWVFYLVVTVQTAINAGITIGSILLAADCLQIMYSDLAPNGPLKLYHFIIVVAVVLSLLSQLPSFHSLRYINLGSLLLSFGYTILVSAACIRAGALSDVPEKDYSLSSSNSEKTFNAFLSISILASVFGNGILPEIQATLAPPAAGKMMKALVLCYTVVLFTFYLPAITGYWAFGSQVQSNVLQSLMPDKGPSLAPTWLLGLAVVLVLLQLLAIALVYSQVAYEIMEKSSADAARGRFSRRNVAPRVALRTAYVAACAFVAAMLPFFGDIVGVVGAVGFIPLDFVLPVVMYNMALAPPRRSPVYLANVAIMVVFTGVGLIGAVASVRKLVLDAGQFKLFSGNVVD

SEQ ID NO: 799 - protein, 421 aa, Oryza sativa
  unsure (1)..(421): unsure at all Xaa locations
XEEAKKMEAGGDTVGQKLDAGALFVLQSKGWAAGLICLVIGAAVTFYSYNLISLVLEHHAQQGRRQLRFRDMATDILGPGWGRFYIGPIQFLVCFGAVVACTLLAGQSMKAIYLIANPGGTIKLYVFVAIFGVFMMILAQMPSFHSLRHVNLISLVLCLAYSFCAVAACIYLGRFPGAPEKDYSIAGANTRDRVFGVFNAIAVIATTYGNGIIPEIQATVAAPVTGKMFKGLCLCYAVVVTTFFSVAISGYWAFGNQSQGTLLSNFMVGGRAVIPEWLLLIIELFTLLQLSAVAVVYLQPTNEVLEGLLSDPKAGQYAARNVAPRVLSRTAAVALGTTIAAMVPFFGDMNALIGAFGFLPLDFAVPAVFYNVTFKPSKKGAVFWLNTTIAVVFSALAVVASVAAVRQIILDANSYKLFANV

SEQ ID NO: 800 - protein, 516 aa, Oryza sativa; identical to SEQ ID NO: 783

SEQ ID NO: 801 - protein, 464 aa, Oryza sativa
SSIAAKEEEVDEGGGDQVIMGTQVADNYPPAKDGRSAQEKAIDDWLPITSSRNAKWWYSAFHNVTAMVGAGVLSLPYAMSELGWGPGIAVLILSWIITLYTLWQMVEMHEMVPGKRFDRYHELGQHAFGEKLGLWIVVPQQLVVEVGVNIVYMVTGGKSLKKFHDVLCDGCKNIKLTYFIMIFASVHFVLSQLPNFNSISGVSLAAAVMSLSYSTIAWGASVDKGKVADVDYHLRATTSTGKVFGFFSALGDVAFAYAGHNVVLEIQATIPSTPEKPSKKPMWKGVVVAYIIVALCYFPVALVGYWAFGNHVDDNILITLSRPKWLIALANMMVVIHVIGSYQIYAMPVFDMIETVLVKKLRFPPGLTLRLIARTLYVAFTMFIAITFPFFGGLLGFFGGFAFAPTTYFLPCIMWLAIYKPRRFSLSWFTNWICIILGVMLMILSPIGGLRQIIIDAKTYKFYS

SEQ ID NO: 802 - protein, 451 aa, Oryza sativa
VDPRVRLSMVTSSVLPKVVDDAGEGEANPRRAKWWYATFHSVTAMVGAGVLSLPYAMAHLGWGPGTAALVVSWGMTLYTLRLLIELHECVPGVRFDRYRDLGAHALGPRLGPWLVVPQQLIVQLGCDVVYMVIGGKCLMKFAESVSSWCAPQLHHQSYWICIFGASQFLLSQLPSLDSITAVSLAAAAMSVGYSTISWAACLARGTPAAAEGGGGGVSYAYKDGTAADSVFRVCSALGQVAFAYAGHGVVLEIQATIPSTPTKPSRGAMWKGAVAAYLVTALCYFPVAIAGYWAFGRDVSDNVLVALRRPPWLVAAANMMVVVHVLGSYQVYAMPIFETLETILITRIRLPPGALLRLVARSAYVAFTLFVAVTFPFFGDLLGFFGGFGFTPTSYFLPCILWLKIKKPPRFSASWFANWGCIVVGVLLMIASTIGGLRSIIQDASTFQFYS

SEQ ID NO: 803 - protein, 366 aa, Oryza sativa
  unsure (1)..(366): unsure at all Xaa locations
XVAGERWHAGGGGRWRRRRXXAAAETGGPWGYWYVSFFQQVASIGNNIAIQIAAGSSLKAVYKHYHTNGAMTLQQFIILFGAFELLLSQLPDIHSLRWVNAACTASTIGFAGTAIGVTIYDGHRIDRKEVDYSLQGSAASKIFRAFNALGTIAFSFGDAMLPEIQSSVREPVRMNMYKGVSTAYSIIVMSYWTLAFSGYWAFGSGVQPYILSSLTXXPRWTIVMANLFAVIQITGCFQIYCRPTFAQFEQRIQXXKDAGYRARMWRLVYTSAYMVVITLISAAMPFFGDFVSVCGAVGFTPLDFVLPALAFLKAGKLPENPGLRHAVKVITSAVAVLFSIVGALACIGAVRAIALDVKTYKFFHDM

SEQ ID NO: 804 - protein, 389 aa, Oryza sativa
  unsure (1)..(389): unsure at all Xaa locations
MSPARGGTPEEEGGGADVEKAAAETGGRGTWRHAAFHVATTIATPAAYAPLPFALASLGWPLGPMSPAWGYWYVSFFQQVASIGNNIAIQIAAGSSLKAVYKHYHTNGAMTLQQFIILFGAFELLLSQLPDIHSLRWVNAACTASTIGFAGTAIGVTIYDGHRIDRKEVDYSLQGSAASKIFRAFNALGTIAFSFGDAMLPEIQSSVREPVRMNMYKGVSTAYSIIVMSYWTLAFSGYWAFGSGVQPYILSSLTXXPRWTIVMANLFAVIQITGCFQAKDAGYRARMWRLVYTSAYMVVITLISAAMPFFGDFVSVCGAVGFTPLDFVLPALAFLKAGKLPENPGLRHAVKVITSAVAVLFSIVGALACIGAVRAIALDVKTYKFFHDM

SEQ ID NO: 805 - protein, 450 aa, Oryza sativa
  unsure (1)..(450): unsure at all Xaa locations
XEMAPPSAMNTSRAEEKAIDDWLPITSSRNAKWWYSAFHNVTAMVGAGVLSLPFAMSELGWGPGVAAMIMSWVITLYTLWQMVEMHECVPGRRFDRYHELGQHAFGDKLGLWIVVPQQLVVEVGVCIVYMVTGGKSLKKFHDLVAPPSAPPIRTSYFIVIFGCLHLVLSQLPNFNSISGVSLAAAVMSLSYSTIAWAASLHHHNHNNGAAAGGVDYSLTEATPAGRTFNFLSALGDVAFAYAGHNVVLEIQATIPSTAERPSKGPMWRGVVLAYGVVAVCYLPVAFAGYYVFGNAVDDNVLITLERPAWLIAAANMFVVVHVVGSYQIYAMPVFDMLETFLVKKLRFKPGMPLRLIARSLYVLFTMFVAIAVPFFGGLLGFFGGFAFAPTTYFLPCIMWLSIMKPKRFGLSWCINWVSSIIIIGVLLSVFAPIGGLRSIIVNAQSYKFFS

SEQ ID NO: 806 - protein, 470 aa, Oryza sativa
  unsure (1)..(470): unsure at all Xaa locations
LSRSSYVNTSPSSPASHRLGRTXEMAPPSAMNTSRAEEKAIDDWLPITSSRNAKWWYSAFHNVTAMVGAGVLSLPFAMSELGWGPGVAAMIMSWVITLYTLWQMVEMHECVPGRRFDRYHELGQHAFGDKLGLWIVVPQQLIVEVGVCIVYMVTGGKSLKKFHDLVAPPSAPPIRTSYFIVIFGCLHLVLSQLPNFNSITGVSLAAAVMSLSYSTIAWAASLHHHNHNNGAAAGGVDYSLTAATPAGRTFNFLSALGDVAFAYAGHNVVLEIQATIPSTPERPSKGPMWRGVVLAYGVVAVCYLPVAFAGYYVFGNAVDDNVLITLERPAWLIAAANIFVVVHVVGSYQIYAMPVFDMLETFLVKKLRFKPGMPLRLIARSLYVLFTMFVAIAVPFFGGLLGFFGGFAFAPTTYFLPCIMWLSIMKPKRFGLSWCINWFCIIIGVLLSVFAPIGGLRSIIVNAQSYKFFS

SEQ ID NO: 807 - protein, 638 aa, Oryza sativa
MLITLYALPTSASAHRGRGGSGPPHPRWAKIRQGPATSSVTPTKTKVGSPPPLPALVTTTSTAYPTHSYSSSYTFFPQITRIVLGGIVNPIQRRRDGIHAAPRSISSRAAKNGEGRRAATTIELILQNAGAHNVRTLTPMNAHTHTLPYEHLRKTRPRCRRITDGGSCRRRRRRHRRRGRTKMSATEVMEECTETARERREEERLRNVNLDDWLPITSSRTAKWYYSAFHNVTAMVGAGVLGLPFAMSQLGWPTGVAAIASSFAITLYTLWQLVELHEPAPGGGKRFDRYHELGQAAFGRRLGVCLIVPLQLIVQVGTDIVYMVTGGQTLKKFVELACDGRCADIRLTFYIMMFASAQFVLSQCPNFNSISAVSAAAAAMSLCYSMIAFFASVLKAHPAAAAAVDYGFKATTAAGRVFGAFNALGAVSFAFAGHNVVLEIQATIPSTPERPSKRPMWRGVVVAYAVVALCYFTVAFGGYHAFGNAVAPNVLISLEKPRWLVAAANLMVVVHVIGAYQVYAMPVFDMIETVLAKKLHLRPGLPLRVTARSAYVALTMFIGITFPFFDGLLGFFGGFGFAPTTYFIPCIIWLIMRKPAKYSLSWLMNWCFIIIGMLLMLVSPIGGLRQIILDASKYKFYS

SEQ ID NO: 808 - protein, 265 aa, Oryza sativa
  unsure (1)..(265): unsure at all Xaa locations
XPVSLAAAAMSVGYSTISWAASAAEGGGGGVSYAYKDGTAADSVFRVCSALGQVAFAYAGHGVVLEIQATIPSTPTKPSRGAMWKGAVAAYLVTALCYFPVAIAGYWAFGRDVSDNVLVALRRPPWLVAAANMMVVVHVLGSYQVYAMPIFETLETILITRIRLPPGALLRLVARSAYVAFTLFVAVTFPFFGDLLGFFGGFGFTPTSYFLPCILWLKIKKPPRFSASWFANWGCIVVGVLLMIASTIGGLRSIIQDASTFQFYS

SEQ ID NO: 809 - protein, 193 aa, Oryza sativa
  unsure (1)..(193): unsure at all Xaa locations
MDQHQLDEENQRAALFHSSAPSSSLGADGEEERETVPLLSCKMADDKSDTVQVSEDTAHQISIDPWYQVGFILTTGVNSAYVLGYSASIMVPLGWIGGTCGLILAAAISMYANALLAHLHEVGAKRHIRYRDLAGHIYGKYXYTQXSLIWQIFDIILFPFFLNLCMFFNHSPPPIFFVFFXGXCRXLTXXGAX

SEQ ID NO: 810 - protein, 517 aa, Oryza sativa
  unsure (1)..(517): unsure at all Xaa locations
XTRQRDSVPMRWRWRVPGVVVSEPEVVSIPPTPRGMSTPDGTATPPPAAGRGAATPARRVVEGLRGYLEEVGHLTRLNPQDAWLPITESRSGNARYAAFHTLNAGLGFQALLLPLAFPALGWSWGIISLTVAYFWQLYTLWILVKLHEAVPGRRYNRYVELAQAAFGEKLGMWLSLFPTIYLSAGSATALILVGGETMKLFYQIVCGPICSPSPISTIEWYLVFTSLAIVLSQLPNLNSIAGVSLIGGTTAITYCTMSWVLSVSQPQPPTVSYEPQAYTSLGSSLFSTLNALGIIAFAFRGHNLALEIQATMPSTFKHPAHVPMWRGAKVAYALIAMCLFPVAIGGYWAYGNMVPQGGMLTALYAFHSHDIPRGLLAATFLLGXVFNCLSSFQIYSMPVFDSFEAAYTGRTNRPCSFWVRSGFRVFYGFLSLFISVALPFLSSLAGLLGGLTLXPVTFAYPCFMWICIKKPERFSSGWYLNWGLGLLGTAFSLALCVGGVWSIISSGMKFKFFKPPS

SEQ ID NO: 811 - protein, 234 aa, Oryza sativa
  unsure (1)..(234): unsure at all Xaa locations
MSVGYSTISWAASAAEGGGGGVSYAYKDGTAADSVFRVCSALGQVAFAYAGHGVVLEIQATIPSTPTKPSRGAMWKGAVAAYLVTALCYFPVAIAGYWAFGRDVSDNVLVALRRPPWLVAAANMMVVVHVLGSYQVYAMPIFETLETILITRIRLPPGALLRLVARSAYVAFTLFVAVTFPFFGDLLGFFGGFGFTPTSYFXXCIVVGVLLMIASTIGGLRSIIQDASTFQFYS

SEQ ID NO: 812 - protein, 416 aa, Oryza sativa
  unsure (1)..(416): unsure at all Xaa locations
MAPPSAMNTSRAEEKAIDDWLPITSSRNAKWWYSAFHNVTAMVGAGVLSLPFAMSELGWGPGVAAMIMSWVITLYTLWQMVEMHECVPGRRFDRYHELGQHAFGDKLGLWIVVPQQLVVEVGVCIVYMVTGGKSLKKFHDLVAPPSAPPIRTSYFIVIFGCLHLVLSQLPNFNSISGVSLAAAVMSLSYSTIAWAASLHHHNHNNGAAAGGVDYSLTEATPAGRTFNFLSALGDVAFAYAGHNVVLEIQATIPSTAERPSKGPMWRGVVLAYGVVAVCYLPVAFAGYYVFGNAVDDNVLITLERPAWLIAAANMFVVVHVVGSYQIYAMPVFDMLETFLVKKLRFKPGMPLRLIARSLYVXLPCIMWLSIMKPKRFGLSWCINWFCIIIGVLLSVFAPIGGLRSIIVNAQSYKFFS

SEQ ID NO: 813 - protein, 503 aa, Oryza sativa
RAREREGLRLATRERRDGEGRGDGGAERRRRRRRRLLRPHPHGGAGGEDVDDDGKQRRTGNVWTASAHIITAVIGSGVLSLAWATAQLGWVVGPVTLMLFALITYYTSGLLADCYRTGDPVSGKRNYTYMDAVAAYLGGWQVWSCGVFQYVNLVGTAIGYTITASISAAAVHKANCYHKNGHDADCGVYDTTYMIVFGVVQIFFSMLPNFSDLSWLSILAAVMSFSYSTIAVGLSLARTISGATGKTTLTGVEVGVDVTSAQKIWLAFQALGDIAFAYSYSMILIEIQDTVKSPPAENKTMKKATLLGVSTTTAFYMLCGCLGYAAFGNAAPGNMLTGFGFYEPYWLIDFANVCIVVHLVGAYQVFCQPIFAAVETFAARRWPGSEFITRERPVVAGRSFSVNMFRLTWRTAFVVVSTVLAIVMPFFNDILGFLGAVGFWPLTVYYPVEMYIRQRRIQRYTSRWVALQTLSLLCFLVSLASAVASIEGVSESLKHYVPFKTKS

SEQ ID NO: 814 - protein, 487 aa, Oryza sativa
  unsure (1)..(487): unsure at all Xaa locations
MGENGVVASKLCYPAAAMEVVAAELGHTAGSKLYDDGRARRTGTVWTASAHIITAVIGSGVLSLAWAIAQLGWVAGPAVMLLFAFVIYYTSTLLAECYRSGDPCHXGKRNYTYMDAVRANLGGSKVRLCGVIQYANLFGVAIGYTIAASISMLAIKRADCFHEKGHKNPCRSSSNPYMILFGVVQIVFSQIPDFDQIWWLSIVAAIMSFTYSTIGLSLGIAQTVANGGFMGSLTGISVGPGVTSMQKVWRSLQAFRDIAFAYSYSIILIEIQDTIKAPPPSEAKVMKRATMVSVATTTVFYMLCGCMGYAAFGDKSPDNLLTGFGFYEPFWLLDVANAAIVVHLVGAYQVFVQPIFAFVERWAAARWPDGGFISRELRVXXPFSLSVFRLTWRTAFVCATTVVSMLLPFFGDVVGLLGAVSFWPLTVYFPVEMYIAQRGVRRGSARWLCLKVLSAACLVVSVAAAAGSIADVVDALKVYRPFSGXRE

SEQ ID NO: 815 - protein, 487 aa, Oryza sativa
MGMERPQEKVATTTTAAFNLAESGYADRPDLDDDGREKRTGTLVTASAHIITAVIGSGVLSLAWAIAQLGWVIGPAVLVAFSVITWFCSSLLADCYRSPDPVHGKRNYTYGQAVRANLGVAKYRLCSVAQYVNLVGVTIGYTITTAISMGAIKRSNWFHRNGHDAACLASDTTNMIIFAGIQILLSQLPNFHKIWWLSIVAAVMSLAYSTIGLGLSIAKIAGGAHPEATLTGVTVGVDVSASEKIWRTFQSLGDIAFAYSYSNVLIEIQDTLRSSPAENEVMKKASFIGVSTTTTFYMLCGVLGYAAFGNRAPGNFLTGFGFYEPFWLVDVGNVCIVVHLVGAYQVFCQPIYQFAEAWARSRWPDSAFVNGERVLRLPLGAGDFPVSALRLVWRTAYVVLTAVAAMAFPFFNDFLGLIGAVSFWPLTVYFPVQMYMSQAKVRRFSPTWTWMNVLSLACLVVSLLAAAGSIQGLIKSVAHYKPFSVSS

SEQ ID NO: 816 - protein, 424 aa, Oryza sativa; identical to SEQ ID NO: 785

SEQ ID NO: 817 - protein, 508 aa, Oryza sativa
  unsure (1)..(508): unsure at all Xaa locations
ARGPLPGFHTSSNPPTPRSIRSSCEVSDMASGQKVVKPMEVSVEAGNAGEAAWLDDDGRARRTGTFWTASAHIITAVIGSGVLSLAWAIAQLGWVAGPAVMLLFAFVIYYTSTLLAECYRTGDPATGKRNYTYMDAVRANLGGAKVTFCGVIQYANLVGVAIGYTIASSISMRAIRRAGCFHHNGHGDPCRSSSNPYMVLFGAVQIVFSQIPDFDQIWWLSIVAAVMSFTYSGIGLSLGIVQTISNGGIQGSLTGISIGVGVSSTQKVWRSLQAFGDIAFAYSFSNILIEIQDTIKAPPPSEAKVMKSATRLSVATTTVFYMLCGCMGYAAFGDAAPDNLLTGFGFYEPFWLLDVANVAIVVHLVGAYQVFVQPIFAFVERWASRRWPDSAFIAKEAXXVGPFALSLFRLTWRXSAFVCLTTVVAMLLPFFGNVVGLLGAVSFWPLTVYFPVEMYIAQRGVPRGSARWVSLKTLSACCLVVSIAAAAGSIADVIDALKVYRPFSGXFF

SEQ ID NO: 818 - protein, 419 aa, Oryza sativa
  unsure (1)..(419): unsure at all Xaa locations
HEHVEQXXLLPTSGGSFCITGASFGRSCLNLSNVISGIGMLSVPYALSQGGWLSLALFAMVGAICFYTGKLIYRCMRADRCVRSYPDIGYLAFGRYGRTAIGLIMYVELYLVAISFLILEGDNLDKLLPGTVVKILGYQVHGKQLFMLVAAAVILPTTWLKNLSMLAYVSAVGLVSSVALTVSLVWAGVADKGFHMAGSSILNLSGLPTALSLYFVCFAGHGVFPTVYSSMRARKDFPKVLLISSVLCSLNYAVTAVLGYKIYGEDVQAQVTLNLPTGKLYTRIAILTTLITPLAKYALVIQPVTTAIEEKLSTAAAAVAADAENNRLTRVLTSTTVVFSTVVLACTVPFFGYLMSFIGSSLNVTVAVLFPCLSYLKIYMPRGGVGRFEVAAIVGILVIGVCVAVIGTYTSLHQIIGTF

SEQ ID NO: 819 - protein, 484 aa, Triticum aestivum
  unsure (1)..(484): unsure at all Xaa locations
MDATKRQQQQHDEEALSNSSPPASSSWASTSSSSXXLPGSGDTDRAPLLPCKMADDEKVDRLDVSDDTAHQISVDPWYQVGFVLTTGVNSAYVLGYSGSIMVPLGWIGGTCGLILAAAISMYANALLGRLHEVGGKRHIRYRDLAGHIYGRKMYALTWALQYINLFMINTGFIILAGQALKAIYVLFRDDGLLKLPYCIALSGFVCALFAFGIPYLSALRIWLGFSTVFSLIYIVIAFVLSLRDGITAPAKDYSIPGSESTRVFTTIGAVANLVFAYNTGMLPEIQATIRPPVVKNMEKALWFQFTVGSLPLYAVTFMGYWAYGSSTSSYLLNSVHGPAWIKVVANLSAFLQTVIALHIFASPMYEYLDTRFGSGHGGPFAIHNVVFRVGVRGGYLAVNTLVAAMLPFLGDFMSLTGALSTFPLTFVLANHMYLMVKGPKLSAFQKGWHWLNVVGFSLLSVTAAAAALRLIILDSSTYHLFADM

SEQ ID NO: 820 - protein, 479 aa, Triticum aestivum
  unsure (1)..(479): unsure at all Xaa locations
FCPCYIYHPNQTKPNQTHRSIACLPAGVDGHAPAGEGATPPPQPVIVVDANPSKNGHGDKLDDLPVADESSHQIGVDPWYQVAFVLTTGVNSAYVLGDSGSLMVPLGPPXXAAVSMYANTLLGRLHLLGGKRHIRYRDLAGHIYGPNMYKITWAMQYVNLFMINTGFIIIAGQALKALYLLVSADGAMKLPYCIAVSGFVCALFAFGIPYLSALRIWLGFSTIFSLTYIFAACVLSLKDGFRTPPRDYSIQGDPSSRVFTTIGAAASLVFAYNTGMLPEIQATVQAPVVKNMEKALWFQFTAGSLPLYAIIVIGYWAYGNQTTTYLLNNVTGPLWIKAVANLAAFLQTVIALHIFASPMYEYLDTRFGSKVGGPFAMHNVIFRVGVRGGYLAVNTLMAAALPFLGDFMSLTGALSTFPLTFVLANHMYLVANRQRLSSLQKSWHWLNIVFFTVLSITAAIAALRLIARDSKTYHIFADV

SEQ ID NO: 821 - protein, 120 aa, Triticum aestivum
  unsure (1)..(120): unsure at all Xaa locations
MASSSLDTEAGAGVQHKAGGDGSGYTTAATAHAVDTDSWQQVGLLLVTGFNCAYVLSFSNLMMVPLGWGWGAACLLLLAAAAWYANWLLAGLHVVDGQRFIRYRDLMGFVXGRKMYYLTW

SEQ ID NO: 822 - protein, 156 aa, Triticum aestivum
  unsure (1)..(156): unsure at all Xaa locations
MATPPAEKVIVVDANPSKNGHGDKLDDLPVADETSHQIGVDPWYQVAFVLTTGVNSAYVLGXSXSLMVPLGWVGGTVGLLLAAAVSMYANALLGRLHLLGGKRHIRYRDLAGHIYGPKMYKITWAMQYINLFMINTGFIIIAGQALKALYLLVSAD

SEQ ID NO: 823 - protein, 487 aa, Triticum aestivum
  unsure (1)..(487): unsure at all Xaa locations
TTCPPSRPLTLPPQRPPSPTPPCSVSSPPFCKSPRWRSLGPRPRESCEPPGTLRTTRTHKGIDGWLPLTASRSAKPCFSSLRCVNARGGARVLTLPYRLSQLRWCSGIWVLTLSWMSTVNSSWEMGEMHNIFPGKPFDRYYEIWXKAFGEXLGLWRSVPQPLAVGVSRQXIVYMVTGGNXTLTKRKVVICCRWXKDIRLTKSIMIFSAVHFVRTKFPTFNSSSGISLTSSAIXLSYSTLAWGASLHQGTAQNPDYSMRAATTPGQVFGFLGGLGDVPASSSPRNVVLEIQATIPSTPGNPSKKPMWKGVVVAYIIIAACYMPVAFIGYWAFGNSVDDNILITLNKPKWLIAMANMMVVVHLIGSYQIYAMPVFDMMETFLVRKLEFAPGITLRLITRTIYVAFTMFVGMTFPFFGGLIGFFGGLAFAPTTYFLPCIMWLIICKPRRFSLSWFTNWICIVLGVILMIIAPIGGLRQIIISAKTYKFYS

SEQ ID NO: 824 - protein, 56 aa, Triticum aestivum
  unsure (1)..(56): unsure at all Xaa locations
XSPHLFTVPIHEGMDTGLQRLEEGMFSRYNMTRQLFARGLLFGVNVFVTALFPFMG

SEQ ID NO: 825 - protein, 377 aa, Triticum aestivum
  unsure (1)..(377): unsure at all Xaa locations
MGTQASPDNYTPPKDERTAREKAIDDWLPITSSRKAKWWYSAFHNVTAMVGAGVLSLPYAMSELGWGPGIAVMTLSWIITVYTLWQMVEMHEIVPGKRFDRYHELGQHAFGDKLGLWIVVPQQLVVEVSLNIVYMVTGGNSXLKKFHDVICDECKEINVTYLIMIFASVHFVLSQLPNFNSISGISLAAAVMSLSYSTIAWGASLHKGRAENVDYSLRASTTPGQVFGFLGGLGDVAFSYSGHNVVLEIQATIPSTPGNPSKKPMWKGXVVAYIIIAACXMPVAFIGYWAFGNSVDDNILITLNKPKXLIAMANMMVVVHLIGSYQIYAMPXFDMMETFLVRKLEFAPGITLRLITRTIYVAFTMFVGMTXPFFGXX

SEQ ID NO: 826 - protein, 508 aa, Triticum aestivum
  unsure (1)..(508): unsure at all Xaa locations
PLANQPRRQGETPASCHRFPDGEEAGDLREGRGQDGADGGVGGGRERQGVRLXLDDDGRPRRSGTVWTASAHIITAVIGSGVLSLAWAIAQLGWVAGPAIMLLFALVIYYTSTLLAECYRSGDPETGKRNYTYMDAVRSYLPGTKVKLCGVIQYANLVGVAIGYTIAASISMRAIGRADCFHYHGGKDECKSSSNPYMIVFGVVQILFSQIPDFDQIWWLSIVAAVMSFTYSTIGLGLGIAQTVANGGIQGSLTGLSVGPGVTSMQKVWRSLQAFGNIAFAYSYSIILIEIQDTVKAPPPSEAKVMKKATGISVATTTVFYMLCGCMGYAAFGDAAPDNLLTGFGFYEPFWLLDVANAAIVLHLVGAYQVFCQPLFAFVEKWAAARWPDSAFIARELRVGPFAISVFRLTWRTAFVCLTTVVSMLLPFFGDVVGLLGAVAFWPLTVYFPVEMYIVQRGVRRGSTRWVCLKMLSAACLVVSVAAAAGSIADVIGELKEYRPFSGXAIFV

SEQ ID NO: 827 - protein, 445 aa, Zea mays
MAGSSMDTEAAGKEQQGSGGGGGYTMPATAHAVDTDSWQQVGLLLVIGFNCAYVLSFSNLMMVPLGWAWGVACLLLVGAAAWYANWLLAGLHFVDGQRFIRYRDLMGFVFGRNMYYITWFLQFATLLLCNMGFILLGARALKAINTEFTHTPARLQWFITATGIVYFAFAYFVPTISAMRNWLATSAALTLAYDVALLAILIRDGKSNKQKDYDVHAGSQAEKVFNALGAVAAILVCNTSGLLPEIQSTVREPAVRGMRRALLLQYTAGAAGYYGISVAGYWAYGSAVSEYLPNELGGPRWAAVLINATAFLQSIVSQHLFTVPIHEAMDTRLQRLDEGMFSRYNLTRRVCARGLVFGFNVFVTALFPFMGDFVNLVGSLALVPLTFTFPSMAVLKIKGKSGGRCNRLWHWGIIVLSSALCVATTAAAVRLIFNNARIYHFFADM

SEQ ID NO: 828 - protein, 445 aa, Zea mays
MAGSSMDTEAAGKEQQGSGGGGGYTMPATAHAVDTDSWQQVGLLLVIGFNCAYVLSFSNLMMVPLGWAWGVACLLLVGAAAWYANWLLAGLHFVDGQRFIRYRDLMGFIFGRNMYYITWFLQFATLLLCNMGFILLGARALKAINTEFTHTPARLQWFITATGIVYFAFAYFVPTISAMRNWLATSAALTLAYDVALLAILIRDGKSNKQKDYDVHAGSQAEKVFNALGAVAAILVCNTSGLLPEIQSTVREPAVRGMRRALLLQYTAGAAGYYGISVAGYWAYGSAVSEYLPNELGGPRWAAVLINATAFLQSIVSQHLFTVPIHEAMDTRLQRLDEGMFSRYNLTRRVCARGLVFGFNVFVTALFPFMGDFVNLVGSLALVPLTFTFPSMAVLKIKGKSGGRCNRLWHWGIIVLSSALCVATTAAAVRLIFNNARIYHFFADM

SEQ ID NO: 829 - protein, 237 aa, Zea mays
MAGSSMDTEAAGKEQQGSGGGGGYTMPATAHAVDTDSWQQVGLLLVIGFNCAYVLSFSNLMMVPLGWAWGVACLLLVGAAAWYANWLLAGLHFVDGQRFIRYRDLMGFIFGRNMYYITWFLQFATLLLCNMGFILLGARALKAINTEFTHTPARLQWFITATGIVYFAFAYFVPTISAMRNWLATSAALTLAYDVALLAILIRDGDSASLSLSLFSAVLAFCIYALESAVLSFLVRE

SEQ ID NO: 830 - protein, 494 aa, Zea mays
  unsure (1)..(494): unsure at all Xaa locations
MMRATFGVGGSHRITVLCCGGLVLLLLPPALFIGRLRFVVLARPAPAPAILRQQGAAPPARQDHGRRXADDKPVSDDTAHQISVDPWYQVGFVLTTGVNSAYVLGYSGSIMVPLGWIGGTCGLLLAAAISMYANALLARLHEVGGKRHIRYRDLAGHIYGPKIYGLTWALQYINLFMINTGFIILAGQALKATYGLFSDDGVLKLPYCIAISGFVCALFAIGIPYLSALRIWLGFSTLFSLMYIVIAVVLSSRDGITAPARDYSIQSSQSTRVFTTIGSIADLVFAYNTGMLPEIQATIRPPVVKNMEKALWFQFTIGSLPLYAVVFVGYWAYGSSTSGYLLNSVTGPVWVKAVANLSAFFQTVIALHIFASPMYEFLDTKYGSGRGGPFEIHNVAFRVAVRGGYLTVNTLVAAVLPFLGDFMSLTGALSTFPLTFVLANHMYLMVKGPKLGAIQKSWHWLNVLGFTALAVAAAVSAIRLIMRDSSTYHFFADL

SEQ ID NO: 831 - protein, 489 aa, Zea mays
  unsure (1)..(489): unsure at all Xaa locations
GIEPPQSKKAVQCRERERDQEEKXEREREAKQWISSSSSSSSTASPCWRRSSCPSRSCAAADDKPXXISDDTAHQISVDPWYQVGFVLTTGVNSAYVLGYSGSIMVPLGWIGGTCGLLLAAAISMYANALLARLHEVGGKRHIRYRDLAGHIYGPKIYGLTWALQYINLFMINTGFIILAGQALKATYGLFSDDGVLKLPYCIAISGFVCALFAIGIPYLSALRIWLGFSTLFSLMYIVIAVVLSSRDGITAPARDYSIPKSSQSTRVFTTIGSIADLVFAYNTGMLPEIQATIRPPVVKNMEKALWFQFTIGSLPLYAVVFVGYWAYGSSTSGYLLNSVTGPVWVKAVANLSAFFQTVIALHIFASPMYEFLDTKYGSGRGGPFEIHNVAFRVAVRGGYLTVNTLVAAVLPFLGDFMSLTGALSTFPLTFVLANHMYLMVKGPKLGAIQKSWHWLNVLGFTALAVAAAVSAIRLIMRDSSTYHFFADL

SEQ ID NO: 832 - protein, 456 aa, Zea mays
  unsure (1)..(456): unsure at all Xaa locations
XSPAPAPAIXTTTGRRSSCPSRSCAAADDKPXXISDDTAHQISVDPWYQVGFVLTTGVNSAYVLGYSGSIMVPLGWIGGTCGLLLAAAISMYANALLARLHEVGGKRHIRYRDLAGHIYGPKIYGLTWALQYINLFMINTGFIILAGQALKATYGLFSDDGVLKLPYCIAISGFVCALFAMGIPYLSALRIWLGFSTLFSLMYIVIAVVLSSRDGITAPARDYSIPKSSQSTRVFTTIGSIADLVFAYNTGMLPEIQATIRPPVVKNMEKALWFQFTIGSLPLYAVVFVGYWAYGSSTSGYLLNSVTGPVWVKAVANLSAFFQTVIALHIFASPMYEFLDTKYGSGRGGPFEIHNVAFRVAVRGGYLTVNTLVAAVLPFLGDFMSLTGALSTFPLTFVLANHMYLMVKGPKLGAIQKSWHWLNVLGFTALXXVAAAVSAIRLIMRDSSTYHFFADL

SEQ ID NO: 833 - protein, 309 aa, Zea mays
  unsure (1)..(309): unsure at all Xaa locations
XFLPRVRPRVRPRVRLKLPYCIAISGFVCALFAIGIPYLSALRIWLGFSTLFSLMYIVIAVVLSSRDGITAPARDYSIPKSSQSTRVFTTIGSIADLVFACPAGWLPVFQATIRXPPVVKNMEKALWFQFTIGSLPLYAVVFVGYWAYGSSTSGYLLNSVTGPVWVKAVANLSAFFQTVIALHIFASPMYEFLDTKYGSGRGGPFEIHNVAFRVAVRGGYLTVNTLVAAVLPFLGDFMSLTGALSTFPLTFVLANHMYLMVKGPKLGAIQKSWHWLNVLGFTALAVAAAVSAIRLIMRDSSTYHFFADL

SEQ ID NO: 834 - protein, 238 aa, Zea mays
  unsure (1)..(238): unsure at all Xaa locations
XAWADAWADAWADASRVFTTIGSIADLVFAYNTGMLPEIQATIRPPVVKNMEKALWFQFTIGSLPLYAVVFVGYWAYGSSTSGYLLNSVTGPVWVKAVANLSAFFQTVIALHIFASPMYEYLDTKYGSGRGGPFEIQNLAFRVVVRGGYLTVNTLVAAVLPFLGDFMSLTGALSTFPLTFVLANHMYLMVKGPKLSAIQKLWHWLNVVGFTALAVAAAVSAIRLIMRDSSTYHFFADV

SEQ ID NO: 835 - protein, 248 aa, Zea mays
  unsure (1)..(248): unsure at all Xaa locations
PRVRGRVGGRVGGRVGGRVGGRVGXRVFTTIGSIADLVFAYNTGMLPEIQATIRPPVVKNMEKALWFQFTIGSLPLYAVVFVGYWAYGSSTSGYLLNSVTGPVWVKAVANLSAFFQTVIALHIFASPMYEFLDTKYGSGRGGPFEIHNVAFRVAVRGGYLTVNTLVAAVLPFLGDFMSLTGALSTFPLTFVLANHMYLMVKGPKLGAIQKSWHWLNVLGFTALAVAAAVSAIRLIMRDSSTYHFFADL

SEQ ID NO: 836 - protein, 456 aa, Zea mays
  unsure (1)..(456): unsure at all Xaa locations
MRPARPPTMEMQPPXDGHARPEKPATAXEESIESWLPISSSRNAKWWYSAFHNVTAMVGAGVLSLPYAMSQLGWEVGVTVLVLLRAITLYTLWQMVEMHECVPGKRFDRYHELGQHAFGERLGLWIVVPQQLVVEVGVNIVYMVTGGTSLKKFHDTVCGDSCTDIKLTYFIMIFASCHFVLSQLPSLHSISGVSLAAAVMSLCYSTIAWVASAHKGRSPDVHYGLRATTAPGKVFGFFGALGDVAFAYAGHNVVLEIQATIPSTPERPSKKPMWKGAVVAYAIVAACYFPASLVGYWAFGNQVNDNVLVSLSKPKWLIALANMMVVVHVIGSYQIXYAMPVFDMIETVLVKKLRFPPGLTLRLIARTLYVAFTMFIAITFPFFGGLLGFFGGFAFAPTTYFLPCVMWLAIYKPKRFSLSWLTNWICIILGVLLMILSPIGGLRQIIMDAKTYQFYS

SEQ ID NO: 837 - protein, 453 aa, Zea mays
  unsure (1)..(453): unsure at all Xaa locations
MGTQAPENYPAEKEDARSAREKAIDDWLPITSSRNAKWWYSAFHNVTAMVGAGVLSLPYAMSELGWGPGIAVLVVSWVITLYTLWQMVEMHEMVPGKRFDRYHELGQHAFGDRLGLWIVVPQQLVVEVGVNIVYMVTGGKSLKKFHDVLVCGDTGVCEGKDNIKTTYFIMIFASVHFVLSQLPNFNSISGVSLAAAVMSLSYSTIAWGASVHKGRMSGVDYHLRATTTPGKVFGFFGALGDVAFAYAGHNVVLEIQATIPSTPDKPSKKPMWKGVVVAYVVVALCYFPVALIGYWAFGSTVEDNILITLSKPKWLIALANMMVVVHVIGSYQIYAMPVFDMIETVLVKKLRFPPGLTLRLIARTLYVAFTMFIAITFPFFGGLLGFFGGFAFAPTTYFLPCVMWLAIYKPKXFSLSWLTNWMCIILGVLLMILSPIGGLRQIIMEAKTYQFYS

SEQ ID NO: 838 - protein, 453 aa, Zea mays
MGTQAPENYPAEKEDARSAREKAIDDWLPITSSRNAKWWYSAFHNVTAMVGAGVLSLPYAMSELGWGPGIAVLVVSWVITLYTLWQMVEMHEMVPGKRFDRYHELGQHAFGDRLGLWIVVPQQLVVEVGVNIVYMVTGGKSLKKFHDVLVCGDTGVCEGKDNIKTTYFIMIFASVHFVLSQLPNFNSISGVSLAAAVMSLSYSTIAWGASVHKGRMSGVDYHLRATTTPGKVFGFFGALGDVAFAYAGHNVVLEIQATIPSTPDKPSKKPMWKGVVVAYVVVALCYFPVALIGYWAFGNTVEDNILITLSKPKWLIALANMMVVVHVIGSYQIYAMPVFDMIETVLVKKLRFPPGLTLRLIARTLYVAFTMFIAITFPFFGGLLGFFGGFAFAPTTYFLPCVMWLAIYKPKRFSLSWLTNWMCIILGVLLMILSPIGGLRQIIMDAKTYQFYS

SEQ ID NO: 839 - protein, 452 aa, Zea mays
MGTQAPENYPAEKDARSAREKAIDDWLPITSSRNAKWWYSAFHNVTAMVGAGVLSLPYAMSELGWGPGIAVLVVSWVITLYTLWQMVEMHEMVPGKRFDRYHELGQHAFGDRLGLWIVVPQQLVVEVGVNIVYMVTGGKSLKKFHDVLVCGDTGVCEGKDNIKTTYFIMIFASVHFVLSQLPNFNSISGVSLAAAVMSLSYSTIAWGASVHKGRMSGVDYHLRATTTPGKVFGFFGALGDVAFAYAGHNVVLEIQATIPSTPDKPSKKPMWKGVVVAYVVVALCYFPVALIGYWAFGNTVEDNILITLSKPKWLIALANMMVVVHVIGSYQIYAMPVFDMIETVLVKKLRFPPGLTLRLIARTLYVAFTMFIAITFPFFGGLLGFFGGFAFAPTTYFLPCVMWLAIYKPKRFSLSWLTNWMCIILGVLLMILSPIGGLRQIIMEAKTYQFYS

SEQ ID NO: 840 - protein, 484 aa, Zea mays
SAAGPAAASSPSLSLSLAISIPLGTQAPPQTQSFSSQKMQEQDVDDGGGRTTQQQEKSIDDWLPINSSRKAKWWYSAFHNVTAMVGAGVLGLPYAMSELGWGPGIAVMILSWIITLYTLWQMVEMHEMVPGKRFDRYHELGQHVFGDRLGLWIVVPQQLAVEVSLNIIYMVTGGQSLKKFHDVICDGGRCGGDLKLSYFIMIFASVHLVLSQLPNFNSISAVSLAAAVMSLSYSTIAWGASLHRGRREDVDYHLRATTTPGKVFGFLGGLGDVAFAYSGHNVVLEIQATIPSTPDKPSKKAMWKGAFVAYVVVAICYFPVTFVGYWAFGSGVDENILITLSKPKWLIALANMMVVVHVIGSYQVYAMPVFDMIETVLVKKMRFAPSLTLRLIARSVYVAFTMFLGITFPFFGGLLSFFGGLAFAPTTYFLPCIMWLKVYKPKRFGLSWFINWICIVIGVLLLILGPIGGLRQIILSATTYKFYQ

SEQ ID NO: 841 - protein, 455 aa, Zea mays
METQAPEKENYLPEKDARSAREKAIDEWLPITSSRNAKWWYSAFHNVTAMVGAGVLSLPYALSELGWGPGIAVLVVSWVITLYTLWQMVEMHEMVPGKRFDRYHELGQHAFGEKLGLWIVVPQQLVVEVGVNIVYMVTGGRSLKKFHDVLVCGDGGASCEGKDNIKTTYFIMIFASVHFVLSQLPNFNSISGVSLAAAVMSLSYSTIAWGASVDKGRMAGVDYHLRATTTPGKVFGFFGALGDVAFAYAGHNVVLEIQATIPSTPEKPSKKPMWKGVVVAYVVVALCYFPVALIGYWAFGNSVQDNILITLSKPRWLIALANMMVVIHVIGSYQIYAMPVFDMIETVLVKKLRFPPGLTLRLISRTAYVAFTMFIAITFPFFGGLLGFFGGFAFAPTTYFLPCVMWLAIYKPKRFSLSWFTNWICIILGVILMILSPIGGLRQIIMDAKTYQFYS

SEQ ID NO: 842 - protein, 455 aa, Zea mays
MGTQAPEKENYPPEKDARSAREKAIDEWLPITSSRNAKWWYSAFHNVTAMVGAGVLSLPYALSELGWGPGIAVLVVSWVITLYTLWQMVEMHEMVPGKRFDRYHELGQHAFGEKLGLWIVVPQQLVVEVGVNIVYMVTGGRSLKKFHDVLVCGDGGASCEGKDNIKTTYFIMIFASVHFVLSQLPNFNSISGVSLAAAVMSLSYSTIAWGASVDKGRMAGVDYHLRATTTPGKVFGFFGALGDVAFAYAGHNVVLEIQATIPSTPEKPSKKPMWKGVVVAYVVVALCYFPVALIGYWAFGNSVQDNILITLSRPRWLIALANMMVVIHVIGSYQIYAMPVFDMIETVLVKKLRFPPGLTLRLISRTAYVAFTMFIAITFPFFGGLLGFFGGFAFAPTTYFLPCVMWLAIYKPKRFSLSWFTNWICIILGVILMILSPIGGLRQIIMDAKTYQFYS

SEQ ID NO: 843 - protein, 412 aa, Zea mays
  unsure (1)..(412): unsure at all Xaa locations
MGLGAVAATREDEEAKMEAGGDTAGQKLDAGALFVLQSKGSWLHCGYHLTTSIVAPALLSLPFAFASLGWAAGTICLVIAAAVTFYSYNLISLVLEHHARQGRRQLRFRDMITDILGPGWGKYYIGPIQFTGWGDSSASSCVPAAXQMQAIYLLANPGGTIKLYVFVAIFGVFMMILAQLPSFHSLRHVNLVSLLLCLAYSFCAVAGSIYLGNSDKAPPKDYSISGDAQNRVFGVFNAIAIIATTYGNGIIPEIQATVAAPVTGKMFRGLCLCYAVVVTTFFSVAISGYWAVGNQAQGILLSNFMVDGAAVIPKGLLLVTQLFTLLQLSAVGVVYLQPTNEVLEGLFSDAKQGQYAARNVVPRLVSRTVAVALATTVAAMLPFFGDMNSLIGAFXFLPLDFAVPALFYXVTX

SEQ ID NO: 844 - protein, 456 aa, Zea mays
  unsure (1)..(456): unsure at all Xaa locations
NSTQLPAARQPPSDTRRALAGLAAAEEKAIDDWLPINARRNAKWWYSAFHNVTAMVGAGVLGLPYAMSELGWGPGIAVLLLSWIITLYTLWQMVEMHEMVPGKXRFDRYHELGQHAFGERLGLXWIVVPQQLVVEVGGCIVFMVTGGRSLKKLHELVCDXCRPIRLTYFIMIFASCHLLLSQLPNFNSXISAVSLAAAVMSLSYSTIAWGASLHRGRREDVDYHLRATTTPGKVFGFLGGLGDVAFAYSGHNVVLEIQATIPSTPDKPSKKAMWKGAFVAYVVVAICYFPVTFVGYWAFGSGVDEKIFXITLSKPKWLIALANMMVVVHVIGSYQVYAMPVFDMIETVLVKKMRFAPSLTLRLIARSVYVAFTMFLGITFPFFGGLLSFFGGLAFAPTTYFLPCIMWLKVYKPKRFGLSWFINWICIVIGVLLLILGPIGGLRQIILSATTYKFYQ

SEQ ID NO: 845 - protein, 472 aa, Zea mays
  unsure (1)..(472): unsure at all Xaa locations
MAAVQPSVEMTTQQGPPAASYSPARDGGGGRSAEDEEKEKAAAIDNWLPISATRNAKWWYSAFHNVTAMVGAGVLGLPYAMSQLGWGAGITIMLLSWVITLYTLWQMVEMHEMVPGKRFDRYHELGQHAFGERLGLWIVVPQQLVVEVGVNIVYMVTGGTSLQKFHELVCGDAACEGGRKIRLTYFIMIFASCHFVLAQLPNFDSISRXVSLAAAVMSLSYSTIAWGASVSKGRVPDVDYGLRATTPPGKVFGFLGALGTVAFAYAGHNVVLEIQATMGGTPVMPSKKPMWKGVVVAYLVVALCYFPVSFVGYWAFGDSVDGDILVTLNRPRWLIALANMMVVIHVIGSYQIYAMPVFDMIETVLVKKLRFPTCLTLRFIARTVYVAFTMFIAITFPXFDGLLSFFGGFAFAPTTYFLPCIMWLAIYKPKRFSLSWFTNWICIILGVLLMVLAPIGGLRQIIISAKTYKFYQ

SEQ ID NO: 846 - protein, 453 aa, Zea mays
  unsure (1)..(453): unsure at all Xaa locations
MGTQAPENYPAEKEDARSAREKAIDDWLPITSSRNAKWWYSAFHNVAAMVGAGVLSLPYAMSELGWGPGIAVLVVSWVITLYTLWQMVEMHEMVPGXKRFDRYHELGQHAFGDRLGLXWIVVPQQLAVEVGVNIVYMXVTGGKXSLKKFPRRGCEGKDNIKLTFFIMTFXASVHFVLSQLPNFNSXSPGVSLAAAVMSLSYSTIAWGAGCTRGRMSGVDYHLRXATTTPGKVFGFFGALGDVAFAYAGHNVVLEIQATIPSTPDKPSKKPMWKGVVVAYVVVALCYFPVALIGYWAFGNTVEDNILITLSKPKWLIALANMMVVVHVIGSYQIYAMPVFDMIETVLVKKLRFPPGLTLRLIARTLYVAFTMFIAITFPFFGGLLGFFGGFAFAPTTYFLPCVMWLAIYKPKRFSLSWLTNWMCIILGVLLMILSPIGGLRQIIMEAKTYQFYS

SEQ ID NO: 847 - protein, 474 aa, Zea mays
  unsure (1)..(474): unsure at all Xaa locations
LRPLVKGSSEPPEGKPGAMGTQASPDYTPPKDERTAREKAIDDWLPITSSRKAKWWYSAFHNVTAMVGAGVLSLPYAMSELGWGPGIAVMTLSWIITVYTLWQMVEMHEMVPGKRFDRYHELGQHAFGDKLGLWIVVPQQLVVEVSLNIVYMVTGGNSLKKFHDVICDECKDIKLTYFIMVFASVHFVLSQLPDFHSISSVSLAAAVMSVGYSAIAWTASAAQGKAAEAEADYSLRATTMPGKVFGFLGALGDVAFTYAGHNVVLEIQATIPSTPGKPSKKPMWKGVIVAYVVIAACYLPVALVGYWAFGNGVDENIFPSLNRPRWLIAAANMMVVVHVVGSYQVYXAMPVFDMIETVLVRKYWFTPGFRLRLIARTVYVALTMFVAITFPFFSELAQFXFGGFAYAPTSYFLPCIMWLIIYKPRRFSLSWFTNWICIVIGVLLMVLSPIGGLRQMILKVKTYKFYQDYSGLKP

SEQ ID NO: 848 - protein, 330 aa, Zea mays
  unsure (1)..(330): unsure at all Xaa locations
XQKFAESAXARAARXLHRSYWICIFGSSQFLLSQLPNLDAITAVSFAAAAMSLCYSTISWAACVARGXGARGGYDAYKAGTGTGTAADSAFRVFSALGQVAFAYAGHGVVLEIQATIPSTPTKPSRAPMWKGTVAAYLVTAACYFPVAVAGYWAFGRDVGDNVLVALQRPPWLVAAANMMVVIHVVGSYQVYAMPMFESIETIMATRFRLPRGLLLRLVARSAYVAFTLFVAVTFPFFGDLLGFFGGFGFTPTSYFLPCVLWLKIKKPPRFSASWCANWGCIIVGVLLMLVSTIGGLRSIVQDASTFHKSSPSLVHAALPLHFVASLRVS

SEQ ID NO: 849 - protein, 471 aa, Zea mays
GLLQNIQLFPAANYLAAISSDPSAYVSIGRATEMATPSSMTSTEKEKAIDDWLPITSSRNAKWWYSAFHNVTAMVGAGVLSLPYAMSELGWGPGVVAMVLSWVITLYTLWQMVEMHECVPGKRFDRYHELGQHAFGDKLGLWIVVPQQLIVEIGVCIVYMVTGGKSFEKCYTVACPDCKPLRTSSWIMVFAAIHLLLSQLPNFNSITLVSLAAAVMSLTYSTIAWAASAHKGRHSAVDYSMKASTTTGQTFNFLSALGDVAFAYAGHNVVLEIQATIPSTPDKPSKKPMWQGVVLAYLVVAICYLPVAFVGYYVFGNAVDDNILITLEKPRWLIAAANIFVVVHVIGSYQIYAMPVFDMLETFLVKKLRFKPGMPLRLIARSLYVVLTALVGIAVPFFGGLLGFFGGFAFAPTTYYLPCILWLKIKKPKKFSLSWFINWFCIIVGVLLTVLAPIGGLRSIVVNASTYKFFS

SEQ ID NO: 850 - protein, 298 aa, Zea mays
  unsure (1)..(298): unsure at all Xaa locations
XGPSGRPGXDPYFXMIFASVHFVLSQLPNFNSISGVSLAAAVMSLSYSTIAWGASVHKGRMSGVDYHLRATTTPGKVFGFFGALGDVAFAYAGHNVVLEIQATIPSTPDKPSKKPMWKGVVVAYVVVALCYFPVALIGYWAFGNTVEDNILITLSKPKWLIALANMMVVVHVIGSYQIYAMPVFDMIETVLVKKLRFPPGLTLRLIARTLYVAFTMFIAITFPFFGGLLGFFGGFAFAPTTYFLPCVMWLAIYKPKRFSLSWLTNWICIILGVLLMILSPIGGLRQIIIDAKTYQFYS

SEQ ID NO: 851 - protein, 183 aa, Zea mays
  unsure (1)..(183): unsure at all Xaa locations
LSSIRHPQDIRESNHHKARRQCSAERERDQEEKEKGKEKQRDAASASSSWQDLPPRLQSYDNRAPLLLPVKIMDAAADDKQISDDTAHQISVDPWYQVGFVLTTGVNSAYVLGYSGSIMVPLGWIGGTCGLLLAAAISMYANALLARLHEVGGKRHIRYRDLAGHIYGPEIYGLTWALQYINX

SEQ ID NO: 852 - protein, 440 aa, Zea mays
  unsure (1)..(440): unsure at all Xaa locations
LPGPPPPLPLTSPIRYCSRLCASRPRVRLQPLPWDQPVRHSRRRPVRRDHGTTILRPSFPQSLLRPKGGVRRQTRRREGKAAGAGRTRSRRPXDDWLPINARRNAKWWYAAFHNVTAMVGAGVLTLPYAMSELGWGVGVTVLVLSWVITVYTLWQMVEMHECVPGKRFDRYHELGQHAFGEKLGLWIVVPQQLVVEVGLNIVYMITGGQSLQKFHDMVCHGRCRRIKLPYFIMVFASVHFVLSQLPDFHSISSVSLAAAVMSVGYSAIAWTASAAQGKAAEAEADYSLRATTTPGKVFGFLGALGDVAFTYAGHNVVLEIQATIPSTPGKPSKKPMWKGVIVAYVVIVACYLPVVLVGYWAFGNGVDENILITLNRPRWLIAAANMMVVVHVVGSYQVYAMPVFDMIETVLVRKYWFTPGFRLRLIARTVYVGNETPLSX

SEQ ID NO: 853 - protein, 531 aa, Zea mays
  unsure (1)..(531): unsure at all Xaa locations
XMPAATAMAMAAEGAASEPELVSIPATXXHGLSTPEGAATPTGAGGGGGGRSKGSGTPGRRVVEGLRGYLEDVGHLTRLDPRDAWLPVTESRGGNARYAAFHSLNAGLGFQALLLPLAFPDLGWSWGIISLTIAYFWQLYTLWILVKLHEAVPGRRYNRYVELAQAAFGEKMGMWLALFPTIYLSAGTATALILVGGETMKLFFQIVCGPLCSPNPITTVEWYLVFTSLAVILSQLPNLNSIAGLSLIGGATAIMYCTMSWVLSVSQPRPPTVSYDPVTSNSFGLSLFSILNALGIIAFAFRGHNLALEIQATMPSTFKHPAHVPMWRGAKVAYLLIAMCLFPVAVGGYWAYGNMVPPGGMLAALYAFHSHDISQGVLATTCLLVVLNCLSSFQIYSMPVFDSFEAYYTGRTNRPCSAWVRSGFRVFYGFLSLFISVALPFLSSLAGLLGGLTLPVTFAYPCFMWICVKKPERFSFSWYLNWGLGLLGTAFSLAFSLGGVWSIVNNGMKLKFFKPNXVHRLLACSNLHASY

SEQ ID NO: 854 - protein, 196 aa, Zea mays
  unsure (1)..(196): unsure at all Xaa locations
LHLVFXPFVWWCAQQKQIMYTSLAPHGPLKLYHFIIMVAVVLAFLSQLPSFHSLRHINFVSLLLSLGYTVLVAAACVRAGLSKNSPAKDYSLSSSKSEQSFDAFLSISILASVFGNGILPEIQATLAPPAAGKMMKALVLCYSVIVFTFFLSSITGYWAFGSNVQSNVLKSLMPDSGPALAPTWLLGVAVLFVLLQ

SEQ ID NO: 855 - protein, 514 aa, Zea mays
  unsure (1)..(514): unsure at all Xaa locations
MSSSREVMVLSDSEVQSAPPTPRPPPPVSAPPSQIHSPSPARSPLASPVRKAVAGVKAGCLEEEVGGHVTRLADPRDAWLPVTESRSGNAYYAAFHSLSSGIGFQALVLPTAFASLGWTWAIICLTLAFGWQLYTLWLLVRLHEPVAGATRYSRYMHLATTVFGDRWANILALLPVTYLSAGICTALIIVGGGSMKMLFGIAYGGSCLARPLTAVEWYLVFVCAAVVLSQLPNLNSIAGVSLVAAVAAVAYCTMIWAVSVARGRVAGVSYDPVHTPDDVDAALGVLNGLGIIAFAFRGHNVVLEIQGTMPSTLKHPSHVPMWKGVKVAYAIIALCLYPIAIGGFWAYGNQIPPNGILSALYKFHSRDASRLVLGVTTLLVIINCLTTFQIYAMPVYDNMEAGYVHKKNRPCPXWMRSGFRAFFGAVNLLVAVAMPFLSELAGLFGGISLPVTLAYPCFMWVAIKKPRKGTATWNVNWALGILGMSISLVLIVGNLWGLVEKGMRVKFFKPADFQ

SEQ ID NO: 856 - protein, 224 aa, Zea mays
  unsure (1)..(224): unsure at all Xaa locations
PPXLAQTYLNSIVXLQATLAPPAAGKMMKALVLCYSVIVFTFFLSSITGYWAFGSNVQSNVLKSLMPDSGPALAPTWLLGVAVLFVLLQLLAIGLVYSQVAYEIMEKGSADAARGRFSRRNLVPRLLLRTLYLAFCALMAAMLPFFGDIVGVVGAVGFVPLDFVLPVLMYNMALAPPRRSPVFIANAAVMVVFAGVGAIGAFATIRKLVLDADKFKLFSNNVVD

SEQ ID NO: 857 - protein, 359 aa, Zea mays
VRGDDDAARAASRQLFSGQGTSSVVVRHQSDSLDGGGGRSAEDEEKEKAAAIDNWLPISATRNAKWWYSAFHNVTAMVGAGVLGLPYAMSQLGWGAGITIMLLSWVITLYTLWQMVEMHEMVPGKRFDRYHELGQHAFGERLGLWIVVPQQLVVEVGVNIVYMVTGGTSLKKFHDTVCGDDDHRCKGRDIKLTYFIMIFASCHLVLSQLPNFHSISGVSLAAAVMSLCYSTIAWIASAQKGKSPDVHYGLRATTTPGKVFGFFGALGDVAFAYAGHNVVLEIQATIPSTPDKPSKKPMWKGVVVAYVVVAVCYFPASLVGYWAFGDGVDENILVTLRKPKWLIALANVMVVVHLIGSYQ

SEQ ID NO: 858 - protein, 278 aa, Zea mays
MVGTDIVYMVTGGQSLRKFHDLVCRQGGCGGGGGDIRLTFWIMIFASPHFVLSQLPNFNSLSAVSGAAAVMSLAYSMIAFSTSVAKGGRAADYGLRATTAPGQAFGMLSALGTVSFAYAAHNVVLEIQATIPSTPEAPSKKPMWRGVVAAYAVVALCYFSVAFAGYYAFGSSVDPNVLITLDRPRWLIAAANLMVVVHVIGGYQVFAMPMFDMIETVLVKRHGFAPGFWLRFVSRSAYVAATMFVGLTFPFFDGLLGFFGGFGFAPTTYFIDLLAWPA

SEQ ID NO: 859 - protein, 484 aa, Zea mays
MVSERQQAAGKVAAFNLTEAGFGDGSDLLDDDGRERRTGTLVTASAHIITAVIGSGVLSLAWAIAQLGWVIGPVVLLAFSAITWFCSSLLADCYRAPPGPGQGKRNYTYGQAVRSYLGESKYRLCSLAQYVNLVGVTIGYTITTAISMGAIKRSNCFHSRGHGADCEASNTTNMIIFAGIQILLSQLPNFHKLWWLSIVAAVMSLAYSSIGLGLSIAKIAGGGVHVKTSLTGAAVGVDVTAAEKVWKTFQSLGDIAFAYTYSNVLIEIQDTLRSSPPENVVMKKASFIGVSTTTAFYMLCGVLGYAAFGSDAPGNFLTGFGFYDPFWLIDVGNVCIAVHLVGAYQVFCQPIYQFVEAWARGRWPDCAFLHAELAVVAGSSFTASPFRLVWRTAYVVLTALVATVFPFFNDFLGLIGAVSFWPLTVYFPIQMYMAQAKTRRFSPAWTWMNVLSYACLFVSLLAAAGSVQGLVKDLKGYKPLFKVS

SEQ ID NO: 860 - protein, 529 aa, Zea mays
  unsure (1)..(529): unsure at all Xaa locations
MSSSKDAISEVESAQPSPRXXPPVSTPPSQIHSPAPGRSPLHAMASPLRAVASPLRAMATPLASPVRKAVAGVRECLEEVGHITRLADPRDAWLPITESRSGNAYYAAFHNLSSGIGFQALVLPTAFASLGWTWAIICLTLAFGWQLYXTLWLLVRLHEPVAGATRYSRYMHLATTVFGERWAKILALLPVMYLSAGICTALIIVGGGSMKLLFGIACGEPCPARPPTTVEWYLVFVCAAVLLSQLPNLNSIAGVSLVGATAAVAYCTMIWTVSVAKGRVPAVSYDPVKAPSDVDGALAILNGLGIIAFAFRGHNVVLEIQGTMPSTLKHPSHVPMWKGVKVAYAIIALCLYPVAIGGFWAYGNQIPPNGILSALYKFHSRDTSRLVLGVTTTLVIVNCLTTFQIYAMPVYDNMEAGYVHKKNRPCPWWMRSGFRAFFGAVNFLIAVALPFLSQLAGLLGGISLPVTLAYPCFMWVAIKKPRKGTATWNVNWALGILGMSISLVLIVGNLWGLVEKGLRVKFFKPADSQ

SEQ ID NO: 861 - protein, 550 aa, Zea mays
  unsure (1)..(550): unsure at all Xaa locations
PINNTTLASPSLLSYLASTGREKKKMVASKAAPFDEVSSVEAGAYGGRDDDGRPRRTGTVWTASAHIITAVIGSGVLSLAWAIAQLGWAAGPAVMLLFAVVIYYTSTLLAECYRSGDPVAGKRNYTYMDAVRASLGGAKVRLCGAIQYANLFGVAIGYTIAASISMLAIKRADCFHAKGHKHACRSSSNPYMILFGVAEVVFSQIPDFDQIWWLSIVAAVMSFTYATIGLVLGIMQTVANGGFQGSLTGISIGAGVTPTEKVWRSLQAFGNIAFAYSYSIILIEIQDTVKAPPPSEAKVMKRATMVSVATTTVFYMLCGCMGYAAFGDAAPDNLLTGFGFYEPFWLLDIANVAIVVHLVGAYQVFCQPLFAFVEKWAAATWPDSAFIAREFRVGPFAXXSLFRLTWRTAFVCLTTVAAMLLPFFGDVVGLLGAVSFWPLTVYFPIEMYVVQRAVRRWSTHWICLQMLSAACLLVSVAAAAGSIADVIGALKVYRPFSSXFLLLWMCWGLDWVWTYVHAAFIALRSTVVNKGGRRCRCSVRCLHGGPYRNK

SEQ ID NO: 862 - protein, 133 aa, Zea mays
  unsure (1)..(133): unsure at all Xaa locations
QPVIALHIFASPMYGFLDTQYGSGRGGPFEIPNVGFRVAVRGGSLPVASLVAPVLPFLGAFMSLXGAFSPFPLTFVLAGPMCLLVKGPKLGAIPESWLWLDVFGFPALAVAPAVSPIRLLLRDSRPSPFFVDL

SEQ ID NO: 863 - protein, 551 aa, Zea mays
  unsure (1)..(551): unsure at all Xaa locations
MDVDMQARAGRDSLSSLETHHRTPRSADSFAAAPAIVTHRCVERSQRARSSHRAACACVQIERETCRSRERDEQRERFMVGAMRGGAMELEDRLATLPRFRGDHDDDGKERRTGTVWTATAHIITAVIGSGVLSLAWAMAQLGWVAGPLTLVLFAAITFYTCGLLADCYRVGDPVTGKRNYTYTEAVKSNLGGWYVWFCGFCQYVNMFGTGIGYTITASISAAAINKSNCFHWHGHDADCSQNTSAYIIGFGXVVQVIFSQLHNFHKLWWLSIIAAIMSFSYSAIAVGLSLAQIVMGPTGKTTMTGTLVGVDVDAAQKVWMTFQALGNVAFAYSYAIILIEIQDTLRSPPAENKTMRRATMMGISTTTGFYMLCGCLGYAAFGNAASGNILTGFGFYEPFWLVDFANACIVVHLVGGFQVFCQPLFAAVEGAVAARYPGXDARVRRRGXLNVFRLVWRTAFVAVITLLAILMPFFNSILGILGSIAFWPLTVFFPVEMYIRQRQVRRFSTKWIALQSLSFVCFLVTAASCAASVQGVVDSLKTYVPFKTRS

SEQ ID NO: 864 - protein, 486 aa, Zea mays
MTQQDVEMAARHGTGARGPGLGPRLENGAGGETLDDDGKKKRTGTVWTASAHIITAVIGSGVLSLAWSTAQLGWVVGPLTLMIFALITYYTSSLLADCYRSGDQLTGKRNYTYMDAVAAYLGRWQVLSCGVFQYVNLVGTAVGYTITASISAAAVHKANCFHNKGHAADCSTYDTMYMVVFGIVQIFFSQLPNFSDLSWLSIVAAIMSFSYSSIAVGLSLARTISGRSGTTTLTGTEIGVDVDSAQKVWLALQALGNIAFAYSYSMILIEIQDTVKSPPAENKTMKKATLMGVTTTTAFYMLAGCLGYSAFGNAAPGNILTGFGFYEPYWLIDFANVCIVVHLVGAYQVFSQPIFAALETAAAKRWPNARFVTREHPLVAGRFHVNLLRLTWRTAFVVVSTVLAIVLPFFNDILGFLGAIGFWPLTVYYPVEMYIRQRRIQKYTSRWVALQLLSFLCFLVSLASAVASIEGVTESLKHYVPFKTKS

SEQ ID NO: 865 - protein, 194 aa, Zea mays
  unsure (1)..(194): unsure at all Xaa locations
LLLSQLPNFNSISAVSIAAAVMSLSYSTIAWGASVHKGKLPDVDYEVLAAAATASEKALSYMAALGDVAFAYAGHNVVLEIQATIPSTPETPSKKPMWRGVVVAYAMVAACYFPVSLLGYWAFGNQVDDNVLVTLSKPRWLIALANAMVVVHVIGSYQIFAMPVFDMMETVLVKKLHFPPGLALRLIARSTYVX

SEQ ID NO: 866 - protein, 467 aa, Zea mays
MDKSAVADDVERGDYEEEHERRGTVWTATAHIVTAVIGSGVLALAWSVAQLGWVAGTLALAGFACVTYYTSTLLANAYRAPHPVTGDRNRTYMDAVRSYLSPREVFMCGIAQYVNLWGTMVGYTITATISMAAIRQSNCFRRSGAGAQCDAPGTVLMLAFGVVQVVLSQFPGLEHITWLSVVAAVMSFAYSFIGLGLSVGQWVSHGGGLGGRIAGAAAASPTRKLWNVLLALGNIAFAYTFAEVLIEIQDTLKSPPPENRTMKKAAMYGIGATTIFYISVGCAGYAAFGSDAPGNILTAGGLGPFWLVDIANMCLILHLIGAYQVYAQPIFASVERWAASRWPEAKFISSAYTVSIPLMQRGSVTVAPYKLVLRTVLVAATTVVALMIPFFNAVLGLLGAFSFWPLTVYFPISMHIAQDKITRGTKWYLLQALSMVCLMISVAVGIGSVTDIVDSLKVSSNPLKTVS

SEQ ID NO: 867 - protein, 455 aa, Zea mays
  unsure (1)..(455): unsure at all Xaa locations
MTQQDVEMAARHGTGADGAGFYPQPRNGGGGETLDDDGKKKRTGTVWTASAHIITAVIGSGVLSLAWSTAQLGWVVGPLTLMIFALITYYTSSLLADCYRSGDQLTGKRNYTYMDAVAAYLGRWQVLSCGVFQYVNLVGTAVGYTITASISAAAVHKANCFHNKGHAADCSTYDTMYMVVFGIVQIFFSQLPNFSDLSWLSIVAAIMSFSYSSIAVGLSLARTISGRSGTTTLTGTEIGVDVDSAQKVWLALQALGNIAFAYSYSMILIEIQDTVKSPPAENKTMKKATLMGVTTTTAFYMLAGCLGYSAFGNAAPGNILTGFGFYEPYWLIDFANVCIVVHLVGAYQVFSQPIFAALETAALKRWPNDRFVTREHPLVXXVRFHVSLLRLTWRTAFVVVSTVLAIALPFFNDILGFLGDIEFWPLTLDYPVXMDIPEGPERKYTWRGXGGVRWX

SEQ ID NO: 868 - protein, 484 aa, Zea mays; identical to SEQ ID NO: 355

SEQ ID NO: 869 - protein, 484 aa, Zea mays; identical to SEQ ID NO: 355

SEQ ID NO: 870 - protein, 484 aa, Zea mays; identical to SEQ ID NO: 355

SEQ ID NO: 871 - protein, 523 aa, Zea mays
  unsure (1)..(523): unsure at all Xaa locations
GCTLGGHRPRVRGRVGGRVGGRVGAPRARRTLLLLHLPSSRTGVWSEASEREVATERPQRDVQIERETNRESDSWXDDDGKERRTGTVWTATAHIITAVIGSGVLSLAWAMAQLGWVAGPLTLVLFAAITFYTCGLLADCYRVGDPVTGKRNYTYTEAVKSNLGGWYVWFCGFCQYVNMFGTGIGYTITASISAAAINKSNCFHWHGHDADCSQNTSAYIIGFGVVQVIFSQLHNFHKLWWLSIIAAIMSFSYSAIAVGLSLAQIVMGPTGKTTMTGTLVGVDVDAAQKVWMTFQALGNVAFAYSYAIILIEIQDTLRSPPAENKTMRRATMMGISTTTGFYMLCGCLGYAAFGNAASGNILTGFGFYEPFWLVDFANACIVVHLVGGFQVFCQPLFAGQRGRRXAARYPGXDARVRRRGXLNVFRLVWRTAFVAVITLLAILMPFFNSILGILGSIAFWPLTVFFPVEMYIRQRQVRRFSTKWIALQSLSFVCFLVTAASCAASVQGVVDSLKTYVPFKTRS

SEQ ID NO: 872 - protein, 533 aa, Zea mays
  unsure (1)..(533): unsure at all Xaa locations
MAVSHNVGSKHGVAPLEVSVEAGNGGAAEWLDDDGRPRRTGTFWTASAHIVTAVIGSGVLSLAWAIAQLGWVAGPAAMLLFAFVTYYTATLLAECYRTGDPDTGKRNYTYMDAVRSNLGGAKVAFCGAIQYANLVGVAIGYTIASSISMQAVSRAGCFHKRGHAVPCKSSSNPYMILFGAVQILFSQIPDFDQIWWLSIVAAVMSFTYSAIGLSLGIAQTVANGGFKGSLTGISIGADVTSTQKVWHSLQAFGDIAFAYSFSNILIEIQDTIKAPPPSESKVMQKATRLSVATTTIFYMLCGCMGYAAFGDKAPDNLLTGFGFFEPFWLIDVANVAIVVHLVGAYQVFCQPIFAFVERRAAAAWPDSAFVSRELRVGPLAXXSVFRLTWRSAFVCVTTVVAMLLPFFGNVVGFLGAVSFWPLTVYFPVEMYIKQRRVPRGSTKWVCLQTLSVACLVVSIAAAAGSIADVIEALKVYHPFSSXFLLLWMCWVGPGLAWVWTYVHAAFIALRSTVVNKGGRQMQMQCEMFAWRPL

SEQ ID NO: 873 - protein, 502 aa, Zea mays
  unsure (1)..(502): unsure at all Xaa locations
DPLERPRRTGTFWTASAHIITAVIGSGVLSLAWAIAQLGWVAGPAAMLLFAFVTYYTATLLAECYRTGDPDTGKRNYTYMDAVRSNLGGAKVAFCGAIQYANLVGVAIGYTIASSISMQAVSRAGCFHKRGHAVPCKSSSNPYMILFGAVQILFSQIPDFDQIWWLSIVAAVMSFTYSAIGLSLGIAQTVANGGFKGSLTGISIGADVTSTQKVWHSLQAFGDIAFAYSFSNILIEIQDTIKAPPPSESKVMQKATRLSVATTTIFYMLCGCMGYAAFGDKAPDNLLTGFGFFEPFWLIDVANVAIVVHLVGAYQVFCQPIFAFVERRAAAAWPDSAFVARELRVGPLAXXSVFRLTWRSAFVCATTVVAMLLPFFGNVVGFLGAVSFWPLTVYFPVEMYIKQRRVPRGSTKWVCLQTLSVACLVVSIAAAAGSIADVIEALKVYHPFSSXFLLLWMCWVGPGLAWVWTYVHAAFIALRSTVVNKGGRRMQMQCEMFAWRPL

SEQ ID NO: 874 - protein, 538 aa, Zea mays
  unsure (1)..(538): unsure at all Xaa locations
CVKYLLQYISGSLCVRALTAAEPHSCSCAVYLSLVVLCRPSYCGREKGVCRPAAKHCYPXPAAMEVSSVEFGHHAAAASKCFDDDGRLKRTGTMWTASAHIITAVIGSGVLSLAWAIAQLGWVAGPTVMLLFSFVTYYTSALLADCYRSGDACTGKRNYTYMDAVNANLSGVKVWFCGFLQYANIVGVAIGYTIAASISMLAIQRANCFHVEGHGDPCNISSTPYMIIFGVVQIFFSQIPDFDQISWLSILAAVMSFTYSTIGLGLGIAQVVSNKGVQGSLTGISVGLVTPVDKMWRSLQAFGDIAFAYSYSLILIEIQDTIRAPPPSESKVMRRATVVSVAVTTFFYMLCGCMGYAAFGDNAPGNLLTGFGFYEPFWLLDVANAAIAVHLVGAYQVYCQPLFAFVEKWARQRWPKSRYITGEVDVPLPPGGRCYKLSLFRLTWRTAFVVATTVVSMLLPFFNDVVGLLGALGFWPLTVYFPVEMYIVQKKVPRWSTRWVCLQLLSVACLVITVASAAGSVAGIVSDLKVYKPFVTTS

SEQ ID NO: 875 - protein, 440 aa, Avicennia marina
SAPAHSGCDRGLCSDDHVAVEIPDTAHQISQDSWFQVGLVLTNGVNSAYVLGYSGAIMVPLGWLGGVVGLILATAISLYANALVAELHEFGGRRHIRYRDLAGFIYGRAAYNLTWGLQYVNLFMINVGYIILAGNALKAMYVLLLDDHLIKLPHFIGIAGLACGLFAMAVPHLSAMRVWLVFSTLFSLVYIVIAFALSLKDGVEAPPRDYSIMATTASRIFTAIGASANLVFAFNTGMVPEIQATVRPPVIGNMMKGLYFQFTAGVLPMYALTFIGYWAYGFEASTYLLSNVHGPVWLKAVANVSAFLQSIIALHIFASPMYEYLDTRYGIKGSALAFSNLCFRVVVRGSYLGMTTFVSALLPFLDDFMSLTGALSTFPLTFILANHMYLVAKKHELTSLQKSWHWFIVCFFGCMSVAAAAAGLRLIVVDSSHYHVFADL

SEQ ID NO: 876 - protein, 466 aa, Arabidopsis thaliana
  unsure (1)..(466): unsure at all Xaa locations
MDVPRPAFKCFDDDGRLKRSGTVWTASAHIITAVIGSGVLSLAWAIGQLGWIAGPTVMXLFSFVTYYSSTLLSDCYRTGDPVSGKRNYTYMDAVRSILGGFRFKICGLIQYLNLFGITVGYTIAASISMMAIKRSNCFHESGGKNPCHMSSNPYMIMFGVTEILLSQIKDFDQIWWLSIVAAIMSFTYSAIGLALGIIQVAANGVVKGSLTGISIGAVTXTQKIWRTFQALGDIAFAYSYSVVLIEIQDTVRSPPAESKTMKIATRISIAVTTTFYMLCGCMGYAAFGDKAPGNLLTGFGFYNPFWLLDVANAAIVIHLVGAYQVFAQPIFAFIEKQAAARFPDSDLVTKEYEIRIPGFRSPYKVNVFRAVYRSGFVVLTTVISMLMPFFNDVVGILGALGFWPLTVYFPVEMYIRQRKVERWSMKWVCLQMLSCGCLMITLVAGVGSIAGVMLDLKVXKPFKTTY

SEQ ID NO: 877 - protein, 261 aa, Vicia faba
AHIITAVIGSGVLSLAWAIAQLGWIAGPSMMLLFSFVTYYTSTLLSACYRTGDQLNGKRNYTYTDAVRAYLGGFKVKICGLVQYVNLFGVAIGYTIAASISMMAIKRSNCFHSSGGKDPCHMNGNLYMISFGIVEIFFSQIPDFDQLWWLSTLAAVMSFTYSTIGLGLGVGKVIENKGIKGSLTGITVGTVTQTQKVGRSFQALGNIAFAYSYSMILIEIQDTIKSPPSESKTMKAATLISVVVTTIFYMLCGCLGYAAFG

SEQ ID NO: 878 - protein, 471 aa, Lycopersicon esculentum
MADKPHQVFEVYGESKCFDDDGRIKRTGSVWTASAHIITAVIGSGVLSLAWATAQLGWVAGPTVLLLFSFVTYYTSALLSDCYRTGDPVTGKRNYTYMDAVRANLGGFQVKICGVIQYANLFGVAIGYTIASSISMVAVNRSNCFHKQGHHAACNVSSTPYMIMFGVMEIIFSQIPDFDQISWLSIVAAVMSFTYSTIGLGLGVAQVAETGKIEGSLTGISIGTEVTEMQKIWRSFQALGAIAFAYSYSLILIEIQDTLKSPPAEAKTMKRATLISVAVTTVFYMLCGCFGYAAFGDQSPGNLLTGFGFYNPYWLLDIANIAMVVHLVGAYQVYCQPLFAFVEKTAAEWYPDSKIITKEIDVPIPGFKPFKLNLFRLVWRAIFVIITTVISMLMPFFNDVVGILGAFGFWPLTVYFPVEMYIVQKRITKWSARWICLQILSGACLVISIAAAAGSFAGVVSDLKVYRPFQS

SEQ ID NO: 879 - protein, 467 aa, Zea mays
MAVSHNVGSKHGVAPLEVSVEAGNGGAAEWLDDDGRPRRTGTFWTASAHIVTAVIGSGVLSLAWAIAQLGWVAGPAAMLLFAFVTYYTATLLAECYRTGDPETGKRNYTYMDAVRSNLGGAKVAFCGVIQYANLVGVAIGYTIAASISMKAVRRAGCFHAHGHADPCNSSSTPYMILFGVVQILFSQIPDFDQIWWLSIVAAVMSFTYSSIGLSLGIAQTISNGGFMGSLTGISIGAGVTSTQKIWHTLQAFGDIAFAYSFSNILIEIQDTIKAPPPSESKVMQKATRLSVATTTIFYMLCGCMGYAAFGDKAPDNLLTGFGFFEPFWLIDIANVAIVVHLVGAYQVFCQPIFAFVERRAAAAWPDSAFVSQELRVGPFAVSVFRLTWRSSFVCVTTVVAMLLPFFGNVVGFLGAVSFWPLTVYFPVEMYIKQRRVPRGSTKWICLQTLSVSCLLVSVAAAASELVD

SEQ ID NO: 880 - protein, 562 aa, Zea mays
  unsure (1)..(562): unsure at all Xaa locations
MAPAPHNGVNNNHPVVPMEVSVEAGNAGAAEWLDDDGRPRRSGTFWTASAHIITAVIGSGVLSLAWAIAQLGWVAGPAAMXLLFAFVTYYTATLLAECYRTGXDPDTGKRNYTYMDAVRSNLGGAKVAFCGAIQYANLVGVAIGYTIASSISMQAVSRAGCFHKRGHAVPCKSSSNPYMILFGAVQILFSQIPDFDQIWWLSIVAAVMSFTYSAIGLSLGIAQTVANGGFKGSLTGISIGXADVTSTQKVWHSLQAFGDIAFAYSFSNILIEIQDTIKXRRPPSESKVMQKATRLSVATTTIFYMLCGCMGYAAFGDKAPDNLLTGFGFFEPFWLIDVANVAIVVHLVGAYQVFCQPIFAFVERRAAAAWPDSAFVARELRVGAXXALSVFRLTWRSAFVCVTTVVAMLLPFFGNVVGFLGAVSFWPLTVYFPVEMYIKQRRVPRGSTKWVCLQTLSVACLVVSIAAAAGSIADVIEALKVYHPFSSXFLLLWLCWGLDWPGFGRMCMQHSLRCVQLWSTREGDGCRCLHGGPYRTSERFRRPCAHAGRIPCKNTRGGARMA

SEQ ID NO: 881 - protein, 548 aa, Zea mays
  unsure (1)..(548): unsure at all Xaa locations
QARSTREHLLPALFRSDGPTRKKKFDSREGGRELVGSVGHGTRAAQRSEQQPPGRAHGGVGGGREXAGAAEWLDDDGRPRRSGTFWTASAHIITAVFGSGVLSLAWAIAQLGWVAGPAAMLLFAFVTYYTAALLAECYRTGHPETGKRNYTYMDAVRSNLGGVKVVFCGVIQYANLVGVAIGYTIASAISMKAVRRAGCFHAHGHADPCKSSSTPYMVLFGGVQILFSQIPDFDQIWWLSIVAAVMSFTYSSIGLSLGIAQTVSNGGFKGSLTGISIGAGVTSTQKIWHTLQAFGDIAFAYSFSNILIEIQDTIKAPPPSESKVMQKATRLSVATTTVFYMLCGCMGYXAAFGDNAPDNLLTGFGFYEPFWXLLDVANVAXIVVHLVGAYQVFCQPIFAFVERRAAAAWPDSAFVSRELRVGPFSXXSVFRLTWRSAFVCVTTVVAMLLPFFGDVVGLLGAVSFWPLTVYFPVEMYIKQLRVPRGSTKWICLQTLSVSCLLVSVAAAAGSIADVIAALKVYKPFSGXLRRQKVGGIYAKTIADTVLLH

SEQ ID NO: 882 - protein, 80 aa, Nicotiana tabacum
GIPFPFFGGLLGFFGGFAFAPTTYFLPCIMWLAIYKPRRWSLSWIANWICIIFGVLLMVLAPIGGLRSIIVQAQTYKFYN

SEQ ID NO: 883 - protein, 128 aa, Triticum aestivum
  unsure (1)..(128): unsure at all Xaa locations
XVIGSYQIYAMPVFDMLETFLVKKLRFKPGWPLRLIARSLYVAFTMLVGIAIPFFGGLLGFFGGFAFAPTTYFLPCIMWLAIKKPARFSMSWCINWICIIIGVLLSVLAPIGGLRSIIINYKTYQFFS

SEQ ID NO: 884 - protein, 156 aa, Triticum aestivum
  unsure (1)..(156): unsure at all Xaa locations
MGTQAAENFEPPAKDVRTDEQKKIDDWLPITSSRNAKWWYSAFHNVTAMVGAGXVLSLPYAMSELGWGPGIAVLGISWGXITLYTLWQMVXEMHQMVPGKPSHRYHELGQHAFGDKLGLWIXVVPQQLIVEVGVNIVYMVTGGRSLKKFHDVICDX

SEQ ID NO: 885 - protein, 145 aa, Triticum aestivum
  unsure (1)..(145): unsure at all Xaa locations
LVSIHPSPLRYLERSRSPERRSDRTGSDRVAMAMNTSKAATSDKQLQDIDDWLPITSSRNAKWWYSAFHNVTAMVGAGVLSLPYAMSELGWGPGVAAMILSWAITLYTLWQMVEMHECVXGKRFDRYHELGQHAFGQKLGXWIVV

SEQ ID NO: 886 - protein, 122 aa, Triticum aestivum
  unsure (1)..(122): unsure at all Xaa locations
XIYAMPVFDMIETVLVKKLKFPPGLTLRLIARTLYVAFTMFVAITFPFFGGLLGFFGGFAFAPTTYFLPCIMWLAIYKPKRFSLSWFTNWVCIVLGVCLMILSPIGGLRQIILDSKTYKFYS

SEQ ID NO: 887 - protein, 102 aa, Triticum aestivum
FKPGWPLRLIARSLYVAFTMLVGIAIPFFGGLLGFFGGFAFAPTTYFLPCIMWLAIKKPSRFSMSWCINWICIIIGMLLSVLAPIGGLRSIIINYKTYQFFS

SEQ ID NO: 888 - protein, 507 aa, Anopheles gambiae str. PEST
RAAHTQTLLPYLRHRIGSSQVKRSQEETQPYTMTVDKGHTNTAFVGDEAINGKKPPQAKTIDPNMYTLEIQEKKPGLETEYDPFQHRLVEHPTTNNETLIHLLKGSLGTGILAMPNAFHHAGWTVGVVGTLLIGLLCTYCIHLLIKAEYELCKRKRVPSLNYPAVTQTALLEGPDALKPLSKIIIHVVNVFLLIYQLGTCCVYVVFVSSNIKAIADYYTETDTDVRLYMLIILLPLILINWVRNLKFLAPFSTIANFVTLVSFGIILYYIFREPISFENRDQVGTMSGFALFFGTVLFALEAIGVILPLENEMKTPKKFGGNFGVLNKAMILIVTLYVGMGFFGYLNYGSAIKGSITLNLPEEEILAQCVKGMLAFAIYITHGLACYVAIDITWNDYLKKNLGDSPRSVFYEYIARTVLVLITFLLAVAIPNLELFISLFGALCLSALGIAFPALIETCTYWHYRKGMAKVWMVVRNSVIGVVAILGLVIGTSTSMIEIIHTFGHDD

SEQ ID NO: 889 - protein, 491 aa, Anopheles gambiae str. PEST
MKNEREPLLGHAADGGSNGSGLDVAEHQRLLARPDLRSSPENMIVDPSNDTDSLVSKEDPTYGSSSGEPYEPSMHRTLEHPTTNLDTMIHLLKGNIGTGILAMPDAFKHAGLYVGLFGTLFMGAVCTHCMHMLVNCSHELCRRLQVPSLSFADVCQRAFESGPIGLRRYSKLATNLINMFLVITQLGFCCVYFVFVAANLREVIAHYFFDLHTRIYLLLLLIPMVLLNLVKNLKYLTPISLIAALLTVTGLSCTFYYMLQDLPNTHTVKPYSSWAQLPLYFGTAIYAFEGIGMVLPLENNMKTPEDFGGWSGVLNTGMVIVACLYTAVGFFGYLKYGDSVKGSITLNLPGDEFIAQLVRIMMALAIFFSYSLQFFVPMSILNPHIRRRLHTEQSRLIGEYLARVSLVVFTFILAAMIPNLGAVISLVGAVSSSTLALIFPPLIEIVTFWPDKLGRHYWVLWKDIAIMVFGILGFIFGTYTSVAQILNPDLV

SEQ ID NO: 890 - protein, 489 aa, Cucumis sativus
MLGQKQAEEAIVPTTANEVEHGGGKEEGEEADGGEQPQNSVFQMKNLLWHGGSAWDAWFSCASNQVAQVLLTLPYSFAQFGMLSGIIFQIFYGLIGSWTAYLISVLYIEYRSRKEKENVNFKNHVIQWFEVLDGLLGPHWKALGLAFNCTFLLFGSVIQLIGCASNIYYINDHLDKRTWTYIFGACCATTVFIPSFHNYRIWSFLGLGMTTYTAWYLAARALIHGQTEGVTHSGPTKLVLYFTGATNILYTFGGHAVTVTVEIMQSDVETQKFKYIYLMATLYVFTLTLPSASAVYWAFGDELLNHSNAFSLLPKNRFRDAAVILMLIHQFITFGFACTPLYFVWEKVIGMHDTKSLCLRALVRLPVVVPIWFLAIIFPFLGPINSAVGALLVSFTVYIIPAAAHMLTYRKASAKQNAAEKPPFFLPSWTAMYVLNSFIVVWIFVFGFGFGGWATITNFVRQINSFGLFAKCYQCKPSHPPAPPPTHRH

SEQ ID NO: 891 - protein, 484 aa, Medicago truncatula
MLPQKQGEEAIVSSFNETDQQEGVVGREEEVEDHSFSVKNFLWHGGSVWDAWFSCASNQVAQVLLTLPYSFSQLGMLSGILLQVFYGILGSWTAYLISVLYVEYRSRKEKENVNFKNHVIQWFEVLDGLLGPYWKALGLAFNCTFLLFGSVIQLIACASNIYYINDNLDKRTWTYIFGACCATTVFIPSFHNYRIWSFLGLGMTTYTAWYLTIASIVHGQAENVTHTGPKKLVLYFTGATNILYTFGGHAVTVEIMHAMWKPQKFKYIYLMATLYVFTLTIPSATAVYWAFGDELLNHSNAFSLLPKNGWRDGAVILMLIHQFITFGFACTPLYFVWEKVIGMHDTRSICLRALARLPVVIPIWFLAIIFPFFGPINSAVGALLVSFTVYIIPSAAHMLTYRKASARKNAAEKPPFFMPSWTAMYIFNAFIVIWVLVVGFGFGGWASMTNFIRQIDTFGLFAKCYQCKPPPVMAAAPPPHALHH

SEQ ID NO: 892 - protein, 479 aa, Medicago truncatula
MLSEKQGEETMMSSLNETIELNEEREEEKGASPGSGFKNFLWHGGSVYDAWFSCASNQVAQVLLTLPYSFSQLGMISGIIFQVFYGLMGSWTAYLISILYVEYRSRKEKENVSFKNHVIQWFEVLEGLLGPYWKAIGLAFNCTFLLFGSVIQLIACASNIYYINDHLDKRTWTYIFGACCATTVFIPSFHNYRIWSFLGLGMTTYTAWYMTIAAIVHGQVENVVHSGPKKMVWYFTGATNILYTFGGHAVTVEIMHAMWKPQKFKAIYFFATLYVFTLTLPSAIAVYWAFGDQLLDHSNAFSLLPRNAWRDAGVILMLIHQFITFGFACTPLYFVWEKVIGMHDTKSIFLRALARLPVVIPIWFLAIIFPFFGPINSAVGALLVSFTVYVIPASAHMLTYRSASARQNAAEKLPKVIPSWTLMYVINAFVVIWVTIVGFGFGGWASMTNFIKQVDTFGLFAKCYQCPPKLPASNHTMHH

SEQ ID NO: 893 - protein, 482 aa, Medicago truncatula
MLSQNQAEEAIVTNMNETEQEGGSSLEEIAEDQSMFNFKSFLWHGGSVWDAWFSCASNQVAQVLLTLPYSFSQLGMVSGIVFQIFYGLIGSWTAYLISVLYVEYRARKEKENVNFKNHVIQWFEVLDGLLGRYWKALGLAFNCTFLLFGSVIQLIACASNIYYINDKLDKRTWTYIFGACCATTVFIPSFHNYRIWSFLGLGMTTYTAWYMAIAAIVNGQIENVVHSGPTKLVLYFTGATNILYTFGGHAVTVEIMHAMWKPQKFKYIYFLATLYVFTLTIPSAVAVYWAFGDELLNHSNAFSLLPKNGFRDAAVILMLIHQFITFGFACTPLYFVWEKVIGMHDTKSICLRALVRLPVVIPIWFLAIIFPFFGPINSAVGALLVTFTVYIIPALAHMLTYRTASARKNAVEKPPSFLPSWTAVYVLNAFIVVWVLVVGFGFGGWASMTNFIRQIDTFGLFAKCYQCKPPTPPQAPSPHARH

SEQ ID NO: 894 - protein, 473 aa, Populus tremula x Populus tremuloides
MSNQKHGEEAMVSSFNDTEHEEKEEVSKDESGFRLKSLLWHGGSVYDAWFSCASNQVAQVLLTLPYSFSQMGMLSGIILQIFYGFLGSWTAYLISVLYVEYRSRKEKENVNFKNHVIQWFEVLDGLLGPTWKAVGLAFNCTFLLFGSVIQLIACASNIYYIDDKFDKRTWTYIFGACCATTVFIPSFHNYRIWSFLGLGMTTYTAWYMTIASLVHGQVDGVTHSGPAKAVLYFTGATNILYTFGGHAVTVEIMHAMWKPQRFKYIYLLATLYVFTLTLPSAAATYWAFGDQLLTHSNAFSLLPRTGWRDAAVILMLIHQFITFGFACTPLYFVWEKVIGMHDTKSILLRALCRLPVVIPIWFFAIIFPFFGPINSAVGALLVTFTVYIIPALAHMLTYRSASARQNAVEKPPVFLPSWTAMYVLNAFIVVWVLVVGFGLGGWASMSNFIKQVDTFGLFAKCCQCPRSAAAKHH

SEQ ID NO: 895 - protein, 465 aa, Drosophila melanogaster
MPVMTKNGHSNSAYVADHPDKLELAEKGQKNKAVVAKDPDYNPYHHRDVEHPTTNSETLFHLLKGSLGTGILAMPNAFRNSGYITGSIGTIVIGFICTFCIHQLVKAQYELCRRKKMPSMNYPMVAETAMGEGPKCFRVFAPYIGTVVNTFLLIYQLGTCCVYVVFVASNIKAIVDAVADTSIDVRLCMIIILLPLILINWVRNLKYLAPFSTLANAITMVSFGIICYYIFREPVTTEGKDAFGKPSNFPLFFGTVLFALEAIGVILPLENEMKTPQKFGGSCGVLNVSMVLIVFLYVGMGLFGYLNYGSAVLGSITLNMPEHEVLSMCVKGMLAFAIYITHGLACYVAIDITWNDYVAKRLGAQRNALFWEYAVRTGLVLITFLLAVAIPNLELFISLFGALCLSALGLAFPALIQICTHWYNTKGFAKVWLVLSNFVLIIVGILGLVIGTYTSLKEIVLTFSE

SEQ ID NO: 896 - protein, 462 aa, Drosophila melanogaster
MTKNGHSNSAYVADHPDKLELAEKGQKNKAVVAKDPDYNPYHHRDVEHPTTNSETLFHLLKGSLGTGILAMPNAFRNSGYITGSIGTIVIGFICTFCIHQLVKAQYELCRRKKMPSMNYPMVAETAMGEGPKCFRVFAPYIGTVVNTFLLIYQLGTCCVYVVFVASNIKAIVDAVADTSIDVRLCMIIILLPLILINWVRNLKYLAPFSTLANAITMVSFGIICYYIFREPVTTEGKDAFGKPSNFPLFFGTVLFALEAIGVILPLENEMKTPQKFGGSCGVLNVSMVLIVFLYVGMGLFGYLNYGSAVLGSITLNMPEHEVLSMCVKGMLAFAIYITHGLACYVAIDITWNDYVAKRLGAQRNALFWEYAVRTGLVLITFLLAVAIPNLELFISLFGALCLSALGLAFPALIQICTHWYNTKGFAKVWLVLSNFVLIIVGILGLVIGTYTSLKEIVLTFSE

SEQ ID NO: 897 - protein, 221 aa, Mus musculus
MEAGGVADSFLSSACVLFTLGMFSTGLSDLRHMQRTRSVDNIQFLPFLTTDVNNLSWLSYGVLKGDGTLIIVNSVGAVLQTLYILAYLHYSPQKHGVLLQTATLLAVLLLGYGYFWLLVPDLEARLQQLGLFCSVFTISMYLSPLADLAKIVQTKSTQRLSFSLTIATLFCSASWSIYGFRLRDPYIAVPNLPGILTSLIRLGLFCKYPPEQDRKYRLLQT

SEQ ID NO: 898 - protein, 221 aa, Mus musculus
MEAGGVADSFLSSACVLFTLGMFSTGLSDLRHMQRTRSVDNIQFLPFLTTDVNNLSWLSYGVLKGDGTLIIVNSVGAVLQTLYILAYLHYSPQKHGVLLQTATLLAVLLLGYGYFWLLVPDLEARLQQLGLFCSVFTISMYLSPLADLAKIVQTKSTQRLSFSLTIATLFCSASWSIYGFRLRDPYITVPNLPGILTSLIRLGLFCKYPPEQDRKYRLLQT

SEQ ID NO: 899 - protein, 221 aa, Rattus norvegicus
MEAGGVADSFLSSACVLFTLGMFSTGLSDLRHMQRTRSVDNIQFLPFLTTDVNNLGWLSYGVLKGDGTLIIVNTVGAVLQTLYILAYLHYSPQKHAVLLQTATLLAVLLLGYGYFWLLVPDLETRLQQLGLFCSVFTISMYLSPLADLAKIIQTKSTQRLSFSLTIATLLSSTSWSIYGFRLKDPYITVPNLPGILTGFIRLVLFYKYPPEQDTKYRLLQT

SEQ ID NO: 900 - protein, 236 aa, Anopheles gambiae str. PEST
ALLPRQQMDGIMSKGSLASLATVATVLQFLTGTVICNRYIRKKSTGDTSAFPFISGFLSCFMWLKYGVLTEESTLILVNFIGSALFFSYTVVFFIFCVNKREVIRQMMVISCIILSATLYTLFETDDEKSIRVIGLLCCCLAVLFFASPLTMLAHVIRTQNTDSLPFPIIMASFFVCLLWTAYGVLIGDRFIQIPNLLGGILAGIQLTLYVIYPKKKASFSGGPRYSPLVSENPIL

SEQ ID NO: 901 - protein, 123 aa, Dianthus caryophyllus
MITIHHPWVFAFGLLGNFISFMVFLAPLPTFIRVYKKKSTEGFQSFPYVVAIFSAMLWIYYALLKGNSLLLITVNVTGVIIETIYVIIFITYAPRQARISTMKLLLFMNFGGFCMIVPRPRPR

SEQ ID NO: 902 - protein, 247 aa, Glycine max
MDVAHFLFGIFGNASALFLFLAPVITFKRIIKNRSTEKFSGIPYVMTLLNCLLSAWYGLPFVSPHNILVSTVNGTGSFIEIIYVLIFIVLAPRKEKAKILGLFTFVLSVFSAVVFVSLFALHGNSRKLFCGFAAAIFSIIMYGSPLSIMRLVIKTKSVEFMPFFLSLFVFLCGTSWFIFGLLGRDPFVAVPNGVGSALGTMQLILYFIYRDNKGVPRKQAPTEEESMEMGDAKPQQGKQSNANGIQG

SEQ ID NO: 903 - protein, 247 aa, Glycine max
MDVAHFLFGIFGNASALFLFLAPVITFKRIIKNRSTEKFSGIPYVMTLLNCLLSAWYGLPFVSPHNILVSTVNGTGSLIEIIYVLIFIVLAPRKEKAKILGLFTFVLSVFSAVVFVSLFALRGNSRKLFCGFAAAIFSIIMYGSPLSIMRLVIKTKSVEFMPFFLSLFVFLCGTSWFIFGLLGRDPFVAVPNGVGSALGTMQLILYFIYRDNKGVTRKQAPTEEESMEIGDVKPQQGKQSNANGIQG

SEQ ID NO: 904 - protein, 248 aa, Glycine max
  unsure (1)..(248): unsure at all Xaa locations
LLLGLSDYLLLDCNWTTRQCLILQXFTFKRIIKNRSTEKFSGIPYVMTLLNCLLSAWYGLPFVSPHNILVSTVNGTGSFIEIIYVLIFIVLAPRKEKAKILGLFTFVLSVFSAVVFVSLFALHGNSRKLFCGFAAAIFSIIMYGSPLSIMRLVIKTKSVEFMPFFLSLFVFLCGTSWFIFGLLGRDPFVAVPNGVGSALGTMQLILYFIYRDNKGVTRKQAPTEEESMEIGDVKPQQGKQSNANGIQG

SEQ ID NO: 905 - protein, 247 aa, Glycine max
  unsure (1)..(247): unsure at all Xaa locations
MDVAHFLFGIFGNASALFLFLAPVITFKRIIKNRSTEKFSGIPYVMTLLNCLLSAWYGLPFVSPHNILVSTVNGTGSFIEIIYVLIFIVLAPRKEKAKILGLFTFVLSVFSAVVFEALFALHGNSRKLFFGFASAIFSIIMYGSPLSITRXVTHLLQYLMVLVLLWGQWFLCGTSWFIFGLLGRDPFVAVPNGVGSALGTMQLILYFIYRDNKGVPRKQAPTEEESMEMGDAKPQQGKQSNANGIQG

SEQ ID NO: 906 - protein, 268 aa, Medicago truncatula
  unsure (1)..(268): unsure at all Xaa locations
MAISHNTLAFTFGMLGNVISFLVFLAPISTFYRIYKKKSTEGFQSLPYLVALFSSMLWLYYALLKKDAFLLITINSFGCVVETIYIILYIIYAPRDARNLTFKLLSAMNVGSFALILIVTNYAVHGPLRVQVLGWVCVSLSVSVFAAPLSIVAQVVRTKSVEFMPFNLSFTLTLSATMWFGYGFFLKDICIXLPNVLGXVLGLLQMLLYAIYRNGGEKAMKKEKKAPIEPPKSIVIETQLEKIEQEKKNKDDDNEEKDKSEEPIGCGV

SEQ ID NO: 907 - protein, 255 aa, Medicago truncatula
MAMTRESWAFVFGIIGNIISFAVFLSPLPTFYVIFKKKSAEGFQALPYVVALFSAMLWIYYAFVKRESALLLITINTFGIVVESAYIIMFLIYAPKKQRLSTIKLLLLLNVFGFGAMLLSTLYLSKGAKRLAIIGWICLVFNISVFAAPLFVISKVIRSRSVEYMPFFLSFFLTINAVMWFFYGLLLRDYYVALPNTLGFVFGIIQMVVYLIYRNATPVVEAPMKGQELSGGHIIDVVKIGTDSNRAGGGAGSKV

SEQ ID NO: 908 - protein, 273 aa, Oryza sativa (japonica cultivar-group)
MEHIARFFFGVSGNVIALFLFLSPVVTFWRIIKKRSTEDFSGVPYNMTLLNCLLSAWYGLPFVSPNNILVTTINGTGSVIEAIYVVIFLIFAERKARLKMMGLLGLVTSIFTMVVLVSLLALHGQGRKLFCGLAATIFSICMYASPLSIMRLVIKTKSVEFMPFLLSLSVFLCGTSWFIYGLLGRDPFIAIPNGCGSFLGLMQLILYAIYRNHKGATPAAAAGKGDAADEVEDAKKAAAAVEMADAKTNKVVADDADADADGKSADDKVASQV

SEQ ID NO: 909 - protein, 292 aa, Oryza sativa
MEHIARFFFGVSGNVIALFLFLSPVVTFWRIIKKRSTEDFSGVPYNMTLLNCLLSAWYGLPFVSPNNILVTTINGTGSVIEAIYVVIFLIFAERKARLKMMGLLGLVTSIFTMVVLVSLLALHGQGRKLFCGLAATIFSICMYASPLSIMRLVIKTKSVEFMPFLLSLSVFLCGTSWFIYGLLGRDPFIAIPNGCGSFLGLMQLILYAIYRNHKGATPAAAAGKGDAADEVEDAKKAAAAVEMADAKTNKVVADDADADARWQVGGRQGRQPGVTRSGPRTAPGRHARKNAA

SEQ ID NO: 910 - protein, 273 aa, Triticum aestivum
  unsure (1)..(273): unsure at all Xaa locations
MEDVAKFLFGISGNVIALFLFLSPVPTFWRIIRNKSTEEFSGVPYNMTLLNCLLSAWYGLPFVSPNNVLVSTINGVGAAIETVYVVIFLIFAERRAKVRMLGLLSVVTAIFATVVLVSLLALHGKARTVFCGLAATVFSICMYASPLSIMRLVIKTKSVEYMPFLLSLSVFLCGTSWFIYGLLGLDPFIYIPNGCGSFLGLMQLILYAIYRKNKGPAAGAGKGEDADEADEVEDAKKAAAAVEMGEAKIXXVDDDTRXSSTMPAVVDKVAAHV

SEQ ID NO: 911 - protein, 275 aa, Triticum aestivum
  unsure (1)..(275): unsure at all Xaa locations
MEHIARFFFGVSGNVIALFLFLSPVVTFWRIIKRKSTEDFSGVPYNMTLLNCLLSAWYGLPFVSPNNILVTTINGAGSVIEAIYVVIFLIFAERKAKIRMLGLLSVVTTIFATVVLVSLLALHGRARTVFCGLAATVFSICMYASPLSIMRLVIKTKSVEYMPFLLSLSVFLCGTSWFIYGLLGLDPFIYIPNGCGSFLGLMQLILYAIYRKNKGPAPAPAPARGRTXDEADEVEDAKKAAAAVEMGEAKIXXVDDDTRRRRRCGPSVDKVAAQV

SEQ ID NO: 912 - protein, 293 aa, Triticum aestivum
  unsure (1)..(293): unsure at all Xaa locations
MEHIARFFFGVSGNVIALFLFLSPVVTFWRIIKRKSTEDFSGVPYNMTLLNCLLSAWYGLPFVSPNNILVTTINGAGSVIEAIYVVIFLIFAERKAKIRMLGLLSVVTTIFATVVLVSLLALHGRARTVFCGLAATVFSICMYASPLSIMRSVIKSMGVADISILLSPSAFLRGAVGDHYGLLGLDPFIYIPNGCGSFLGLMQLMLYAIYRKNKGTRPRAAAGKGDEAEEVEDATKAAAAAEMGEAKIXXVDDXEPAXSTMTAVVDKLAALLWQAACRRELAWSVSSKSAQLN

SEQ ID NO: 913 - protein, 264 aa, Zea mays
MEHIARFFFGVSGNVIALFLFLSPVVTFWRVIRKRSTEDFSGVPYNMTLLNCLLSAWYGLPFVSPNNILVSTINGTGSVIEAIYVVIFLIFAVDRRARLSMLGLLGIVASIFTTVVLVSLLALHGNARKVFCGLAATIFSICMYASPLSIMRLVIKTKSVEFMPFLLSLAVFLCGTSWFIYGLLGRDPFIIIPNGCGSFLGLMQLILYAIYRKNKGPAAPAGKGDAAAEVEDTKKVAAAVELADATTNKAADAVGGDGKVASQV

SEQ ID NO: 914 - protein, 263 aa, Zea mays
MEDVVKFVFGVSGNVIALFLFLSPVPTFWRIIRRKSTEDFSGVPYSMTLLNCLLSAWYGLPFVSPNNMLVSTINGAGAAIEAVYVVIFLAFASRRTRLRMLGLASAVSAAFAAVALASMLALHGQGRKLMCGLAATVCSICMYASPLSIMRLVIKTKSVEFMPFLLSLAVFLCGTSWFIYGLLGRDPFIIIPNGCGSFLGLMQLILYAIYRKNKGPAAPAGKGDAAAEVEDTKKVAAAVELADATTNKAADAVGGDGKVASQV

SEQ ID NO: 915 - protein, 265 aa, Zea mays
  unsure (1)..(265): unsure at all Xaa locations
MEHIARFFFGVSGNVIALFLFLSPVVTFWRVIRKRSTEDFSGVPYNMTLLNCLLSAWYGLXPFVSPNNILVSTINGTGSVIEAIYVVIFLIFAVDRRARLSMLGLLGIVASIFTTVVLVSLLALHGNARKVFCGLAATIFSICMYASPLSIMRLVIKTKSVEFMPFLLSLAVFLCGTSWFIYGLLGRDPFIIIPNGCGSFLGLMQLILYAIYRKNKGPAAPAGKGDAAAEVEDTKKVAAAVELADATTNKAADAVGGDGKVASQV

SEQ ID NO: 916 - protein, 297 aa, Zea mays
  unsure (1)..(297): unsure at all Xaa locations
MEDVVKFVFGVSGNVIALFLFLSPVPTFWRIIRRKSTEDFSGVPYSMTLLNCLLSAWYGLPFVSPNNMLVSTINGAGAAIEAVYVVIFLAFASRRTRLRMLGLASAVSAAFAAXVALASMXLALHGQGRKLMCGLAATVCSICMYASPLSIMRLVVKTKSVEYMPFLLSLAVFLCGTSWFVYGLLGRDPFVAIPNGCGSFLGAVQLVLYAIYRDSXXSGGKQQAGDDVERAASDAKSSKKVADDVGGKEDRRSSMELATFSFGARAYVSSPRVVCVCVYYTRSACCTVLPLQCVQVI

SEQ ID NO: 917 - protein, 273 aa, Zea mays
  unsure (1)..(273): unsure at all Xaa locations
MEHIARFFFGVSGNVIALFLFLSPVVTFWRVIRKRSTEDFSGVPYNMTLLNCLLSAWYGLAVXVSPNNILXVSTINGTGSVIEAIYVVIFLIFAVDRRARLSMLGLLGIVASIFTTVVLVSLLALHGNAXRKVFCGXLAATIFXSICMYASPLSIMRLVIKTKSVEFMPFLLSLAVFLCGTSWFIYGLLGRDPFIIIPXNGCXGASLGLMQLILYAIYRKNKGPAAPGRQGRGPAAAEVEDTKKVAAAVELADATTNKAADAVGGDGKVASQV

SEQ ID NO: 918 - protein, 298 aa, Zea mays
  unsure (1)..(298): unsure at all Xaa locations
XPYNXTYMNHIMRSWYGLPFVSPNNILVSTINGTGSVIEAIYVVIFLIFAVDRRARLSMLDITGLVASIFTTVVLVSLLALHGNARKVFCGLAATIFSICMYASPLSIMRLVIKTKSVEFMPFLLSLAVFLXSGTSWFIYGLLGRDPFIIIPNGCGSFLGLMQLILYAIYRKNKGPAAPAGKGDAAAVVEDTKKVAAAVELADATTNKVASQDLLSSGTGRNILNEAAYXVSLSVKHIGVGFCGLLRLLLLSSPSLPGGYPQACSSFHSDSGTAVARYSALKLSLQSVFFYSISLLLL

SEQ ID NO: 919 - protein, 219 aa, Lilium longiflorum
VEQFSPVPYLATLLNCMLWVVYGLPLVHPHSTLVLTINGLGLIIELTYVLLFLLYSNGRARIRVLAMLLTEIVFVGLITVIVLSTAHTLVTRSLIIGVLCVFFGTMMYAAPLSVMKLVIQTKSVEYMPLFLSVASFLNGICWTTYALIRFDLFITIPNALGTMFAVAQLILHAMYYKSTKIQMEAQKRKLEMGFEEVMAPVENTEKIRGASQTGKYPPV

SEQ ID NO: 920 - protein, 355 aa, Caenorhabditis elegans
MFEIFTQGFSLLNLLSILAFFTTVGLFFCGIPICRQIWKRKDTKEISGAPFLMGVVGGCCWMTYGWLKNDGTVKWVTGCQVILYTTYTIFYWCMTKKKLYISLKVLGVIGICTSLVLAVHFFGMKIFHPLGIVCLTLNIADFAAPLGGIRVVIRRWATSTLPLPLCIANFLVSTEWFLYGLLKNDFYLIFPNGVGSLLAFIQLLLFIVLPRKPGQRAPIVRLWLWIRGVRVEETKEIVAELGECDEKDDKKMNRAQRWSQKIKMNVSTVAEELENVIYQLPTKDQFAYTHKIGDEDSSSEKTVETVDETKKAPVTAVDKLKDADRERKMRNALRAAQDARENALRRTISSPDLSE

SEQ ID NO: 921 - protein, 233 aa, Caenorhabditis elegans
MDTFFPIIFSTELKKPICLQIYRQGHVGDISGFPFLMGTLVLPFWLRYGFLRNDVMLISINCAGIPIAVFNAMFFLYFSKPKKYYMTQLSIVTIIILTMLMLIHFNPNVQFLGFVCIVLNLITFGSPLAGLRVVLRDREVITLPFVLCLVQLIVQCLWNLYGILIQDFFLVIPTAVGIMISLVQLSLFLIFPRKRDGYSPMAKVARCVFGSSNNRKEVPDEPQKIVVESNTVY

SEQ ID NO: 922 - protein, 299 aa, Caenorhabditis elegans
MLEVVLQVLSISAITTTIALFFCGIPICMQIRRQGAVGDISGVPFLMGVLGGSFWLRYGLLKMDYVMIIVNVVGVACMAFYCVFFLIYSLPKKTFTCQLILVTSTIGGMVLWIALKPNLDYLGVICMTFNIMNFGAPLAGLGVVLKNREVSTLPLPMCVANFLVSSQWCLYGNLVSDIYIIIPNGIGMFLAIVQLALFVVLPIRENEKSPLEKLASWFTGRDSKVKDLERGDCIVSSPPSSPQKVPNETRSDVEDKFDKLMAETSSTIPSDSRRGSMGSPPSYKSRSSSDPDLSSIQSP

SEQ ID NO: 923 - protein, 225 aa, Caenorhabditis elegans
MTTSLGQTILPYLSFTALSSTVAFFLCGLQICHRIKTRGSSEGTSPAPFLLSFLSCGLFIQYGLLKDDDVITYCNGIGCFLQACYLMYFYYMTRNRRFLNKVISIELGIIGIVVYWVAHSTNSHLTKTTYVGNYCIFLNICSVAAPLFDIGKVVRNKSSESLPLPLCVACFVVCLQWMFYGYIVDDIVILVPNVIATVISILQLSLFIIYPGAPAGVLPQKYEHI

SEQ ID NO: 924 - protein, 116 aa, Pinus pinaster
TVFTVILYGSPLSVIRLVIHTKSVEFMPSFYFSLFAFLGSVLWMVYGALSGDILIMAPNFVGIPLGLSQMALYCIYWNNSPVRVEATKLEAGGELKSIEQNIKEDIELYTEDIEKA

SEQ ID NO: 925 - protein, 66 aa, Pinus pinaster
TVFTVILYGSPLSVIRLVIHTKSVEFMPSFYFSLFAFLGSVLWMVYGALSGDILIMAPNFVGIPLG

SEQ ID NO: 926 - protein, 226 aa, Drosophila melanogaster
MSAVAYDSLLSTTAVISTVFQFLSGAMICRKYIQKKSTGDSSGVPFICGFLSCSFWLRYGVLTNEQSIVLVNIIGSTLFLVYTLIYYVFTVNKRACVKQFGFVLTVLVVVIVYTNRLEDQRDRMIHVTGIVCCIVTVCFFAAPLASLLHVIRAKNSESLPLPLIATSFVVSLQWLIYGILISDSFIQIPNFLGCILSLLQLGLFVLYPPRSYSGHGYKLVEQAVPF

SEQ ID NO: 927 - protein, 226 aa, Drosophila melanogaster
MSAVAYDSLLSTTAVISTVFQFLSGAMICRKYIQKKSTGDSSGVPFICGFLSCSFWLRYGVLTNEQSIVLVNIIGSTLFLVYTLIYYVFTVNKRACVKQFGVCSDCSGGGHCLHQSAGRSARSNDTRHRNCVLHRDRVFFAAPLASLLHVIRAKNSESLPLPLIATSFVVSLQWLIYGILISDSFIQIPNFLGCILSLLQLGLFVLYPPRSYSGHGYKLVEQAVPF

SEQ ID NO: 928 - protein, 637 aa, Plasmodium yoelii yoelii
MGIMKRLPLQILLLIFFWCHINGKNGGDIWALNALSIDDKQNRDDKPNGDTKSSGNETERGEVKEHTVVSGNKKEQTNTVTSKPVEIEVEKNGKINDNKNGTPGNSNTVNSNTANSNTANSNTANSNSANSNSANSNSANSNSANSNSANSNPVNSNNSVSANNPNDKSTPSPSKHAFIQNIAEVPSNKEIEKKEGVTSNNEQGNTPKPEEKEKTDKAEEKGKETKVEEKGKESKVEEKGKESKVEEKGKETKVEEKGNEPSKDTEESVVKEITPKSEEKKNDNNISGSTSSNTVSSNSNDKKVENMINVSNNNSLNNEDVINISKEENNSDLYFLKTLSIGSSIFMQLVLLPSVFKILKKKSTGESDGLTYVVLFFSSFLWLVYGILLNNSAIIFPNSVGLLLGLFYSIIYHVNCKNMWLKHKLYSYYKTCGSICFMLYIFLYILSYEQYELFVGFIAFVSSIVNFGAPLSYIQTVIKKRNSSLIPLEISIGSLVCSFLWLTYGFILKDVFLITPNLCGFVLSILQIALILLYSNKEVLSNMDTEIAYNESNNNNNNSNTIIQDNNVFFNEFNLDDDFKITEVPTNLNNSIFDTPYDETSPLTGHFDIQFKHNHLDRQNYLNNSENKKNNNHSVPF

SEQ ID NO: 929 - protein, 221 aa, Papio anubis
MEAGGFLDSLIYGACVVFTLGMFSAGLSDLRHMRMTRSVDNVQFLPFLTTEVNNLGWLSYGALKGDRILIVVNTVGAALQTLYILAYLHYCPRKRVVLLQTATLLGVLLLGYGYFWLLVPNPEARLQLLGLFCSVFTISMYLSPLADLAKVIQTKSTQCLSYPLTIATVLTSASWCLYGFRLRVPYIMVSNFPGIVTSFIRFWLFWKYPQEQDRNYWFLQT

SEQ ID NO: 930 - protein, 221 aa, Homo sapiens
MEAGGFLDSLIYGACVVFTLGMFSAGLSDLRHMRMTRSVDNVQFLPFLTTEVNNLGWLSYGALKGDGILIVVNTVGAALQTLYILAYLHYCPRKRVVLLQTATLLGVLLLGYGYFWLLVPNPEARLQQLGLFCSVFTISMYLSPLADLAKVIQTKSTQCLSYPLTIATLLTSASWCLYGFRLRDPYIMVSNFPGIVTSFIRFWLFWKYPQEQDRNYWLLQT

SEQ ID NO: 931 - protein, 221 aa, Homo sapiens
MEAGGFLDSLIYGACVVFTLGMFSAGLSDLRHMRMTRSVDNVRFLPFLTTEVNNLGWLSYGALKGDGILIVVNTVGAALQTLYILAYLHYCPRKRVVLLQTATLLGVLLLGYGYFWLLVPNPEARLQQLGLFCSVFTISMYLSPLADLAKVIQTKSTQCLSYPLTIATLLTSASWCLYGFRLRDPYIMVSNFPGIVTSFIRFWLFWKYPQEQDRNYWLLQT

SEQ ID NO: 932 - protein, 226 aa, Anopheles gambiae str. PEST
STMEAISEALQPYKEQVGMAAGILTVGQMFSGCFVCNDIRKKGTTDGFSAMPFVGGCGLTVLFLQHGMLMNDSAMTNANLVGLTISLAYAIFFLLYTPPTGRSSYWRQVGGTALFTITLLGYVKVENPSVVEDRFGMIITVLMLALIGQPLFGLPDIIRRKSTEGLPFAMILSGTIVGLSWLLYGVILNNVFVVCQNLAAVTLSGIQLALFAIYPSKAAPPSKKRE

SEQ ID NO: 933 - protein, 246 aa, Anopheles gambiae str. PEST
FVVSRVTQNTHAFPGHWTMESIAVALQPYKDTVGLTAAIVTVVQFFSGVLALNAIRRQGNTRGFSALPFLGGTVFCLLNIQFGQMLRDDGMIRVNFIGLALNLLYVCGFYLYTEGPAKTAVWGQIGLAGALTAGVLSYVQYEDPQLVEFRFGLILTGLLWTLVGMPLLGLGDILKKKSTEGLPFPIIFLGAVVSFAWLLYGIILRSNFLVVQNLMALALSAVQLSLFIIFPSGAAKPPPTPAKKRN

SEQ ID NO: 934 - protein, 218 aa, Anopheles gambiae str. PEST
STMEAISEALQPYKEQVGMAAGILTVGQMFSGCFVCNDIRKKGTTDGFSAMPFVGGCGLTVLFLQHGMLMNDSAMTNANLVGLTISLAYAIFFLLYTPPTGRSSYWRQVGGTALFTITLLGYVKVENPSVVEDRFGMIITVLMLALIGQPLFGLPDIIRRKSTEGLPFAMILSGTIVGLSWLLYGVILNNVFVVVRSVLLVSNGIQLALFAIYPSKAA

SEQ ID NO: 935 - protein, 686 aa, Plasmodium falciparum 3D7
MGIIKRILLLQIVLVLVLCCHRIRCEEVSSISNKASVKDEGQNNNSNKSNNNNNNNNNNNNNNNNNNNNNNNNNNNNNNNNNNNNNNNNNNNNNNTSGLSVKSENFNMIIKPEGDEQSPLNSLSVEQKKDTPQIEELRKKEETKDQKVTEQVNNLQSKNEKLTNTLDQVVQGDNNNNTLDTTTSETSSSSTTNTNNNNNNNINNNSNSNNNNSNINNNNNINNNNNNIYLGHNNNLDSNIIQQTNFIENTEHNVQKQNEKKENNNTSGSTSKSSSSQNLENSKEVEQAVVKEITPKEETSNGQNKDKEKILSNVQNDATNKKMVNDNTKGLSSDNMNSSNDLNAPNKMNEDSKGSSEYVDLASQKIYDEMNKNVEESGSNLYFLKLLSIGSSIFMQLIFLPTIFKIIKKKTTGELDGFPYIILLLSSFLWLVYGMLLNNSAIVFPNLVGLILGILYCVIYHKNCKNMWLKQKLHSYYKICGFICFLLYAFLYILSYEQYEVFVGFVAFISSIVNFGAPLSYIQIVIKKKNSSLIPMEVTMGSLLCSFLWLTYGFTLKDGFIIIPNLCGFILSLLQVLLIILYSNKENTTFNHDSDTTVSEISTRKNRNKYIPDTNSNMFFNEYNVDEENRMTEISTTMPTTIFDLSFDETSPLTGTFNIDYSRPGVSNQKYLKRSESLEKNTAITF

SEQ ID NO: 936 - protein, 247 aa, Arabidopsis thaliana; identical to SEQ ID NO: 434

SEQ ID NO: 937 - protein, 202 aa, Arabidopsis thaliana
MTLLNCLLSAWYGLPFVSKDNTLVSTINGTGAVIETVYVLIFLFYAPKKEKIKIFGIFSCVLAVFATVALVSLFALQGNGRKLFCGLAATVFSIIMYASPLSIMRLVVKTKSVEFMPFFLSLFVFLCGTSWFVYGLIGRDPFVAIPNGFGCALGTLQLILYFIYCGNKGEKSADAQKDEKSVEMKDDEKKQNVVNGKQDLQV

SEQ ID NO: 938 - protein, 265 aa, Petunia x hybrida
MAQLRADDLSFIFGLLGNIVSFMVFLAPVPTFYKIYKRKSSEGYQAIPYMVALFSAGLLLYYAYLRKNAYLIVSINGFGCAIELTYISLFLFYAPRKSKIFTGWLMLLELGALGMVMPITYLLAEGSHRVMIVGWICAAINVAVFAAPLSIMRQVIKTKSVEFMPFTLSLFLTLCATMWFFYGFFKKDFYIAFPNILGFLFGIVQMLLYFVYKDSKRIDDEKSDPVREATKSKEGVEIIINIEDDNSDNALQSMEKDFSRLRTSK

SEQ ID NO: 939 - protein, 142 aa, Triticum aestivum
MEDVAKFLFGISGNVIALFLFLSPVPTFWRIIRNKSTEEFSGVPYNMTLLNCLLSAWYGLPFVSPNNVLVSTINGVGAAIETVYVVIFLVFASNKKARLRMLGLASAVATVFAVVALVSMLALHGPARKLLAGLAMTVFSIC

SEQ ID NO: 940 - protein, 148 aa, Zea mays
  unsure (1)..(148): unsure at all Xaa locations
MEDVAKFLFGISGNVIALFLFLSPVPTFWRIIRNKSTEEFSGVPYNMTLLNCLLSAWYGLPFVSPNNVLVSTINGVGAVIETVYVVIFLVFASNKKARLRTLGLASAVAGVFAVVALVSMLALHXPARKLLAGLAMTVFSICMYASPL

SEQ ID NO: 941 - protein, 261 aa, Arabidopsis thaliana
MGDKLRLSIGILGNGASLLLYTAPIVTFSRVFKKKSTEEFSCFPYVMTLFNCLIYTWYGLPIVSHLWENLPLVTINGVGILLESIFIFIYFYYASPKEKVGVTFVPVIVGFGLTTAISALVFDDHRHRKSFVGSVGLVASISMYGSPLVVMKKVIETRSVEYMPFYLSFFSFLASSLWLAYGLLSHDLFLASPNMVATPLGILQLILYFKYKNKKDLAPTTMVITKRNDHDDKNKATLEFVVDVDRNSDTNEKNSNNASSI

SEQ ID NO: 942 - protein, 289 aa, Glycine max
  unsure (1)..(289): unsure at all Xaa locations
MAETIRLGVAVLGNAASVALYAAPMVTFRRVIRKKSTEEFSCFPYIIGLLNCLLFTWYGLPIVSYKWENFPLVTVNGVGILLELSYVLIYFWYASAKGKVKVAMTAIPVLLVFSIIAAVSAFAFHDNHHRKLLVGSIGLGVSVAMYGSPLIVMKKVIQTKSVEFMPLPLSMCSFLATVLWLIYGLLIRDIFVAGPSAVGTPLGILQLVLYCKYRXXGSVVEEPSKGDLEKGNLEKVDMEIGKVEMNVTNHMNGNSXTMRLRGKVEDFRMFYSDSFFFFFYVYFLYFKTK

SEQ ID NO: 943 - protein, 267 aa, Glycine max
  unsure (1)..(267): unsure at all Xaa locations
MAETLRMVVAVIGNVASVSLYAAPTVTFKRVIRKKSTEEFSCMPYIIALLNCLLFTWYGLPVVSNKWENLPLVTVNGVGILFELSYVLIYIWFSTPKGKVKVAMTAVPVLIVFCVIAIVSAFVFPDHRHRKLLVGSIGLGVSIAMYGSPLVVMKKVIQTKSVEFMPLPLSFCSFLASVLWLTYGLLIRDIFVAGPSLIGTPLGILQLVLHCKYWKRRVMEEPNKVELQKGNNTEKRKWDMEKNVXQFLVTATNDPGQPRLKDFNWFF

SEQ ID NO: 944 - protein, 307 aa, Glycine max
  unsure (1)..(307): unsure at all Xaa locations
MAETIRLAVAVLGNAASVALYAAPMVTFRRVMRKKSTEEFSCFPYIIGLLNCLLFTWYGLPVVSYKWENFPLVTVNGVGIVLELSYVLIYFWYASAKGKVKVAMTAIPVLLVFSIIAAVSAFAFHDNHHRKLLVGSIGLGVSVTMYGSPLIVMKKVIQTKSVEFMPLPLSMCSFLATVLWLIYGLLIRDIFVAGPSAVGTPLGXILQLVLYCKYRXXGVLWRIPSKGDLEKGNLEKVEMEIGKVEMNVTNHMNGHSXTMRLRGKIEDYRMFYSDSFFLCFISFILRQNDPPLALVVLLTYKLSYITS

SEQ ID NO: 945 - protein, 292 aa, Glycine max
  unsure (1)..(292): unsure at all Xaa locations
MAETIRLAVAVLGNAASVALYAAPMVTFRRVIRKKSTEEFSCFPYIIGLLNCLLFTWYGLPVVSYKWENFPLVTVNGVGIVLELSYVLIYFWYASAKGKVKVAMTAIPVLLVFSIIAAVSAFAFHDNHHRKLLVGSIGLXVFSVAMYGSPLIVMKKVIQTKSVEFMPLPLSMCSFLATVLWLIYGLLIRDIFVAGPSAXVGTPLGXILQLVLYCKYRXXGSVVEEPSKGDLEKGNLEKVDMEIGKVEMNVTNHMNGNSXTMRLRGKVEDFRMFYSDSFFFFFYVYFLYFKTK

SEQ ID NO: 946 - protein, 244 aa, Oryza sativa (japonica cultivar-group); identical to SEQ ID NO: 436

SEQ ID NO: 947 - protein, 265 aa, Triticum aestivum
MVSPDAIRTVIGVIGNGTALVLFLSPVPTFISIWKKKTVEQYSAVPYLATLLNCMMWVLYGLPLVHPHSMLVITINGTGMLIELTYIALFLTFSVGAARRRVLLLLVAEVAFVAGVAALVLSLAHTHDRRSMVVGILCVLFGTGMYAAPLSVMKMVIQTKSVEYMPLFLSVASLVNGICWTAYALIKFDLYITIPNGLGVMFAVGQIILYAIYYKSTQQILEARKRKADQVPMTEVVVDGKSGSATNSGAANGHSRSNTTINSPD

SEQ ID NO: 948 - protein, 254 aa, Zea mays
  unsure (1)..(254): unsure at all Xaa locations
MVPDTVRVAVGILGNAASMLLYTTPILTFRWVIRKGNVEEFSCVPYILALLNCLLYTWYGLPVWPPSTAWASCSRSPSSPYTYGSHXXAEKKRFALQLVLPALALFGLTAALSSFAAHTHRSRKAFVGSVGLVASVSMYTSPMVAAKRVIATKSVEFMPFSLSLFSFLSSALWMAYGLLGRDLFIASPNFIGVPVGVLQLLLYCIYRRDHGAAAGAEAHAHGPAAAADQEKGMKAAAPVAVQPQEVAARVSEYK

SEQ ID NO: 949 - protein, 461 aa, Streptomyces coelicolor A3(2)
MTVESVNPETRAPAAPGAPELREPPVAGGGVPLLGHGWRLARDPLAFMSQLRDHGDVVRIKLGPKTVYAVTNPELTGALALNPDYHIAGPLWESLEGLLGKEGVATANGPLHRRQRRTIQPAFRLDAIPAYGPIMEEEAHALTERWQPGKTVDATSESFRVAVRVAARCLLRGQYMDERAERLCVALATVFRGMYRRMVVPLGPLYRLPLPANRRFNDALADLHLLVDEIIAERRASGQKPDDLLTALLEAKDDNGDPIGEQEIHDQVVAILTPGSETIASTIMWLLQALADHPEHADRIRDEVEAVTGGRPVAFEDVRKLRHTGNVIVEAMRLRPAVWVLTRRAVAESELGGYRIPAGADIIYSPYAIQRDPKSYDDNLEFDPDRWLPERAANVPKYAMKPFSAGKRKCPSDHFSMAQLTLITAALATKYRFEQVAGSNDAVRVGITLRPHDLLVRPVAR

SEQ ID NO: 950 - protein, 512 aa, Mus musculus
MLFEGLELVSALATLAACLVSVTLLLAVSQQLWQLRWAATRDKSCKLPIPKGSMGFPLIGETGHWLLQGSGFQSSRREKYGNVFKTHLLGRPLIRVTGAENVRKILLGEHQLVSTEWPRSARVLLGPNTVANSIGDIHRNKRKVFSKIFSHEALESYLPKIQLVIQDTLRAWSSQPEAINVYQEAQRLTFRMAVRVLLGFSIPEEDLGHLFEVYQQFVENVFSLPVDLPFSGYRRGIQARQILQKGLEKAIREKLQCTQGKDYSDALDILIESSKEHGKEMTMQELKDGTLELIFAAYATTASASTSLIMQLLKHPAVLEKLREELRAQGLLHGGGCPCEGTLRLDTLSSLRYLDCVIKEVMRLFTPVSGGYRTVLQTFELDGFQIPKGWSVMYSIRDTHDTAPVFKDVNVFDPDRFSQARSEDKDGRFHYLPFGGGVRTCLGKHLAKLFLKVLAVELASTSRFELATRTFPRITLVPVLHPVDGLSVKFFGLDSNQNEILPETEAMLSATV

SEQ ID NO: 951 - protein, 512 aa, Rattus norvegicus
MLFEGLELVSALATLAACLVSVTLLLAVSQQLWQLRWAATRDKSCKLPIPKGSMGFPLIGETGHWLLQGSGFQSSRREKYGNVFKTHLLGRPLIRVTGAENVRKILLGEHQLVSTEWPRSARVLLGPNTVANSIGDIHRNKRKVFSKIFSHEALESYLPKIQLVIQDTLRAWSSQPEAINVYQEAQRLTFRMAVRVLLGFSIPEEDLGNLFEVYQQFVENVFSLPVDLPFSGYRRGIQARQILQKGLEKAVREKLQCTQGKDYSDALDILIESSKEHGKEMTMQELKDGTLELIFAAYATTASASTSLIMQLLKHPAVLEKLREELRAQGLLHGGGCPCEGTLRLDMLSGLRYLDCVIKEVMRLFTPVSGGYRTVLQTFELDGFQIPKGWSVMYSIRDTHDTAPVFKDVNVFDPDRFSQARSEDKDGRFHYLPFGGGVRTCLGKHLAKLFLKVLAVELASTSRFELATRTFPRITLVPVLHPVDGLSVKFFGLDSNQNEILPETEAMLSATV

SEQ ID NO: 952 - protein, 462 aa, Nostoc sp. PCC 7120
MHLPKGPQTPVFVQVLRWVFSPMSFLEDCAKRYGDIFSVKLAKDVPAIVFLSNPKDIQQILTNDNNQLDSPGDWNDLFEPLLGKRSVITLSGAEHQRQRQLLMPPFHGERMRGYSQVITDVTEKVISQHQIGQPFQVRSVTQAITLRVIMQAVFGLYEGSRAEKLQHLLSDLLEKSSSPFSVALLYFPSLRRDFGPIKFWGEQVQIQQQADELIYQEIQERRENPDPSRTDILSLLMDARDADGQPMTDVELRDELMTLLVAGHETTATALAWAMYWIHKLPPVKARLLEELDSLGDNPDSTTIFKLPYLNAVYSETLRIYPVAMLTFARRVIETMALGGYELPPGTPVLGSIYLTHHREDLYPEPKKFKPERFLERQFSPYEYLPFGGGTRRCLGLAFAQWEMKLALAKILTSYELELVNNSVEVRPKRRGLVTGPHRPIEMVIKSQRQITSRILETTTVS

SEQ ID NO: 953 - protein, 459 aa, Rhodopseudomonas palustris
MSIQVADSSLVARLSPPKPSALAHVPGDEGWPIIGRTLAVLADPKGEVEKMARTYGPVYRSRVLGETSITLLGPEANELVLFDNTKLFSSTHGWGPILGRLFPRGLMMLDFDEHRLHRRTLSVAFKAGPMQSYLAELNAGIAHRVAEWRARPGEMLCYPAMKQLTLDLAATSFLGTAIGAETEEVNRAFIDMVAASVAPIRKPWPGTAMARGVKGRQRIVAYFAEQIPIRRAKGGDDLFSQLCRATHDDGALLSNQAIIDHMSFLMMAAHDTLTSSLTSFVAALAAHPEWQQKLREEIAGLGLKPGEPISFEQLDALPLTEMAFKEAMRLRPPVPSLPRRATRAFSFKGYTIPAGTMVAVNPLFTHHMPEIWPNPDQFDPLRFTDEASRGRHRFAWIPYGGGAHMCLGLNFAYMQAKCFAVHLLQHLDLSLPPNYQASWQMWPIPKPKDGLRVNVAPLN

SEQ ID NO: 954 - protein, 499 aa, Hordeum vulgare subsp. vulgare
MGEGAWWAVAAVVAALAVVALDAAVRAAHAWYWTASLGAGRRGRLPPGDMGWPLVGGMWAFLRAFKSGRPDSFIDSFARRFGRAGLYRAFMFSSPTIMATTPEACKQVLMDDDAFVTGWPKATVALIGPKSFVNMGYDEHRRLRKLTAAPINGFDALTSYLGFIDDTVVTTLRGWSERGGDGHFEFLTELRRMTFRIIVQIFMGGADERTAAELERTYTELNYGMRAMAIDLPGFAYHKAIRARRRLVAALQRVLDERRARGGKTAAGAAAPVDMMDRLIAVEDEGGRRLQDDEIIDVLVMYLNAGHESSGHITMWATVFLQENPEILAKAKAEQEAIMRSIPPGQKGLTLRDFRKMAYLSQVVDETLRFVNISFVSFRQATRDVFVNGYLIPKGWKVQLWYRSVHMDPQVYPDPKKFDPSRWEGPPPRAGTFLPFGLGTRLCPGNDLAKLEISVFLHHFLLGYKLTRKNPNCRVRYLPHPRPVDNCLAKITRLSSSHG

SEQ ID NO: 955 - protein, 444 aa, Synechocystis sp. PCC 6803
MITSPTNLNSLPIPPGDFGLPWLGETLNFLNDGDFGKKRQQQFGPIFKTRLFGKNVIFISGALANRFLFTKEQETFQATWPLSTRILLGPNALATQMGEIHRSRRKILYQAFLPRTLDSYLPKMDGIVQGYLEQWGKANEVIWYPQLRRMTFDVAATLFMGEKVSQNPQLFPWFETYIQGLFSLPIPLPNTLFGKSQRARALLLAELEKIIKARQQQPPSEEDALGILLAARDDNNQPLSLPELKDQILLLLFAGHETLTSALSSFCLLLGQHSDIRERVRQEQNKLQLSQELTAETLKKMPYLDQVLQEVLRLIPPVGGGFRELIQDCQFQGFHFPKGWLVSYQISQTHADPDLYPDPEKFDPERFTPDGSATHNPPFAHVPFGGGLRECLGKEFARLEMKLFATRLIQQFDWTLLPGQNLELVVTPSPRPKDNLRVKLHSLM

SEQ ID NO: 956 - protein, 455 aa, Bacillus megaterium
TIKEMPQPKTFGELKNLPLLNTDKPVQALMKIADELGEIFKFEAPGRVTRYLSSQRLIKEACDESRFDKNLSQALKFVRDFAGDGLFTSWTHEKNWKKAHNILLPSFSQQAMKGYHAMMVDIAVQLVQKWERLNADEHIEVPEDMTRLTLDTIGLCGFNYRFNSFYRDQPHPFITSMVRALDEAMNKLQRANPDDPAYDENKRQFQEDIKVMNDLVDKIIADRKASGEQSDDLLTHMLNGKDPETGEPLDDENIRYQIITFLIAGHETTSGLLSFALYFLVKNPHVLQKAAEEAARVLVDPVPSYKQVKQLKYVGMVLNEALRLWPTAPAFSLYAKEDTVLGGEYPLEKGDELMVLIPQLHRDKTIWGDDVEEFRPERFENPSAIPQHAFKPFGNGQRACIGQQFALHEATLVLGMMLKHFDFEDHTNYELDIKETLTLKPEGFVVKAKSKKIPL

SEQ ID NO: 957 - protein, 473 aa, Bacillus megaterium
GAMTIKEMPQPKTFGELKNLPLLNTDKPVQALMKIADELGEIFKFEAPGRVTRYLSSQRLIKEACDESRFDKNLSQALKFVRDFAGDGLFTSWTHEKNWKKAHNILLPSFSQQAMKGYHAMMVDIAVQLVQKWERLNADEHIEVPEDMTRLTLDTIGLCGFNYRFNSFYRDQPHPFITSMVRALDEAMNKLQRANPDDPAYDENKRQFQEDIKVMNDLVDKIIADRKASGEQSDDLLTHMLNGKDPETGEPLDDENIRYQIITFLIAGHETTSGLLSFALYFLVKNPHVLQKAAEEAARVLVDPVPSYKQVKQLKYVGMVLNEALRLWPTAPAFSLYAKEDTVLGGEYPLEKGDELMVLIPQLHRDKTIWGDDVEEFRPERFENPSAIPQHAFKPFGNGQRACIGQQFALHEATLVLGMMLKHFDFEDHTNYELDIKETLTLKPEGFVVKAKSKKIPLGGIPSPSTEQSAKKV

SEQ ID NO: 958 - protein, 450 aa, Streptomyces carzinostaticus subsp. neocarzinostaticus
MNGRRPVSPPLRALPGLLRKLAVDRLGMMRDAAALDDAVLVSMGPKKLFVFNRPDYAKHVLADNAANYRKGIGLIESRKMLGDGLLTSEGELWREQRRTVQPAFRPARVAAQADAVAEETMNLRDLLMRRGADGPVDVLQEVTGFTLGVLGRTVLNTDLGGYGGIAHAFEAVQDQAMFDMVTQNMVPTWAPLATQRRFRRARRELIRTVDELVADRSARMTDGEEADDAFSLMIAAARRQTDPRTGQGRLRDELVTLLLAGHETTASTLAWTLLLLARHPHMRDLVREEARGVLADGRAPDAGDLRKLTYTTQVVQEAMRLYPPVWILPRVARQSDEVGPYSVSAGADVLICPYTLHRHPDLWERPEQFDPGRFDPARVADRPRYAYIPFGAGPRFCVGSNLGMMEAVFVTALLTRDLVLEVVPGDERTPEPMMSLRMRGGLPMTVRPVR

SEQ ID NO: 959 - protein, 449 aa, Streptomyces globisporus
MRIDPPGPPLRALPGLLRKLAVDRLGMMRDAAGLGDAVRVSMGPKKLYIFNRPDYAKHVLADNSDNYHKGIGLVQSRRVLGDGLLTSDGETWREQRRIVQPAFKPGRINQQAAAVAEEAAKLVALLRGHEGGGPVDVLQEVTGLTLGVLGRTLLDSNLTAHESLAHSFEEVQDQAMLEMVSQGTVPAWLPLPPQARFRRARRELYRVADLLVADRRSRMADGGPGDDALSRIIVAADRRRDDPARARNRLREELVTLLLAGHETTASTLGWTLHLLERHPEVRDRVRAEARAALGDGVPGPEDLHRLTYTTMVVQEAMRLFPPVWILPRVAQQRDVVGGYTVSAGSDVLVCPYIMHRHPGLWEDPERFDPERFEPRQTADRPRYAYIPFGAGPRFCVGSNLGMMEAVFVTALVTRDLDLRTVAGHRAVAEPMLSLRMRGGLPMTVSTAR

SEQ ID NO: 960 - protein, 448 aa, Trichodesmium erythraeum IMS101
MNMNFKSSNPASSLALPPGDLGLPFIGQNKKIFKNPQNFIEEVYQKYGPVYKTNFLGKNFIYFQGYEAIKFILTNENKYFTYSQILRNYQRIFGENDITVLAGKEHRERQKILAKTIKSKNLNNYIDIIHDLSQSYFLKWIKSDYVDLYSEINNYTLDMILKLLLGIDYASKSEISNYLKDMSSGLNTIPVVFPWTKFGSALESKNKLFNQFEQIIVRRKKENNFGSDILGILLTVQEQMNYELTPREIVGQMVNLLSLGKKELSSALSSFFILTSEHLDVLKLLQIEQEKMDVSEPLSLDKYKKMVYLEQVIKEVLRLVPPVSGGLRKIIEDCSFQGFRIPKGWHAYYYISSVLKDPEIYKQPEIFNPERFNPTNAEDKKKPLCYIPFGGGARECIGKEFAYLVIKIFISALLDNCSWKFKENQDLTINTFPVARPAHKIEVCFTPK

SEQ ID NO: 961 - protein, 318 aa, Trichodesmium erythraeum IMS101
MTANYLEKWVEMGTLTWYPEIRNYTFDIASLLFMGSDESSQTKLVSLFEEWVKGLFSIPLSLPWTRFGKSLRCRQKLLQHIEEIILQRQQQQNLGEDALGILLQAQDKEVNGLSLDELKDQILLLLFAGHETLTSAIASFCLLTSQHLDVLTRLRQEQKQFSAIEPLTLENLKRMTYLDMVLKEVLRLIPPVGGGFRQVTQDCEFCGYSIPKGWLVQYQIAKTHQDETLYPDDKNFDPERFAPENAVDKQKVFGYVPFGGGMRECLGKEFARLEMKIFAVMLLRGYEWELLPEQDLSVVAAPTPYPRDGLKVKFRKVE

SEQ ID NO: 962 - protein, 486 aa, Bradyrhizobium japonicum USDA 110
MLPRSAGAGRNKVAVARCPFGQPTGALVMSMQNVAAPALQFTAPRRNELTHIPGDEGWPVIGKTFQVLADPKGHIEANGAKYGPVYRTHVFGETNVVLLGPEANELVMFDQQKLFSSTHGWNKVLGLLFPRGLMLLDFDEHRLHRKALSVAFKSGPMKSYLSDLDRGISARVAQWKAKPGEMQLYPAMKQLTLDLAAASFLGADIGPEVDEINRAFVDMVAAAVAPIRRPLPGTQMARGVAGRKRIVAYFRQQIPLRRGNHGGDDLFSQLCRATHEDGALLSEQDIIDHMSFLMMAAHDTLTSSLTSFIGELAANPDWQDRLRAEVLALGLAPGAPSSFDDLEKMPLSEMAFKEALRIKPPVPSMPRRAMRDFTFKGFRIPAGTAVGVNPLYTHHMKDIWPEPDRFDPLRFTEEAQRNRHRFAWVPFGGGAHMCLGLHFAYMQAKCFARHFLQNIEVSLAPGYKPDWQMWPIPKPRDGLKVRVKAV

SEQ ID NO: 963 - protein, 473 aa, Streptomyces avermitilis MA-4680
MAAVTAAGAAQAPIVAGHPLLGSMNDLLNDPLATYLRARRDHGDVVRFRAGPPGLRADIYAVFSAEGAQQVLATESGNFRKDNVFYGELRDSVGNGLLTSQDATYLRQRRLVQPLFTRRRVDGYAGQVADEAAGLAEAWRGIPGGGVELVGEMHRFALRVVGRILFGTDMETTFEVIERTLPLLQEYALKRGLAPVRTPRTWPTPANRRAARTQAELFALCDGIIDSRRNRKNEGDGGEESGEDLVTLLVRAGNAEDGSLDAAELREQVLIFLLAGHETTATALAFALHLLARHPEQQRRVRDEADRVLGGPGGRAPTAADMEALPYLTMVLKEAMRLYPSAPVIGRRAVADAEVDGVRIPAGADLFVSPWVTHRHPDYWPDPERFDPERFTPEAEAGRPRYAWFPFGGGPRACIGQHLSMLESVLGLAVLIREFEFEAVGEEEVPLGAGITLLAKGPARCRVIPRSSGPRSS

SEQ ID NO: 964 - protein, 513 aa, Orconectes limosus
MSWLLDGALDLETGSVITYLIVTTLITLTLVWYFKRQQKVWLLEQIPGPRGLPILGNVLYLNVDPPELFERFLAVAEYGEVSRLWLCNMCTCLLSSATTAEVILSSTKHLDKSEDYTLLHPWLGESLLNSAGSRWHARRKLLTPAFHFKILEQFMEVFNSQTNKLVHKLLKKADGSPFDISDDITHCVLDIICETAMGRSINAQDNSESEYVQAVRKISGLIQYRQFRPWMYYEFLFKLMGPIKEYNACFKTLHDMSNSTIKERKESRKDKANTEVLEEEEVFGKKKRQAFLDLMLEYAEDNPELTDEEIRKEVDTFMFAGHDTTASAINWVLYTLGLHPDIQTRVQEELDDIFGSSDRPATMDDLRQMKYAEMCIKETMRLFTPVPVISRDIKEEVVINNYRIPANTIVAVVIYKIHRDPEQFPDPEVFDPDRFLPENALKRHPYAYVPFSAGPRNCIGQKFAMLELKTVVSSIFRKLRVESVIPRKDLKMTAEIILRPANGNILKLSPRTK

SEQ ID NO: 965 - protein, 497 aa, Taxus chinensis
MDSFIFLRSIGTKFGQLESSPAIISLTLAPILAIILLLLFRYNHRSSVKLPPGKLGFPLIGETIQLLRTLRSETPQKFFDDRLKKFGPVYMTSLIGHSTVVLCGPAGNKLALSNEDKLVEMEGPKSFMKLIGEDSIVAKRGEDHRILRTALARFLGAQALQNYLGRMSSEIGHHFNKKWKGKDEVKVLPLVRGLIFSIASTLFFDANDGHQQKQLHHLLETILVGSLSVPLDFPGTRYRKGLQARLKLDEILSSLIKRRRSDLRSGIASDDQDLLSVLLTFRDEKGNSLTDQGILDNFSAMFHASYDTTVAPMALIFKLLYSNPEYHEKVFQEQLEIIGNKKEGEEISWKDLKSMKYTWQAVQESLRMYPPVFGIFRKAITDIHYDGYTIPKGWRVLCSPYTTHLREEYFPEPEKFRPSRFEDEGRHVTPYTYVPFGGGLRTCPGWEFSKIEILLFVHHFVKNFSSYIPVDPNEKVLSDPLPPLPANGFSIKLFPRS

SEQ ID NO: 966 - protein, 512 aa, Pinus taeda
MSVPEMGPFGVVVTGIVAIAIVYKLVQRWRFKLPPGPRPWPVVGNLLQIEPVRFRCFWDWSKKYGPIMSVWFGSTLNVVVSNTELAKEVLKEHDQQLADRPRSRSAEKFSRNGQDLIWADYGPHYVKVRKVCTLELFSPKRLEALRPIREDEVAAMVESIFNDCGKQEGIGKPLVVKRYLSGVAFNNITRPAFGKRFVNEEGKMDPQGVEFKEIVATGLKLGASLTMAEHIPYLRWMFPLEEGAFAKHGARRDNVTKAIMEEHTLARQTSGAKQHFVDALLTLQEKYDLSEDTIIGLLWDMITAGMDTTAITVEWAMAELVRNPRIQQKAQEEIDRVVGRDRVMNETDFPHLPYLQCITKEALRLHPPTPLMLPHKATQNVKIGGYDIPKGSNVHVNVWAIARDPAVWKDPVTFRPERFLEEDVDIKGHDYRLLPFGAGRRICPGAQLGINLVQSMLGHLLHHFVWAPPEGMQAEDIDLTENPGLVTFMAKPVQAIAIPRLPDHLYKRQPLN

SEQ ID NO: 967 - protein, 506 aa, Lithospermum erythrorhizon
MALPAIPLAIIIFLIISYKLYQKLRLKLPPGPRPLPIIGNIYQVKPVKFRCFYNWSKTYGPIFSIYYGSQMNVIVSTTELAKEVLKENDQHLADRFRTRSSASMSRGGKDLIWADYGPHYVKVRKLCNVELFSPKRLEAIRPMREDEYTALVESIYKDCTKPELKGKSLLVREYLSSVAFNNITRLAFGKRFMDSNGVVNEQGQEFKKITHDGIKITAKLSIAEYIPWIRWMFKVEQDALDKFAADRDHLTRVIMEEHIKSGNTKQHFVDALLTLQKQYDISEDTIIGLLWDMIAAGMDTATISTEWAMAELVRNPRVQRKAQEELDRVVGPDRIMTEADVPKLPYLQCIVKESLRLHPPTPLMLPHRASANVKIGGYDIPKGSIVHVNVWAIARDPAYWKNPEEFRPERFMEEDIDMKGTDYRLLPFGAGRRICPGAQLAINLITSSLGHLLHQFTWSPQPGVKPEEIDLSENPGTVTYMRNPVKAVVSPRLSAVHLYKRVESDM

SEQ ID NO: 968 - protein, 498 aa, Mycobacterium abscessus
MDAVEAAQRPGGTMTNHLLAPAHHVKERLSSVIMVPAPHAVDDRWRRWSRDWPVRELAPAPAGSGLKAVRGDAGLPFVGHTLDYIRFGSDFSRERYDRLGSVSWMGAFGTKMVVIAGPDATREAFTSEAKAFSQDGWSFLIDAFFHRGLMLMSFDEHLMHRRIMQEAFTRPRLTGYVEQVTPCVRSAVPAWPVGPSVRIYPLLKELTLDIATDVFMGGRGKDESDAVNKAFVATVRAASSLVRAPLPGTRFRAGVQGRRVLEDYFFRHLPAARAGETEDLFAALCQATTEDGERFSDEDVVNHMIFLMMAAHDTSTITTTAVTYFLAKYPQWQEAAAAEAAAIGDGLPDIEALEKMTVIDRVIKEALRLLAPVPLVMRKTVRDVAIDGYHIPSNTLCAITPAVNHFDRTIWNDPERFDPSRFDEPRREDQHHRFAWVPFGGGAHKCIGMQFGTLEVKAILHRMLRSFTWKVPENYHVRWDNTSLPIPVDGLPLEMKRR

SEQ ID NO: 969 - protein, 478 aa, Arabidopsis thaliana
MWALLIWVSLLLISITHWVYSWRNPKCRGKLPPGSMGFPLLGESIQFFKPNKTSDIPPFIKERVKKYGPIFKTNLVGRPVIVSTDADLSYFVFNQEGRCFQSWYPDTFTHIFGKKNVGSLHGFMYKYLKNMVLTLFGHDGLKKMLPQVEMTANKRLELWSNQDSVELKDATASMIFDLTAKKLISHDPDKSSENLRANFVAFIQGLISFPFDIPGTAYHKCLQGRAKAMKMLRNMLQERRENPRKNPSDFFDYVIEEIQKEGTILTEEIALDLMFVLLFASFETTSLALTLAIKFLSDDPEVLKRLTEEHETILRNREDADSGLTWEEYKSMTYTFQFINETARLANIVPAIFRKALRDIKFKEFVNDTDYTIPAGWAVMVCPPAVHLNPEMYKDPLVFNPSRWEGSKVTNASKHFMAFGGGMRFCVGTDFTKLQMAAFLHSLVTKYRWEEIKGGNITRTPGLQFPNGYHVKLHKKRD

SEQ ID NO: 970 - protein, 639 aa, Arabidopsis thaliana
MPEHWVFVPKPHEVGSWKKVPSDFCPFIPVRRGQCINGVTYYLAWIDMYNSVLVSFDIRSEELTMSQIPRRDDGDGSRKNVSLIEYGGKVTLLDSNHLRDKGMLVLRVLEDAGINKEWSKKTMVLHPYQLHLVQVDIIFNVNDIMKEMWGVALSFVIALVVVKISLWLYRWANPNCSGKLPPGSMGFPVIGETVEFFKPYSFNEIHPFVKKRMFKHGGSLFRTNILGSKTIVSTDPEVNFEILKQENRCFIMSYPEALVRIFGKDNLFFKQGKDFHRYMRHIALQLLGPECLKQRFIQQIDIATSEHLKSVSFQGVVDVKDTSGRLILEQMILMIISNIKPETKSKLIESFRDFSFDLVRSPFDPSFWNALYNGLMARSNVMKMLKRMFKERREEATSDDSKYGDFMETMIYEVEKEGDTINEERSVELILSLLIASYETTSTMTALTVKFIAENPKVLMELKREHETILQNRADKESGVTWKEYRSMMNFTHMVINESLRLGSLSPAMFRKAVNDVEIKGYTIPAGWIVLVVPSLLHYDPQIYEQPCEFNPWRWEGKELLSGSKTFMAFGGGARLCAGAEFARLQMAIFLHHLVTTYDFSLIDKSYIIRAPLLRFSKPIRITISENPLSSSHQNANLF

SEQ ID NO: 971 - protein, 479 aa, Arabidopsis thaliana
MSSIWNVAMLMVALVVVRISHWLYRWSNPKCPGKLPPGSMGFPIIGETLDFFKPCGVEGIPTFVKKRMIRYGPLFRTNIFGSKTVVSTDPDVIHQIFRQENTSFELGYPDIFVKVFGKDNLFLKEVFIHKYLQKITMQILGSEGLKQTMLGNMDKATRDHIRSIASQGSFNVRKEVENLVVAYMTPKLISNLKPETQSKLIDNLNAFNLDWFKSFLRLSTWKAVTKALKSREEAIQVMKDVLMMRKETREKQEDFLNTLLEELEKDGSFFDQGSAINLIFLLAFALREGTSSCTALAVKFISKDPKVLAELKREHKAIVDNRKDKEAGVSWEEYRHNMTFTNMVSNEVLRLANTTPLLFRKAVQDVEIKGYTIPAGWIVAVAPSAVHFDPAIYENPFEFNPWRWEGKEMIWGSKTFMAFGYGVRLCVGAEFSRLQMAIFLHHLVAYYDFSMVQDSEIIRSPFHQYTKDLLINISQSPTK

SEQ ID NO: 972 - protein, 518 aa, Arabidopsis thaliana
MDRRGKYWAGPMWIGLSMCGSGSDTILECRLRLFKLQRQNQMSFVWSAAVWVIAVAAVVISKWLYRWSNPKCNGKLPPGSMGLPIIGETCDFFEPHGLYEISPFVKKRMLKYGPLFRTNIFGSNTVVLTEPDIIFEVFRQENKSFVFSYPEAFVKPFGKENVFLKHGNIHKHVKQISLQHLGSEALKKKMIGEIDRVTYEHLRSKANQGSFDAKEAVESVIMAHLTPKIISNLKPETQATLVDNIMALGSEWFQSPLKLTTLISIYKVFIARRYALQVIKDVFTRRKASREMCGDFLDTMVEEGEKEDVIFNEESAINLIFAILVVAKESTSSVTSLAIKFLAENHKALAELKREHAAILQNRNGKGAGVSWEEYRHQMTFTNMVINETLRMANMAPIMYRKAVNDVEIKGYTIPAGWIVAVIPPAVHFNDAIYENPLEFNPWRWEGKELRSGSKTFMVFGGGVRQCVGAEFARLQISIFIHHLVTTYDFSLAQESEFIRAPLPYFPKGLPIKISQSL

SEQ ID NO: 973 - protein, 477 aa, Arabidopsis thaliana
MSFVWSAAVWVIAVAAVVISKWLYRWSNPKCNGKLPPGSMGLPIIGETCDFFEPHGLYEISPFVKKRMLKYGPLFRTNIFGSNTVVLTEPDIIFEVFRQENKSFVFSYPEAFVKPFGKENVFLKHGNIHKHVKQISLQHLGSEALKKKMIGEIDRVTYEHLRSKANQGSFDAKEAVESVIMAHLTPKIISNLKPETQATLVDNIMALGSEWFQSPLKLTTLISIYKVFIARRYALQVIKDVFTRRKASREMCGDFLDTMVEEGEKEDVIFNEDSAINLIFAILVVAKESTSSVTSLAIKFLAENHKALAELKREHAAILQNRNGKGAGVSWEEYRHQMTFTNMVINETLRMANMAPIMYRKAVNDVEIKGYTIPAGWIVAVIPPAVHFNDAIYENPLEFNPWRWEGKELRSGSKTFMVFGGGVRQCVGAEFARLQISIFIHHLVTTYDFSLAQESEFIRAPLPYFPKGLPIKISQSL

SEQ ID NO: 974 - protein, 395 aa, Phascolarctos cinereus
LILSKRDPKSHDVYKFLIPWIGKGLLVLNGSDWFRHRRLLTPAFHSDILKPYVGLMADSARVMLDKWEKLSYQPLSLEISEHVSLMTLDSLMKCAFSHQSNCQMDRHSNLYIQAVHDLSYLLSSRMRNAFYHNDVLYWFSSAGRRTREAAQRAHQYTDQVIQKRRQQLEQEGGLEAISRKRHLDFLDILLCARTEGGDSLLDEELRAEVDTFMFEGHDTTASGISWLLYALATHPEHQQKCREEIRGVLGDGTSITWDHLGQLPYTTMCIKEALRLYPPVPSIGRDIKETITFPDGRILRAGNSVSLHIYALHHNPRVWENPEVFNPFRFSPENLTLQHSHAFLPFSAGSRNCIGQKFAMNEMKVVLALTLLLFELKPDTMKPPLPISKLVLKSK

SEQ ID NO: 975 - protein, 500 aa, Phascolarctos cinereus
MNSPLSFAWFQGNVSGLLQVSFLLGLGLLVLKVAQMYVRRQRLLRDFQNFPGPPSHWLYGNTLEFPVEEELPKMASLAEKFPCAFPRWLTGSWNLLQVYDPEYMKLILSKRDPKSHDVYKFLIPWIGKGLLVLNGSDWFRHRRLLTPAFHSDILKPYVGLMADSARVMLDKWEKLSYQPLSLEISEHVSLMTLDSLMKCAFSHQSNCQMDRHSNLYIQAVHDLSYLLSSRMRNAFYHNDVLYWFSSAGRRTREAAQRAHQYTDQVIQRRRQQLEQEGGLEAISRKRHLDFLDILLCARTEGGDSLLDEELRAEVDTFMFEGHDTTASGISWLLYALATHPEHQQKCREEIRGVLGDGTSITWDHLGQLPYTTMCIKEALRLYPPVPSIGRDIKETITFPDGRILRAGNSVSLHIYALHHNPRVWENPEVFNPFRFSPENLTLQHSHAFLPFSAGSRNCIGQKFAMNEMKVVLALTLLLFELKPDTMKPPLPISKLVLKSK

SEQ ID NO: 976 - protein, 401 aa, Oryza sativa (japonica cultivar-group)
MVGQDLIVCLDPEVNSFVFQQEERLFQCWYPDSFMRIIGADNIITTLGSSHKYIRNLILRLFGPENLRRAMLQDVHRTAQASLLSWLDRPSIELKDAVSSMIFSVTAKKLISYDSLASDGKMWKQFDAFIRGLLAFPIGIPGTAFYKCMQGRKNIMKMLKELIDERKEASGRRGSIDFIDVLLEELNEEKPLISENVALDLIFLLLFASFETTASAITAVVRFLTDNPEALQELAEEHDNIQKRRVDLNSEITWEEYKSMKFTSHVIHEALRLANIAPVMFRKATEDVHIKGFFIPKGSKIMICPSTVHLNPMIYKDPNIFNPWRWKDTAEPTGGASKDFMAFGGGLRLCVGADFAKLQTAIFLHCLVTKYRWKAIKGGTMVLGPGLRFPEGFHIQLFPKP

SEQ ID NO: 977 - protein, 464 aa, Lycopersicon esculentum
MAFFLIFLSSFFGLCIFCTALLRWNQVKYNQKNLPPGTMGWPLFGETTEFLKLGPSFMKNQRARYGSFFKSHILGCPTIVSMDSELNRYILVNEAKGLVPGYPQSMIDILGKCNIAAVNGSAHKYMRGALLSLISPTMIRDQLLPKIDEFMRSHLTNWDNKVIDIQEKTNKMAFLSSLKQIAGIESTSLAQEFMSEFFNLVLGTLSLPINLPNTNYHRGFQARKIIVNLLRTLIEERRASKEIQHDMLGYLMNEEATRFKLTDDEMIDLIITILYSGYETVSTTSMMAVKYLHDHPKVLEELRKEHMAIREKKKPEDPIDYNDYRSMRFTRAVILETSRLATIVNGVLRKTTQDMEINGYIIPKGWRIYVYTRELNYDPRLYPDPYSFNPWRWMDKSLEHQNSFLVFGGGTRQCPGKELGVAEISTFLHYFVTKYRWEEIGGDKLMKFPRVEAPNGLRIRVSAH

SEQ ID NO: 978 - protein, 474 aa, Solanum tuberosum
DLFLLSFATILTIIIYVFFKYFFAKPKEKIPPGTFGWPIIGETIQFFISLYYGMVHEFVQERTKKYNSHVFKTSLLGQKVVIFSGPAANKFIFTQGNKLIIGWRPKSVQKLFASTSFVPIEHDTKRAHNVISYLLNSQNVERLISTMDNMSHLHLKNHWKGKNEVIVYDLVKLFTFSLSIRAFIGIKESDKILNLYEKFKIFTYGLLAVDINLPGTTFYKAMKAGNELRKQMKVIIKQRRAELSENPNLSKVDVLTQMINEQDEDGKYMTEVEIEDKVFGFIIGSYDTTATTITLTMKYLQQMPEFFNEIIQEQNEISMQMMPRKELCWNDIQKMKKTWSFVNEVLRNTPVVQGIFREVIEDFTYEDFYIPKGWKIYLSFGATQKNGEYFPNPTKFDPSRFEGNGQVPYTSVPFGGGHRMCPGKEFARILILVFLHHLLKNFRWEPKVPSEKILYPFFLLAIPTDGYPITLSAV

SEQ ID NO: 979 - protein, 509 aa, Sesamum indicum
MALPLLILSFLTIFIAYKLFQRLRYKLPPGPRPLPVVGNLYDIKPLLVRCFTEWSQVYGPIFSVYLGSHLSVVVNSAELAKEVLKDNDQQLANRNRTRQIAKFSKNGADLIWSDYGPHYVKVRKLCTLELFSMKRLEGLRPIREDEVTAMVESIFKDCNKPENKGKALVLREYLGMMAFLHIARLTFGKRFMDSNGVVDGQGEELKAILHNGIKLGTKKSWAEFLPWFRFLFKTENQLLAEHDALADSFTKKIMQEHTLARQKTGNTKNHFVDALLTLQKEYDLSDDTVIGLLWDMISAGMVTTTITVEWAMAELVRNPRVQQKVQEELDRVVGSDRVMTEADIPNLPYLQCVTKECFRMHPPTPLMLPHKASTNVKIGGYDIPKGATVSVNVWALARDPAVWKNPLEFRPERFQEEDIDMKGTDYRLLPFGSGRRICPGAQLAIYLVTSMLGHMLHHFTWTPPAGTKPEDMDMMEQPGTVTYMRTPLQAVPTPRLPADLFKRVASGNV

SEQ ID NO: 980 - protein, 224 aa, Helianthus annuus
NDFFDYVLEELKQNDTMLTEATALDLMFALLFANFETTSQAITVAIKFLTHNPRALKELTEEHQKILRKRENPKLDLHGKNIVDEIYLQVINETLRLASIVPVLFRKAKKDIKFKGYTIPSGWAVMVCPPAVHLDPVNYKDPLDFNPWRWEDMDLKSASKTFMAFGGGQRFCVGADFAKLQIAIFLHCLVTKYQWQPIKGGDIVRTPGLQFPNGFHVRIFEKET

SEQ ID NO: 981 - protein, 414 aa, Oryza sativa
  unsure (1)..(414): unsure at all Xaa locations
XGPVFRTNMVGQDLIVCLDPKVNSFVFQQEERLFQCWYPDSFMRIIGADNIITTLGSSHKYIRNLILRLFGPENLRRAMLQDVHRTAQASLLSWLDRPSIELKDAVSSMIFSVTAKKLISYDSLASDGKMWKQFDAFIRGLLAFPIGIPGTAFYKCMQGRKNIMKMLKELIDERKEASGRRGSIDFIDVLLEELNEEKPLISENVALDLIFLLLFASFETTASAITAVVRFLTDNPEALQELAEEHDNIQKRRVDLNSEITWEEYKSMKFTSHVIHEALRLANIAPVMFRKATEDVHIKVCLICAGFFIPKGSKIMICPSTVHLNPMIYKDPNIFNPWRWKVCKIHNASKDFMAFGGGLRLCVGADFAKLQTAIFLHCLVTKYRWKAIKGGTMVLGPGLRFPEGFHIQLFPKPX

SEQ ID NO: 982 - protein, 481 aa, Sorghum bicolor
MSMHYLAALSVTLLGAILLRWAFKWMNYGRTGGEEGMLLPPGSRGLPFLGETLEFFAASPTLELVPFFKRRLERFGPIFRTNIVGEDMIVSLDPELNARVLQQEERGFQIWYPSSFMRILGADNMVSMLGPLHRHIRNLVLRLFGPEALRLVLLRDVQRSARDELRSWLDRPEVEVRTATSRMIFGVTAKKLISHDDVASGGSLWKCFDAWTKGLMSFPICVPGTAFYRCMQGRKNVMKVLKQQLDERRNGAERKTVDFFDLVIDELDKPNSIMSESIALNLLFLLLFASHETTSMGLTVILKFLTDNPKSLQELTEEHEKIMERRVDPDSDITWEEYKSMKFTSHVIHESLRLANIAPVVFRQANQDVHIKGYTIPEGSKIMICPSAAHLNSKVYEDPLAFNPWRWKDTPEPVGGSKDFMAFGGGLRLCVGAEFAKLQMAMFLHYLVTNYRWKALSKGTMMLYPGLRFPDGFHIQLHKKT

SEQ ID NO: 983 - protein, 178 aa, Triticum aestivum
  unsure (1)..(178): unsure at all Xaa locations
XSVVESLKEEHEAILKKREGAGTSAITWDEYKSMAFTAQVTNEIVRLSNVAPGIFRKTLTDVQAKGYTIPAGWLVMISPISVNLNPELYEDPLAFNPWRWQDESKKSTLLKNFMPFGGGLRLCVGAEFSRIQIALFLHTLVTKYRWKEIKGGEVQRISEIVFPKGYHIQIIPREESIN

SEQ ID NO: 984 - protein, 168 aa, Triticum aestivum
  unsure (1)..(168): unsure at all Xaa locations
XLMVEHETIXNQREXDGDRVTWKEYKSMTFTSQVINETVRLANIAPGXFRKTLKDVQFRGYXIPAGWGVMVCPLAVHLNPDIYPDPLTFNPSRFKDKLEANRGSRHFMAFGGGLRSCVGADFSKLQMAIFLHFLVTKYRWIQLGGGXIVRCPGLEFPDGYLIQIRQRD

SEQ ID NO: 985 - protein, 394 aa, Zea mays subsp. mays
LGSARRARLPPGEMGWPLVGGMWAFLRAFKSGKPDAFIASFVRRFGRTGVYRSFMFSSPTVLVTTAEGCKQVLMDDDAFVTGWPKATVALVGPRSFVAMPYDEHRRIRKLTAAPINGFDALTGYLPFINRTVTSSLRAWADHGGSVEFLTELRRMTFKIIVQIFLGGADQATTRALERSYTELNYGMRAMAINLPGFAYRGALRARRRLVAVLQGVLDERRAARAKGVSGGGVDMMDRLIEAQDERGRRLDDDEIIDVLVMYLNAGHESSGHITMWATVFLQENPDMFARAKAEQEAIMRSIPSSQRGLTLRDFRKMEYLSQVIDETLRLVNISFVSFRQATRDVFVNGYLIPKGWKVQLWYRSVHMDPQVYPDPTKFDPLRWEGHSPRAGTFL

SEQ ID NO: 986 - protein, 394 aa, Zea mays subsp. mays
LGSARRARLPPGEMGWPLVGGMWAFLRAFKSGKPDAFIASFVRRFGRTGVYRSFMFSSPTVLVTTAEGCKQVLMDDDAFVTGWPKATVALVGPRSFVAMPYDEHRRIRKLTAAPINGFDALTGYLPFIDRTVTSSLRAWADHGGSVEFLTELRRMTFKIIVQIFLGGADQATTRALERSYTELNYGMRAMAINLPGFAYRGALRARRRLVAVLQGVLDERRAARAKGVSGGGVDMMDRLIEAQDERGRRLDDDEIIDVLVMYLNAGHESSGHITMWATVFLQENPDMFARAKAEQEAIMRSIPSSQRGLTLRDFRKMEYLSQVIDETLRLVNISFVSFRQATRDVFVNGYLIPKGWKVQLWYRSVHMDPQVYPDPTKFDPSRWEGHSPRAGTFL

SEQ ID NO: 987 - protein, 394 aa, Zea mays subsp. mays
  unsure (1)..(394): unsure at all Xaa locations
LGAARRARLPPGEMGWPLVGGMWAFLRAFKSGKPDAFIASFVRRFGRTGVYRSFMFSSPTVLVTTAEGCKQVLMDDDAFVTGWPKATVALVGPRSFVAMPYDEHRRIRKLTAAPINGFDALTGYLPFINRTVTSSLRAWADHGGSVEFLTELRRMTFKIIVQIFLGGADQATTRALERSYTELNYGMRAMAINLPGFAYRGALRARRRLVAVLQGVLDERRAARAKXVSGGGXDMMDWLIEAQDERGRRLDDDEIIDVLVMYLNAGHESSGHITMWATVFLQENPDMFARAKAEQEAIMRSIPSSQQGLTLRDFRKMEYLSQVIDETLRLVNISFVSFRQATRDVFVNGYLIPKGWKVQLWYRSVHMDPQVYPDPTKFDPSRWEGHSPRAGTFL

SEQ ID NO: 988 - protein, 394 aa, Zea mays subsp. mays
LGAARRARLPPGEMGWPLVGGMWAFLRAFKSGKPDAFIASFVRRFGRTGVYRSFMFSSPTVLVTTAEGCKQVLMDDDAFVTGWPKATVALVGPRSFVAMPYDEHRRIRKLTAAPINGFDALTGYLPFIDRTVTSSLRAWADHGGSVEFLTELRRMTFKIIVQIFLGGADQATTRALERSYTELNYGMRAMAINLPGFAYRGALRARRRLVAVLQGVLDERRAARAKGVSGGGVDMMDRLIEAQDERGRRLDDDEIIDVLVMYLNAGHESSGHITMWATVFLQENPDMFARAKAEQEAIMRSIPSSQQGLTLRDFRKMEYLSQVIDETLRLVNISFVSFRQATRDVFVNGYLIPKGWKVQLWYRSVHMDPQVYPDPTKFDPSRWEGHSPRAGTFL

SEQ ID NO: 989 - protein, 394 aa, Zea mays subsp. mays
LGAERRARLPPGEMGWPLVGGMWAFLRAFKSGKPDAFIASFVRRFGRTGVYRSFMFSSPTVLVTTAEGCKQVLMDDDAFVTGWPKATVALVGPRSFVAMPYDEHRRIRKLTAAPINGFDALTGYLPFIDRTVTSSLRAWADHGGSVEFLTELRRMTFKIIVQIFLGGADQATTRALERSYTELNYGMRAMAINLPGFAYHGALRARRRLVAVLQGVLDERRAARAKGVSGGGVDMMDRLIEAQDERGRRLDDDEIIDVLVMYLNAGHESSGHITMWATVFLQENPDMFARAKAEQEAIMRSIPSSQQGLTLRDFRKMEYLSQVIDETLRLVNISFVSFRQATRDVFVNGYLIPKGWKVQLWYRSVHMDPQVYPDPTKFDPSRWEGHSPRAGTFL

SEQ ID NO: 990 - protein, 394 aa, Zea mays subsp. mays
  unsure (1)..(394): unsure at all Xaa locations
LGAARRARLPPGEMGWPLVGGMWAFLRAFKSGKPDAFIASFVRRFGRTGVYRSFMFSSPTVLVTTAEGCKQVLMDDDAFVTGWPKXTVALVGPRSFVAMPYDEHRRIRKLTAAPINGFDALTGYLPFIDRTVTSSLRAWADHGGSVEFLTELRRMTFKIIVQIFLGGADQATTRALERSYTELNYGMRAMAINLPGFAYRGALRARRRLVAVLQGVLDERRAARAKGVSGGGVDMMDRLIEAQDERGRRLDDDEIIDVLVMYLNAGHESSGHITMWATVFLQENPDMFARAKAEQEAIMRSIPSSQQGLTLRDFRKMEYLSQVIDETLRLVNISFVSFRQATRDVFVNGYLIPKGWKVQLWYRSVHMDPQVYPDPTKFDPSRWEGHSPRAGTFL

SEQ ID NO: 991 - protein, 394 aa, Zea mays subsp. mays
LGSARRARLPPGEMGWPLVGGMWAFLRAFKSGKPDAFIASFVRRFGRTGVYRSFMFSSPTVLVTTAEGCKQVLMDDDAFVTGWPKATVALVGPRSFVAMPHDEHRRIRKLTAAPINGFDALTGYLPFIDSTVTSSLRAWADHGGSVEFLTELRRMTFKIIVQIFLGGADQATTRALERSYTELNYGMRAMAINLPGFAYRGALRARRRLVAVLQGVLDERRAARAKGVSGGGVDMMDRLIEAQDERGRRLDDDEIIDVLVMYLNAGHESSGHITMWATVFLQENPDMFARAKAEQEAIMRSIPSSQQGLTLRDFRKMEYLSQVIDETLRLVNISFVSFRQATRDVFVNGYLIPKGWKVQLWYRSVHMDPQVYPDPTKFDPSRWEGHSPRAGTFL

SEQ ID NO: 992 - protein, 394 aa, Zea mays subsp. mays
LGSARRARLPPGEMGWPLVGGMWAFLRAFKSGKPDAFIASFVRRFGRTGVYRSFMFSSPTVLVTTGEGCKQVLMDDDAFVTGWPKATVALVGPRSFVAMPYDEHRRIRKLTAAPINGFDALTGYLPFINRTVTSSLRAWADHGGSVEFLTELRRMTFKIIVQIFLGGADQATTRALERSYTELNYGMRAMAINLPGFAYRGALRARRRLVAVLQGVLDERRAARAKGISGGGVDMMDRLIEAQDERGRRLDDDEIIDVLVMYLNAGHESSGHITMWATVFLQENPDMFARAKAEQEAIMRSIPSSQQGLTLRDFRKMEYLSQVIDETLRLVNISFVSFRQATRDVFVNGYLIPKGWKVQLWYRSVHMDPQVYPDPTKFDPSRWEGHSPRAGTFL

SEQ ID NO: 993 - protein, 394 aa, Zea mays subsp. mays
  unsure (1)..(394): unsure at all Xaa locations
XGAXRRARLPPGEMGWPLVGGMWDFLRAXKSGXPDXFIASFVRRFGRTGVYRSFMFSSPTVLVTTAEGCKQVLMDDDAFVTGWPKATVALVGPRSFVAMPYDEHRRIRKLTAAPINGFDALTGYLPFIDRTVTSSLRAWADHGGSVEFLTELRRMTFKIIVQIFLGGADQATTRALERSYTELNYGMRAMAINLPGFAYRGALRARRRLVAVLQGVLDERRAARAKGVSGGGVDMMDRLIEAQDERGRRLDDDEIIDVLVMYLNAGHESSGHITMWATVFLQENPDMFARAKAEQEAIMRSIPSSQRGLTLRDFRKMEYLSQVIDETLRLVNISFVSFRQATRDVFVNGYLIPKGWKVQLWYRSVHMDPQVYPDPTKFDPSRWEGHSPRAGTFL

SEQ ID NO: 994 - protein, 394 aa, Zea mays subsp. mays
LGAARRARLPPGEMGWPLVGGMWAFLRAFKSGKPDAFIASFVRRFGRTGVYRSFMFSSPTVLVTTAEGCKQVLMDDDAFVTGWPKATVALVGPRSFVAMPYDEHRRIRKLTAAPINGFDALTGYLPFIDRTVTSSLRAWADHGGSVEFLTELRRMTFKIIVQIFLGGADQATTRALERSYTELNYGMRAMAINLPGFAYRGALRARRRLVAVLQGVLDERRAARAKGVSGGGVDMMDRLIEAQDERGRRLDDDEIIDVLVMYLNAGHESSGHITMWATVFLQENPDMFARAKAEQEAIMRSIPSSQQGLSLRDFRKMEYLSQVIDETLRLVNISFVSFRQATRDVFVNGYLIPKGWKVQLWYRSVHMDPQVYPDPTKFDPSRWEGHSPRAGTFL

SEQ ID NO: 995 - protein, 394 aa, Zea mays subsp. mays
LGAARRARLPPGEMGWPLVGGMWAFLRAFKSGKPDAFIASFVRRFGRTGVYRSFMFSSPTVLVTTAEGCKQVLMDDDAFVTGWPKATVALVGPRSFVAMPHDEHRRIRKLTAAPINGFDALTGYLPFIDSTVTSSLRAWADHGGSVEFLTELRRMTFKIIVQIFLGGADQATTRALERSYTELNYGMRAMAINLPGFAYRGALRARRRLVAVLQGVLDERRAARAKGVSGGGVDMMDRLIEAQDERGRRLDDDEIIDVLVMYLNAGHESSGHITMWATVFLQENPDMFARAKAEQEAIMRSIPSSQQGLTLRDFRKMEYLSQVIDETLRLVNISFVSFRQATRDVFVNGYLIPKGWKVQLWYRSVHMDPQVYPDPTKFDPSRWEGHSPRAGTFL

SEQ ID NO: 996 - protein, 394 aa, Zea mays subsp. mays
  unsure (1)..(394): unsure at all Xaa locations
LGAERRARLPPGEMGWPLVGGMWDFLRAXKSGKPDXFIASFVRRFGRTGVYRSFMFSSPTVLVTTAEGCKQVLMDDDAFVTGWPKATVALVGPRSFVAMPYDEHRRIRKLTAAPINGFDALTGYLPFIDRTVTSSLRAWADHGGSVEFLTELRRMTFKIIVQIFLGGADQATTRALERSYTELNYGMRAMAINLPGFAYRGALRARRRLVAVLQGVLDERRAARAKGVSGGGVDMMDRLIEAQDERGRRLDDDEIIDVLVMYLNAGHESSGHITMWATVFLQENPDMFARAKAEQEAIMRSIPSSQQGLTLRDFRKMEYLSQVIDETLRLVNISFVSFRQATRDVFVNGYLIPKGWKVQLWYRSVHMDPQVYPDPTKFDPSRWEGHSPRAGTFL

SEQ ID NO: 997 - protein, 394 aa, Zea mays subsp. mays
LGAERRARLPPGEMGWPLVGGMWAFLRAFKSGKPDAFIASFVRRFGRTGVYRSFMFSSPTVLVTTAEGCKQVLMDDDAFVTGWPKATVALVGPRSFVAMPYDEHRRIRKLTAAPINGFDALTGYLPFIDRTVTSSLRAWADHGGSVEFLTELRRMTFKIIVQIFLGGADQATTRALERSYTELNYGMRAMAINLPGFAYRGALRARRRLVAVLQGVLDERRAARAKGVSGGGVDMMDRLIEAQDERGRRLDDDEIIDVLVMYLNAGHESSGHITMWATVFLQENPDMFARAKAEQEAIMRSIPSSQQGLTLRDFRKMEYLSQVIDETLRLVNISFVSFRQATRDVFVNGYLIPKGWKVQLWYRSVHMDPHVYPDPTKFDPSRWEGHSPRAGTFL

SEQ ID NO: 998 - protein, 394 aa, Zea mays subsp. mays
LGSARRARLPPGEMGWPLVGGMWAFLRAFKSGKPDAFIASFVRRFGRTGVYRSFTFSSPTVLVTTAEGCNQVLMDDDAFVTGWPKATVALVGPRSFVPIPHDEHRRIRKLTAAPINGFDALTGYLPFIDRTVTSSLRAWADHGGSVEFLTELRRMTFKIVVQIFLGGADQATTRALERSYTELNYGMRAMAINLPGFAYRGALRARRRLVAVLQGVLDERRAARAKGVSGGGVDMMDRLIEAQDERGRRLDDDEIIDVLVMYLNAGHESSGHITMWATVFLQENPDMFARAKAEQEAIMRSIPSSQRGLTLRDFRKMEYLSQVIDETLRLVNISFVSFRQATRDVFVNGYLIPKGWKVQLWYRSVHMDPQVYPDPTKFDPSRWEGHSPRAGTFL

SEQ ID NO: 999 - protein, 394 aa, Zea mays subsp. mays
LGAARRARLPPGEMGWPLVGGMWAFLRAFKSGKPDAFIASFVRRFGRTGVYRSFMFSSPTVLVTTAEGCKQVLMDDDAFVTGWPKATVALVGPRSFVAMPYDEHRRIRKLTAAPINGFDALTGYLPFIDRTVTSSLRAWADHGGSVEFLTELRRMTFKIIVQIFLGGADQATTRALERSYTELNYGMRAMAINLPGFAYRGALRARRRLVAVLQGVLDERCSARAKGVSGGGVDMMDRLIEAQDERGRRLDDDEIIDVLVMYLNAGHESSGHITMWATVFLQENPDMFARAKAEQEAIMRSIPSSQQGLTLRDFRKMEYLSQVIDETLRLVNISFVSFRQATRDVFVNGYLIPKGWKVQLWYRSVHMDPQVYPDPTKFDPSRWEGHSPRAGTFL

SEQ ID NO: 1000 - protein, 394 aa, Zea mays subsp. mays
  unsure (1)..(394): unsure at all Xaa locations
XGXARRARLPPXEMGWPLVGGMWDFLRAYKSGMPDTFIASFVRRFGRTGVYRSFMFSSPTVLVTTAEGCKQVLMDDDAFVTGWPKATVALVGPRSFVAMPYDEHRRIRKLTAAPINGFDALTGYLPFIDRTVTSSLRAWADHGGSVEFLTELRRMTFKIIVQIFLGGADQATTRALERSYTELNYGMRAMAINLPGFAYRGALRARRRLVAVLQGVLDERRAARAKGVSGGGVDMMDRLIEAQDERGRRLDDDEIIDVLVMYLNAGHESSGHITMWATVFLQENPDMFARAKAEQEAIMRSIPSSQRGLTLRDFRKMEYLSQVIDETLRLVNISFVSFRQATRDVFVNGYLIPKGWKVQLWYRSVHMDPQVYPDPTKFDPSRWEGHSPRAGTFL

SEQ ID NO: 1001 - protein, 394 aa, Zea mays subsp. mays
LGAARRARLPPGEMGWPLVGGMWAFLRAFKSGKPDAFIASFVWRFGRTGVYRSFMFSSPTVLVTTAEGCKQVLMDDDAFVTGWPKATVALVGPRSFVAMPYDEHRRIRKLTAAPINGFDALTGYLPFIDRTVTSSLRAWADHGGSVEFLTELRRMTFKIIVQIFLGGADQATTRALERSYTELNYGMRAMAINLPGFAYRGALRARRRLVAVLQGVLDERRAARAKGVSGGGVDMMDRLIEAQDERGRRLDDDEIIDVLVMYLNAGHESSGHITMWATVFLQENPDMFARAKAEQEAIMRSIPSSQQGLTLRDFRKMEYLSQVIDETLRLVNISFVSFRQATRDVFVNGYLIPKGWKVQLWYRSVHMDPQVYPDPTKFDPSRWEGHSPRAGTFL

SEQ ID NO: 1002 - protein, 394 aa, Zea mays subsp. mays
LGAERRARLPPGEMGWPLVGGMWAFLRAFKSGKPDAFIASFVRRFGRTGVYRSFMFSSPTVLVTTAEGRKQVLMDDDAFVTGWPKATVALVGPRSFVAMPHDEHRRIRKLTAAPINGFDALTGYLPFIDSTVTSSLRAWADHGGSVEFLTELRRMTFKIIVQIFLGGADQATTRALERSYTELNYGMRAMAINLPGFAYRGALRARRRLVAVLQGVLDERRAARAKGVSGGGVDMMDRLIEAQDERGRRLDDDEIIDVLVMYLNAGHESSGHITMWATVFLQENPDMFARAKAEQEAIMRSIPSSQQGLTLRDFRKMEYLSQVIDETLRLVNISFVSFRQATRDVFVNGYLIPKGWKVQLWYRSVHMDPHVYPDPTKFDPSRWEGHSPRAGTFL

SEQ ID NO: 1003 - protein, 394 aa, Zea mays subsp. mays
LGAERRARLPPGEMGWPLVGGMWAFLRAFKSGKPDAFIASFVRRFGRTGVYRSFMFSSPTVLVTTAEGCKQVLMDDDAFVTGWPKATVALVGPRSFVAMPHDEHRRIRKLTAAPINGFDALTGYLPFIDSTVTSSLRAWADHGGSVEFLTELRRMTFKIIVQIFLGGADQATTRALERSYTELNYGMRAMAINLPGFAYRGALRARRRLVAVLQGVLDERRAARAKGVSGGGVDMMDRLIEAQDERGRHLDDDEIIDVLVMYLNAGHESSGHITMWATVFLQENPDMFARAKAEQEAIMRSIPSSQQGLTLRDFRKMEYLSQVIDETLRLVNISFVSFRQATRDVFVNGYLIPKGWKVQLWYRSVHMDPHVYPDPTKFDPSRWEGHSPRAGTSL

SEQ ID NO: 1004 - protein, 394 aa, Zea mays subsp. mays
LGAERRARLPPGEMGWPLVGGMWAFLRAFKSGKPDAFIASFVRRFGRTGVYRSFMFSSPTVLVTTAEGCKQVLMDDDAFVTGWPKATVALVGPRSFVAMPHDEHRRIRKLTAAPINGFDALTGYLPFIDSTVTSSLRAWADHGGSVEFLTELRRMTFKIIVQIFLGGADQATTRALERSYTELNYGMRAMAINLPGFAYRGALRARRRLVAVLQGALDERRAARAKGVSGGGVDMMDRLIEAQDERGRHLDDDEIIDVLVMYLNAGHESSGHITMWATVFLQENPDMFARAKAEQEAIMRSIPSSQQGLTLRDFRKMEYLSQVIDETLRLVNISFVSFRQATRDVFVNGYLIPKGWKVQLWYRSVHMDPQVYPDPTKFDPSRWEGHSPRAGTFL

SEQ ID NO: 1005 - protein, 394 aa, Zea mays subsp. mays
LGAERRARLPPGQMGWPLVGGMWAFLRAFKSGKPDAFIASFVRRFGRTGVYRSFMFSSPTVLVTTAEGCKQVLMDDDAFVTGWPKATVALVGPRSFVAMPHDEHRRIRKLTAAPINGFDALTGYLPFIDSTVTSSLRAWADHGGSVEFLTELRRMTFKIIVQIFLGGADQATTRALERSYTELNCGMRAMAINLPGFAYRGALRARRRLVAVLQGVLDERRAARAKGVSGGGVDMMDRLIEAQDERGRHLDDDEIIDVLVMYLNAGHESSGHITMWATVFLQENPDMFARAKAEQEAIMRSIPSSQRGLTLRDFRKMEYLSQVIDETLRLVNISFVSFRQATRDVFVNGYLIPKGWKVQLWYRSVHMDPQVYPDPTKFDPLRWEGHSPRAGTFL

SEQ ID NO: 1006 - protein, 394 aa, Zea mays subsp. mays
LGAERRARLPPGEMGWPLVGGMWDFLRAFKSGKPDAFIASFVRRFGRTGVYRSFMFSSPTVLVTTAEGCKQVLMDDDAFVTGWPKATVALVGPRSFVAMPHDEHRRIRKLTAAPINGFDALTGYLPFIDSTVTSSLRAWADHGGSVEFLTELRRMTFKIIVQIFLGGADQATTRALERSYTELNYGMRPMAINLPGIAYRGALRARRRLVAVLQGVLDERRAARAKGVSGGGVDMMDRLIEAQDERGRRLDDDEIIDVLVMYLNAGHESSGHITMWATVFLQENPDMFARAKAEQEAIMRSIPSSQRGLTLRDFRKMEYLSQVIDETLRLVNISFVSFRQATRDVFVNGYLIPKGWKVQLWYRSVHMDPQVYPDPTKFDPLRWEGHSPRAGTFL

SEQ ID NO: 1007 - protein, 394 aa, Zea mays subsp. mays
LGAERRARLPPGEMGWPLVGGMWDFLRAYKSGKPDTFIDSFVRRFGRTGVYRSFMFSSPTVLVTTAEGCKQVLMDDDAFVTGWPKATVALVGPRSFVAMPHDEHRRIRKLTAAPINGFDALTGYLPFIDSTVTSSLRAWADHGGSVEFLTELRRMTFKIIVQIFLGGADQATTRALERSYTELNYGMRAMAINLPGFAYRGALRARRRLVAVLQGVLDERRAARAKGVSGGGVDMMDRLIEAQDERGRHLDDDEIIDVLVMYLNAGHESSGHITMWATVFLQENPDMFARAKAEQEAIMRSIPSSQRGLTLRDFRKMEYLSQVIDETLRLVNISFVSFRQATRDVFVNGYLIPKGWKVQLWYRSVHMDPQVYPDPTKFDPLRWEGHSPRAGTFL

SEQ ID NO: 1008 - protein, 394 aa, Zea mays subsp. mays
LGAERRARLPPGEMGWPLVGGMWAFLRAFKSGKPDAFIASFVRRFGRTGVYRSFMFSSPTVLVTTAEGCKQVLMDDDAFVTGWPKATVALVGPRSFVAMPHDEHRRIRKLTAAPINGFDALTGYLPFIDSTVTSSLRAWADHGGSVEFLTELRRMTFKIIVQIFLGGADQATTRALERSYTELNYGMRAMAINLPGFAYRGALRARRRLVAVLQGVLDERRAARAKGVSGGGVDMMDRLIEAQDERGRRLDDDEIIDVLVMYLNAGHESSGHITMWATVFLQENPDMFARAKAEQEAIMRSIPSSQRGLTLRDFRKMEYLSQVIDETLRLVNISFVSFRQATRDVFVNGYLIPKGWKVQLWYRSVHMDPQVYPDPTKFDPLRWEGHSPRAGTFL

SEQ ID NO: 1009 - protein, 394 aa, Zea mays subsp. mays
  unsure (1)..(394): unsure at all Xaa locations
LGAARRARLPPGEMGWPLVGGMWAFLRAFKSDKPDAFIASFVRRFGRTGVYRSFIFSSPTVLLTTPEGCKQVLMDDDAFVTGWPKATVALVGPRSFVAMPYDEHRRIRKLTAAPINGFDALTGYLPFIDRTVTSSLRAWADHGGSVEFLTELRRMTFKIIVQIFLGGADQATTRALERSYTELNYGMRAMAINLPSFAYRGALRARRRLVAVLQGVLDERRXARAKGVSGGGVDMMDRLIEAQDERGRRLDDDEIIDVLVMYLNAGHESSGHITMWATVFLQENPDMFARAKAEQEAIMRSIPSSQQGLTLRDFRKMEYLSQVIDETLRLVNISFVSFRQATRDVFVNGYLIPKGWKVQLWYRSVHMDPQVYPDPTKFDPSRWEGHSPRAGTFL

SEQ ID NO: 1010 - protein, 394 aa, Zea mays subsp. mays
LGAERRARLPPGEMGWPLVGGMWAFLRAFKSGKPDAFIASFVRRFGRTGVYRSFMFSSPTVLVTTAEGCKQVLMDDDAFVTGWPKATVALVGPRSFVAMPHDEHRRIRKLTAAPINGFDALTGYLPFIDSTVTSSLRAWADHGGSVEFLTELRRMTFKIIVQIFLGGADQATTRALERSYTELNYGMRAMAINLPGFAYRGALRARRRLVAVLQGVLDERRAARAKGVSGGGVDMMDRLIEAQDERGRRLDDDEIIDVLVMYLNAGHESSGHITMWATVFLQENPDMFARAKAEQEAIMRSIPSSQRGLTLRDFRKMEYLSQVIDETLRLVNISFVSFRQATRDVFVNGYLIPKGWKVQLWYRSVHMDPQVYPDPTKFDPSRWEGHSPRAGTFL

SEQ ID NO: 1011 - protein, 394 aa, Zea mays subsp. mays
LGAERRARLPPGEMGWPLVGGMWAFLRAFKSGKPDAFIASFVRRFGRTGVYRSFMFSSPTVLVTTAEGCKQVLMDDDAFVTGWPKATVALVGPRSFVAMPHDEHRRIRKLTAAPINGFDALTGYLPFIDSTVTSSLRAWADHGGSVEFLTELRRMTFKIIVQIFLGGADQATTRALERSYTELNYGMRAMAINLPGFAYRGALRARRRLVAVLQGVLDERRAARAKGVSGGGVDMMDRLIEAQDERGRHLDDDEIIDVLVMYLNAGHESSGHITMWATVFLQENPDMFARAKAEQEAIMRSIPSSQRGLTLRDFRKMEYLSQVIDETLRLVNISFVSFRQATRDVFVNGYLIPKGWKVQLWYRSVHMDPQVYPDPTKFDPLRWEGHSPRAGTFL

SEQ ID NO: 1012 - protein, 394 aa, Zea mays subsp. mays
LGAERRARLPPGEMGWPLVGGMWAFLRAFKSGKPDAFIASFVRRFGRTGVYRSFMFSSPTVLVTTAEGCKQVLMDDDAFVTGWPKATVALVGPRSFVAMPHDEHRRIRKLTAAPINGFDALTGYLPFIDSTVTSSLRAWADHGGSVEFLTELRRMTFKIIVQIFLGGADQATTRALERSYTELNYGMRAMAINLPGFAYRGALRARRRLVAVLQGVLDERRAARAKGISGGGVDMMDRLIEAQDERGRRLDDDEIIDVLVMYLNAGHESSGHITMWATVFLQENPDMFARAKAEQEAIMRSIPSSQQGLTLRDFRKMEYLSQVIDETLRLVNISFVSFRQATRDVFVNGYLIPKGWKVQLWYRSVHMDPQVYPDPTKFDPSRWEGHSPRAGTFL

SEQ ID NO: 1013 - protein, 394 aa, Zea mays subsp. mays
LGAERRARLPPGEMGWPLVGGMWAFLRAFKSGKPDAFIASFVRRFGRTGVYRSFMFSSPTVLVTTAEGCKQVLMDDDAFVTGWPKATVALVGPRSFVAMPHDEHRRIRKLTAAPINGFDALTGYLPFIDSTVTSSLRAWADHGGSVEFLTELRRMTFKIIVQIFLGGADQATTRALERSYTELNYGMRAMAINLPGFAYRGALRARRRLVAVLQGVLDERRAARAKGISGGGVDMMDRLIEAQDERGRRLDDDEIIDVLVMYLNAGHESSGHITMWATVFLQENPDMFARAKAEQEAIMRSIPSSQRGLTLRDFRKMEYLSQVIDETLRLVNISFVSFRQATRDVFVNGYLIPKGWKVQLWYRSVHMDPQVYPDPTKFDPSRWEGHSPRAGTFL

SEQ ID NO: 1014 - protein, 394 aa, Zea mays subsp. mays
LGAERRARLPPGEMGWPLVGGMWAFLRAFKSGKPDAFIASFVRRFGRTGVYRSFMFSSPTVLVTTAEGCKQVLMDDDAFVTGWPKATVALVGPRSFVAMPHDEHRRIRKLTAAPINGFDALTGYLPFIDSTVTSSLRAWADHGGSVEFLTELRRMTFKIIVQIFLGGADQATTRALERSYTELNYGMRAMAINLPGFAYRGALRARRRLVAVLQGVLDERRAARAKGVSGGGVDMMDRLIEAQDERGRRLDDDEIIDVLVMYLNAGHESSGHITMWATVFLQENPDMFARAKAEQEAIMRSIPSSQQGLTLRDFRKMEYLSQVIDETLRLVNISFVSFRQATRDVFVNGYLIPKGWKVQLWYRSVHMDPHVYPDPTKFDPSRWEGHSPRAGTFL

SEQ ID NO: 1015 - protein, 394 aa, Zea mays subsp. mays
LGAERRARLPPGEMGWPLVGGMWAFLRAFKSGKPDAFIASFVRRFGRTGVYRSFMFSSPTVLVTTAEGCKQVLMDDDAFVTGWPKATVALVGPRSFVAMPHDEHRRIRKLTAAPINGFDALTGYLPFIDSTVTSSLRAWADHGGSVEFLTELRRMTFKIIVQIFLGGADQATTRALERSYTELNYGMRAMAINLPGFAYRGALRARRRLVAVLQGVLDERRAARAKGVSGGGVDMMDRLIEAQDERGRHLDDDEIIDVLVMYLNAGHESSGHITMWATVFLQENPDMFARAKAEQEAIMRSIPSSQQGLTLRDFRKMEYLSQVIDETLRLVNISFVSFRQATRDVFVNGYLIPKGWKVQLWYRSVHMDPHVYPDPTKFDPSRWEGHSPRAGTFL

SEQ ID NO: 1016 - protein, 394 aa, Zea mays subsp. mays
  unsure (1)..(394): unsure at all Xaa locations
LGAERRARLPPGEMGWPLVGGMWDFLRAXKSGKPDXFIASFVRRFGRTGVYRSFMFSSPTVLVTTAEGCKQVLMDDDAFVTGWPKATVALVGPRSFVAMPYDEHRRIRKLTAAPINGFDALTGYLPFIDRTVTSSLRAWADHGGSVEFLTELRRMTFKIIVQIFLGGADQATTRALERSYTELNYGMRAMAINLPGFAYRGALRARRRLVAVLQGVLDERRAARAKGVSGGGVNMMDRLIEAQDERGRRLDDDEIIDVLVMYLNAGHESSGHITMWATVFLQENPDMFARAKAEQEAIMRSIPSSQRGLTLRDFRKMEYLSQVIDETLRLVNISFVSFRQATRDVFVNGYLIPKGWKVQLWYRSVHMDPQVYPDPTKFDPSRWEGHSPRAXTFL

SEQ ID NO: 1017 - protein, 394 aa, Zea mays subsp. mays
LGAERRARLPPGEMGWPLVGGMWAFLRAFKSGKPDAFIASFVRRFGRTGVYRSFMFSSPTVLVTTAEGCKQVLMDDDAFVTGWPKATVALVGPRSFVAMPHDEHRRIRKLTAAPINGFDALTGYLPFIDSTVTSSLRAWADHGGSVEFLTELRRMTFKIIVQIFLGGADQATTRALERSYTELNYGMRAMAINLPGFAYRGALRARRRLVAVLQGVLDERRAARAKGVSGGGVNMMDRLIEAQDERGRRLDDDEIIDVLVMYLNAGHESSGHITMWATVFLQENPDMFARAKAEQEAIMRSIPSSQQGLTLRDFRKMEYLSQVIDETLRLVNISFVSFRQATRDVFVNGYLIPKGWKVQLWYRSVHMDPQVYPDPTKFDPSRWEGHSPRAGTFL

SEQ ID NO: 1018 - protein, 394 aa, Zea mays subsp. mays
  unsure (1)..(394): unsure at all Xaa locations
LGAERRARLPPXDMGWPLVGGMWAYLRAXKSGKPDXFIASFVRRFGRTGVYRSFMFSSPTVLVTTAEGCKQVLMDDDAFVTGWPKATVALVGPRSFVAMPHDEHRRIRKLTAAPINGFDALTGYLPFIDSTVTSSLRAWADHGGSVEFLTELRRMTFKIIVQIFLGGADQATTRALERSYTELNYGMRAMAINLPGFAYRGALRARRRLVAVLQGVLDERRAARAKGVSGGGVDMMDRLIEAQDERGRHLDDDEIIDVLVMYLNAGHESSGHITMWATVFLQENPDMFARAKAEQEAIMRSIPSSQRGLTLRDFRKMEYLSQVIDETLRLVNISFVSFRQATRDVFVNGYLIPKGWKVQLWYRSVHMDPQVYPDPTKFDPSRWEGHSPRAGTFL

SEQ ID NO: 1019 - protein, 394 aa, Zea mays subsp. mays
LGAERRARLPPGEMGWPLVGGMWAFLRAFKSGKPDAFIASFVRRFGRTGVYRSFMFSSPTVLVTTAEGCKQVLMDDDAFVTGWPKATVALVGPRSFVAMPHDEHRRIRKLTAAPINGFDALTGYLPFIDSTVTSSLRAWADHGGSVEFLTELRRMTFKIIVQIFLGGADQATTRALERSYTELNYGMRAMAINLPGFAYRGALRARRRLVAVLQGVLDERRAARAKGVSGGGVDMMDRLIEAQDERGRHLDDDEIIDVLVMYLNAGHESSGHITMWATVFLQENPDMFARAKAEQEAIMRSIPSSQRGLTLRDFRKMEYLSQVIDETLRLVNISFVSFRQATRDVFVNGYLTPKGWKVQLWYRSVHMDPQVYPDPTKFDPLRWEGHSPRAGTFL

SEQ ID NO: 1020 - protein, 394 aa, Zea mays subsp. mays
LGAERRARLPLGEMGWPLVGGMWAFLRAFKSGKPDAFIASFVRRFGRTGVYRSFMFSSPTVLVTTAEGCKQVLMDDDAFVTGWPKATVALVGPRSFVAMPYDEHRRIRKLTAAPINGFDALTGYLPFIDRTVTSSLRAWADHGGSVEFLTELRRMTFKIIVQIFLGGADQATTRALERSYTELNYGMRAMAINLPGFAYRGALRARRRLVAVLQGVLDERRAARAKGVSGGGVDMMDRLIEAQDERGRRLDDDEIIDVLVMYLNAGHESSGHITMWATVFLQENPDMFARAKAEQEAIMRSIPSSQQGLTLRDFRKMEYLSQVIDETLRLVNISFVSFRQATRDVFVNGYLIPKGWKVQLWYRSVHMDPHVYPDPTKFDPSRWEGHSPRAGTFL

SEQ ID NO: 1021 - protein, 394 aa, Zea mays subsp. mays
LGAERRARLPPGEMGWPLVGGMWAFLRAFKSGKPDAFIASFVRRFGRTGVYRSFMFSSPTVLVTTAEGCKQVLMDDDAFVTGWPKATVALVGPRSFVAMPHDEHRRIRKLTAAPINGFDALTGYLPFIDSTVTSSLRAWADHGGSVEFLTELRRMTFKIIVQIFLGGADQATTRALERSYTELNYGMRAMAINLPGFAYRGALRARRRLVAVLQGVLDERRAARAKGVSGGGVDMMDRLIEAQDERGRRLDDDEIIDVLVMYLNAGHESSGHITMWATVFLQENPDMFARAKAEQEAIMRSIPSSQRGLTLRDFMKMEYLSQVIDETLRLVNISFVSFRQATRDVFVNGYLIPKGWKVQLWYRSVHMDPQVYPDPTKFDPSRWEGHSPRAGTFL

SEQ ID NO: 1022 - protein, 394 aa, Zea mays subsp. mays
LGAERRARLPPGEMGWPLVGGMWAFLRAFKSGKPDAFIASFVRRFGRTGVYRSFMFSSPTVLVTTAEGYKQVLMDDDAFVTGWPKATVALVGPRSFVAMPHDERRRIRKLTAAPINGFDALTGYLPFIDSTVTSSLRAWADHGGSVEFLTELRRMTFKIIVQIFLGGADQATTRALERSYTELNYGMRAMAINLPGFAYRGALRARRRLVAVLQDVLDERRAARAKGVSGGGVDMMDRLIEAQDERGRHLDDDEIIDVLVMYLNAGHESSGHITMWATVFLQENPDMFARAKAEQEAIMRSIPSSQQGLTLRDFRKMEYLSQVIDETLRLVNISFVSFRQATRDVFVNGYLIPKGWKVQLWYRSVHMDPHVYPDPTKFDPSRWEGHSPRAGTFL

SEQ ID NO: 1023 - protein, 394 aa, Zea mays subsp. mays
LGAERRARLPPGEMWWPLVGGMWAFLRAFKSGKPDAFIASFVRRFGRTGVYRSFMFSSPTVLVTTAEGCKQVLMDDDAFVTGWPKATVALVGPRSFVAMPHDEHRRIRKLTAAPINGFDALTGYLPFIDSTVTSSLRAWADHGGSVEFLTELRRMTFKIIVQIFLGGADQATTRALERSYTELNYGMRAMAINLPGFAYRGALRARRRLVAVLQGVLDERRAARAKGISGGGVDMMDRLIEAQDERGRRLDDDEIIDVLVMYLNAGHESSGHITMWATVFLQENPDMFARAKAEQEAIMRSIPSSQRGLTLRDFRKMEYLSQVIDETLRLVNISFVSFRQATRDVFVNGYLIPKGWKVQLWYRSVHMDPQVYPDPTKFDPSRWEGHSPRAGTFL

SEQ ID NO: 1024 - protein, 394 aa, Zea mays subsp. mays
  unsure (1)..(394): unsure at all Xaa locations
LGSARRARLPPGEMGWPLVGGMWAFLRAFKSGKPDAFIASFVRRFGRTGVYRSFMFSSPTVLVTTAEGCKQVLMDDDAFVTGWPKATVALVGPRSFVAMPHDEHRRIRKLTAAPINGFDALTGYLPFIDRTVTSSLRAWADHGASVEFLTEIRRMTFKIIVQIFLXGADQATTRALERSYTELNYRMRTMAIHMTDFAYRGALRARRRIVTVMQGVLDERRAARAKGVSGGGVDMMDRLIEAQDERGRRLDDDEIIDVLVMYLNAGHESSGHITMWATVFLQENPDMFARAKAEQEAIMRSILSSQRGLTLRDFSKMEYLSQVIDETLRLVNISFVSFRQATRDVFVHGYLIPKGWKVQLWYRSVHMDPQVYPDPTKLYPSRWEGHSPRPGTFL

SEQ ID NO: 1025 - protein, 394 aa, Zea mays subsp. mays
  unsure (1)..(394): unsure at all Xaa locations
LGAERRARLPPGEMGWPLVGGMWAFLRAFKSGKPDAFIASFVRRFGRTGVYRSFMFSSPTVLVTTAEGCKQVLMDDDAFVTGWPKATVALVGPRSFVAMPHDEHRRIRKLTAAPINGFDALTGYLPFIDSTVTSSLRAWADHGGSVEFLTELRRMTFKIIVQIFLGGADQATTRALERSYTELIYGVRAMAINLPGFAYRGALRARRRLXGALXGVLYXSPAARAKGVSGGGVDMMDRLIEAQDERGRHLDDDEIIDVLVMYLNAGHESSGHITMWATVFLQENPDMFARAKAEQEAIMRSIPSSQQGLTLRDFRKMEYLSQVIDETLRLVNISFVSFRQATRDVFVNGYLIPKGWKVQLWYRSVHMDPHVYPDPTKFDPSRWEGHSPRAGTFL

SEQ ID NO: 1026 - protein, 473 aa, Cunninghamella elegans
MNNFIFKRLNVKEFYEAETKKLVENGHEFHLRLERTGYVIHTCNPQAIKEILLKGDKFPKYDYNTSNNEDGSFFHEFVGFENVLMTNGSTWKKHRMIVNPAFKTALPSRLFGDCTRDLFKLWDNEYANEPFDSDIHNITERLTLQIIGKAAFDFDFNAILDEKSIWKQTYDGINKAASDPLFILFPILEEKFLWLFPKRQQSFKLLNEWKKMLLSIIEKKREAIQNNVDHGVEEAEKDLLTLMIESEHRGEGALSNEELLSDLIIFFIAGHDTTAFALSAAIYYLAKHPDIQEKARQEAISVLCPNGEVDEDIFPTTEDTKHFVYINQIMKETLRINGSVLFLLSPRLVTQDVNLSGVFIPKGSQINVNIHEVHHNPNVWHDPETFDPDRWASNGEAEQLAGKGMAWVPFSNGNRQCIGMNFSLLEQRVILGSLLRKYEWTLPEDSIHQDYMVNKFNLIPKPIDLKIRFKRRY

SEQ ID NO: 1027 - protein, 456 aa, Polyangium cellulosum
MISISKSKQKLLPPGPRSPMALQTLQWLKNPVPFLEACGARYGEMFTLKLPTQWPVVVVQHPEAVKEVFALDSNAGHAGEANNILKPFLGKYSLLVLDGEEHMRQRKMMMPAFHGERMEAYGHAMIDAAHASIDAWPVGSPFGVHAPMQAITLQVILRTVVGMTDGPLLAELEALYPQVIDAASAPAMHFELFRKDLGPWSPWGKFKRRSARGKEIMIHEIRRAREKGTAGRTDVLAMIIDAKDENGELLTEDEIHGELMTLLVAGHETTATALCWALRWLLRDAALTRRVAEEAAEVADDPVKIAKSELLDRVVKEALRLQPIGPVVARVLKQPLTIQGRELPADVMVAPCVQLLHHRPSLYPEPTRFDPDRYATFTPKPWEFIPFGGGLRKCIGAAFSMYEMKMVLATAFSRLSMELATDDIKIIRRGVTLAPSGGLPLVIRKKSPRATKPIAA

SEQ ID NO: 1028 - protein, 437 aa, Nostoc punctiforme
MKTNQIPPGSFGLPVLGETLSFVFDRDFAKKRYHQYGPIFKTHLLGRPTVVMAGPEALEFVLSSHIENFSWREGWPDNFKTLLGESLFLQDGEEHRRNRRLMMPALHGPALASYFSTMEDITRSYLQKWEKKQEFTWFQEFKQLTFDIASQLFLGTRPGPECVRLSQLFTTLTNGLLAINPLPLPFTTFGKAIAARNEILEHLTQVVRERQQNPTQDTISLLIKAKDEDGNSLSEKEIIAQAVLLLFAGHETTTSMLTWLCTELACHPEVLEKARVEQLQLASQGDLDLEQLGKMPYLEQVLWEVERLHQPVGGGFRGVIKDFELNGYHVPTGWQLYYSIGVTHQIEEIYSEPELFDPDRFSPQRQEHKKYPFSLVGFGGGPRICIGIAFAKMEMKIVAAHLLRSYHWEILPNQSLEVVAVPTNRPKDGLRVRFQPR

SEQ ID NO: 1029 - protein, 452 aa, Nostoc punctiforme
MQQLKSAEEIPGSYGLPILGETLEIFRDSELYLWRRFQQYGSVFKTSVLGRKRAYLIGPSANRLVLVEQAENMSSRIGWYFLESTFGNNILLQDGEEHRLTRRLMYPAFHGKAIATYFDTIQNIVQDFLKDWGERGTISLNSSFRQLTLMIATRLFLGSQNKSEVEQTSQWFTQLLDSSMAIFKWNVPFTLYGRGQNARGKLVAFLREAIAQRIEQGNLEESKDVLGLLLAAVDEDGNKLSETQVINEALLLLFAGHETTASLLTWVIFELGNHPEWRERLRQEQLAVVGNNPLSLSHLKQFPQLTNVLKEAERLYPPVYAYNRGVLKDIEYGGYRIPAGWFVTISPMLTHRLPELYTEPDRFDPDRFAPPREEDKKHPLALMGFGYGSHSCLGMEFAQMEMKIVLSTLLRHYDWTVKPDYSAIAPVRQPSKVKDILQAYIEPLLIKHPLDS

SEQ ID NO: 1030 - protein, 405 aa, Halobacterium sp. NRC-1
MGPMETYVVTEPALVERLLVSDAAEFRKPEFQADAIDDLLGDGLLLSEGESWREQRGRANPAFSMARVAGFDADIAAHAADRVDDWPVGDTVDVEAAMTHITLDVILDVMLGVSLPEARVDAIGDALEPVGARFEPDPVRFAVPEWLPMPDDREYAAAVATLDDLVDDIVAAREGTASGGDGDDPMDLLSVLLRARDRGEQSLDRLRDEVMTTLLAGHDTTALTLTYTWFLLSEHPDVEARLHAELDGALDDGAQPTVAQLQDLDYLEWVLQESMRLYPPVYNVFRTPIEPVELAGSEVPAGAPIMLPQWAIHRSPDHWDDPEAFDPERWRPERRADRPRFAYFPFGGGPRHCIGKQLALLEAKLIVATVASDYRLRYEGDTPLSFVPSLTIHPEQEMRMRVEPR

SEQ ID NO: 1031 - protein, 511 aa, Blaberus discoidalis
MEFITILLSTALFIVTFLFLFRQGAKRARFVYLVNKLPGPTAYPVVGNAIEAIVPRNKLFQVFDRRAKLYGPLYRIWAGPIAQVGLTRPEHVELILRDTKHIDKSLVYSFIRPWLGEGLLTGTGAKWHSHRKMITPTFHFKILDIFVDVFVEKSEILVKKLQSKVGGKDFDIYPFITHCALDIICETAMGIQMNAQEESESEYVKAVYEISELTMQRSVRPWLHPKVIFDLTTMGKRYAECLRILHGFTNKVIQERKSLRQMTGMKPTISNEEDELLGKKKRLAFLDLLLEASENGTKMSDTDIREEVDTFMFEGHDTTSAGICWALFLLGSHPEIQDKVYEELDHIFQGSDRSTTMRDLADMKYLERVIKESLRLFPSVPFIGRVLKEDTKIGDYLVPAGCMMNLQIYHVHRNQDQYPNPEAFNPDNFLPERVAKRHPYAYVPFSAGPRNCIGQKFATLEEKTVLSSILRNFKVRSIEKREDLTLMNELILRPESGIKVELIPRLPADAC

SEQ ID NO: 1032 - protein, 505 aa, Tribolium castaneum
MLVLTTVLTAAAVFLLFYLFYCYKTIKQHIYSLISLSYLPGPPVNDIISGNILPLYTSAENIFKQLREWGRLYYPIYKLNAAHLAAANILSPEDCELVLSNPTHMEKSAIYNLLHDWLGTGLLTSTGLKWQTRRKILTPAFHFSILQQFVAIFNEETDKLVEVLKEECYKPFINVNAHVAQFTLKTIAETAMGTKLRFTTRKETIYKQSIVDMGEFLLYRLLRCWLISKCIYVFNPRYYLEKKVTRRLHRFTKSVIAERQENFKEIVVPETDEVYTGKRRLAMLDLLLTAKNKEGLIDDEGIREEVDTFMFEGHDTTAAALGFALMVLAGHKEVQDKIVEEMNEVLGDIKKKPTYQDLQEMKYLERCVKEVLRLYPSVHFISRKLGEDLVTHSGHKLAKGSIVNLHIYDLHHNPAIYPDPEKFDPDRFLPENCQKRHPFAYLPFSAGPRNCIGKKFAMLELKAAICGILANFTLEPIDIPETIVLVVDIVLRTKEGIKVRFIPRV

SEQ ID NO: 1033 - protein, 432 aa, Prochlorococcus marinus str. MIT 9313
MASSDDAKLRPLPNTAALSGVLEAFAFFRDPAFAQKRFERHGNVFETSLLGQPMVFIQGGQAIRDLLAQPNAVEGWWPESVRQLLGSHSLANRNGASHRARRRVIGQLFSASALQRYSAGIISMVQDLADELQAAKTALPLAERMRRFAFSVIATTVLGLEGTDRDELFVDFEIWTRALFSIPIALPGSSFAKALKARERLLRRLQKVLLKASNGNGGLDLLAGGLDEAGIPLTDEDMVEQLLLLLFAGYETTASSLSCLMRELLLNPQVETWLREEINGVDWPPAPEQATTAYDQVNAPKLDAVVSEVMRLTPAVGGFFRRTKCALVIDGVEVPKNRVVQVALAASNRHGAGDLEAFRPQRHLEDGCSATLLPFGGGERVCLGKPLAELEIRLMVVGLFHQLRLHLIPDQDLTLQMLPSPTPRDGLLTKVL

SEQ ID NO: 1034 - protein, 414 aa, SYNECHOCOCCUS SP. WH 8102
MTAAPLPSTGAVTGLGETLAFFRDPSFSQRRFSELGDVFETKLLAQSIVFIRGERAIGDLLKQEDCLQGWWPDSVRQLLGSKSLANRSGADHKARRRVVGQLFSSAALSRYTPAIEALVNDLANELQQAEGPIPLAARMRRFAFSVIATTVLGLEAENRDALFADFEIWTRALFSIPLALPGTPFARALAARQRLLARLKTVLQTNNNRQQGGLDLLSGGLDEAGLPLDDDDLVEQLLLLLFAGYETTASSLSCLFRALLLNPEVEQWLMQDLNNHERPSRLDATVLEVMRMTPPVGGFFRQNTQSIELADVAIPQGRVIQVVLSSSSTTNQIDLETFRPQRHLDGSFQQTLLPFGGGERVCLGKALAELEIRLMAMGLLQRVQLHLEPDQDLNLQLIPSPTPRDGLLVRATAR

SEQ ID NO: 1035 - protein, 453 aa, Bacillus halodurans
MPTNTMPTGPKGNPVLGNTIEFGKDPLQFITRCSQEYGEIVRLRFERERDTFLLNDPKHIQYVFMNKGGEFSKGYQQDPIMGLVFGNGLLTSEGSFWLRQRRLSQPAFHPKRIADYADTMVGYCERMLNTWMDNDTRDINDEMMQLTMAIATKTLFDLDLHKGDTQEASRSLDTVMTAFNEQMTNVFRHVLHLIGLGKLVPPVSRELREAVESLDKMIYSIIEERRKHPGDRGDLLSMLISTYDEDDGSYMTDRQLRDEIITLFLAGHETTANTLSWAFYLLSQHPHVEEKLYQEVSQVLGNRPATLEDMPKLSYAEHVIKETLRVQPTVWLISRRAEKDVTLGDYHISAGSEIMISQWGMHRNPRYFNDPLTFLPERWDNNDNKPSKYVYFPFGGGPRVCIGERFALMEATLIMATIVREFRMELVDELPIKMEPSITLRPKHGVTMKLRKR

SEQ ID NO: 1036 - protein, 512 aa, Homo sapiens
MLFEGLDLVSALATLAACLVSVTLLLAVSQQLWQLRWAATRDKSCKLPIPKGSMGFPLIGETGHWLLQGSGFQSSRREKYGNVFKTHLLGRPLIRVTGAENVRKILMGEHHLVSTEWPRSTRMLLGPNTVSNSIGDIHRNKRKVFSKIFSHEALESYLPKIQLVIQDTLRAWSSHPEAINVYQEAQKLTFRMAIRVLLGFSIPEEDLGHLFEVYQQFVDNVFSLPVDLPFSGYRRGIQARQILQKGLEKAIREKLQCTQGKDYLDALDLLIESSKEHGKEMTMQELKDGTLELIFAAYATTASASTSLIMQLLKHPTVLEKLRDELRAHGILHSGGCPCEGTLRLDTLSGLRYLDCVIKEVMRLFTPISGGYRTVLQTFELDGFQIPKGWSVMYSIRDTHDTAPVFKDVNVFDPDRFSQARSEDKDGRFHYLPFGGGVRTCLGKHLAKLFLKVLAVELASTSRFELATRTFPRITLVPVLHPVDGLSVKFFGLDSNQNEILPETEAMLSATV

SEQ ID NO: 1037 - protein, 497 aa, Taxus cuspidata
MDSFIFLRSIGTKFGQLESSPAILSLTLAPILAIILLLLFRYNHRSSVKLPPGKLGFPLIGETIQLLRTLRSETPQKFFDDRLKKFGPVYMTSLIGHPTVVLCGPAGNKLVLSNEDKLVEMEGPKSFMKLIGEDSIVAKRGEDHRILRTALARFLGAQALQNYLGRMSSEIGHHFNEKWKGKDEVKVLPLVRGLIFSIASTLFFDVNDGHQQKQLHHLLETILVGSLSVPLDFPGTRYRKGLQARLKLDEILSSLIKRRRRDLRSGIASDDQDLLSVLLTFRDEKGNSLTDQGILDNFSAMFHASYDTTVAPMALIFKLLYSNPEYHEKVFQEQLEIIGNKKEGEEISWKDLKSMKYTWQAVQESLRMYPPVFGIFRKAITDIHYDGYTIPKGWRVLCSPYTTHLREEYFPEPEEFRPSRFEDEGRHVTPYTYVPFGGGLRTCPGWEFSKIEILLFVHHFVKNFSSYIPVDPNEKVLSDPLPPLPANGFSIKLFPRS

SEQ ID NO: 1038 - protein, 508 aa, Rattus norvegicus
MLGAAGTALLCAGLLLGLAQQLWTLRWTLSRDWASTLPLPKGSMGWPFFGETLHWLVQGSRFHSSRRERYGTVFKTHLLGRPVIRVSGAENVRTILLGEHRLVRSQWPQSAHILLGSHTLLGAVGERHRQRRKVLARVFSRPALEQFVPRLQEALRREVRSWCAAQRPVAVYQAAKALTFRMAARILLGLQLDEARCTELAQTFERLVENLFSLPLDVPFSGLRKGIRARDQLYQHLDEVIAEKLREELTAEPGDALHLIINSARELGRELSVQELKELAVELLFAAFFTTASASTSLILLLLQHPAAIAKIQQELSAQGLGSPCSCAPRASGSRPDCSCEPDLSLAVLGRLRYVDCVVKEVLRLLPPVSGGYRTALRTFELDGYQIPKGWSVMYSIRDTHETAAVYRSPPEGFDPERFGVESEDARGSGGRFHYIPFGGGARSCLGQELAQAVLQLLAVELVRTARWELATPAFPVMQTVPIVHPVDGLLLLFHPLPTLGAGDGSPF

SEQ ID NO: 1039 - protein, 944 aa, Rattus norvegicus
MLFEGLELVSALATLAACLVSVTLLLAVSQQLWQLRWAATRDKSCKLPIPKGSMGFPLIGETGHWLLQGSGFQSSRREKYGNVFKTHLLGRPLIRVTGAENVRKILLGEHQLVSTEWPRSARVLLGPNTVANSIGDIHRNKRKVPWPKDEPGPMNTRTRDQAPTVFRYNPLTVEAPHQEIPQDPRIWASVFSKIFSHEALESYLPKIQLVIQDTLRAWSSQPEAINVYQEAQRLTFRMAVRVLLGFSIPEEDLGNLFEVYQQFVENVFSLPVDLPFSGYRRGIQARQILQKGLEKAIREKLQCTQGKDYSDALDILIESSKEHGKEMTMQELKDGTLELIFAAYATTASASTSLIMQLLKHPAVLEKLREELRAQGLLHGGGCPCEGTLRLDMLSGLRYLDCVIKEVMRLFTPVSGGYRTVLQTFELDGFQIPKGWSVMYSIRDTHDTAPVFKDVNVFDPDRFSQARSEDKDGRFHYLPFGGGVRTCLGKHLAKLFLKVLAVELASTSRFELATRTFPRITLVPVLHPVDGLSVKFFGLDSNQNEILPETEAMLSATSAKPSSEFGIEKKAERLVRRFLGLSVFPSAVPRPACQEALERTVKFCSTVLHKGKAVMRSRADGGIDSRKATALPGVTVTRYQVFTLDPMTQRLIDQFEPGWLKFAAVGGAGVAFAWAVSCKLGSTGRKGEYRHQFGKNLEETYSAISQPSPKFPGALAGPGFPRPQDQQAAVRNAPFIPWIRATLSSQKRQPLPRQRCPRSACPHQCCKLNKAIKEEDKAWVSEVTCALLCLSPTLGVNGCTPRELDAKIQVLNIIDFPNKGATSPREEGEKDVAMYYSLKTTGQALGTEIDQGSDYARERAATGNRNSKLEPTNKNPGVFFVPLLSWHQLHRQLDRKPCEAGGRVNEHGTRARKTLEEPGTNTLKLKSRWWQPYSCPRQSTGKAS

SEQ ID NO: 1040 - protein, 526 aa, Oculimacula acuformis
MGILEAVSVPLAQQVSQRGLGVVIAAGFAAFLVVSVVLNVLSQILFKNPNEPPVVFHFFPIIGSTVTYGIDPYKFFFDNKAKYGDIFTFILLGKKTTVYLGRNGNEFILNGKIKDVNAEEIYTVLTTPVFGKDVVYDCPNSKLMEQKKFMKIGLTTEAFKTYVPIIQDEVETFIKRSAELKGHSGTVNIPAQMAEITIYTASHALQGKDCRDKFDSSFAELYHALDMGFSPINFMLHWAPLPHNRARDHAQRTVAKTYMEIMEARRKDKKSLDNMDIMSQLMRSTYKNGVPVPDMEIAHMMIALLMAGQHSSSSSSSWIMLRLASRPDIMEELYQEQLEVLGSDLPPLQYDDLAKLTKHQNVLKEVLRLHTPIHSIMRKVKTPMPVTGTKFVVPTSHVLLASPGFSSRDDTYFPDAMKWEPHRWDPESGGVLGTDVEEESFDYGYGLISKGAKSPYLPFGAGRHRCIGEQFANVQLITITAVMVRHFKFKNLDNSTKVVETDYTSLFSRPLAPAVVEYERREKVKV

SEQ ID NO: 1041 - protein, 445 aa, Deinococcus radiodurans
MVPAPPFLGHAAEMGTIKLRPFLTRCYQAYGPVFQLTVPGQKITVLAGPEANLFAMKEGHRVLRSLEAWRDNDHEMGSDRSMISLDGAEHRAYRRVEGRAFARSFFAAGLRPALAVLAEDLAPFQPGDVLPVATWCKKTITEQLARMAVGGTVRPYLPDLLHFIQTALQVTVNRQLPPAVLRLPKYRRAKARIFQMVDDLIEDHRQNPPEKSGRAPDLIDDVLADQQVNPERWEHPDVRLAALGAFIAGMDTAANSLAFVLYRMHLHSEFLPALRAEADALFRDGPPTAEALGRSPLLHRFVMETLRVHPIAPALSRTLTEDVEFAGHRIPAGTPVIIGTTVPHGLPELFPDPEHFDPGRFAPGRAEHRQPGAYAPFGVGSHTCAGSGMAEGLIMLGAAAALRTLDLSLEPDYVLRQTAKPTPSLDNKLQLRVNAVRHNPVFLVH

SEQ ID NO: 1042 - protein, 455 aa, Mycobacterium tuberculosis
MSAVALPRVSGGHDEHGHLEEFRTDPIGLMQRVRDECGDVGTFQLAGKQVVLLSGSHANEFFFRAGDDDLDQAKAYPFMTPIFGEGVVFDASPERRKEMLHNAALRGEQMKGHAATIEDQVRRMIADWGEAGEIDLLDFFAELTIYTSSACLIGKKFRDQLDGRFAKLYHELERGTDPLAYVDPYLPIESFRRRDEARNGLVALVADIMNGRIANPPTDKSDRDMLDVLIAVKAETGTPRFSADEITGMFISMMFAGHHTSSGTASWTLIELMRHRDAYAAVIDELDELYGDGRSVSFHALRQIPQLENVLKETLRLHPPLIILMRVAKGEFEVQGHRIHEGDLVAASPAISNRIPEDFPDPHDFVPARYEQPRQEDLLNRWTWIPFGAGRHRCVGAAFAIMQIKAIFSVLLREYEFEMAQPPESYRNDHSKMVVQLAQPACVRYRRRTGVHHHH

SEQ ID NO: 1043 - protein, 509 aa, Anopheles gambiae str. PEST
MFYWAVVLGVIATLLAALDWKYKSYEHLPGPRRWPFIGNVVSFLGAGPVEIFDQLIAFASTYGKVYKLDFFYDYTIIYSSPEAAEAILTSPAFTAKSQDYDKVSEWIGNGLLISRDQKWFTHRKVITPGFHFKILENFVPVFNRQAEAFCAKLETLTGRSADAVNVFPELKLLTLGIICETAMGVGMDGEGQSTQQAYYTQIVEELSSILYWRMFNVFVNIDAVFRLTRTSRRFDELVKKSWQFTLGMIERRRKMNELEAPVEVRKEEETFGKQKRALLDTLLEARIDGRPLTDEEIREEVDTFTFAGHDTTASAMTFILYNVAKHPEIQERVYQEIVNEIGADFCELSLRAICLHTLSALNNLHYMELVIKESLRLFPPVPVIARIATEDTELLAERITRGTSVAIDIYTMHHSDDYFPDAERFDPDRFEGARDAQTFNPYTYIPFSAGSRNCIGQKFAQYELKSTLVKLLQRFQIRLADASYVPILKAEIVLKPAEGLPLRFIKRRV

SEQ ID NO: 1044 - protein, 458 aa, Caulobacter crescentus CB15
MDADVRSAPLIPPAPKVHPRQLGGSFVGELRIALEMSRNLMGAWCEEDFDNLFTPYVFMGQPGMVVSDPAAARRILSSPNYVRPVKAARSVRPIAGDGLLLSEGETWRRQRKSLAPVFTPMAVEGLLPHFVAAGASLAEALSGHARADLSEAFHHATLDAVLSALFSRRADAQGDQLAYMVRRYMEGPAHFNLMDFVSRGADDLTFLDVERRRQGAAWFQAVEHLIAQRQAHPHAEARDLLDRLLAARDEDGAPLSNQEIRDQCGTMLVAGFETTSRLLFWATYLLALDPATQDRLRAEVLAAPAAAVRTLDDLQAWPLMRSVLFETLRLYPTAPLLAREAIGPDTVMGHAVVPGQIITISPWLIHRHRKLWDAPTAFVPDRFIDQPHPWGIEAFLPFGAGPRVCIGASFALAEAQIVLASLLERFEIGLVSDRPVIPIASITLGPDHAPAFTLTPVS

SEQ ID NO: 1045 - protein, 500 aa, Mentha x piperita
MELQISSAIIILVVTYTISLLIIKQWRKPKPQENLPPGPPKLPLIGHLHLLWGKLPQHALASVAKQYGPVAHVQLGEVFSVVLSSREATKEAMKLVDPACADRFESIGTKIMWYDNDDIIFSPYSVHWRQMRKICVSELLSARNVRSFGFIRQDEVSRLLGHLRSSAAAGEAVDLTERIATLTCSIICRAAFGSVIRDHEELVELVKDALSMASGFELADMFPSSKLLNLLCWNKSKLWRMRRRVDAILEAIVEEHKLKKSGEFGGEDIIDVLFRMQKDSQIKVPITTNAIKAFIFDTFSAGTETSSTTTLWVMAELMRNPEVMAKAQAEVRAALKGKTDWDVDDVQELKYMKSVVKETMRMHPPIPLIPRSCREECEVNGYTIPNKARIMINVWSMGRNPLYWEKPETFWPERFDQVSRDFMGNDFEFIPFGAGRRICPGLNFGLANVEVPLAQLLYHFDWKLAEGMNPSDMDMSEAEGLTGIRKNNLLLVPTPYDPSS

SEQ ID NO: 1046 - protein, 496 aa, Cucurbita maxima
MESTWAVAAVVTAVVAVATVFSVLKWAAKSLNEWIYEAKLGDRRLALPPGDLGWPLIGNMLGFLRAFKSKNPETFIDGYVSRYGKTGVYKVHLFGNPSVVVTTPETCRKVLTDDEAFQPGWPRAAVELIGEKSFIQMPQEEHKRLRRLTSAPVNGFEALSNYIPYIEKNVLESLEKWSKMGPIEFLTQLRKLTFTVIMYIFLSSESEPVMEMLEKEYTRLNYGVRDMRINLPGFAYHKALKARKNLVAALKGIVTERRRQKLDKWAPKRKDMMDQLIDIVDENGRKLDDEEIIDILIMYLNAGHESSGHTMMWATILLNQHPEVLKKAREEQEAIVRNRPAGQTGLTLKECRDMEYLSKVVDETLRYVSFSLVVFREAQMDVNLNGYLIPKGWKVLAWFRSIHYDSEVYPDPKKFEPSRWDGFVPKAGEFLPFGAGSRLCPGNDLAKLEICIFVHYFLLNYNLEWLTPDCEILYLPHSRPKDNCMAKITKKSSVAA

SEQ ID NO: 1047 - protein, 468 aa, Arabidopsis thaliana
MAEIWFLVVPILILCLLLVRVIVSKKKKNSRGKLPPGSMGWPYLGETLQLYSQNPNVFFTSKQKRYGEIFKTRILGYPCVMLASPEAARFVLVTHAHMFKPTYPRSKEKLIGPSALFFHQGDYHSHIRKLVQSSFYPETIRKLIPDIEHIALSSLQSWANMPIVSTYQEMKKFAFDVGILAIFGHLESSYKEILKHNYNIVDKGYNSFPMSLPGTSYHKALMARKQLKTIVSEIICERREKRALQTDFLGHLLNFKNEKGRVLTQEQIADNIIGVLFAAQDTTASCLTWILKYLHDDQKLLEAVKAEQKAIYEENSREKKPLTWRQTRNMPLTHKVIVESLRMASIISFTFREAVVDVEYKGYLIPKGWKVMPLFRNIHHNPKYFSNPEVFDPSRFEVNPKPNTFMPFGSGVHACPGNELAKLQILIFLHHLVSNFRWEVKGGEKGIQYSPFPIPQNGLPATFRRHSL

SEQ ID NO: 1048 - protein, 443 aa, Arabidopsis thaliana
MAEIWFLVVPILILCLLLVRVIVSKKKKNSRGKLPPGSMGWPYLGETLQLYSQNPNVFFTSKQKRYGEIFKTRILGYPCVMLASPEAARFVLVTHAHMFKPTYPRSKEKLIGPSALFFHQGDYHSHIRKLVQSSFYPETIRKLIPDIEHIALSSLQSWANMPIVSTYQEMKKFAFDVGILAIFGHLESSYKEILKHNYNIVDKGYNSFPMSLPGTSYHKALMARKQLKTIVSEIICERREKRALQTDFLGHLLNFKNEKGRVLTQEQIADNIIGVLFAAQDTTASCLTWILKYLHDDQKLLEAVKAEQKAIYEENSREKKPLTWRQTRNMPLTHKVIVESLRMASIISFTFREAVVDVEYKGYLIPKGWKVMPLFRNIHHNPKYFSNPEVFDPSRFEVNPKPNTFMPFGSGVHACPGNELAKLQILIFLHHLVSNFRYVFHAR

SEQ ID NO: 1049 - protein, 521 aa, Glycine max
  unsure (1)..(521): unsure at all Xaa locations
MSRAKKYAAILIFIFIFCFLRKKANLLTFQRTESSNTPMDGIFAYTILILLTIFSFMFLPKPNRRRPQNQTLAKLPPGSMGWPYIGETLQLYSQDPNAYFSTKHKRYGEIFKTNILGCPCVMLTSPEAARFVLVTQAHLFRPTYPKSKERLIGPFALFFHQGEYHTRLRKLVQRSLSLEALRNLVPHIEALALSAMNSWGGDGQVINTFKEMKMFSFEVGILTIFGYLEPRLREELKKNYRIVDNGYNSFPTCIPGTQYQKALLARRRLGKIIGDIICERKEKKLLERDLLSCLLNWKGEGGEVLSDYQIADNIIGVLFAAQDTTASAMTWVVKYLHDEPKLLESVKAEQKAIHKSNXXGNLPLSWDQTRNMRITHKVVLESLRMASIISFPFREAIADVEYKGFLIPKGWKAMPLFRNIHHNPEYFPEPQKFNPSRFEVAPKPNTFMPFGSGVHACPGNELAKLETLIMIHHLVTKFRWEVVGSKCGIQYGPFPLPLNGLPARCWRESYQLEKAAREENA

SEQ ID NO: 1050 - protein, 488 aa, Pisum sativum
MILEMGSMWVVLMAIGGALLVLRSILKNVNWWLYESKLGVKQYSLPPGDMGWPFIGNMWSFLRAFKSKDPDSFISSIVSRYGSSGIYKALMFGNPSVIVTTPEGCKRVLTDDEKFTTGWPQSTIELIGKNSFIAMTYEEHKRLRRLTSSSINGMEALSLYLKYIEENVIISLEKWSNMGQIEFLTEIRKLTFKIIMHIFLSSESEPVMEALEKEYTILNHGVRAMQINVPGFAYYKALKARKNLVGIFQSIVDDRRNIRKVYSQKKAKDMMDSLIDVEDDNGRKLNDEDIIDIMLMYLNAGHESSGHITMWATYFLQKHPEYLKKAKEEQEEIIKRRPSTQKGLTLKEIRGMDFLYKVIDETMRVITFSLVVFREAKSDVTINGYTIPKGWKVLTWFRSVHLDPEIYPNPKEFNPNRWNKEHKAGEFLPFGAGTRLCPGNDLAKMEIAVFLHHFTLNYRLEQLNPKCPIRYLPHTRPMDNCLGRVKKC

SEQ ID NO: 1051 - protein, 490 aa, Pisum sativum
MASLWFIFGAIAGALLVLRSLLKNVNWFLYEAKLGDKQYSLPPGDMGWPIIGNMWSFLRAFKSSKPDSFMDSIVKRFGNTGIYKVFMFGFPSVIVTSPEACKKVLTDDENFEPGWPQSTVELIGEKSFIKMPFEEHRRLRRLTSASINGYEALSVYLKYIEEIVISSLEKWTQMGEIEFLTQMRKLTFKIIIHIFLGSESEPVMEALEREYTVLNLGVRAMRINIPGFAFHKSLKARKNLVAIFQSIVDKRRNERRGKEPAPGKKAKDMMDSLIDAVDENGRKLGDDEIIDIMLMYLNAGHESSGHITMWATYFLQRHPEFFRKAKEEQVEMLKRRPPSQKGLKLEDVRKMEYLSKVIDETMRVVTFSLMVFRQARNDVKVNGYLIPKGWRVLTWFRSVHFDSELYPDPREFNPENFSVVRKAGEFLPFGAGTRLCPGNDLAKLEISVFLHHFLLKYELEQLNPKSPIRFLPHTRPLDNCLARIKKQEAA

SEQ ID NO: 1052 - protein, 550 aa, Cryptococcus neoformans var. neoformans
MSAIIPQVQQLLGQVAQFFPPWFAALPTSLKVAIAVVGIPALIIGLNVFQQLCLPRRKDLPPVVFHYIPWFGSAAYYGEDPYKFLFECRDKYGDLFTFILMGRRITVALGPKGNNLSLGGKISQVSAEEAYTHLTTPVFGKGVVYDCPNEMLMQQKKFIKSGLTTESLQSYPPMITSECEDFFTKEVGISPQKPSATLDLLKAMSELIILTASRTLQGKEVRESLNGQFAKYYEDLDGGFTPLNFMFPNLPLPSYKRRDEAQKAMSDFYLKIMENRRKGESDHEHDMIENLQSCKYRNGVPLSDRDIAHIMIALLMAGQHTSSATSSWTLLHLADRPDVVEALYQEQKQKLGNPDGTFRDYRYEDLKELPIMDSIIRETLRMHAPIHSIYRKVLSDIPVPPSLSAPSENGQYIIPKGHYIMAAPGVSQMDPRIWQDAKVWNPARWHDEKGFAAAAMVQYTKAEQVDYGFGSVSKGTESPYQPFGAGRHRCVGEQFAYTQLSTIFTYVVRNFTLKLAVPKFPETNYRTMIVQPNNPLVTFTLRNAEVKQEV

SEQ ID NO: 1053 - protein, 500 aa, Solanum chacoense
MQLVSIFLFISFLFLLRKWKKYLNNSQTKKLPPGPWKLPFIGGMHHLAGGLPHRVLRDLAEKYGPLMHLQLGEVSAVVVTSPEMAKQVLKTHDIAFASRPKLLAMDIICYNRRDIAFSPYGDYWRQMRKICIMEVLSAKSVRSFSSIRHDEVVRLIDSIQPCFTSGELVNFTERIIWFTSSMTCRSAFGQVLKEQEVFIKLIREVISLAEGFDVADIFPSYKFLHGFGGAKQKLLNAHRKVDSIVEDVIKEHKKNLATRKSDDAIGGEDLVDALVRLMNDKSLQFPINNDNIKAVIIDLFAAGTETSSTTTVWAMAEMLKNPSVFAKAQAKVREAFRDKVTFDENDVEELKYLKLVIKETMRLHAPVPLLVPRECREETEINGYTIPVKTKVMVNVWALGRDPKYWDDAESFKPERFEQCSIDFIGNNFEYLPFGGGRRICPGISFGLANVYLPLAQLLYHFDWKLPTGMEPKDLDLTESAGITAARKGDLYLIATPHQP

SEQ ID NO: 1054 - protein, 492 aa, Oryza sativa
  unsure (1)..(492): unsure at all Xaa locations
MAASFVIVIVISFXXFLLLLCAMSTTRAGRGGKLPPGSMGWPYIGETLQLYSQDPNVFFASKQKRYGEIFKTHILGCPCVMLASPEAARFVLVTQAHLFKPTYPRSKEXRMIGPSALFFHQGDYHLRLRRLVQGPLGPDALRALVPDVEAAVRSTLASWDGNVSSTFHAMKRLSFDVGIVTIFGGRLDERRKAELRQNYAIVEKGYNSFPNSFPGTLYYKAIQARRRLHGVLSDIMRERRARGEPGSDLLGCLMQSRAGDDGALLTDEQVADNIIGVLFAAQDTTASVLTWIVKYLHDHPKLLEAVRAEQAAIRAANDGGRLPLTWAQTRSMALTHKVILESLRMASIISFTFREAVADVEYKGFLIPKGWKVMPLFRNIHHNPDYFQDPQKFDPSRFKVSPRPNXTFXSFGNGVHACPGNELAKLEMLVLIHHLVTGYRWEIVGSSDEVEYSPFPVPKHGLLAKLWRDDSVSVETDGCQNGDNDDNGVAMV

SEQ ID NO: 1055 - protein, 490 aa, Oryza sativa
  unsure (1)..(490): unsure at all Xaa locations
AAVLCFVVPAFLLLCTSVQRRRDVGRQKKKKLRLPPGSMGWPYVGETLQLYSQDPNVFFASKQKRYGEIFKTNLLGCPCVMLASPEAARFVLVSQARLFKPTYPPSKERMIGPSALFFHQGEYHLRLRRLVQAALAPDSLRALVPDVDAAVAATLAAWSGGHVASTFHAMKKLSFDVGVVTIFGGRLXAAGHREELRTNYSVVERGYNCFPNRFPGTLYHKAIQARKRLRAILSEIVAERRARGGGGGGGGDDLLGGLMRSRDDGTAVLTDDQIADNVVGVLFAAQDTTASVLTWILKYLHDSPKLLEAVKAEQMAIYVANEGGKRPLTWTQTRSMTLTHQVILESLRMASIISFTFREAVADVEYKGFLIPKGWKVMPLFRNIHHNPDYFQDPQKFDPSRFKVAPRPSTFLPFGSGVHACPGNELAKLEMLVLVHRLVTAYRWEIVGASDEVEYSPFPVPRGGLNAKLWKQEAEEDMYMAMGTITAAGA

SEQ ID NO: 1056 - protein, 502 aa, Oryza sativa
  unsure (1)..(502): unsure at all Xaa locations
TGASTSLPLLCFSQGRGEERERIGKEVERAAVLCFVVPAFLLLCTSVQRRRDVGQGGGRDWQKKKKLRLPPGSMGWPYVGETLQLYSQDPNVFFASKQKRYGEIFKTNLLGCPCVMLASPEAARFVLVSQARLFKPTYPPSKERMIGPSALFFHQGXAALAPDSLRALVPDVDAAVAATLAAWSGGHVASTFHAMKKLSFDVGVVTIFGGRRRRHREELRTNYSVVERGYNCFPNRFPGTLYHKAIQARKRLRAILSEIVAERRARGGGGGGGGDDLLGGLMRSRDDGTAGAVALLTDDQIADNVVGVLFAAQDTTASVLTWILKYLHDSPKLLEAVKAEQMAIYVANEGGKRPLTWTQTRSMTLTHQVILESLRMASIISFTFREAVADVEYKXPALAWAYLTTTSLNFAGRFXVAPRPSTFLPFGSGVHACPGNELAKLEMLVLVHRLVTAYRWEIVGASDEVEYSPFPVPRGGLNAKLWKQEAEEDMYMAMGTITAAGA

SEQ ID NO: 1057 - protein, 189 aa, Triticum aestivum
  unsure (1)..(189): unsure at all Xaa locations
XGPLGPEALRKLVPDIEAAVRATLAAWADGDVASTFHAMKRLSFDVGIVTIFGGRLDERRKEELRRNYAVVEKGYNSFPNSFPGTLYYKAIQARRRLNGVLSDILHERRERGEPGDDLLGCLMRYDGDEGALLTDEQVADNVIGVLFAAQDTTASVLTWIVKYLHDRPKLLEAVRAEHAQIHEANDGGX

SEQ ID NO: 1058 - protein, 247 aa, Triticum aestivum
  unsure (1)..(247): unsure at all Xaa locations
XKARKRLGAIVAHIISVRRERERGSDLLGSFMDGREALTDDQIADNAIGVIFAARDTEPSXPARHPIEKQRLTRSSYNQQEEHAEIAREKALSGEALSWADTRRMRLTGRVIQETMRVASILSFTFREAVEDVEYQGYLIPKGWKVLPLFRNIHHNPDHFPSPEKFDPSRFEVAPKPNTFMPFGNGTHSCPGNELAKLEMLVLCHHLATKYRWSTSKSESGVQFGPFALPINGLPMTFTRKDDKNKA

SEQ ID NO: 1059 - protein, 122 aa, Triticum aestivum
  unsure (1)..(122): unsure at all Xaa locations
SFSRIIWMAFFLLLLCILISAAIVSYAHHQAALKLPPGSMGLPYIGETLQLYSQDPSVFLSSKQKRYGEIFKTHLLGCPCVMLASPEAARFVLVSRAHLFKPTYPRSKERLIGPSALFFHQX

SEQ ID NO: 1060 - protein, 464 aa, Novosphingobium aromaticivorans
MASIAPDSRTDLHTERANPHWVRLGGDHKLDHVPGEDGWPVLGTTLMQLADPLGFQRRMVETHGPVFRTRSFGRRGVNLIGADANELVLFDRDRLFSNEQGWGPVLNLLFPRGLMLMDFEAHRVDRRALSIAFKPEPMRAYCSVLNTGIAQAVQGWGGQMRFYDAIKALTLDTAASSFLGLPLGPEADRLNKAFVDMVQASGGVVRRPLPFTRMGKGVAGRRLMVEYFGRLVRERRADPGQDMFSQFALATREDGSLLPEDVVVDHMIFLMMAAHDTITSSATVLFWQLARNPDWQDRLRAEARAVTGGDGLPLAYEDLGRMELTEMAFKEALRFMPPVPNMPRRALRDFEFGGYRIPAGTPVGISPAAVHADPAHWPEPDRFDPLRFTPENVSGRHKYAWVPFGGGAHMCLGLHFAYMQVKLLVSHILTRYEVAMQPGPAPSWQAWPIPKPRDGLRVEMRRIC

SEQ ID NO: 1061 - protein, 310 aa, Pichia anomala
EFVKGALTRDAFKSYVPQIREEIIHYFQNSKNFKFGERKHGISNVMATQPEITIFTASRSLMGKQMRERFDESFAGYYSDLDKGFTPINFVFPNLPLPSYRRRDYAQQKISSTYMGLIKERRENNDIKDRDLIDTLMKTSTYKDGVKMTDQEIANLLIGVLMGGQHTSAATSAWFLLHLAEKPELQEEIYQEIMKVTGGEDVTYDDLQEMPLVNNVIKETLRMHMPLHSIFRKVKNPLPVPGTSYVVPKGHHVLVSPGFAMTNENYFPQPEVYNPHRWDEDSTSKAAQDSSTVDYGFGAVSKGVSSPYLP

SEQ ID NO: 1062 - protein, 524 aa, Venturia inaequalis
  unsure (1)..(524): unsure at all Xaa locations
MGLLSPLLAXLPGSDRSWLFYTLASFGFTVAIVAANLVKQLLFSNPNEPPVVFHWFPFFGNTVVYGIDPIKFFAECKEKHGDIFTFILLGRKTTVYIGTKGNEFILNGKQSHVNAEEIYSPLTTPVFGSDVVYDCPNSKLMEQKKFVKYGLTTEALKSYVTLIQQEVEDYTKRYPQFKGEKGSFDVCASMAEITIFTASRSLQGKEVRDKFDASFADLFHDLDMGFSPINFMLPWAPLPHNRRRDAANKKMTETYLEIIQSRKAEGVKKDSEDMIWNLMQCVYKNGTPIPDKEIAHMMIALLMAGQHSSSSTSSWILLRLATRPDIQEELYQEQIRVCGADLPPLQYEDLARMPLHNQIIKETLRMHSPIHSILRAVKQPMPVEGTPYTIPTSHVLLAAPIASGGSPMYFPAPEKWEPHRWDEGSGGTNISGGENGGEEKEDYGYGLITKGASSPYLPFGAGRHRCIGEQFAYMQLNTVLATQVREFKFSLREGESFPKTDFSSLFSGPLRPAWLNWERREKSS

SEQ ID NO: 1063 - protein, 524 aa, Uncinula necator
MYIADILSDLLTQQTTRYGWIFMVTSIAFSIILLAVGLNVLSQLLFRRPYEPPVVFHWFPIIGSTISYGIDPYKFYFDCRAKYGDIFTFILLGKKVTVYLGLQGNNFILNGKLKDVNAEEIYTNLTTPVFGRDVVFDCPNSKLMEQKKFMKTALTIEAFHSYVTIIQNEVEAYINNCVSFQGESGTVNISKVMAEITIYTASHALQGEEVRENFDSSFAALYHDLDMGFTPINFTFYWAPLPWNRARDHAQRTVARTYMNIIQARREEKRSGENKHDIMWELMRSTYKDGTPVPDREIAHMMIALLMAGQHSSSSTSSWIMLWLAARPDIMEELYEEQLRIFGSEKPFPPLQYEDLSKLQLHQNVLKEVLRLHAPIHSIMRKVKNPMIVPGTKYVIPTSHVLISSPGCTSQDATFFPDPLKWDPHRWDIGSGKVLGNDAVDEKYDYGYGLTSTGASSPYLPFGAGRHRCIGEQFATLQLVTIMATMVRFFRFRNIDGKQGVVKTDYSSLFSMPLAPALIGWEKR

SEQ ID NO: 1064 - protein, 524 aa, Uncinula necator
MYIADILSDLLTQQTTRYGWIFMVTSIAFSIILLAVVLNVLSQLLFRRPYEPPVVFHWFPIIGSTISYGIDPYKFYFDCRAKYGDIFTFILLGKKVTVYLGLQGNNFILNGKLKDVNAEEIYTNLTTPVFGRDVVYDCPNSKLMEQKKFMKTALTTEAFHSYVTIIQNEVEAYINNCVSFQGESGTVNISKVMAEITIYTASHALQGEEVRENFDSSFAALYHDLDMGFTPINFTFYWAPLPWNRARDHAQRTVARTYMNIIQARREEKRSGENKHDIMWELMRSTYKDGTPVPDREIAHMMIALLMAGQHSSSSTSSWIMLWLAARPDIMEELYEEQLRIFGSEKPFPPLQYEDLSKLQLHQNVLKEVLRLHAPIHSIMRKVKNPMIVPGTKYVIPTSHVLISSPGCTSQDATFFPDPLKWDPHRWDIGSGKVLGNDAVDEKYDYGYGLTSTGASSPYLPFGAGRHRCIGEQFATLQLVTIMATMVRFFRFRNIDGKQGVVKTDYSSLFSMPLAPALIGWEKR

SEQ ID NO: 1065 - protein, 524 aa, Uncinula necator
MYIADILSDLLTQQTTRYGWIFMVTSIAFSIILLAVGLNVLSQLLFRRPYEPPVVFHWFPIIGSTISYGIDPYKFYFDCRAKYGDIFTFILLGKKVTVYLGLQGNNFILNGKLKDVNAEEIYTNLTTPVFGRDVVYDCPNSKLMEQKKFMKTALTIEAFHSYVTIIQNEVEAYINNCVSFQGESGTVNISKVMAEITIYTASHALQGEEVRENFDSSFAALYHDLDMGFTPINFTFYWAPLPWNRARDHAQRTVARTYMNIIQARREEKRSGENKHDIMWELMRSTYKDGTPVPDREIAHMMIALLMAGQHSSSSTSSWIMLWLAARPDIMEELYEEQLRIFGSEKPFPPLQYEDLSKLQLHQNVLKEVLRLHAPIHSIMRKVKNPMIVPGTKYVIPTSHVLISSPGCTSQDATFFPDPLKWDPHRWDIGSGKVLGNDAVDEKYDYGYGLTSTGASSPYLPFGAGRHRCIGEQFATLQLVTIMATMVRFFRFRNIDGKQGVVKTDYSSLFSMPLAPALIGWEKR

SEQ ID NO: 1066 - protein, 416 aa, Streptomyces venezuelae
MRRTQQGTTASPPVLDLGALGQDFAADPYPTYARLRAEGPAHRVRTPEGDEVWLVVGYDRARAVLADPRFSKDWRNSTTPLTEAEAALNHNMLESDPPRHTRLRKLVAREFTMRRVELLRPRVQEIVDGLVDAMLAAPDGRADLMESLAWPLPITVISELLGVPEPDRAAFRVWTDAFVFPDDPAQAQTAMAEMSGYLSRLIDSKRGQDGEDLLSALVRTSDEDGSRLTSEELLGMAHILLVAGHETTVNLIANGMYALLSHPDQLAALRADMTLLDGAVEEMLRYEGPVESATYRFPVEPVDLDGTVIPAGDTVLVVLADAHRTPERFPDPHRFDIRRDTAGHLAFGHGIHFCIGAPLARLEARIAVRALLERCPDLALDVSPGELVWYPNPMIRGLKALPIRWRRGREAGRRTG

SEQ ID NO: 1067 - protein, 481 aa, Trypanosoma brucei brucei
MLLEVAIFLLTALALYSFYFVKSFNVTRPTDPPVYPVTVPILGHIIQFGKSPLGFMQECKRQLKSGIFTINIVGKRVTIVGDPHEHSRFFLPRNEVLSPREVYSFMEPVFGEGVAYAAPYPRMREQLNFLAEELTIAKFQNFVPAIQHEVRKFMAANWDKDEGEINLLEDCSTMIINTACQCLFGEDLRKRLDARRFAQLLAKMESSLIPAAVFLPILLKLPLPQSARCHEARTELQKILSEIIIARKEEEVNKDSSTSDLLSGLLSAVYRDGTPMSLHEVCGMIVAAMFAGQHTSSITTTWSMLHLMHPANVKHLEALRKEIEEFPAQLNYNNVMDEMPFAERCARESIRRDPPLLMLMRKVMADVKVGSYVVPKGDIIACSPLLSHHDEEAFPEPRRWDPERDEKVEGAFIGFGAGVHKCIGQKFGLLQVKTILATAFRSYDFQLLRDEVPDPDYHTMVVGPTASQCRVKYIRRKAAAA

SEQ ID NO: 1068 - protein, 515 aa, Mercenaria mercenaria
MEILGMVNLPTWLVCIIMTVMTVCLYTWYKQSYFKRLGIHTKPTVFFLGDMFELSKKGFGYIDDQMVKENGKIFGLYLGNIPTLVISDTDIIKQIMVKDFSKFTDRVSLVQVTKKWKSAVSVASGEHWRFLRTTLSPTFTTGKIREMKPYIHKCMKTLLELLSEKTDQNPEGFNIVPNLSGYTLDVICSTGFGLDVDAQKDPDNLIIRYAREFLEFRGLRNPLFLVQMFFPDLSSIFGRLLETNIVSNEAFDFYMSTMKKAFTDRKQAQSKHRDLLQLLINTHKGELGENEIDTEETTFEGMKQRGLTDEEVLLNSIIFMVAGYDTTATTLSWIVYDLVTNTECQEKLIEEIDAEIGESETTYDNVFKLRYLDMVVNETLRMHPPAQRINRLALEDVKINGLQILKGMDCTFSILALHYMPEYWENPYKYDPERFAPENQANINQYAYMPFGQGPRNCIGKRLALLEVKATVVVLLQKFRLHKTDKLQVPMPVSDVGLGKPAKPVFVRLEKRSKN

SEQ ID NO: 1069 - protein, 518 aa, Homarus americanus
MITVVLVAVLAVLLTHFLWRRKNHFQLLARNGIPTPKYHWLLGHMEQTFYSPGKRSVVEVKHEWLQLYGKVCGFYSGAIPRVLVADLDMLKHILVKDINNFVNRSFFGTDKKMLIFLRDQQWKDVRRIMTPVFSSAKMKKMMPLMGGCVEELMDMYETAADSGQPIDMMEAFQCLTMDVINRCAITLDINCIKNPKNEVLAFMRKYVSQPIPCIFKFIVAFPMLYDLIRLLIPENKRNNITFIEEHLTKVVKQRREQTQATVVDGLQLLVDAADANVDASKTKLTDEEVVDNAFLFLLAGFETTSTALTYTSYLLALNPDIQEKIFQEVEEVVGLERAPSYEDLSKLVYTEAVALESTRMYPPVTGFITRQATQDWQYGPYTIPAGTEVEVPVWSIHHNPELYPQPELFKPERFLPKAKKDRHTMAYLGFGGGPRNCLGLRFALMEMKLVLSSVIQRFYIKPCSHTKVPLTLVTRNVFTNPDEGVWLTLHRRTTDLPHHYEPPTQVLYNRLCQVPLTK

SEQ ID NO: 1070 - protein, 492 aa, Mycobacterium tuberculosis H37Rv
MATIHPPAYLLDQAKRRFTPSFNNFPGMSLVEHMLLNTKFPEKKLAEPPPGSGLKPVVGDAGLPILGHMIEMLRGGPDYLMFLYKTKGPVVFGDSAVLPGVAALGPDAAQVIYSNRNKDYSQQGWVPVIGPFFHRGLMLLDFEEHMFHRRIMQEAFVRSRLAGYLEQMDRVVSRVVADDWVVNDARFLVYPAMKALTLDIASMVFMGHEPGTDHELVTKVNKAFTITTRAGNAVIRTSVPPFTWWRGLRARELLENYFTARVKERREASGNDLLTVLCQTEDDDGNRFSDADIVNHMIFLMMAAHDTSTSTATTMAYQLAAHPEWQQRCRDESDRHGDGPLDIESLEQLESLDLVMNESIRLVTPVQWAMRQTVRDTELLGYYLPKGTNVIAYPGMNHRLPEIWTDPLTFDPERFTEPRNEHKRHRYAFTPFGGGVHKCIGMVFDQLEIKTILHRLLRRYRLELSRPDYQPRWDYSAMPIPMDGMPIVLRPR

SEQ ID NO: 1071 - protein, 441 aa, Mycobacterium tuberculosis H37Rv
MSEVVTAAPAPPVVRLPPAVRGPKLFQGLAFVVSRRRLLGRFVRRYGKAFTANILMYGRVVVVADPQLARQVFTSSPEELGNIQPNLSRMFGSGSVFALDGDDHRRRRRLLAPPFHGKSMKNYETIIEEETLRETANWPQGQAFATLPSMMHITLNAILRAIFGAGGSELDELRRLIPPWVTLGSRLAALPKPKRDYGRLSPWGRLAEWRRQYDTVIDKLIEAERADPNFADRTDVLALMLRSTYDDGSIMSRKDIGDELLTLLAAGHETTAATLGWAFERLSRHPDVLAALVEEVDNGGHELRQAAILEVQRARTVIDFAARRVNPPVYQLGEWVIPRGYSIIINIAQIHGDPDVFPQPDRFDPQRYIGSKPSPFAWIPFGGGTRRCVGAAFANMEMDVVLRTVLRHFTLETTTAAGERSHGRGVAFTPKDGGRVVMRRR

SEQ ID NO: 1072 - protein, 472 aa, Mycobacterium tuberculosis H37Rv
MSGTSSMGLPPGPRLSGSVQAVLMLRHGLRFLTACQRRYGSVFTLHVAGFGHMVYLSDPAAIKTVFAGNPSVFHAGEANSMLAGLLGDSSLLLIDDDVHRDRRRLMSPPFHRDAVARQAGPIAEIAAANIAGWPMAKAFAVAPKMSEITLEVILRTVIGASDPVRLAALRKVMPRLLNVGPWATLALANPSLLNNRLWSRLRRRIEEADALLYAEIADRRADPDLAARTDTLAMLVRAADEDGRTMTERELRDQLITLLVAGHDTTATGLSWALERLTRHPVTLAKAVQAADASAAGDPAGDEYLDAVAKETLRIRPVVYDVGRVLTEAVEVAGYRLPAGVMVVPAIGLVHASAQLYPDPERFDPDRMVGATLSPTTWLPFGGGNRRCLGATFAMVEMRVVLREILRRVELSTTTTSGERPKLKHVIMVPHRGARIRVRATRDVSATSQATAQGAGCPAARGGGPSRAVGSQ

SEQ ID NO: 1073 - protein, 476 aa, Mycobacterium tuberculosis H37Rv
MVLRSLASPAALTDPKRCASVVGVAAFAVRREHAPDALGGPPGLPAPRGFRAAFAAAYAVAYLAGGERRMLRLIRRYGPIMTMPILSLGDVAIVSDSALAKEVFTAPTDVLLGGEGVGPAAAIYGSGSMFVQEEPEHLRRRKLLTPPLHGAALDRYVPIIENSTRAAMHTWPVDRPFAMLTVARSLMLDVIVKVIFGVDDPEEVRRLGRPFERLLNLGVSEQLTVRYALRRLGALRVWPARARANTEIDDVVMALIAQRRADPRLGERHDVLSLLVSARGESGEQLSDSEIRDDLITLVLAGHETTATTLAWAFDLLLHHPDALRRVRAEAVGGGEAFTTAVINETLRVRPPAPLTARVAAQPLTIGGYRVEAGTRIVVHIIAINRSAEVYEHPHEFRPERFLGTRPQTYAWVPFGGGVKRCLGANFSMRELITVLHVLLREGEFTAVDDEPERIVRRSIMLVPRRGTRVRFRPAR

SEQ ID NO: 1074 - protein, 449 aa, Mycobacterium tuberculosis H37Rv
MASTLTTGLPPGPRLPRYLQSVLYLRFREWFLPAMHRKYGDVFSLRVPPYADNLVVYTRPEHIKEIFAADPRSLHAGEGNHILGFVMGEHSVLMTDEAEHARMRSLLMPAFTRAALRGYRDMIASVAREHITRWRPHATINSLDHMNALTLDIILRVVFGVTDPKVKAELTSRLQQIINIHPAILAGVPYPSLKRMNPWKRFFHNQTKIDEILYREIASRRIDSDLTARTDVLSRLLQTKDTPTKPLTDAELRDQLITLLLAGHETTAAALSWTLWELAHAPEIQSQVVWAAVGGDDGFLEAVLKEGMRRHTVIASTARKVTAPAEIGGWRLPAGTVVNTSILLAHASEVSHPKPTEFRPSRFLDGSVAPNTWLPFGGGVRRCLGFGFALTEGAVILQEIFRRFTITAAGPSKGETPLVRNITTVPKHGAHLRLIPQRRLGGLGDSDPP

SEQ ID NO: 1075 - protein, 526 aa, Oculimacula yallundae
MGILDAVTVPLATQVSQRGLGVVIAAGFAAFLVVSVVLNVLSQILFKNPNEPPVVFHFFPIIGSTVTYGIDPYKFFFDNKAKYGNIFTFILLGKKTTVYLGPDGNEFILNGKIKDVNAEEIYTVLTTPVFGKDVVYDCPNSKLMEQKKFMKIGLTTDAFKTYVPIIQNEVETFIKRSPEFKGHSGTVNIPAQMAEITIYTASHALQGKDCRDKFDSSFAELYHALDMGFSPINFMLHWAPLPHNRARDHAQRTVAKTYMEIMEARRKDKKSLDNMDIMSQLMRSTYKNGVPVPDMEIAHMMIALLMAGQHSSSSSSSWIMLRLASRPDIMEELYQEQLEVLGSDLPPLQYEDLAKLTKHQNVLKEVLRLHTPIHSIMRKVKTPMPVAGTKFVVPTSHVLLASPGFSSRDDTYFPDAMKWEPHRWDPESGGVLGTDVEEESFDYGYGLISKGAKSPYLPFGAGRHRCIGEQFANVQLITITAVMVRYFKFKNLDNSGKVVETDYTSLFSRPLAPAVVEYERREKVKV

SEQ ID NO: 1076 - protein, 526 aa, Oculimacula yallundae
MGILDTVTVPLAQQVSQRGLGVVIAAGFAAFLVVSVVLNVLSQILFKNPNEPPVVFHFFPIIGSTVTYGIDPYKFFFDNKAKYGNIFTFILLGKKTTVYLGRDGNEFILNGKIKDVNAEEIYTVLTTPVFGKDVVYDCPNSKLMEQKKFMKIGLTTDAFKTYVPIIQNEVETFIKRSPEFKGHSGTVNIPAQMAEITIYTASHALQGKDCRDKFDSSFAELYHALDMGFSPINFMLHWAPLPHNRARDHAQRTVAKTYMEIMEARRKDKKSLDNMDIMSQLMRSTYKNGVPVPDMEIAHMMIALLMAGQHSSSSSSSWIMLRLASRPDIMEELYQEQLEVLGSDLPPLQYEDLAKLTKHQNVLKEVLRLHTPIHSIMRKVKTPMPVAGTKFVVPTSHVLLASPGFSSRDDTYFPDAMKWEPHRWDPESGGVLGTDVEEESFDYGYGLISKGAKSPYLPFGAGRHRCIGEQFANVQLITITAVMVRYFKFKNLDNSGKVVETDYTSLFSRPLAPAVVEYERREKVKV

SEQ ID NO: 1077 - protein, 526 aa, Oculimacula yallundae
MGILDAVTVPLAQQVSQRGLGVVIAAGFAAFLVVSVVLNVLSQILFKNPNEPPVVFHFFPIIGSTVTYGIDPYKFFFDNKAKYGNIFTFILLGKKTTVYLGRDGNEFILNGKIKDVNAEEIYTVLTTPVFGKDVVYDCPNSKLMEQKKFMKIGLTTDAFKTYVPIIQNEVETFIKRSPEFKGHSGTVNIPAQMAEITIYTASHALQGKDCRDKFDSSFAELYHALDMGFSPINFMLHWAPLPHNRARDHAQRTVAKTYMEIMEARRKDKKSLDNMDIMSQLMRSTYKNGVPVPDMEIAHMMIALLMAGQHSSSSSSSWIMLRLASRPDIMEELYQEQLEVLGSDLPPLQYEDLAKLTKHQNVLKEVLRLHTPIHSIMRKVKTPMPVAGTKFVVPTSHVLLASPGFSSRDDTYFPDAMKWEPHRWDPESGGVLGTDVEEESFDYGYGLISKGAKSPYLPFGAGRHRCIGEQFANVQLITITAVMVRYFKFKNLDNSGKVVETDYTSLFSRPLAPAVVEYERREKVKV

SEQ ID NO: 1078 - protein, 526 aa, Venturia nashicola
MGLLSALLAPLAGSDRGWLFYTLASFGFTVAIVVANVLKQVLLKNPNEPPVVFHWFPFFGNTVVYGIDPIKFFAECKEKHGDIFTFILLGRKTTVYIGTKGYEFILNGKQSHVNAEEIYSPLTTPVFGSDVVYDCPNSKLMEQKKFVKYGLTTEALKSYVTLIQREVEDYAKRYSQFKGEKGSFDVCATMGEITIFTASRSLQGKEVRDKFDASFADLFHDLDMGFSPINFMLPWAPLPHNRRRDAANKKMTETYLEIIRSRKVEGAKKDSEDMIWNLMQCVYKNGTPIPDNEIAHMMIALLMAGQHSSSSTSSWMLFRLATRPDIQEELYQEQIRVCGADLPPLKYDDLARMPLHNQQIIKETLRMHSPIHSILRAVKQPMPIEGTPYTIPTSHVLLAAPIASGGSPMYFPAPEKWEPHRWDEGSGGTNISGGDNGDEEKEDYGYGLITKGASSPYLPFGAGRHRCIGEQFAYMQLNTVLATQVREFKFSFREGESFPKTDFSSLFSGPQRPAWLNWERREKSSS

SEQ ID NO: 1079 - protein, 503 aa, Macaca fascicularis
MDLIPDLAVETWLLLAVTLVLLYLYGTHSHGLFKKLGIPGPTPLPLLGNILSYRKGFWTFDMECYKKYGKVWGFYDGRQPVLAITDPNMIKTVLVKECYSVFTNRRPFGPVGFMKNAISIAEDEEWKRIRSLLSPTFTSGKLKEMVPIIAKYGDVLVRNLRREAETGKPVTLKDVFGAYSMDVITSTSFGVNIDSLNNPQDPFVENTKKLLRFDFLDPFFLSITIFPFIIPILEVLNISIFPREVTSFLRKSVKRIKESRLKDTQKHRVDFLQLMIDSQNSKETESHKALSDLELVAQSIIFIFAGYETTSSVLSFIIYELATHPDVQQKLQEEIDTVLPNKAPPTYDTVLQMEYLDMVVNETLRIFPIAMRLERVCKKDVEINGIFIPKGVVVMIPSYALHHDPKYWPEPEKFLPERFSKKNNDNIDPYIYTPFGSGPRNCIGMRFALMNMKLAIIRVLQNFSFKPCKETQIPLKLRLGGLLQTEKPIVLKIESRDGTVSGA

SEQ ID NO: 1080 - protein, 522 aa, Homo sapiens
MFPWGLSCLSVLGAAGTALLCAGLLLSLAQHLWTLRWMLSRDRASTLPLPKGSMGWPFFGETLHWLVQGSRFHSSRRERYGTVFKTHLLGRPVIRVSGAENVRTILLGEHRLVRSQWPQSAHILLGSHTLLGAVGEPHRRRRKVLARVFSRAALERYVPRLQGALRHEVRSWCAAGGPVSVYDASKALTFRMAARILLGLRLDEAQCATLARTFEQLVENLFSLPLDVPFSGLRKGIRARDQLHRHLEGAISEKLHEDKAAEPGDALDLIIHSARELGHEPSMQELKESAVELLFAAFFTTASASTSLVLLLLQHPAAIAKIREELPDLSLAALGRLRYVDCVVKEVLRLLPPVSGGYRTALRTFELDVSAPCQPMASLLPPAACRLPPAACRGGAQGYQIPKGWSVMYSIRDTHETAAVYRSPPEGFDPERFGAAREDSRGASSRFHYIPFGGGARSCLGQELAQAVLQLLAVELVRTARWELATPAFPAMQTVPIVHPVDGLRLFFHPLTPSVAGNGLCL

SEQ ID NO: 1081 - protein, 485 aa, Taxus cuspidata
MDALKQLEVSPSILFVTLAVMAGIILFFRSKRHSSVKLPPGNLGFPLVGETLQFVRSLGSSTPQQFIEERMSKFGDVFKTSIIGHPTVVLCGPAGNRLVLSNENKLVQMSWPSSMMKLIGEDCLGGKTGEQHRIVRAALTRFLGPQALQNHFAKMSSGIQRHINEKWKGKDEATVLPLVKDLVFSVASRLFFGITEEHLQEQLHNLLEVILVGSFSVPLNIPGFSYHKAIQARATLADIMTHLIEKRRNELRAGTASENQDLLSVLLTFTDERGNSLADKEILDNFSMLLHGSYDSTNSPLTMLIKVLASHPESYEKVAQEQFGILSTKMEGEEIAWKDLKEMKYSWQVVQETLRMYPPIFGTFRKAITDIHYNGYTIPKGWKLLWTTYSTQTKEEYFKDADQFKPSRFEEEGKHVTPYTYLPFGGGMRVCPGWEFAKMETLLFLHHFVKAFSGLKAIDPNEKLSGKPLPPLPVNGLPIKLYSRS

SEQ ID NO: 1082 - protein, 500 aa, Beta vulgaris
FLHLRPTPTAKSKALRHLPNPPSPKPRLPFIGHLHLLKDKLLHYALIDLSKKHGPLFSLYFGSMPTVVASTPELFKLFLQTHEATSFNTRFQTSAIRRLTYDSSVAMVPFGPYWKFVRKLIMNDLLNATTVNKLRPLRTQQIRKFLRVMAQGAEAQKPLDLTEELLKWTNSTISMMMLGEAEEIRDIAREVLKIFGEYSLTDFIWPLKHLKVGKYEKRIDDILNKFDPVVERVIKKRREIVRRRKNGEDVEGEVSGVFLDTLLEFAEDETMEIKITKDHIKGLVVDFFSAGTDSTAVATEWALAELINNPKVLEKAREEVYSVVGKDRLVDEVDTQNLPYIRAIVKETFRMHPPLPVVKRKCIEECEINGYVIPEGALILFNVWQVGRDPKYWDRPSEFRPERFLETGAEGEARLLDLRGQHFQLLPFGSGRRMCPGVNLATSGMATLLASLIQCFDLQVLGPQGQILKGGDAKVSMEERAGLTVPRAHSLVCVPLARIG

SEQ ID NO: 1083 - protein, 499 aa, Beta vulgaris
LHLRPTPTAKSKALRHLPNPPSPKPRLPFIGHLHLLKDKLLHYALIDLSKKHGPLFSHYFGSMPTVVASTPELFKLFLQTNEATSFNTRFQTSAIRRLTYDSSVAMVPFGPYWKFVRKLIMNDLLNATTVNKLRPLRTQQIRKFLRAMAQGAEARKPLDLTEELLKWANSTISMMMLGEAEEIRDIAREVLKIFGEYSLTDFIWPLKHLKVGKYEKRIDDILNKFDPVVERVIKKRREIVRRRKNGEVVEGEVSGVFLDTLLEFAEDETMEIKITKDHTKGLVVDFFSAGTDSTAVATEWALAELINNPKVLEKAREEVYSVVGKDRLVDEVDTQNLPYIRAIVKETFRMHPPLPVVKRKCTEECEINGYVIPEGALIPFNVWQVGRDPKYWDRPSEFRPERFLETGAEGEARPLDLRGQHFQLLPFGSGRRMCPGVNLATSGTATLLASLIQCFDLQVLGPQGQILKGGDAKVSMEERAGLTVPRAHSLVCVPLARIG

SEQ ID NO: 1084 - protein, 511 aa, Gerbera hybrid cultivar
MNTLQLIFLLFFFPTLLFLYCLPYKRNQNHRRLPPSPPSFPIIGHLHHLGPLIHQSFHALSTRYGSLIHLRLGSVPCVVVSTPDLAKDFLKTNELAFSSRKHSLAIDHITYGVAFAFAPYGTYWKFIKKLFTVELLGTQNLSHFLPIRTHEIRELLRTLMVKSRAKERVNLTEELLKLTNNVISQMMMSIRCSGTNSEADEAKNLVREVTKIFGQFNVSDFIWFCKNIDLQGFKKRYEGTHRRYDALLERIIMGREENRRRGKIKDGEGKDFLDMLLDVLEDGKAEIKITRDHIKALILDFLTAGTDTTAIAIEWALVELINNPNALEKARQEIDQVIGDERLVQESDTPNLPYIQAIIKEALRLHPPIPMLIRKSTENVIVQGYDIPAGTLLFVNIWSIGRNPQCWETPLEFKPHRFLDGGDLKSSLDIKGHNFQLLPFGTGRRGCPGVNLAMRELSVVIANLIQCFDWDVVGERLLNTDERAGLTAPRAVDFVCVPLERGNTLKILGSN

SEQ ID NO: 1085 - protein, 496 aa, Mentha spicata
MELDLLSAIIILVATYIVSLLINQWRKSKSQQNLPPSPPKLPVIGHLHFLWGGLPQHVFRSIAQKYGPVAHVQLGEVYSVVLSSAEAAKQAMKVLDPNFADRFDGIGSRTMWYDKDDIIFSPYNDHWRQMRRICVTELLSPKNVRSFGYIRQEEIERLIRLLGSSGGAPVDVTEEVSKMSCVVVCRAAFGSVLKDQGSLAELVKESLALASGFELADLYPSSWLLNLLSLNKYRLQRMRRRLDHILDGFLEEHREKKSGEFGGEDIVDVLFRMQKGSDIKIPITSNCIKGFIFDTFSAGAETSSTTISWALSELMRNPAKMAKVQAEVREALKGKTVVDLSEVQELKYLRSVLKETLRLHPPFPLIPRQSREECEVNGYTIPAKTRIFINVWAIGRDPQYWEDPDTFRPERFDEVSRDFMGNDFEFIPFGAGRRICPGLHFGLANVEIPLAQLLYHFDWKLPQGMTDADLDMTETPGLSGPKKKNVCLVPTLYKSP

SEQ ID NO: 1086 - protein, 518 aa, Lotus japonicus
MLVEIALALLALALFLQFRPTPTAKSKALRHLPNPPSPKPRLPFVGHLHLLDQPLLHNSLIKLGEKYGPLYTLYFGSMPTVVASTPELFKLFLQTHEATSFSTRFQTSAIRRLTYDNSVAMVPFAPYWKFIRKVIMNDLLNATTVNKLRPLRSQEIRKVLKAMAQSAESQKPLNVTEELLKWTNSTISRMMLGEAEHVKDIVREVLKIFGEYSLTDFIWPLKKLRVGQYEKRIDEIFNKFDPVIEKVIKKRQEIIKRRKERNGELEEGEQSVVFLDTLLEYAADENMEIKITKEQIKGLVVDFFSAGTDSTAVATDWALAELINNPRVLKKAREEVDSVVGKDRLVDESDIQNLPYIRAIVKETFRMHPPLPVVKRKCVQECELNGYVIPEGALVLFNVWAVQRDPKYWKTPLEFRPERFLEEADIDLKGQHFELLPFGSGRRMCPGVNLATAGMATLLSSVIQCFELQVVGPKGQILKGSDAKANMEERAGLTVPRANSLMCVPLARSKVAAELLSS

SEQ ID NO: 1087 - protein, 490 aa, Lotus japonicus
VALMILRKNLKKPDSIPNIPPGPWKLPIIGSIPHLVGSPPHRKLRDLAKKYGPLMHLQLGEVIFIIVSSAEYAKEVMKTHDVTFASRPRSLFTDIVFYGSTDIGFSPYGDYWRQVRKICNVELLSMKRVQSLWPIREEEVKNLIQRIASEEGSVVNLSQAIDSLIFTITSRSAFGKRYMEQEEFISCVREVMKLAGGFNIADLFPSAKWLENLTRMRSKFEYLHQKMDRILETIIDDHKANSRTKEGQVEGGEEDLIDVLLKYENSSTDQDFHLTIRNIKAILFDIFIAGSETSATTINWTMAEMMKDPILLKKAQDEVREIFQRRGKVDETCIYELKYLKAFINEVLRLHPPGPLVFRECRQACEINGYHIPAKSTVLVNTFAIGTDSKYWAEPERFCPERFIDSSIDYKGTNFEHLPFGAGRRICPGINYGMANVELVLALLLYHFDWTLPKGIKNEDLDLTEEFGVTVSKKEDLCLIPSISHPLPST

SEQ ID NO: 1088 - protein, 318 aa, Persea americana
  unsure (1)..(318): unsure at all Xaa locations
DIIKNAAEIIAKTSFGMNHQYAERVFEKLKAMQVTLYRSGRLLGVPFGRLVYLKQTLEERKLGKEIDDLLLSIITARKASHIAEPPKDLLGLLLPDNHVNELLGKKLSPRELVDECKTFFFGGHETTALASLWTLFLLAKQPKWQTLLREXIMEVTGGEPLDFTMLPKLEKMGWVMNEVLRLYPPAPNVQRQVREDIQVGDTIIPKGTNIWIDLVGMHHDPALWGEDVNEFRPERFKEDVLYGGCKHKMGYLPFGFGGRMCVGRNLALMEYKTVLSLILTRFSMSLSPNYLHSPTHLLSLRPSCGMPLILQPITPNHP

SEQ ID NO: 1089 - protein, 488 aa, Coptis japonica
MEVLSIAIVSFSFLLFLFFILRDSRPKNLPPGPRPSPIVGNLLQLGDKPHAEFAKLAQKYGELFSLKLGSQTVVVASSPAAAAEILKTHDKILSGRYVFQSFRVKEHVENSIVWSECNDNWKLLRKVCRTELFTPKMIESQSEIREAKAREMVKFLRGKEGEVVKIVEVVFGTLVNIFGNLIFSKDVFDLEDPTGGSVELKEHLWKLLDMGNSTNPADYFPIMGKLDLFGQRRAVAEVLQQIYDVWGVMLKERRGTKGSESKNDFVDVLLNAGLDDQKINALLMELFGAGTETSASTIEWAITELTKKPLVVSKIRLELVNVVGDNTVKESDLPHLPYLQAFVKETLRLHPPTPLLLPRRALETCTVMNYTIPKECQIMVNAWAIGRDPKTWDDPLNFKPERFLSSDVDYKGNDFELIPFGGGRRICPGLPLASQFSNLIVATLVQNFEWSLPQGMSTSELSMDEKFGLTLQKDPPLLIVLKARASNI

SEQ ID NO: 1090 - protein, 491 aa, Coptis japonica
MEMNPLLVCATVAIVFATTTIIRILFSSSSLPQMKWPSGPRKLPIIGNLHQLGDDVLHVALAKLAKVHGSVMTIWIGSWRPVIVISDIEKAWEVLVNKSADYGARDMPEITKIASASWHTISTSDAGSFWQNVRKGLQSGAMGPLNVAAQNQYQERDMKRLIKAMSDEAANNNGIVKPLDHIKKNTVRLLTRLIFGQAFDDNKFIESMHYEIEDIIRISGYARLAEAFYYAKYLPSHKKAEREAFLVKCRVEELVRPLLSSKPPTNSYLYFLLSQNFEEEVIIFCIFELYLLGVDSTSSTTTWALAYLIREQGAQEKLYQDIRMTLGDVDLVKIEDVNKLKYLQGVVKETMRMKPIAPLAIPHKTAKETTLMGTKVAKGTRIMVNLYALHHNQNIWPDPYKFMPERFLEGETGTAYNKAMEQSFLPFSAGMRICAGMDLGKLQFAFALANLVNAFKWSCVEEGKLPDMGEELSFVLLMKTPLEARIAGRNV

SEQ ID NO: 1091 - protein, 521 aa, Stenotomus chrysops
  unsure (1)..(521): unsure at all Xaa locations
MVLMILPVIGSVSVSEGLVAMITMCLAYLILRLFRTEIPEGLLQLPGPKPLPIIGNVLEVGRNPYLSLTAMSKRYGDVFQIQIGMRPVVVLSGSETVRQALIKQGDXFAGRPDLYSFRFINDGKSLAFSTDQAGVWRARRKLAYSALRSFATLEGTTPEYSCALEEHVSKEAEYLVKQLHTVMEADGSFDPFRHIVVSVANVICGMCFGRRYDHNHQELLNLVNLSDEFGQVVASGNPADFIPILQYLPSTTMKKFLNINDRFNTFVQKIVSEHYTTFDKDNIRDITDSLIDHCEDRKLDENSNVQMSDEKIVGIVNDLFGAGFDTISTALSWSVMYLVAYPEIQERLYQEMNETVGPDRTPCLSDKPKLPFLEAFILETFRHSSFLPFTIPHCTSKDTSLNGYFIPKDTCVFINQWQINHDAELWKDPSSFNPDRFLNADGTEVNKLEGEKMMVFGMGKRRCIGEVIARSEVFLFLAILVQNLRFHSMPGEPLDMTPEYGLTMKHKRCQLRAAMRARNEE

SEQ ID NO: 1092 - protein, 521 aa, Stenotomus chrysops
MVLMILPVIGSVSVSEGLVAMITMCLAYLILRLFRTEIPEGLLQLPGPKPLPIIGNVLEVGRNPYLSLTAMSKRYGDVFQIQIGMRPVVVLSGSETVRQALIKQGDDFAGRPDLYSFRFINDGKSLAFSTDQAGVWRARRKLAYSALRSFATLEGTTPEYSCALEEHVSKEAEYLVKQLHTVMEADGSFDPFRHIVVSVANVICGMCFGRRYDHNHQELLNLVNLSDEFGQVVASGNPADFIPILQYLPSTTMKKFLNINDRFNTFVQKIVSEHYTTFDKDNIRDITDSLIDHCEDRKLDENSNVQMSDEKIVGIVNDLFGAGFDTISTALSWSVMYLVAYPEIQERLYQEMNETVGPDRTPCLSDKPKLPFLEAFILETFRHSSFLPFTIPHCTSKDTSLNGYFIPKDTCVFINQWQINHDAELWKDPSSFNPDRFLNADGTEVNKLEGEKMMVFGMGKRRCIGEVIARSEVFLFLAILVQNLRFHSMPGEPLDMTPEYGLTMKHKRCQLRAAMRARNEE

SEQ ID NO: 1093 - protein, 491 aa, Arabidopsis thaliana
MDTSSSLLFFSFFFFIIIVIFNKINGLRSSPASKKKLNDHHVTSQSHGPKFPHGSLGWPVIGETIEFVSSAYSDRPESFMDKRRLMYGRVFKSHIFGTATIVSTDAEVNRAVLQSDSTAFVPFYPKTVRELMGKSSILLINGSLHRRFHGLVGSFLKSPLLKAQIVRDMHKFLSESMDLWSEDQPVLLQDVSKTVAFKVLAKALISVEKGEDLEELKREFENFISGLMSLPINFPGTQLHRSLQAKKNMVKQVERIIEGKIRKTKNKEEDDVIAKDVVDVLLKDSSEHLTHNLIANNMIDMMIPGHDSVPVLITLAVKFLSDSPAALNLLTEENMKLKSLKELTGEPLYWNDYLSLPFTQKVITETLRMGNVIIGVMRKAMKDVEIKGYVIPKGWCFLAYLRSVHLDKLYYESPYKFNPWRWQERDMNTSSFSPFGGGQRLCPGLDLARLETSVFLHHLVTRFRWIAEEDTIINFPTVHMKNKLPIWIKRI

SEQ ID NO: 1094 - protein, 464 aa, Arabidopsis thaliana
MDTSSSLLFFSFFFFIIIVIFNKINGLRSSPASKKKLNDHHVTSQSHGPKFPHGSLGWPVIGETIEFVSSAYSDRPESFMDKRRLMYGRVFKSHIFGTATIVSTDAEVNRAVLQSDSTAFVPFYPKTVRELMGKSSILLINGSLHRRFHGLVGSFLKSPLLKAQIVRDMHKFLSESMDLWSEDQPVLLQDVSKTVAFKVLAKALISVEKGEDLEELKREFENFISGLMSLPINFPGTQLHRSLQAKKNMVKQVERIIEGKIRKTKNKEEDDVIAKDVVDVLLKDSSEHLTHNLIANNMIDMMIPGHDSVPVLITLAVKFLSDSPAALNLLTEENMKLKSLKELTGEPLYWNDYLSLPFTQKVITETLRMGNVIIGVMRKAMKDVEIKGYVIPKGWCFLAYLRSVHLDKLYYESPYKFNPWRWQERDMNTSSFSPFGGGQRLCPGLDLARLETSVFLHHLVTRFR

SEQ ID NO: 1095 - protein, 524 aa, Arabidopsis thaliana
MQPPASAGLFRSPENLPWPYNYMDYLVAGFLVLTAGILLRPWLWLRLRNSKTKDGDEEEDNEEKKKGMIPNGSLGWPVIGETLNFIACGYSSRPVTFMDKRKSLYGKVFKTNIIGTPIIISTDAEVNKVVLQNHGNTFVPAYPKSITELLGENSILSINGPHQKRLHTLIGAFLRSPHLKDRITRDIEASVVLTLASWAQLPLVHVQDEIKKMTFEILVKVLMSTSPGEDMNILKLEFEEFIKGLICIPIKFPGTRLYKSLKAKERLIKMVKKVVEERQVAMTTTSPANDVVDVLLRDGGDSEKQSQPSDFVSGKIVEMMIPGEETMPTAMTLAVKFLSDNPVALAKLVEENMEMKRRKLELGEEYKWTDYMSLSFTQNVINETLRMANIINGVWRKALKDVEIKGYLIPKGWCVLASFISVHMDEDIYDNPYQFDPWRWDRINGSANSSICFTPFGGGQRLCPGLELSKLEISIFLHHLVTRYSWTAEEDEIVSFPTVKMKRRLPIRVATVDDSASPISLEDH

SEQ ID NO: 1096 - protein, 457 aa, Arabidopsis thaliana
MIPNGSLGWPVIGETLNFIACGYSSRPVTFMDKRKSLYGKVFKTNIIGTPIIISTDAEVNKVVLQNHGNTFVPAYPKSITELLGENSILSINGPHQKRLHTLIGAFLRSPHLKDRITRDIEASVVLTLASWAQLPLVHVQDEIKKMTFEILVKVLMSTSPGEDMNILKLEFEEFIKGLICIPIKFPGTRLYKSLKAKERLIKMVKKVVEERQVAMTTTSPANDVVDVLLRDGGDSEKQSQPSDFVSGKIVEMMIPGEETMPTAMTLAVKFLSDNPVALAKLVEENMEMKRRKLELGEEYKWTDYMSLSFTQNVINETLRMANIINGVWRKALKDVEIKGYLIPKGWCVLASFISVHMDEDIYDNPYQFDPWRWDRINGSANSSICFTPFGGGQRLCPGLELSKLEISIFLHHLVTRYSWTAEEDEIVSFPTVKMKRRLPIRVATVDDSASPISLEDH

SEQ ID NO: 1097 - protein, 524 aa, Arabidopsis thaliana
MQPPASAGLFRSPENLPWPYNYMDYLVAGFLVLTAGILLRPWLWFRLRNSKTKDGDEEEDNEEKKKGMIPNGSLGWPVIGETLNFIACGYSSRPVTFMDKRKSLYGKVFKTNIIGTPIIISTDAEVNKVVLQNHGNTFVPAYPKSITELLGENSILSINGPHQKRLHTLIGAFLRSPHLKDRITRDIEASVVLTLASWAQLPLVHVQDEIKKMTFEILVKVLMSTSPGEDMNILKLEFEEFIKGLICIPIKFPGTRLYKSLKAKERLIKMVKKVVEERQVAMTTTSPANDVVDVLLRDGGDSEKQSQPSDFVSGKIVEMMIPGEETMPTAMTLAVKFLSDNPVALAKLVEENMEMKRRKLELGEEYKWTDYMSLSFTQNVINETLRMANIINGVWRKALKDVEIKGYLIPKGWCVLASFISVHMDEDIYDNPYQFDPWRWDRINGSANSSICFTPFGGGQRLCPGLELSKLEISIFLHHLVTRYSWTAEEDEIVSFPTVKMKRRLPIRVATVDDSASPISLEDH

SEQ ID NO: 1098 - protein, 467 aa, Glycine max
  unsure (1)..(467): unsure at all Xaa locations
XRVSYVGPPPKTSQNLSPLMLKSKRKKNKLPLGTLGWPFIGETIEFVSCAYSDRPESFMDKRRRMYGKVFKSHIFGSPTIVSTDASVNKFILQSDAKVFVPSYPKSLTELMGESSILLINGSLQRRIHGLIGAFFKSQQLKAQITRDMQKYVKESMASWREDCPIYIQDETKKIAFHVLVKALISLDPGEEMELLKKHFQEFISGLMSLPIKLPGTKLYQSLQAKKKMVKLVKRIILAKRSSGFCKVPKDVVDVLLSDANEKLTDDLIADNIIDMMIPGEDSVPLLMTLATKYLSECPAALQQLTEENMKLKKIQDQVGESLSWSDYLSLPFTQTVITETLRMGNIIIGVMRKALKDVEIKGHLIPKGWCVFVNFRSVHLDDKNYECPYQFNPWRWQDKDTSSCNFTPFGGGQRLCPGLDLARLEASIFLHHFVTQFRWHAEKDAIVNFPTVRMKKRMPVKVRRVES

SEQ ID NO: 1099 - protein, 500 aa, Lupinus albus
FLHLRPTPTAKSKALRHLPNPPSPKPRLPFIGHLHLLKDKLLHYALIDLSKKHGPLFSLYFGSMPTVVASTPELFKLFLQTHEATSFNTRFQTSAIRRLTYDSSVARVPFGPYWKFVRKLIMNDLLNATTVNKLRPLRTQQIRKFLRVMAQGAEAQKPLDLTEELLKWTNSTISMMMLGEAEEIRDIAREVLKIFGEYSLTDFIWPLKHLKVGKYEKRIDDILNKFDPVVERVIKKRREIVRRRKNGEVVEGEVSGVLLDTLLEFAEDETMEIKITKDHIKGLVVDFFSAGTDSTAVATEWALAELINNPKVLERAREEVYSVVGKDRLVDEVDTQNLPYIRAIVKETFRMHPPLPVVKRKCTEECEINGYVIPEGALILFNVWQVGRDPKYWDRPSEFRPERFLETEAEGEARPLDLRGQHFQLLPFGSGRRMCPGVILATSGMATLLASLIQCFDLQVLGPQGQILKGGDAKVSMEERAGLTVPRAHSLVCVPLARIG

SEQ ID NO: 1100 - protein, 500 aa, Medicago sativa
FLHLRPTPTAKSKALRHLPNPPSPKPRLPFIGHLHLLKDKLLHYALIDLSKKHGPLFSLYFGSMPTVVASTPELFKLFLQTHEATSFNTRFQTSAIRRLTYDSSVAMAPFGPYWKFVRKLIMNDLLNATTVNKLRPLRTQQIRKFLRVMAQGAEAQKPLDLTEELLKWTNSTTSMMMLGEAEEIRDIAREVLKIFGEYSLTDFIRPLKHLKVGKYEKRIDDILNKFDPVVERVIKKRREIVRRRKNGEVVEGEVSGVFLDTLLEFAEDETTEIKITKDHIKGLVVDFFSAGTDSTAVATEWALAELINNPKVLEKAREEVYSVVGKDRLVDEVDTQNLPYIRAIVKETFRMHPPLPVVKRKCTEECEINGYVIPEGALILFNVWQVGRDSKYWDRPSEFRPERFLETGAEGEARPLDLRGQHFQLLPFGSGRRMCPGVNLATSGMATLLASLIQCFDLQVLGPQGQILKGGDAKVSMEERAGLTVPRAHSLVCVPLARIG

SEQ ID NO: 1101 - protein, 500 aa, Medicago sativa
FLHLRPTPTAKSKALRHLPNPPSPKPRLPFIGHLHLLKDKLLHYALIDLSKKHGPLFSLYFGSMPTVVASTPELFKLFLQTHEATSFNTRFQTSAIRRLTYDSSVAMVPFGPYWKFVRKLIMNDLLNATTVNKLRPLRTQQIRKLLRVMAQGAEAQKPLDLTEELLKWTNSTISMMMLGEAEEIRDIAREVLKIFGEYSLTDFIWPLKHLKVGKYEKRIDDILNKFDPVVERVIKKRREIVRRRKNGEVIEGEVSGVFLDTLLEFAEDETTEIKITKDHIKGLVVDFFSAGTDSTAVATEWALAELINNPKVLEKAREEVYSVVGKDRLVDEVDTQNLPYIRAIVKETFRMHPPLPVVKRKCTEECEINGYVIPEGALILFNVWQVGRDPKYWDRPSEFRPERFLETGAEGEARPLDLRGQHFQLLPFGSGRRMCPGVNLATSGMATLLASLIQCFDLQVLGPQGQILKGGDAKVSMEERAGLTVPRAHSLVCVPLARIG

SEQ ID NO: 1102 - protein, 500 aa, Medicago sativa
FLHLRPTPSAKSKALRHLPNPPSPKPRLPFIGHLHLLKDKLLHYALIDLSKKHGPLFSLSFGSMPTVVASTPELFKLFLQTHEATSFNTRFQTSATRRLTYDNSVAMVPFGPYWRFVRKLIMNDLLNATTVNKLRPLRTQQIRKFLRVMAQSAEAQKPLDVTEELLKWTNSTISMMMLGEAEEIRDIAREVLKIFGEYSLTDFIWPLKYLKVGKYEKRIDDILNKFDPVVERVIKKRRGIVRRRENGEVVEGEASGVFLDTLLEFAEDETMEIKITKEQIKGLVVDLFSAGTDSTAVATEWALAELINNPRVLQKAREEVYSVVGKDRLVDEVDTQNLPYIRAIVKETFRMHPPLPVVKRKCTEECEINGYVIPEGALVLFNVWQVGRDPKYWDRPSEFRPERFLETGAEGEAGPLDLRGQHFQLLPFGSGRRMCPGVNLATSGMATLLASLIQCFDLQVLGPQGQILKGDDAKVSMEERAGLTVPRAHSLVCVPLARIG

SEQ ID NO: 1103 - protein, 500 aa, Trifolium repens
FLHLRPTPTAKSKALRHLPNPPSPKPRLPFIGHLHLLKDKLLHYALIDLSKKHGPLFSLYFGSMPTVVASTPELFKLFLQTHEATSFNTRFQTSAIRRLTYDNSVAMVPFGPYWKFVRKLIMNDLLNATTVNKLRPLRTQQIRKFLRVMAQSAEAQKPLDVTEELLKWTNSTISMMMLGEAEEIRDIAREVLKIFGEYSLTDFIWPLKYLKVGKYEKRIDDILNKFDPVVERVIKKRREIVRRRKNGEVVEGEASGVFLDTLLEFAEDETMEIKITKEQIKGLVVDFFSAGTDSTAVATEWALAELINNPKVLQKAREEAYSVVGKDRLVDEVDTQNLPYIRAIVKETFRMHPPLPVVKRKCTEECGINGYVIPEGALVLFNVWQVGRDPKYWDRPSEFRPERFLETGAEGEAGPLDLRGQHFQLLPFGSGRRMCPGVNLATSGMATLLASLIQCFDLQVLGPQGQILKGDDAKVSMEERAGLTVPRAHSLVCVPLARIG

SEQ ID NO: 1104 - protein, 499 aa, Trifolium repens
SHLRPTPSAISKALRHLPNPPSPRPRLPFIGHLHLLKDKLLHYAPIDLSKKHGPLFSLSFGSMPTVVASTPELFKLFLQTHEATSFNTRFQTSAIRHLTYDNSVAMVPFGPYWKFVRKLIMNDLLNATTVNKLRPLRTQQIRKFLRVMAQSAEAQKPLDVTEELLKWTNSTISMMMLGEAEEIRDIAREVLKIFGEYSLTDFIWPLKYLKVGKYEKRIDDILNKFDPVVERVIKKRREIVRRRKNGEVVEGEASGVFLDTLLEFAEDETMEIKITKEQIKGLVVDFFSAGTDSTAVVTEWALAELINNPRVLQKAREEVYSVVGKDRLVDEVDTQNLPYIRAIVKETFRMHPPLPVVKRKCTEECEINGYVIPEGALVLFNVWQVGRDPKYWDRPSESRPERFLETGAEGEAGPLDLRGQHFQLLPFGSGRRMCPGVSLATSGMATLLASLIQCFDLQVLGPQGQILKGDDAKVSMEERAGLTVPRAHSLVCVPLARIG

SEQ ID NO: 1105 - protein, 500 aa, Vicia villosa
FLHLRPTPTAKSKALRHLPNPPSPKPRLPFIGHLHLLKDKLLHYALIDLSKKHGPLFSLYFGSMPTVVASTPELFKLFLQTHEATSFNTRFQTSAIRRLTYDSLVAMVPFGPYWKFVRKLIMNDLLNATTVNKLRPLRTQQIRKFLRVMAQGAEAQKPLDLTEELLKWTNSTISMMMLGEAEEIRDIAREVLKIYGEYSLTDFIWPLKHLKVGKYEKRIDDILNKFDPVVERVIKKRREIVRRRKNGEVVEGEVSGVFLDTLLEFAEDETTEIKITKDHIKGLVVDFFSAGIDSTAVATEWALAELINNPKVLEKAREEVYSVVGKDRLVDEVDTQNLPYIRAIVKETFRMHPPLPVVKRKCTEECEINGYVIPEGALILFNVWQVGRDPKYWDRPSEFRPERFLETGAEGEARPLDLRGQHFQLLPFGSGRGMCPGVNLATSGMATLLASLIQCFDLQVLGPQGQILKGGDAKVSMEERAGLTVPRAHSLVCVPLARIG

SEQ ID NO: 1106 - protein, 490 aa, Oryza sativa (japonica cultivar-group)
MVSAAAGWAAPAFAVAAVVIWVVLCSELLRRRRRGAGSGKGDAAAAARLPPGSFGWPVVGETLEFVSCAYSPRPEAFVDKRRKLHGSAVFRSHLFGSATVVTADAEVSRFVLQSDARAFVPWYPRSLTELMGKSSILLINGALQRRVHGLVGAFFKSSHLKSQLTADMRRRLSPALSSFPDSSLLHVQHLAKSVVFEILVRGLIGLEAGEEMQQLKQQFQEFIVGLMSLPIKLPGTRLYRSLQAKKKMARLIQRIIREKRARRAAASPPRDAIDVLIGDGSDELTDELISDNMIDLMIPAEDSVPVLITLAVKFLSECPLALHQLEEENIQLKRRKTDMGETLQWTDYMSLSFTQHVITETLRLGNIIGGIMRKAVRDVEVKGHLIPKGWCVFVYFRSVHLDDTLYDEPYKFNPWRWKEKDMSNGSFTPFGGGQRLCPGLDLARLEASIFLHHLVTSFRWVAEEDHIVNFPTVRLKRGMPIRVTAKEDDD

SEQ ID NO: 1107 - protein, 506 aa, Antirrhinum majus
MSTLVYSTLFILSTLLLTLLTRTRRKTRPPGPLALPLIGHLHLLGPKLHHTFHQFSQRYGPLIQLYLGSVPCVVASTPELAREFLKTHELDFSSRKHSTAIDIVTYDSSFAFAPYGPYWKFIKKLCTYELLGARNLSHFQPIRALEVNSFLRILYEKTEQKQSVNVTEELVKLTSNVISNMMLGIRCSGTEGEAEVARTVIREVTQIFGEFDVSEIVWFCKNLDLQGIRKRSEDIRRRYDALLEKIISDRERLRLRGGGGGGGGEVKDFLDMLLDVMESEKSEVEFTREHLKALILDFFTAGTDTTAITTEWAIAELISNPNVLKKAQEEMDKVIGSQRLLQESDAPNLPYLNAIIKETFRLHPPIPMLTRKSISDVVVNGYTIPAKTLLFVNLWSMGRNPNYWENPMEFRPERFLEKGTGSIDVKGQHFELLPFGTGRRGCPGMLLGMQELFSIIGAMVQCFDWKLPDGVKSVDMTERPGLTAPRANDLVCQLVPRIDPVVVSGP

SEQ ID NO: 1108 - protein, 511 aa, Liquidambar styraciflua
MDSSLHEALQPLPMTLFFIIPLLLLLGLVSRLRQRLPYPPGPKGLPVIGNMLMMDQLTHRGLAKLAKQYGGLFHLKMGFLHMVAVSTPDMARQVLQVQDNIFSNRPATIAISYLTYDRADMAFAHYGPFWRQMRKLCVMKLFSRKRAESWESVRDEVDSAVRVVASNIGSTVNIGELVFALTKNITYRAAFGTISHEDQDEFVAILQEFSQLFGAFNIADFIPWLKWVPQGINVRLNKARGALDGFIDKIIDDHIQKGSKNSEEVDTDMVDDLLAFYGEEAKVSESDDLQNSIKLTKDNIKAIMDVMFGGTETVASAIEWAMTELMKSPEDLKKVQQELAVVVGLDRRVEEKDFEKLTYLKCVLKEVLRLHPPIPLLLHETAEDAEVGGYYIPAKSRVMINACAIGRDKNSWADPDTFRPSRFLKDGVPDFKGNNFEFIPFGSGRRSCPGMQLGLYALETTVAHLLHCFTWELPDGMKPSELEMNDVFGLTAPRAIRLTAVPSPRLLCPLY

SEQ ID NO: 1109 - protein, 474 aa, Oryza sativa
  unsure (1)..(474): unsure at all Xaa locations
MQPLAAGGGVSWPLYAATVAAALLVTAIVLRXRRAVDGXXACKARPPAGSLGWPLVGETLQFISAAYSSRPESFVEKRCRRYGKVFRSHLWGSPAVVSADAEASRAVLQSDASAFVPWYPRSLMELMGESSILVLGGALQRRVHGLAGAFFKSPELKARVTADMRSRLAAAMDAWRATAATGAGAAVRVQDEAKLEMNYLRQQFHIFIAGLISLPIKLPGTQLYRSLKAKKRMTSLIQNIIQEKRRRIFEGKDPRDLIDVLMSNGSDELSLTDELISDNMIDFMIPAEDSVPVLITLAIKYLSECPLALQQLEEENMELKRQKSDVGETLEWTDYMSLTFTQHVITETLRIGNIISGIMRKAVRDVEVKGQGDVVIPKGWCVLVYFRSVHLDANIYDDPYAFNPWRWKERDMAAGGFTPFGGGQRLCPGLDLXRLQTSIFLHHLXWVAQGDVVVNFPTVRLKRGMPIKVTPKTX

SEQ ID NO: 1110 - protein, 222 aa, Triticum aestivum
  unsure (1)..(222): unsure at all Xaa locations
LFXHEVDFCLSLLVAGYETTSVLMTVAVKFLTETPAALAQLKEEHENMTKMKGENQPLEWVDYKSMTFTQCVINETLRVANIIGGVFRRANTDIHFKGYTIPKGCKIFASFRAVHLNNEHYENARTFDPWRWQSNNNQNEVGANLFTPFGGGPRLCPGYELARVVISVFLHHLVMRFSWEAAEEDRLVFFPTTRTLKGYPINLRRRSESVXRPHIGLRLLLS

SEQ ID NO: 1111 - protein, 139 aa, Triticum aestivum
  unsure (1)..(139): unsure at all Xaa locations
XFRSVHLDDMLYEDPCKFNPWRWKEKDMSTSSFTPFGGGQRLCPGLDLARLEASIFLHHLVTSFRWVAEEDHIVNFPTVRLKGGMPIRVTAKDXLPVNQTVVLDQLPAAAKPAMHIHDAAAASMVSSIARLKGSLKQAS

SEQ ID NO: 1112 - protein, 521 aa, Trifolium pratense
MLLELALGLLVLALFLHLRPTPTAKSKALRHLPNPPSPKPRLPFIGHLHLLKDKLLHYALIDLSKKHGPLFSLYFGSMPTVVASTPELFKLFLQTHEATSFNTRFQTSAIRRLTYDSSVAMVPIGPYWKFVRKLIMNDLLNATTVNKLRPLRTQQIRKFLRVMAQGAEAQKPLDLTEELLKWTNSTISMMMLGEAEEIRDIAREVLKIFGEYSLTDFIWPLKHLKVGKYEKRIDDILNKFDPVVERVIKKRREIVRRRKNGEVDEGEVSGVFLDTLLEFAEDETTEIKITKDHIKGLVVDFFSAGTDSTAVATEWALAELINNPKVLEKAREEVYSVVGKDRLVDEVDTQNLPYIRAIVKETFRMHPPLPVVKRKCTEECEINGYVIPEGALILFNVWQVGRDPKYWDRPSEFRPERFLETGAEGEARPLDLRGQHFQLLPFGSGRRMCPGVNLATSGMATLLASLIQCFDLQVLGPQGQILKGGDAKVSMEERAGLTVPRAHSLVCVPLARIGVASKLLS

SEQ ID NO: 1113 - protein, 505 aa, Oncorhynchus mykiss
MSLMESLLLQAPSTVTLLGAVLFLLVLYLLSSSSSSEEHGKEPPGPRPLPLLGNMLQLDLKRPYQTLCELSKKYGSVFTVHIGPRKVVVLAGYKTVKQALVNHAEEFGDRGISHLFTELNKGHGIVFANGDSWKEMRRFALTNLRDFGMGKKASEEKIIEEVHYLIEVFEEHKGKAFDATQAMNYAVSNIICSIVYGSRFDYSDPRFRRSVDQANESIRLGGSISIQLYNMFPWLGPLLKNKTLILKNIADNKGEMKELVRGLKETLNPQMCRGFVDSFLVRKQTLEESGNMNSHYHTENLIQTVANLFAAGTDTTGTTLRWGLLLMAKYPDIQDRVQEEISRVIGSRQALVEDRKNLPYTDAVIHETQRLANIVPMSIPHTTSQDVTFQGYFIKKGTDVLPLLTSVLRDESEWKSPHTFNPEHFLDEEGRFVKKDAFMPFSAGRRVCLGESLARMELFLFFTSLLQHFCFSPPPGVREEDLDLTPSLGFTLSPSPHQLCAVSRV

SEQ ID NO: 1114 - protein, 497 aa, Fundulus heteroclitus
MWLYNFLLVLDLKAILLFIFSFLLIADFLRNRKPANFPPGPKALPFVGNMLNLDSQHPHIFFSKLADIYGNVFSFRLGKESMVVVSGHKLVKEAIVTQGENFVDRPPNAIAERFYTEPSGGLFFNNGEIWKRQRRFALSTLRTFGLGKNTLELSICEEIRHLQEEIENEKGKPFSPAGLFNNAVSNIICQLVMGRRFDYHDQSFQTMLKYMSEALWLEGSIWGQLYQAFPQVMKYIPGPHNKLFSNFTAIKELLQEEIEKHKKDLDHSNPRDYIDTFLIKMENQQEAELGFTERNLAFCSLDLFLAGTETTATTLLWALLFLIKYPEVQEKVHAEIDRVIGQTRLPSMADRPNLPYTDAVIHEIQRMSNIVPLNGLRVASKDTTLGGYFIPKGTAVMPMLTSVLFDKTEWETPDTFNPGHFLDANGKFVKKEAFLPFSAGKRVCLGEGLAKMELFLFLVALLQKFSFSAPEGVELSTEGITGITLVPHPYKVSAKAR

SEQ ID NO: 1115 - protein, 495 aa, Oreochromis niloticus
MLPVEELTAGPMVADRASEVTAVLLLLLLLLLLFTTWRQRKQSHIPGPFFLAGLGPILSYSRFIWSGIGTACNYYNNKYGSIVRVWINGEETLILSRSSEVYHVLRSAHYTSRFGSKKGLECIGMYGNGIIFNSDVLLWKKVRTYFSKALTGPGLQRTVGICVSFTAKHLDNLQDMTDPSGHVDALNLLRAIVLDISNRLFLIVPLNEKDFLTKIHNYFDTWQTVLIKPDIFFKVGWLYNKHKRAAQELQDAMESLLEVKKKMIHEAEKLDDELDFATELIFAQNHGELSADNVRQCVLEMVIAAPDTLSISLFFMLMLLKQNPDIELQLVEEMNTILNEKDVENIDYQSLKVMESFINESLRFHPVVDFTMRKALEDNDIAGTKIKKGTNIILNTGLMHKTEFFPKPEEFNLTNFEKTVPNRYFQPFGCGPRSCVGKHIAMVMMKAILVTLLSRYTVCPHQGCTLSSIKQTNNLSQQPVEDEHSLAMRFIPRTK

SEQ ID NO: 1116 - protein, 495 aa, Oreochromis niloticus
MLPVEELTAGPMVADRASEVTAVLLLLLLLLLLFTTWRQRKQSHIPGPFFLAGLGPILSYSRFIWSGIGTACNYYNNKYGSIVRVWINGEETLILSRSSEVYHVLRSAHYTSRFGSKKGLECIGMYGNGIIFNSDVLLWKKVRTYFSKALTGPGLQRTVGICVSSTAKHLDNLQDMTDPSGHVDALNLLRAIVLDISNRLFLRVPLNEKDFLTKIHNYFDTWQTVLIKPDIFFKVGWLYNKHKRAAQELQDAMESLLEVKKKMIHEAEKLDDELDFATELIFAQNHGELSADNVRQCVLEMVIAAPDTLSISLFFMLMLLKQNPAIELQLVEEMNTILNEKDVENIDYQSLKVMESFINESLRFHPVVDFTMRKALEDNDFAGTKIKKGTNIILNTGLMHKTEFFPKPEEFNFTNFEKTVPNRYFQPFGCGPRSCVGKHIAMVMMKAILVTLLSRYTVCPHQGCTLSSIKQTNNLSQQPVEDEHSLAMRFIPRTK

SEQ ID NO: 1117 - protein, 480 aa, Oreochromis niloticus
RASEVTAVLLLLLLLLLLFTTWRQRKQSHIPGPFFLAGLGPILSYSRFIWSGIGTACNYYNNKYGSIVRVWINGEETLILSRSSEVYHVLRSAHYTSRFGSKKGLECIGMYGNGIIFNSDVLLWKKVRTYFSKALTGPGLQRTVGICVSSTAKHLDNLQDMTDPSGHVDALNLLRAIVLDISNRLFLRVPLNEKDFLTKIHNYFDTWQTVLIKPDIFFKVGWLYNKHKRAAQELQDAMESLLEVKRKMIHEAEKLDDELDFATELIFAQNHGELSADNVRQCVLEMVIAAPDTLSISLFFMPMLLKQNPDIELQLVEEMNTILNEKDVENIDYQSLKVMESFINESLRFHPVVGFTMRKALEDNDIAGTKIKKGTNIILNTGLMHKTEFFPKPEEFNHTNFEKTVPNRYFQPFGCGPRSCVGKHIAMVMMKAILVTLLSRYTVCPHQGCTLSSIKQTNNLSQQPVEDEHSLAMRFIPRTK

SEQ ID NO: 1118 - protein, 520 aa, Sus scrofa
MLARGLALRSVLVKGCQPFLSAPRECPGHPRVGTGEGACISTKTPRPFSEIPSPGDNGWINLYRFWKEKGTQKIHYHHVQNFQKYGPIYREKLGNLESVYIIDPEDVALLFKFEGPNPERYNIPPWVAYHQHYQKPVGVLLKKSGAWKKDRLVLNTEVMAPEAIKNFIPLLDTVSQDFVGVLHRRIKQQGSGKFSGDIREDLFRFAFESITNVIFGERLGMLEEIVDPEAQKFIDAVYQMFHTSVPMLNLPPDLFRLFRTKTWRDHVAAWDTIFNKAEKYTQNFYWDLRRKREFNNYPGILYRLLGNDKLLSEDVKANVTEMLAGGVDTTSMTLQWHLYEMARSLNVQEMLREEVLNARRQAQGDTSKMLQLVPLLKASIKETLRLHPISVTLQRYLVNDLVLRDYMIPAKTLVQVAVYAMGRDPAFFSNPGQFDPTRWLGKERDLIHFRNLGFGWGVRQCVGRRIAELEMTLFLIHILENFKVELQHFSDVDTIFNLILMPDKPIFLVFRPFNQDPLQA

SEQ ID NO: 1119 - protein, 494 aa, Cricetulus griseus
MLASGLLLVSVLAFLVILVLMSVWKQRKLSGKMPPGPTPLPFIGNYLQLNTAQMYNSLMKISKRYGPVFTVHLGPRRRIVVLWGQEAVKEALVDQAEEFSGRGEQATFDSFFEGYGLVFSSGERAKQLRRFSIATLRDFGMGKRGVEERILEEAGYLLEALQKTNGALIDPTFYLSRAVSNVMSSIVFGDRFDYEDQEFLSLLRMMLETFQFTASSTGQLYEMFSSVMKRLPGPQQQAYKGLKALEDFIAKKVEQHQSTLDPNSPRDFIDSFLIRMQEEKDPNTEFFMKNLVLTTLNLFAAGTETISTTLRYGFLLLMKHPDVEAKVHEEIDRVIGRNRQPKYEDRTKMPYTEAVIHEIQRFGDVIPMGVPRRVTKDTKFRDFLIPKGTDVFPVLGSVLKDSKFFSNPKDFNPKHFLDGNMQFKKNDAFVPFSLGKRYCFGEGLARMELFLFLTIILQNFRFRSSQAPQDIDVSPQLVGFGTLPPNYTMSFLSR

SEQ ID NO: 1120 - protein, 493 aa, Cricetulus griseus
MLGSELLLVAILAYLSVMVLVSVWKQKVRGKLPPGPTPLPYIGNYLQLNTKDMYSSITELSERYGPVFTIHLGPRPVVVLYGYDAVKEALVDQAEEFSGRGEQATYNTLFKGYGVTFSSGERAKQLRRFSIATLRDFGVGKRSVEERIQEEAACLVKMLQSTSGAPIDPTVYLSQTVSNVINSIVFGDRFDYEDKEFLELLRMMGQINRFAASPTGQLYDMFHSVMKYLPGPQQQIIKNTKELEDFMVRKVKQNQSTLDLNSPRNFIDSFLIHMQEEKKNPDSEFNIQNLVMTSLNLFFAGSETVSSTMRYGFLLLMKYPEVEAKVHEEIDRVIGRNRQPQFEDRMKMPYTEAVINEIQRFANLAPLGIPRKTIQNTTFRGFFLPKDTEVFPILGSLLTDPKFFPSPKDFNPQNFLDDKGQLKKNAAFVPFSVGKRFCLGDGLARMELFLFFTTILQNFRFKFPKKPEDIDESPKPLGFARIIPHYTMSFLPI

SEQ ID NO: 1121 - protein, 453 aa, Nostoc sp. PCC 7120
MTVTQNLPNGPRIPRLLRLFKFITQPIQYVEDFAKVYGDNFTIWGSGESYFVYFSHPQALEQIFTNVSCFESSGGGSPLLELLLGKNSLILLEGDRHQRQRQLLTPPFHGERMRAYGQTIREITQQVTQAWQMGKPFNIRASMQEITMRVILRVVFGVDEGELFQELRQLLTTLLDFMGSPLMSSTFFFSFTQKDYGAWSPWGRMVRLIKKIDQLIYALIAQRRAEFGENRQDILSLLISARYDDGQPMSDVELRDELMTMLVAGHETTASALTWAFYWIDSVPEVREKLFQELDTLNDDSEPSIIAKLPYLTAVCQETLRFYPIVLNAFFRRTKNPMEIMGYKLPKATLVVPSIYLAHHREEVYPQSKQFRPERFLEKQFSPYEYLPFGGGNRRCIGLAFAQYEMKIVLATILSQFQVSRLSKRPVQPVRRGLTLAAPGGMKMVANKRMRNS

SEQ ID NO: 1122 - protein, 474 aa, Vigna radiata
MVSLPTLLLLFAASAAAIFLHRAFSRRKFRLPPGSYGLPFIGETLQLISAYKSSNPEPFMDERVRRYGSIFMTHVFGEPTVFSADPELNRFILQNEGKLLDCSYPGSISNLLGKHSLLLMKGALHKRMHSLTMSFANSSIIKDHLLHHIDRLIGLNLDTWSDRVTLMDQAKKITFELTVKQLMSFDPDEWTESLRKEYVLVIEGFFTLPLPLFSTTYRRAIKARTKVAEALTLVVRQRREEYNQGKEKKSDMLGALLASGDHFSDDQIVDFLLALLVAGYETTSTIMTLAVKFLTETPLALAQLKEEHDQIRARSDPGAPLEWTDYKSMVFTQHVVNETLRVANIIGGIFRRATTDIDIKGYTIPKGWKVFASFRAVHLNPEYYKDARTFNPWRWQSNSSEAANPANVYTPFGGGPRLCPGYELARVVLSVFLHRIVTRFSWVPAEEDKLVFFPTTRTQKRYPIIVKRRNANHV

SEQ ID NO: 1123 - protein, 372 aa, Hemerocallis hybrid cultivar
STEIFSPVRIRSLAAVRQEEVKLMITGILASTSTDNSVKVNMKVVFSELMFNVIMKIIAGKRYFGVNTDSEVEEGQKFRVVFDEMFSTLEVASPQDFLPFLKWFGFKRMENRLTKLAKELDQLFQKLIEERRSERGKVQSTVIDVLLSLQETDREQYSDKLIKGMILSLIAAGTHTTAGTMEWAMSLLLNHPEALLKVRDEIDKKVGQDRLIDHSDLQNLSYLNNAIKESLRLFPTAPLLLAHESSAECTVGGFTIPSNTILFANAYALHRDPKVWTDPVSFKPERFENNGQQGSRIYVPFGLGRRSCPGEGLATQVVGLALGTLIQCFEWDRNGEEKVDMTDGSGLAMHMEKPLEAMCKPRQSIVDVINRL

SEQ ID NO: 1124 - protein, 536 aa, Gossypium arboreum
MLQIAFSSYSWLLTASNQKDGMLFPVALSFLVAILGISLWHVWTIRKPKKDIAPLPPGPRGLPIVGYLPYLGTDNLHLVFTDLAAAYGPIYKLWLGNKLCVVISSAPLAKEVVRDNDITFSERDPPVCAKIITFGLNDIVFDSYSSPDWRMKRKVLVREMLSHSSIKACYGLRREQVLKGVQNVAQSAGKPIDFGETAFLTSINAMMSMLWGGKQGGERKGADVWGQFRDLITELMVILGKPNVSDIFPVLARFDIQGLEKEMTKIVNSFDKLFNSMIEERENFSNKLSKEDGNTETKDFLQLLLDLKQKNDSGISITMNQVKALLMDIVVGGTDTTSTMMEWTMAELIANPEAMKKVKQEIDDVVGSDGAVDETHLPKLRYLDAAVKETFRLHPPMPLLVPRCPGDSSNVGGYSVPKGTRVFLNIWCIQRDPQLWENPLEFKPERFLTDHEKLDYLGNDSRYMPFGSGRRMCAGVSLGEKMLYSSLAAMIHAYDWNLADGEENDLIGLFGIIMKKKKPLILVPTPRPSNLQHYMK

SEQ ID NO: 1125 - protein, 487 aa, Berberis stolonifera
MDYIVGFVSISLVALLYFLLFKPKHTNLPPSPPAWPIVGHLPDLISKNSPPFLDYMSNIAQKYGPLIHLKFGLHSSIFASTKEAAMEVLQTNDKVLSGRQPLPCFRIKPHIDYSILWSDSNSYWKKGRKILHTEIFSQKMLQAQEKNRERVAGNLVNFIMTKVGDVVELRSWLFGCALNVLGHVVFSKDVFEYSDQSDEVGMDKLIHGMLMTGGDFDVASYFPVLARFDLHGLKRKMDEQFKLLIKIWEGEVLARRANRNPEPKDMLDVLIANDFNEHQINAMFMETFGPGSDTNSNIIEWALAQLIKNPDKLAKLREELDRVVGRSSTVKESHFSELPYLQACVKETMRLYPPISIMIPHRCMETCQVMGYTIPKGMDVHVNAHAIGRDPKDWKDPLKFQPERFLDSDIEYNGKQFQFIPFGSGRRICPGRPLAVRIIPLVLASLVHAFGWELPDGVPNEKLDMEELFTLSLCMAKPLRVIPKVRI

SEQ ID NO: 1126 - protein, 475 aa, Myxococcus xanthus
MGTSEPVEPDHALSKPPPVAPVGAQALPRGPAMPGIAQLMMLFLRPTEFLDRCAARYGDTFTLKIPGTPPFIQTSDPALIEVIFKGDPDLFLGGKANNGLKPVVGENSLLVLDGKRHRRDRKLIMPTFLGERMHAYGSVIRDIVNAALDRWPVGKPFAVHEETQQIMLEVILRVIFGLEDARTIAQFRHHVHQVLKLALFLFPNGEGKPAAEGFARAVGKAFPSLDVFASLKAIDDIIYQEIQDRRSQDISGRQDVLSLMMQSHYDDGSVMTPQELRDELMTLLMAGHETSATIAAWCVYHLCRHPDAMGKLREEIAAHTVDGVLPLAKINELKFLDAVVKETMRITPVFSLVARVLKEPQTIGGTTYPANVVLSPNIYGTHHRADLWGDPKVFRPERFLEERVNPFHYFPFGGGIRKCIGTSFAYYEMKIFVSETVRRMRFDTRPGYHAKVVRRSNTLAPSQGVPIIVESRLPS

SEQ ID NO: 1127 - protein, 481 aa, Papaver somniferum
SLVAVVITTFLYLIFRDSSPKGLPPGPKPWPIVGNLLQLGEKPHSQFAQLAETYGDLFSLKLGSETVVVASTPLAASEILKTHDRVLSGRYVFQSFRVKEHVENSIVWSECNETWKKLRKVCRTDLFTQKMIESQAEVRESKAMEMVEYLKKNVGNEVKIAEVVFGTLVNIFGNLIFSQNIFKLGDESSGSVEMKEHLWRMLELGNSTNPADYFPFLGKFDLFGQSKDVADCLQGIYSVWGAMLKESKIAKQHNNSKKNDFVEILLDSGLDDQQINALLMEIFGAGTETSASTIEWALSELTKNPQVTANMRLELLSVVGKRPVKESDIPNMPYLQAFVKETLRLHPATPLLLPRRALETCKVLNYTIPKECQIMVNAWGIGRDPKRWTDPLKFSPERFLNSSIDFKGNDFELIPFGAGRRICPGVPLATQFISLIVSSLVQNFDWGLPKGMDPSQLIMEEKFGLTLQKEPPLYIVPKTRD

SEQ ID NO: 1128 - protein, 481 aa, Papaver somniferum
SLVAVVITTFLYLIFRDSSPKGLPPGPKPWPIVGNLLQLGEKPHSQFAQLAETYGDLFSLKLGSETVVVASTPLAASEILKTHDRVLSGRYVFQSFRVKEHVENSIVWSECNETWKKLRKVCRTELFTQKMIESQAEVRESKAMEMVEYLKKNVGNEVKIAEVVFGTLVNIFGNLIFSQNIFKLGDESSGSVEMKEHLWRMLELGNSTNPADYFPFLGKFDLFGQSKDVADCLQGIYSVWGAMLKERKIAKQHNNSKKNDFVEILLDSGLDDQQINALLMEIFGAGTETSASTIEWALSELTKNPQVTANMRLELLSVVGKRPVKESDIPNMPYLQAFVKETLRLHPATPLLLPRRALETCKVLNYTIPKECQIMVNAWGIGRDPKRWTDPLKFSPERFLNSSIDFKGNDFELIPFGAGRRICPGVPLATQFISLIVSSLVQNFDWGFPKGMDPSQLIMEEKFGLTLQKEPPLYIVPKTRD

SEQ ID NO: 1129 - protein, 472 aa, Arabidopsis thaliana
MAFTAFLLLLSSIAAGFLLLLRRTRYRRMGLPPGSLGLPLIGETFQLIGAYKTENPEPFIDERVARYGSVFMTHLFGEPTIFSADPETNRFVLQNEGKLFECSYPASICNLLGKHSLLLMKGSLHKRMHSLTMSFANSSIIKDHLMLDIDRLVRFNLDSWSSRVLLMEEAKKITFELTVKQLMSFDPGEWSESLRKEYLLVIEGFFSLPLPLFSTTYRKAIQARRKVAEALTVVVMKRREEEEEGAERKKDMLAALLAADDGFSDEEIVDFLVALLVAGYETTSTIMTLAVKFLTETPLALAQLKEEHEKIRAMKSDSYSLEWSDYKSMPFTQCVVNETLRVANIIGGVFRRAMTDVEIKGYKIPKGWKVFSSFRAVHLDPNHFKDARTFNPWRWQSNSVTTGPSNVFTPFGGGPRLCPGYELARVALSVFLHRLVTGFSWVPAEQDKLVFFPTTRTQKRYPIFVKRRDFAT

SEQ ID NO: 1130 - protein, 513 aa, Brassica napus
QTLSQLLDPTTAILIIVSLFIFIGLITRRRRSYPPGPRGWPIIGNMLMMDQLTHRGLANLAKKYGGLCHLRMGFLHMYAVSSPHVARQVLQVQDSIFSNRPATIAISYLTYDRADMAFAHYGPFWRQMRKVCVMKVFSRKRAESWASVRDEVDKMIRSVSSNVGKSINVGEQIFALTRNITYRAAFGSACEKGQDEFIRILQEFSKLFGAFNVADFIPYFGWIDPQGISKRLVKARNDLDGFIDDIIDEHMKKKENQNTVDDGDVGDTDMVDDLLAFYSEEAKLVSETTDLQNSIKLTRDNIKAIIMDVMFGGTETVASAIEWALTELLRSPEDLKRVQQELAEVVGLDRRVEESDIEKLTFLKCTLKETLRLHPPIPLLLHETAEDTEIDGYFVPKKSRVMINAFAIGRDPKSWPDAETFRPSRFLEPGVADFKGSNFEFIPFGSGRKSCPGMQLGLYALELAVAHILHCFTWKLPDGMKASELDMNDVFGLTAPKATRLFAVPSTRLICAV

SEQ ID NO: 1131 - protein, 437 aa, Cicer arietinum
NSARVMTLKLGQVTTVVISSADMAKEVLLTHDLITSNRTVPDALSVLNHDQYSLSFMRVSPRWRDLRKICNYQLFSNKTLDSSQALRRRKLQDLLNDIERCSKVGEAVDVGKAAFKTTVNLLSNTFFSVDFVHSAKEAGEYKEIIVSILKEVGVPNVSDFFPMLKFLDLQGIRKRSIVSVKKVLSIFKRFVGERVKMREGTGSIGNDDVLDALLNMSSDGGKIEMDKDEIEHLLLNIFVAGTDTTTYTLEWAMAELIHNPEMMSKLKEELEKTVGKGIPVEETDIAKLPYMQAVIKETFRLHPPVPLLLPRRAEIDVKIGDYVIPKDAQILINAWVVGRDPTKWENPNVFIPERFLDSEIDIKGHHFELIPFGSGRRTCPGLPLAIRMLPLMLGSLVNCFDWKLEDGLNVEDFNKEDEFGITLEKSQPVRIVPTKLY

SEQ ID NO: 1132 - protein, 381 aa, Cicer arietinum
WRSLRRACATKIFSPQQLDSTQFHRKRKVQDLLNYVQKCCEKGEALDFGEVVLATVMNSISETFISMDLFHYCDPSNDDDNKKSREFKEMVFGIMEEVGRPNVVDFFPFLKLFDPQGVRTRMRNHFEKLLAFFYEVMKERMRLRASGESKEYKDVLDSFLDLLNEENSQLCRHDVLHLFTDLFVAGIDTTSTTMEWAMAELLHNPSKLARLRKELEQIHGKFGQIEESDASKLPYLRAVVKEILRLHPSVPFLVPHKSKDDGELGGFMVPKNAQILVNVWSIGRNSSIWDNQIHLNLKDFWRVKLISKGRDFELVPFGAGRRICPGLPLASRSIHYIMASLLHHFNFKLADDLKPDDMDMSHKFGVTLHKAQPLRVVPIKA

SEQ ID NO: 1133 - protein, 496 aa, Glycine max
  unsure (1)..(496): unsure at all Xaa locations
MASLPALPTLLLSFAAIFFTVLLLFLRRRQLRLPPGSYGLPLIGETLQLISAYKSDNPEPFIDERVERYGSIFTTHVFGEATVFSADPEVNRFILQNEGRLLDCSYPGSISNLLGKHSLLLMKGGLHKRMHSLTMSLANSSIIKDHLLHHIDRLVCLNLDAWSNRVFLMDQAKKITFELTVKQLMSFDPDEWTENLRKEYVLVIEGFFTLPFPLFSTTYRRAIKARTKVAEALTLVVRQRRKEYDEDKEKKNDMLGALLASGDHFSDEEIVDFLLALLVAGYETTSTIMTLAIKFLTETPLALAQLKEEHDQIRARSDPGTPLEWTDYKSMAFTQCVVNETLRVANIIGGIFRRARTDIDIKGYTIPKGWKVFASFRAVHLNPEHYKDARSFNPWRWQSNSSETANPGNVYTPFGGGPRLCPGYELARVVLSVFLHRIVTRFSWVPAEEDKLVFFPTTRTQKRYPIIVQRRHXRGMTMYSNMKIKSTTDREGKKGS

SEQ ID NO: 1134 - protein, 479 aa, Glycine max
  unsure (1)..(479): unsure at all Xaa locations
MASFIIIPLLLLSICVVHVLHHRRGYCRGYPGNGGSAXGLPVVGATLLLVSAYKSDNPEPFMDQRVKRYGPIFTTHVFGEPTVFSADPETNRFILLNEGKLFECSYPGSISNLLGKHSLLLMKGSLHKRMHSLTMSFANSSIIKDHLLVDIDRLIRLNLDSWSDRVLLMEEAKKITFELTVKQLMSFDPGEWTETLRKEYVLVIEGFFSVPLPLFSSTYRRAIKARTKVAEALTLVVRDRRKESVTEEKKNDMLGALLASGYHFSDEEIVDFMLALLVAGYETTSTIMTLAIKFLTETPLALAQLKEEHDQIRAKKSCPEAPLEWTDYKSMAFTQCVVNETLRVANIIGAIFRRAMTDINIKGYTIPKGWRVVASFRAVHLNPDHFKDARTFNPWRWQSNSEASSPGNVYTPFGGGPRLCPGYELARVVLSVFLHRIVTRYSWFPAEEDKLVFFPTTRTQKRYPIIVKRREESKLSKSP

SEQ ID NO: 1135 - protein, 322 aa, Glycine max
  unsure (1)..(322): unsure at all Xaa locations
MASLPTLLSFAVISVALLYLRRVFRRRQFRLPPGSHGLPLIGETLQLISAYKSDNPEPFIDERVERYGSIFTTHVFGEPTVFSADPEVNRFILQNEGKLLDCSYPGSISNLLGKHSLLLMKGALHKRMHSLTMSFGNSSIIKDHLLHHIDRLICLNLDAWSDTVFLMDQAKKITFELTVKQLMSFDPEEWTENLRKEYVLVIEGFFTLPFPLFSTTYRRAIKARTKVAEALTLVVRQRRKEYDEDKEKKNDMLGALLASGDHFSDEEIVDFLLALLVAGYETTSTIMTLAIKFLTETPLALAQLKEREKKIKMMNYLQSNSX

SEQ ID NO: 1136 - protein, 509 aa, Ocimum basilicum
MAALLLLLLLLPAIFLLHHLYYRLRFRLPPGPRPLPVVGNLYDVKPVRFRCFADWAQSYGPIISVWFGSTLNVIVSNTELAKEVLKEKDQQLADRHRSRSAAKFSRDGQDLIWADYGPHYVKVRKVCMLELFSPKRLEALRPIREDEVTAMVESIYHDCTAPDNAGKSLLVKKYLGAVAFNNITRLAFGKRFVNSEGIIDKQGLEFKAIVSNGLKLGASLAMAEHIPWLRWMFPLDEDAFAKHGARRDQLTREIMEEHTRAREESGGAKQHFFDALLTLKDKYDLSEDTIIGLLWDMITAGMDTTAISVEWAMAELIKNPRVQQKAQEELDRVIGYERVMTELDFSNLPYLQCVAKEALRLHPPTPLMLPHRSNSNVKIGGYDIPKGSNVHVNVWAVARDPAVWKNPSEFRPERFLEEDVDMKGHDFRLLPFGAGRRVCPGAQLGINLVTSMIGHLLHHFNWAPPSGVSTDELDMGENPGLVTYMRTPLEAVPTPRLPSDLYKRIAVDL

SEQ ID NO: 1137 - protein, 512 aa, Ocimum basilicum
MAALLLLLLLPLLLPAIFLLHHLYYRLRFRLPPGPRPLPIVGNLYDVKPVRFRCFADWAQSYGPIISVWFGSTLNVIVSNTELAKEVLKEKDQQLADRHRSRSAAKFSRDGQDLIWADYGPHYVKVRKVCTLELFSPKRLEALRPIREDEVTAMVESIYHDCTAPDNAGKSLLVKKYLGAVAFNNITRLAFGKRFVNSEGIIDKQGLEFKAIVSNGLKLGASLAMAEHIPSLRWMFPLDEDAFAKHGARRDQLTREIMEEHTRAREESGGAKQHFFDALLTLKDKYDLSEDTIIGLLWDMITAGMDTTAISVEWAMAELIKNPRVQQKAQEELDRVIGYERVMTELDFSNLPYLQCVAKEALRLHPPTPLMLPHRSNSNVKIGGYDIPKGSNVHVNVWAVARDPAVWKNPCEFRPERFLEEDVDMKGHDFRLLPFGAGRRVCPGAQLGINLVTSMIGHLLHHFNWAPPSGVSSDELDMGENPGLVTYMRTPLEAVPTPRLPSDLYKRIAVDL

SEQ ID NO: 1138 - protein, 477 aa, Dictyostelium discoideum
FHKKRTNGMPPGPFPLPIIGNLHQLGKSPYKSLKSFSDKYGGLTTIFLGSVPTVLISEPNILREIIIKNNDSIIDRYISDSGLIIGGERNLLFSKGSFWIKYRKIFSSAMTNARKFNIASRIEQQAISLNNYFGTYANSKQAINPHDYIRRYSLNGVIDYSFSDSVEYESDTHHIVIRAAEIMEEILATGNPHDYLPFLKPFYTKKRNTLAMAVGQVWDYCNDAITVHRKTLDHEKPRDLLDLILMEIEKSEEKQFYDDDSLSKCLTDLIVAGHETVAITLGWMILFLSNHQDVQQKVYDELINVVGKGNLPALVHRKDTSYLNACIQETMRIRTAAPLALPRIASEDIKVGGYTIPKGTQVMMSVYGMASDERYWKDPHIFNPERWLSSNHSTENGGGGGGVVGNSSQSEVFIPFGVGPRMCVGMGVAKDELYYCASQMFMNFKWSPVNDKPIDDEGVARIALEYKEYQVVLERRK

SEQ ID NO: 1139 - protein, 328 aa, Oryza sativa
  unsure (1)..(328): unsure at all Xaa locations
XTMRQWEPAATVRLMDEAKKITFNLTVKQLVSIEPGPWTKSLRREYVKLIDGFFSIPFPLANLLPFTTYGQALKARKKVAGALREVIKKRMEEKAEGKKEKKDMVEELLEAEGGSFSEEEMVDFCLSLLVAGYETTSMLMTLAVKFLTETPAALAELKEEHANIRDMKGKKQPLEWSDYKSMPFTQCVINETLRVGNIISGVFRRANTDIHYKDYTIPKGCKIFASFRAVHLNNEHYENARTFNPWRWQINNKLQNAVGANIFTPFGGGPRLCPGYELARVVVSIFLHHLVTRFSWEETEEDRLVFFPTTRTLKGYPINLRLLSESIC

SEQ ID NO: 1140 - protein, 231 aa, Triticum aestivum
  unsure (1)..(231): unsure at all Xaa locations
MDEGALQLAAAAVAIVVAALVCRWFLVACAVGVRKQRPRLPPGSTGLPLIGETLRLISAYKTPDPEPFIDERVARHGGVFTTHIFGERTVFSADPAFNRLLLAAEGRAVSCSYPSSITTLLGARSLLLTRGTAHKRLHSLTLTRLGRPASQPLLAHIERLVLATMGQWEPTATVRLLDEAXKITFNLTVKQLVSIEPGPWTESLRREYVKLIDGFFSIPFLSPHSSPSPTT

SEQ ID NO: 1141 - protein, 516 aa, Fusarium sporotrichioides
MWSSKPLHDNLAQVASSFPPEVSETLSNLTLTQGFLAFLVLFIIVPRVFELLRNIFSPVSRIPGPLINKLSPWPLEIATFKGKSHLFARALHQKYGPIVVLAPNMISVGDANEIKRIIQNEDWVKSEAIYGNFRQDPHRPTLLAFTEKKAYSRRKRMLSSMFGIRYIRSLEPLMKSCVDAGVAHLDKLCENSNNSTVINLQHFIHGLAIDTIGATTFGGSFNVVENGSHPLPSRLKAGMKISAVMQLISWIKYIPFLPKRDPYIEEFTFKIVDKRRKESGDVKHQDLLQHLVDVSDDSPGSEFRTSDVQDESVILLAAGSETTANAELFTIMQLLKHPHVMKKLVEEVDKWYPPSEPDRETECAYSQAGMTYLQACIDETMRLIPGQATGSPRDASKQETVLGYGIPKGTTVFPNTQEAHLDSDNWKNPDKFVPERWLDIYSQNQTSSVPYWPFSAGSRVCVGKHFAFQEMHISLTTLLRKFSFEYVPGQDETTVFRIAQQLQANSYDVKVKRRSV

SEQ ID NO: 1142 - protein, 520 aa, Gibberella zeae
MIDQDWIKGLVNIPVSHVAGIFAASTVIYFLSSCFYNLYLHPLRKIPGPKLAAIGPYLEFYHEVIRDGQYLWEIRKMHDKYGPIVRVNAREVHIRDSSYYTTIYTAGSRKTNKDPATVGAFDVPSATAATVDHDRHRSRRGYLNPYFSKRTITNLEPFIHERVTKLLTRFQQHLDNDQVLSLDGAFCALTADVITNRFYGKHNDYLSLPDFHFVVRDGFLGLTKVYHLARFLPAVVTVLKRLPYSCIRMIAPSVCDLLQMRDEIQERGGEEFLSNKSHEAKSSILFGALADSHIPAHERTVERMLDEGTVILFAGTETTSRTLAITVFYLLTHPECLKKLREELNSLPPVKDDQYPLATLENLPYLNGVIHEGFRLAFGPISRSGRVATQEDLKYKEHVIPKGTPISQSTYFMHTDPKNFPEPEKFKPERWIEAQQKGIALKKYITNFSQGSRQCIGYTMAFAEMYLALSRIARAYEVELYDTTKADIDMTHARIVGYPKAIPGKKEHLGEVRVKVLKAL

SEQ ID NO: 1143 - protein, 519 aa, Rana dybowskii
MKLCFFLLIFIRSFLLFKIKLVRTSEKKWRMGSRSHGDVKHPKSLPSLPVIGSLLHLGKKLPPHILFCNLQKKYGSLYSFMMGSHYVVVVNNHEDAREVLLKKGKTFGGRPRTVTTDILTRDGKDIAFADYSPTWKFHRKMVHSALCMFGEGTVAIEQIISREAASLCQTLTSFQRIPLDMAPELIRAVTNVVCSLCFNTRYKRGDAEFETMLKYSKGIVDTVAKDSLVDIFPWLQIFPNKDLDILRQSVAARDQLLQKKINEHKDAFCGETVKDLVDALLKAKLNMENNNSNVSQDVGLTEDHILMTVGDIFGAGVETTSTVLKWAVAYLLHYPEVQKKIQEELDVKVGFGRYPLLSDRKILHYTEAAISEVLRIRPVSPLLIPHVALKESSIGEYTIPKEARVVINLWSLHHDEKEWVNPHLFSPDRFLDENGNRVYSPSPSFLPFGAGIRVCLGEALAKMEVFLFLSWILQRFTLEVPEGDPLPDLEGKFGVVIQVKPFKVIAKLREVWKNIEIVT

SEQ ID NO: 1144 - protein, 543 aa, Musca domestica
MIKYKQYSRAIVALRQRGAQQYSTNVTNASQPDVKATTTTTISPEWQEAKPFEEMPSMNSWPIIKNMLPWGKYGKMEPTQFLMALRDDMGPIVRTAAFMGRPPTVITHNPHDFEMVFRNEGIWPIRPGGDAQMYHRTVLREDFFQGVTGLVSVNGEKWGNFRSTVNPVLMQPKNVRLYLNKMAQVNDEFMARIRQIRDPETLEVPASFQEEMNRWTLESVSVVALDKQLGLITTNRDNPDLKKLIGLLNDFFELGQKIEFGLPFWKYIKTPTFKLFMKTLDGLLEIGNKYVNEAIDRLEAERQSGVPEKPENEKSVLEKLIKIDRKIATVMAIDMILAGVDTTSTTFTALLLCLAKNPEKQEKLREEIRQILPRKDSQFEPSSLNHIPYTRACIKEALRMYPLTLGNARILANDTVLSGYRVPKGTLVSMISTGLLQDDNHYTKAKEYLPERWMRPTKEETEDSATCPHALKASSPFIYLPFGFGPRSCVGRRIVEMELELGIARLVRNFRIEFNYPTENAFKFKLINVPNIPLKFKFTDVEN

SEQ ID NO: 1145 - protein, 509 aa, Squalus acanthias
MSLMLAALILTVAFVICSLTGFTQRKLSGGRLPKCLPSFPLIGSLLSLRSDLPPHLLFQKLQKTYGNLFSLMMGPHYAVVINNHQHAKEVLLKKGKIFAGRPSMVTTDLLSRGGKDIAFGKYGPAWKFHRKLVLSALHLFGDGSAGIEKMICQEATSMCSTFERLNNAAHDMMPDVTRAVTNVICLLCFNSTYEKEDPEFQTMRKYSQGIVNTVAKDSLIDIFPWLQFFPNENLHTLKQCIATRDSILQKKFEDHKANYSSDSANDLFNILLKAKMNAENNNSSVHEAGLTDDHMVMTVADIFGAGVETSSTAFAWMIIYLIHHPEVQKKIQEEIDSNIGFERTPKMSDKGNMNFLNATIHEILRIQPVSPLLIPHVALADSSIGDYTIPKGTRVIINLWAIHHDEKEWKNPDAFDPGRFLDEDGKYVCSSSESYLPFGAGTRVCLGEMLARMELFLFTSWILQRFTVQVPPGYPPPDKEGKFGIVLQPLKFKVQLKLRKAWENRGLHD

SEQ ID NO: 1146 - protein, 521 aa, Lycopersicon esculentum x Lycopersicon peruvianum
MVLNNINSILEALQANPILIFFFIIPLFFLYLFSTSRRKRYPPGPLGWPLIGNMMIMDQLTHRGLAKLAQKYGGVFHLKMGYVHKIVISGPEEARQVLQVQDNIYSNRPKTVAISYLTYDRADMAFADYGPFWRQMRKLCVMKLFSRKRAESWDSVRDEVDSMVKIVTTNAGTSINLGELVFCLTRNIIYRAAFGTSSDEGQDDFIKILQEFSKLFGAFNMADFIPWLGWIGKQGLNVRLAKARASLDGFIDTIIDDHIERKKAIHVINDDGYRESDMVDELLAFYSEETKVNESEDLQNAIRLTRDNIKAIIMDVMFGGTETVASAIEWAMAELMKSPEDLKKVQQELANVVGLNRKVDESDFENLTYLKCCLKETLRLHPPIPLLLHETAEESTVSGYYIPANSHVIINSFAIGRDKNSWEDPDSFKPSRFLKEGVADFKGGNFEFLPFGSGRRSCPGMQLGLYALEMAVAHLLHCFTWELPDGMKPSELNMDDMFGLTAPLANRLVAVPTPRLLCEIY

SEQ ID NO: 1147 - protein, 491 aa, Capra hircus
MDSISTAILLLILALICLLLTTSSKGKGRLPPGPRALPFLGNLLQLRSQDMLTSLTKLSKEFGAVYTVYLGPRRVVVLSGYQAVKEALVDQAEEFSGRGDYPAFFNFTKGNGIAFSNGDRWKALRKYSLQILRNFGMGKRTIEERILEEGHFLLEELRKTQGKPFDPTFVVSRSVSNIICSVIFGSRFDYDDDRLLTIIHLINENFQIMSSPWGEMYNIFPNLLDWVPGPHRRLFKNYGRMKNLIARSVREHQASLDPNSPRDFIDCFLTKMAQEKQDPLSHFFMDTLLMTTHNLLFGGTETVGTTLRHAFRLLMKYPEVQVRVQEEIDRVVGRERLPTVEDRAEMPYTDAVIHEVQRFADIIPMSLPHRVTRDTNFRGFTIPRGTDVITLLNTVHYDPSQFLKPKEFNPEHFLDANMSFKKSPAFMPFSAGRRLCLGEALARMELFLYLTAILQSFSLQPLGAPEDIDLTPLSSGLGNVPRPYQLCVRAR

SEQ ID NO: 1148 - protein, 378 aa, Oryctolagus cuniculus
LGILFSNANTWKEMRRFSLMTLRNFGMGKRSIEDRVQEEARCLVEELRKTNASPCDPTFILGCAPCNVICSIIFHNRFDYKDEHFLKLMEKFNENVRILSSPWLQICNNFPVLTDYLPGIHNTLVKNIEYTKNFIMEKVKEHQKSLDVNNPRDFIDCFLIKMDQENHLEFTLESLVTTVSDLFGAGTETTSTTLSISLLLLLKHPEVAAKVQEEIERVIGRHRSPCMQDRSRMPYTDAVIHEIQRYIDLIPINLPHAVTRDIKFRNYFIPKGMNIITSLTSVLHDEKEFPNPKVFDPGHFLDESGNFKKSDYFMPFSAGKRMCVGEGLARMELFLFLTSILQNFKLQSLVEPKDLDITAVVNGFASVPPAYQLCFSPV

SEQ ID NO: 1149 - protein, 504 aa, Mus spretus
MELLNGTDLWPVAIFTVIFILLVVLTHQRQRWTSRYPPGPVPWPILGNLLQVDLGNMPYSLYKLQKRYGDVFSLQMAWKPIVVINGLKAMKEMLLTCGEDTADRPPVPIFEYLGVKPGSQGVVLAPYGPEWREQRRFSVSTLRNFGLGKKSLEDWVTKEARHLCDAFTAQAGRSINPNTMLNKSTCNVIASLIFARRFEYEDPFLIRMLKVLEQSLTEISGLIPEVLNAFPILLRIPRLADKALQGQKSFNAILDNLLTENRTTWDPVQAPRNLTDAFLAEIEKAKGNPESSFNDENLLIVVRDLFGAGMVTTSTTLSWALLLMILYPDVQCRVQQEIDEVIGQVRHPEMADQAHMPYTNAVIHEVQRFGDIVPVNLPRITSHDIEVQDFLIPKGTILLPNMSSMLKDETVWEKPLRFHPEHFLDAQGHFVKPEAFMPFSAGRRSCLGESLARMELFLFFTCLLQRFSFSVPDGQPRPSNSGVYGILVAPSPYQLCAVIRDQGH

SEQ ID NO: 1150 - protein, 510 aa, Callistephus chinensis
MSILSLLVYFCISLLVIIALVNMFITRHTNRLPPGPAPWPVVGNLPHLGAIPHHTLAALATKYGPLVYLRLGFVHVVVASSPSVAAQFLKVHDLKFASRPPNSGAKHIAYNYQDMVFAPYGPQWTMFRKICKDHLFSSKALDDFRHVRQEEVAILARGLAGAGRSKVNLGQQLNMCTANTLARMMLDKRVFGNESGGDDPKANEFKEMATELMFLAGQFNIGDYIPVLDWLDLQGIVKKMKKLHTRFDKFLDVILDEHKVIASGHIDMLSTLISLKDDTSVDGRKPSDIEIKALLLELFVAGTDTSSNTVEWAIAELIRQPHLLKRAQEEMDSVVGQNRLVTEMDLSQLTFLQAIVKEAFRLHPSTPLSLPRIASESCEVDGYYIPKGSTLLVNIWAIGRHPEVWTDPLEFRPTRFLPGGEKPGIVVKVNDFEVLPFGAGRRICAGMSLALRTVQLLMGTLVQAFDWELANGIKPEKLNMDEAFGLSVQRAEPLVVHPRPRLPPHVYKSG

SEQ ID NO: 1151 - protein, 518 aa, Callistephus chinensis
MTILPFIFYTCITALVLYVLLNLLTRNPNRLPPGPTPWPIVGNLPHLGMIPHHSLAALAQKYGPLMHLRLGFVDVVVAASASVAAQFLKTHDANFASRPPNSGAKHIAYNYQDLVFAPYGPRWRMLRKICSVHLFSTKALDDFRHVREEEVAILTRVLVHAGESAVKLGQLLNVCTTNALARVMLGRRVFADGSEGRGVDPKADEFKDMVVELMELAGEFNIGDFIPPLDCLDLQGITKKMKKLHARFDKFLNIILDDHKIEKGAAGRRHSDLLTTLISLKDVDAADDDEEGKLSDIEIKALLLNLFAAGTDTSSSTVEWAVAELIRHPELLKQAREEMDIVVGRDRLVTELDLSRLTFLQAIVKETFRLHPSTPLSLPRMASESCEVDGYYIPKGSTLLVNVWAIARDPKMWTNPLEFRPSRFLPGGEKPDADIKGNDFEVIPFGAGRRICAGMSLGMRMVQLLIATLVQTFDWELANGLDPEKLNMEEAYGLTLQRAEPLMVHPRPRLSPHVYESR

SEQ ID NO: 1152 - protein, 406 aa, Streptomyces griseolus
MTDTATTPQTTDAPAFPSNRSCPYQLPDGYAQLRDTPGPLHRVTLYDGRQAWVVTKHEAARKLLGDPRLSSNRTDDNFPATSPRFEAVRESPQAFIGLDPPEHGTRRRMTISEFTVKRIKGMRPEVEEVVHGFLDEMLAAGPTADLVSQFALPVPSMVICRLLGVPYADHEFFQDASKRLVQSTDAQSALTARNDLAGYLDGLITQFQTEPGAGLVGALVADQLANGEIDREELISTAMLLLIAGHETTASMTSLSVITLLDHPEQYAALRADRSLVPGAVEELLRYLAIADIAGGRVATADIEVEGHLIRAGEGVIVVNSIANRDGTVYEDPDALDIHRSARHHLAFGFGVHQCLGQNLARLELEVILNALMDRVPTLRLAVPVEQLVLRPGTTIQGVNELPVTW

SEQ ID NO: 1153 - protein, 454 aa, Pseudomonas fluorescens
MTSWEREVSRGAGNRQLPVVKGWPLLGSALALIRNPLGFLQTTRSTYGDVYRVKAAHMNFVVLAGMEANRFVADKGKDCFVSSGFWEATLQEMQCPHSFIGVDGDAHRFQRNLMKPLFSKSAFNERIPMLAQIFTDTLQARYGVDQKVSALFRHVLSQQIGGSLQGYQPTPDEVEALMRYQNTAMNVCALKKWPRLALRLPGYRAAKKQVQALADRIIESERTQEQTQGYFQTLKEKGQMVQPQWFTPGDMRNHAIISYLAGIDTVGATLSFMLLELFKQPHLHQALRDEVDACFSQGLPDADGLENMETLKNFIREVMRLYPTAYAVRRTRRKDFEFQGYSIDKGQDIILFTTANHTDPAWFKNPQVFDITRYEEPRLEHRASGAWAPFGRGPHTCIGAGLANILLSLNLALFLYHTDLRPACKLSDIKMDFSNPAAGLSERFAISFTPRNRP

SEQ ID NO: 1154 - protein, 421 aa, Amycolatopsis mediterranei
MTTTAETSAEPVDLFSPEVVADPWGAHAAVREAPTLQIGGFMGGPPMYLAARYEDVRQVLMDQRFQCNPLADSPAEDIRNGVFRHLDMPEELIPWLKNLINASDGEEHARLRKLVSYALTAHRVGKFRPRVEELTAELLDKLEAAGGDGTPIDLVESFCYPLPVTVICELVGVDHEDRPQWRAWSDAMATLDGKRLPEEVRKTLAAARGMIERRRAEPKDDMVTALVEAQAKNPGIATDDELVGVLFSLVTAGHQTTTYLIGNSVLALHEHPDQLARLKADPSLWPQAVRELQRLGPIQFGQPRFATEDIEVGGTVIPRGMPVVPLIMAANSDPRKFPEPEKLQIDRLAVGSESHLGFGKGIHRCLGQHVAYLEAEVALRGLYTRFPDMTLAVPREEIPWILRPGFTRTKDLPVRLARPAS

SEQ ID NO: 1155 - protein, 511 aa, Amycolatopsis mediterranei
PVPLSIVSRDRVSIQRLACKVFGETRSGPPGRASFVLIAPRRPQTVHKGHNSEHCQVGGCSTGRPLPTVRNRACRTRAGRPRRHQEGMAMTATAKPSAKPVDLFSPEVVADPFGWYARLREEPLPHTGTLNLGTMMGGPDMWLATRYEDVLTVLTDPRFLTNPPADSPLADIRDGVFKAMNFPEDLIPWMANKLNTADGEDHTRLRKLVSYALTARRVNALRPRVEKITEDLFDRMAEQGKDGSPVDIVEEFCFPLPVTVICELVGIDEPDRAAWHAWGNAMATMDGPKIPPALRECIALSRELMARRRVEPKDDLVTALVQAQADDPGRVSDDEIVGILFSLVTAGHQTTTYLIGNSVLFLLEQPEQLARLKAEPALWAQAVRELQRLGPLQFTQARFPSEDVELGGVTIPRGTPVAPLLLAANTDPRKFPEPDKLVVDRLSVANEMHLSFGKGIHRCLGQHLAYQEAEVALHGLFTRFPDLALAVPRDEIPWILRPAFTRTKTLPLKLA

SEQ ID NO: 1156 - protein, 499 aa, Lotus japonicus
MDIISFLYYSLFYVALFAIIKLFLGSRKFKNLPPGPTSLPIIGNLHHLKRPLHRTFRALSEKYGDVFSLWFGNRLVVVVSSFADVQECFTKNDVVLANRPRFLSGKYIFYNYTTLGSTSYGEHWRNLRRITSLDVLSNHRINSFSPIRRDETTRLIRKLAEDSAKNFSEVELTSRFFDMTFNNIMRMISGKRYYGEDCDMTELQEASEFRDMVTELLQLSGANNKADFMPILRLVDFEGLEKRVKGISSKTDRFLRGLLQEHRDKKQRTANTMIDHLLTLQESQPEYYTDQIIKGLALAMLLAGTDSSAVTLEWSMCNVLNYPEVLEKIKAELDTHVGQDRLVDESDIPKLTYLKNVINETLRLYTPAPLLLPHSASDDCTIGGYKVPRDTIVLINAWALHRDPQLWTEATTFKPERFDKKGELEKLIPFGLGRRACPGELLAIRAISMTLALLIQCFDWKRVSDEEIDMGERDGFVLMKSIPVKAMCKSRPVINNVFK

SEQ ID NO: 1157 - protein, 471 aa, Persea americana
MAILVSLLFLAIALTFFLLKLNEKREKKPNLPPSPPNLPIIGNLHQLGNLPHRSLRSLANELGPLILLHLGHIPTLIVSTAEIAEEILKTHDLIFASRPSTTAARRIFYDCTDVAFSPYGEYWRQVRKICVLELLSIKRVNSYRSIREEEVGLMMERISQSCSTGEAVNLSELLLLLSSGTITRVAFGKKYEGEEERKNKFADLATELTTLMGAFFVGDYFPSFAWVDVLTGMDARLKRNHGELDAFVDHVIDDHLLSRKANGSDGVEQKDLVDVLLHLQKDSSLGVHLNRNNLKAVILDMFSGGTDTTAVTLEWAMAELIKHPDVMEKAQQEVRRVVGKKAKVEEEDLHQLHYLKLIIKETLRLHPVAPLLVPRESTRDVVIRGYHIPAKTRVFINAWAIGRDPKSWENAEEFLPERFVNNSVDFKGQDFQLIPFGAGRRGCPGIAFGISSVEISLANLLYWFNWELPGI

SEQ ID NO: 1158 - protein, 502 aa, Persea americana
MAILVSLLFLAIALTFFLLKLNEKREKKPNLPPSPPNLPIIGNLHQLGNLPHRSLRSLANELGPLILLHLGHIPTLIVSTAEIAEEILKTHDLIFASRPSTTAARRIFYDCTDVAFSPYGEYWRQVRKICVLELLSIKRVNSYRSIREEEVGLMMERISQSCSTGEAVNLSELLLLLSSGTITRVAFGKKYEGEEERKNKFADLATELTTLMGAFFVGDYFPSFAWVDVLTGMDARLKRNHGELDAFVDHVIDDHLLSRKANGSDGVEQKDLVDVLLHLQKDSSLGVHLNRNNLKAVILDMFSGGTDTTAVTLEWAMAELIKHPDVMEKAQQEVRRVVGKKAKVEEEDLHQLHYLKLIIKETLRLHPVAPLLVPRESTRDVVIRGYHIPAKTRVFINAWAIGRDPKSWENAEEFLPERFVNNSVDFKGQDFQLIPFGAGRRGCPGIAFGISSVEISLANLLYWFNWELPGDLTKEDLDMSEAVGITVHMKFPLQLVAKRHLS

SEQ ID NO: 1159 - protein, 516 aa, Penicillium digitatum
MDLVPLVTGQIKCIAYYTTGLVLASIVLNVIKQLVFYNRKEPPVVFHWIPFIGSTVAYGMDPYQFFFASRAKYGNIFTFILLGKKTTVYLGVEGNEFILNGKLKDVNAEEIYGKLTTPVFGSDVVYDCPNSKLMEQKKFIKYGLSQEALESYVPLIADEISSYIKSSPSFKGQSGTIDLVPAMAEITTFTAARTLQGEEVRSKLTTEFAKLFHDLDLGFTPINFMLPWAPLPQNRKRDRAHRRMREIYVDIIQARREAGEEANDNGRDKTKGTDMISNLMRCVYRDGTPIPDKEIAHLMITLLMAGQHSSASISCWILLRLASQPEMTEKLFAEQVNNLGADLPPLQYKDLDKLPLHRNVIKETLRLHSSIHTLMRKVKNPMPVPGTDFVIPPSHTLLSSPGVTARDDRHFRDPLRWDPHRWESRVEAEDSSDTVDYGYGAVSKGTRSPYLPFGAGRHRCIGEKFAYLNLGVIIATLVREFRFFNPEGMEGVPDTDYSSLFSRPMQPATVRWEVRS

SEQ ID NO: 1160 - protein, 516 aa, Penicillium digitatum
MDLVPLVTGQIKCIAYYTTGLVLASIVLNVIKQLVFYNRKEPPVVFHWIPFIGSTVAYGMDPYQFFFASRAKYGNIFTFILLGKKTTVYLGVEGNEFILNGKLKDVNAEEIYGKLTTPVFGSDVVYDCPNSKLMEQKKFIKYGLSQEALESYVPLIADEISSYIKSSPSFKGQSGTIDLVPAMAEITTFTAARTLQGEEVRSKLTTEFAKLFHDLDLGFTPINFMLPWAPLPQNRKRDRAHRRMREIYVDIIQARREAGEEANDNGRDKTKGTDMISNLMRCVYRDGTPIPDKEIAHLMITLLMAGQHSSASISCWILLRLASQPEMTEKLFAEQVNNLGADLPPLQYKDLDKLPLHRNVIKETLRLHSSIHTLMRKVKNPMPVPGTDFVIPPSHTLLSSPGVTARDERHFRDPLRWDPHRWESRVEAEDSSDTVDYGYGAVSKGTRSPYLPFGAGRHRCIGEKFAYLNLGVIIATLVREFRFFNPEGMEGVPDTDYSSLFSRPMQPATVRWEVRS

SEQ ID NO: 1161 - protein, 489 aa, Arabidopsis thaliana
MTETGLILMWFPLIILGLFVLKWVLKRVNVWIYVSKLGEKKHYLPPGDLGWPVIGNMWSFLRAFKTSDPESFIQSYITRYGRTGIYKAHMFGYPCVLVTTPETCRRVLTDDDAFHIGWPKSTMKLIGRKSFVGISFEEHKRLRRLTSAPVNGPEALSVYIQFIEETVNTDLEKWSKMGEIEFLSHLRKLTFKVIMYIFLSSESEHVMDSLEREYTNLNYGVRAMGINLPGFAYHRALKARKKLVAAFQSIVTNRRNQRKQNISSNRKDMLDNLIDVKDENGRVLDDEEIIDLLLMYLNAGHESSGHLTMWATILMQEHPMILQKAKEEQERIVKKRAPGQKLTLKETREMVYLSQVIDETLRVITFSLTAFREAKSDVQMDGYIIPKGWKVLTWFRNVHLDPEIYPDPKKFDPSRWEGYTPKAGTFLPFGLGSHLCPGNDLAKLEISIFLHHFLLKYRVERSNPGCPVMFLPHNRPKDNCLARITRTMP

SEQ ID NO: 1162 - protein, 489 aa, Arabidopsis thaliana
MTETGLILMWFPLIILGLFVLKWVLKRVNVWIYVSKLGEKKHYLPPGDLGWPVIGNMWSFLRAFKTSDPESFIQSYITRYGRTGIYKAHMFGYPCVLVTTPETCRRVLTDDDAFHIGWPKSTMKLIGRKSFVGISFEEHKRLRRLTSAPVNGPEALSVYIQFIEETVNTDLEKWSKMGEIEFLSHLRKLTFKVIMYIFLSSESEHVMDSLEREYTNLNYGVRAMGINLPGFAYHRALKARKKLVAAFQSIVTNRRNQRKQNISSNRKDMLDNLIDVKDENGRVLDDEKIIDLLLMYLNAGHESSGHLTMWATILMQEHPMILQKAKEEQERIVKKRAPGQKLTLKETREMVYLSQVIDETLRVITFSLTAFREAKSDVQMDGYIIPKGWKVLTWFRNVHLDPEIYPDPKKFDPSRWEGYTPKAGTFLPFGLGSHLCPGNDLAKLEISIFLHHFLLKYRVERSNPGCPVMFLPHNRPKDNCLARITRTMP

SEQ ID NO: 1163 - protein, 490 aa, Arabidopsis thaliana
MAETTSWIPVWFPLMVLGCFGLNWLVRKVNVWLYESSLGENRHYLPPGDLGWPFIGNMLSFLRAFKTSDPDSFTRTLIKRYGPKGIYKAHMFGNPSIIVTTSDTCRRVLTDDDAFKPGWPTSTMELIGRKSFVGISFEEHKRLRRLTAAPVNGHEALSTYIPYIEENVITVLDKWTKMGEFEFLTHLRKLTFRIIMYIFLSSESENVMDALEREYTALNYGVRAMAVNIPGFAYHRALKARKTLVAAFQSIVTERRNQRKQNILSNKKDMLDNLLNVKDEDGKTLDDEEIIDVLLMYLNAGHESSGHTIMWATVFLQEHPEVLQRAKAEQEMILKSRPEGQKGLSLKETRKMEFLSQVVDETLRVITFSLTAFREAKTDVEMNGYLIPKGWKVLTWFRDVHIDPEVFPDPRKFDPARWDNGFVPKAGAFLPFGAGSHLCPGNDLAKLEISIFLHHFLLKYQVKRSNPECLVMYLPHTRPTDNCLARISYQ

SEQ ID NO: 1164 - protein, 490 aa, Arabidopsis thaliana
MAETTSWIPVWFPLMVLGCFGLNWLVRKVNVWLYESSLGENRHYLPPGDLGWPFIGNMLSFLRAFKTSDPDSFTRTLIKRYGPKGIYKAHMFGNPSIIVTTSDTCRRVLTDDDAFKPGWPTSTMELIGRKSFVGISFEEHKRLRRLTAAPVNGHEALSTYIPYIEENVITVLDKWTKMGEFEFLTHLRKLTFRIIMYIFLSSESENVMDALEREYTALNYGVRAMAVNIPGFAYHRALKARKTLVAAFQSIVTERRNQRKQNILSNKKDMLDNLLNVKDEDGKTLDDEEIIDVLLMYLNAGHESSGHTIMWATVFLQEHPEVLQRAKAEQEMILKSRPEGQKGLSLKETRKMEFLSQVVDETLRVITFSLTAFREAKTDVEMNGYLIPKGWKVLTWFRDVHIDPEVFPDPRKFDPARWDNGFVPKAGAFLPFGAGSHLCPGNDLAKLEISIFLHHFLLKYQVKRSNPECPVMYLPHTRPTDNCLARISYQ

SEQ ID NO: 1165 - protein, 499 aa, Cicer arietinum
MEYNFLTYIIFLSLFLITTKLLFSKRKFKKLPPCPPSIPIIGNLHQVKQPIHHTFYNLSKKYGPIFTLKFGSQPVVVVSSASLVEECFTKNDIIFANRIHSAKTKYLGYNNTNMVSTSYGDLWRNLRRISSIEILSTHRLNSFSEIRKDETMRLIGKLAKKSHKDFTKVELRSLFGELTFNTIMRMVCGKRFYGEESDGTNAEEAKKFRDMMNEMQEFGLGSNLGDFVPLFKLFDFSGGHKKLKKVGEKMDALFQGLVDEHRNNKDKNLNTMIDHLLSLQESQPDYYSDQIIKGLIMALIVAGTETSSVTLEWAMSNLLNHPEILEKAKIELDNHIGQEHLIEEAEATKLQYLQNIISETLRLHPPVTMLLPHLSSHDCTIGGYDVPRNTMLMVNAWAIHRDPNLWADPMSFKPERFENGQGDIGGFIPFGMGRRACPGSGLALRTLGLTLGSLIQCFEWKRIGKEEVDMSEGSGTVVPKAIPLEAQCKARPIINKIFN

SEQ ID NO: 1166 - protein, 497 aa, Glycine max
MIMMMMMCSMWMWVVLVAIAGALLVLRSILKNVNWWLYESKLGVKQYSLPPGDMGWPFIGNMWSFLSAFKSKDPDSFISSFVSRFGRTGMYKTMMFGNPSIIVTTPEICKRVLTDDDKFTPGWPQSTIELIGKRSFISMSYEEHKRLRRLTSSSINGMEALSLYLTYIEKNVKSSLEKWANMGQIEFLTEIRKLTFKIIMHIFLSSESEHVMEALEREYTALNHGVRAMCINIPGFAYHKAFKARKNLVAIFQSIVDERRNLRKGYLPGKAKDMMDALIDLEDDDGRKLSDEDIIDIMLMYLNAGHESSGHITMWATFFLQKHPEYLQKAKAEQEEIIRRRPSTQKGLTLKEVREMDFLYKVIDETLRVITFSLVVFREAKTDVNINGYTVPKGWKVLVWFRSVHLDPEIFPDPKEFNPNRWNKEHKAGEFLPFGGGSRLCPGNDLAKMEIAVFLHHFLLNYRFEQHNPNCPVRYLPHTRPMDNCLGRVRKCPSTTT

SEQ ID NO: 1167 - protein, 495 aa, Glycine max
  unsure (1)..(495): unsure at all Xaa locations
MMEMDSMCMWVVLVAIAGALLVLRSMLKNVNWWLYESKLGVKQYSLPPGDMGWPFIGNMWSFLRAFKSKDPDSFISSFVSRYGRTGMYKTLMFGNPSVIVTTPETCKRVLTDDDKFTTGWPQSTIELIGKRSFISMSYEEHKRLRRLTSSSINGMESLSLYLTYIEENVKNSLEKWANMGQIEFLTEIRKLTFKIIMHIFLSSESEPVMEXALEREYTALNHGVRAMCINIPGFAYHKAFKARKNLVAIFQSIVDERRNLRKGYLPGKAKDMMDALIDVEDDDGRKLSDEDIIDIMLMYLNAGHESSGHITMWATFFLQKHPEYLQKAKAEQEEIIRRRPPTQKGLTLKEVREMDFLYKVIDETLRVITFSLVVFREAKSDVNINGYTIPKGWKALVWFRSVHLDPEIYPNPKEFNPYRWNKEHKAGEFLPFGGGSRLCPGNDLAKMEIAVFLHHFLLNYRFEQHNPNCPVRYLPHTRPMDNCLGRVRKCSSTTT

SEQ ID NO: 1168 - protein, 368 aa, Glycine max
  unsure (1)..(368): unsure at all Xaa locations
XFGSRNSLYLSYEEHKRLRRLTSSSINGMESLSLYLTYIEENVKNSLEKWANMGQIEFLTEIRKLTFKIIMHIFLSSESEPVMEALEREYTALNHGVRAMCINIPGFAYHKAFKARKNLVAIFQSIVDERRNLRKGYLPGKAKDMMDALIDVEDDDGRKLSDEDIIDIMLMYLNAGHESSGHITMWATFFLQKHPEYLQKAKAEQEEIIRRRPPTQKGLTLKEVREMDFLYKVIDETLRVITFSLVVFREAKSDVNINGYTIPKGWKALVWFRSVHLDPEIYPNPKEFNPYRWNKEHKAGEFLPFGGGSRLCPGNDLAKMEIAVFLHHFLLNYRFEQHNPNCPVRYLPHTRPMDNCLGRVRKCSSTTT

SEQ ID NO: 1169 - protein, 504 aa, Oryza sativa (japonica cultivar-group)
MEGMGMAAAWAAGDLWVLAAAVVAGVVLVDAVVRRAHDWVRVAALGAERRSRLPPGEMGWPMVGSMWAFLRAFKSGNPDAFIASFIRRFGRTGVYRTFMFSSPTILAVTPEACKQVLMDDEGFVTGWPKATVTLIGPKSFVNMSYDDHRRIRKLTAAPINGFDALTTYLSFIDQTVVASLRRWSSPESGQVEFLTELRRMTFKIIVQIFMSGADDATMEALERSYTDLNYGMRAMAINLPGFAYYRALRARRKLVSVLQGVLDGRRAAAAKGFKRSGAMDMMDRLIEAEDERGRRLADDEIVDVLIMYLNAGHESSGHITMWATVFLQENPDIFARAKAEQEEIMRSIPATQNGLTLRDFKKMHFLSQVVDETLRCVNISFVSFRQATRDIFVNGYLIPKGWKVQLWYRSVHMDDQVYPDPKMFNPSRWEGPPPKAGTFLPFGLGARLCPGNDLAKLEISVFLHHFLLGYKLKRANPKCRVRYLPHPRPVDNCLATITKVSDEH

SEQ ID NO: 1170 - protein, 469 aa, Oryza sativa (japonica cultivar-group)
MAAAWAAGDLWVLAAAVVAGVVLVDAVVRRAHDWVRVAALGAERRSRLPPGEMGWPMVGSMWAFLRAFKSGNPDAFIASFIRRQVWADRGVQDVHVQQPDDPGGDAGGVQAGAHGRRGLRHRLAQGHRHPHRPQILRQHVLRRPPPHPQAHRRPHQRLRRPHHLPLLHRPDRRRLPPPLVLAGVRPGRVPHRAQAHDLQDHRPDLHERRRRRHHGGPGAELHRPQLRHARHGHQPPRLRLLPRAQGSPEARVRAAGCARRPEGRRRQGLQTLRGHGHDGPPHRGRGRTRPPPRRRRDRRRPHHVPQRRPRVLRPHHHVGHRLPPGEPRHLRKSKVQAEQEEIMRSIPATQNGLTLRDFKKMHFLSQVVDETLRCVNISFVSFRQATRDIFVNGYLIPKGWKVQLWYRSVHMDDQVYPDPKMFNPSRWEGPPPKAGTFLPFGLGARLCPGNDLAKLEISVFLHHFLLGYK

SEQ ID NO: 1171 - protein, 505 aa, Helianthus tuberosus
MEIPYLLTTTLLLLFTTLYLLLRRRSSTLPPTIFPSLPIIGHLYLLKPPLYRTLAKLSAKHGQILRLQLGFRRVLIVSSPSAAEECFTKNDIVFANRPKMLFGKIIGVNYTSLAWSPYGDNWRNLRRIASIEILSIHRLNEFHDIRVEETRLLIQKLLSACNSGSSQVTMKFSFYELTLNVMMRMISGKRYFGGDNPELEEEGKRFRDMLDETFVLAGASNVGDYLPVLSWLGVKGLEKKLIKLQEKRDVFFQGLIDQLRKSKGTEDVNKKKTMIELLLSLQETEPEYYTDAMIRSFVLVLLAAGSDTSAGTMEWVMSLLLNHPQVLKKAQNEIDSVIGKNCLVDESDIPNLPYLRCIINETLRLYPAGPLLVPHEASSDCVVGGYNVPRGTILIVNQWAIHHDPKVWDEPETFKPERFEGLEGTRDGFKLLPFGSGRRSCPGEGLAVRMLGMTLGSIIQCFDWERTSEELVDMTEGPGLTMPKAIPLVAKCKPRVEMTNLLSEL

SEQ ID NO: 1172 - protein, 520 aa, Helianthus tuberosus
MEIPYLLTVVLLLLTTLYLLLFTTLLLLFTTLYLLLRRRRSSTLPPTIFPYLPIIGHLYLLKPPLYRTLAKLSAKHGPILRLQLGFRRVLIVSSPSAAEECFTKNDIVFANRPKMLFGKIIGVNYTSLAWSPYGDNWRNLRRIASIEILSIHRLNEFHDIRVEETRLLIQKLLSACNSGSSQVTMKFSFYELTLNVMMRMISGKRYFGGDNPELEEEGKRFRDMLDETFVLAGASNVGDYLPVLSWLGVKGLEKKLIKLQEKRDVFFQGLIDQLRKSKGTEDVNKKKTMIELLLSLQETEPEYYTDAMIRSFVLVLLAAGSDTSAGTMEWVMSLLLNHPQVLKKAQNEIDSVIGKNCLVDESDIPNLPYLRCIINETLRLYPAGPLLVPHEASSDCVVGGYNVPRGTILIVNQWAIHHDPKVWDEPETFKPERFEGLEGTRDGFKLLPFGSGRRSCPGEGLAVRMLGMTLGSIIQCFDWERTSEELVDMTEGPGLTMPKAIPLVAKCKPRVEMTNLLSEL

SEQ ID NO: 1173 - protein, 504 aa, Oryza sativa; identical to SEQ ID NO: 1169

SEQ ID NO: 1174 - protein, 442 aa, Oryza sativa
MEEWHRFGRTGVYRTFMFSSPTILAVTPEACKQVLMDDEGFVTGCAKGTVTLIGPKSFVNMSYDDHRRIRKLTAGPINGFDALTTYLSFIDQTVVASLRRWSSPESGQVEFLTELRRMTFKIIVQIFMSGADDATMEALERSYTDLNYGMRAMAINLPGFAYYRALRARRKLVSVLQGVLDGRRAAAAKGFKRSGAMDMMDRLIEAEDERGRRLADDEIVDVLIMYLNAGHESSGHITMWATVFLQENPDIFARAKAEQEEIMRSIPATQNGLTLRDFKKMHFLSQVVDETLRCVNISFVSFRQATRDIFVNGYLIPKGWKVQLWYRSVHMDDQVYPDPKMFNPSRWEGPPPKAGTFLPFGLGARLCPGNDLAKLEISVFLHHFLLGYNASRRRASRRRRRPPLPPGPALCPPPLRDLLARSPARPTSVSVHSSFVRSAPLP

SEQ ID NO: 1175 - protein, 144 aa, Oryza sativa
  unsure (1)..(144): unsure at all Xaa locations
RLADDEIVDVLIMYLNAGHESSGHITMWATVFLQENPDIFARAKAEQEEIMRSIPATQNGLTLRDFKKMHFLSQVVDETLRCVNISFVSFRQATRDIFVNGYLIPKGWKVQLWYRSVHMDDQVYPDPKMFNPSRWEGPPPILKX

SEQ ID NO: 1176 - protein, 494 aa, Triticum aestivum
  unsure (1)..(494): unsure at all Xaa locations
MGEGGRRAAAGRPGLAAPGGRGALAPRVHARPAAAAPGCRRRGGRPRGAVGWLLVRGPWAPLGPSESARPDSYGCSPPRWLGRAGLHRALMCRRLPSVVTTPDAAGNARSPGRPXXAAFPRSPGTARPSTTPLSPSPGAGPTAPATSRLVLGDGRPDDAAGPASRSLTVGAPTWGTADRHLGIDTVTELRNLTLRIIGQIFMGVADERTAAELESTYTERSYVMRAMAIDLPGFAYHKAIRARRRLVAALQCVLDERRARGAKTAGVDMMDRLIAAEDEGGRRLQDDEIIDVLVMYLNAGHESPGHITMWATVFLQENPEILAKAKAEQEAIMRSIPPGQKGLTLRDFRKMEYLSQVVDETLRFVNISFVSFRQATRDVSVNGYLIPKGWKVQLWYRSVHMDPQVYPDPKKFDPSRWEGPPPRAGTFLPFGLGTRLCPGNDLAKLEISVFLHHFLLGYKLTRKNPNCRVRYLPHPRPVDNCLAKITRVSSSHXR

SEQ ID NO: 1177 - protein, 324 aa, Triticum aestivum
  unsure (1)..(324): unsure at all Xaa locations
XCLLLQINPTKGNKSWSSTAVAAALERGRLPPGDMGWPLVGGMWAFLRAFKSGRPDSFIDSFARWFGRAGLYRAFMFSSPTIMVTTPDACKQVLMDDDTFVTGWPKATIALIGPKSFISMGYDEHRRLRKLTAAPINGFDALTFYLAFIDHTVVTTLRGWSERGDDFESPAELRRMTFRIIVQIFMGGADERTAAELESTYTELNYGMRAMAIDLPGFAYHKAIRARRRPGAALQCVLDERRARGAKTAGVDMMDRLIAAEDEGGRRLQDDEIIDVLVMYLNAGHESSGHITMWATVFLQENPEILAKAKAEQEAIMRSIPSGQ

SEQ ID NO: 1178 - protein, 128 aa, Triticum aestivum
  unsure (1)..(128): unsure at all Xaa locations
ICLFSSSLMEKYIGTMLFRFRRAGLYRAFMFSSPTILVTTPEACKQVLMDDDTFVTGWPKATVALIGPKSFVNMGYDEHRRLRKLTAAPINGFDALTSYLGFIDETVVTTLRGWADRGSDFEFLTELX

SEQ ID NO: 1179 - protein, 141 aa, Triticum aestivum
  unsure (1)..(141): unsure at all Xaa locations
MGELVWAALAGVLVPLAAVALDAAVRAAHAWYWTASLGAGRRGRLPPGDMGWPLVGGMWAFLCAFKSGRPDSFIDSFARRFRRAXGLYXRAFMFSSPTILVTSPEAXCKQXCFMDDDTFVTGWPKATVALIGPKSFINMGX

SEQ ID NO: 1180 - protein, 507 aa, Musa acuminata
MALPPLLLSPLPSLLVVLALLSSLLLAGRKARGGSATWKLPPGPPKLPVIGHLHLLGSSLLHRSLWELSKKHGPLMHLKFGRVPVVVVSSPEMAKEVLKTHDLECCSRPSLLSFSKFSYGLSDVAFIPYGERWRQLRKLCTVELLSTRKINSFRDIRKEEMERVTKLICSHVRASSMVNLSELLLSLSCNMTCRSAFGSGFDDGGDIQLHDMLREAQEELSGLFLSDYLPLLGWVDRLSGMRSRLERAFLKLDSIYQRRIDYHQDRLRQQGKEDGDVLDALLRMQKDEEGLTEDHIKGVLMDIFIAGTDTSSATVEWAMAELIRQPELMKRAQDEVRRCVGSKGEVEESDLHQLHFFKCVIKETMRLHPPAPLLLPRETMQHFKLNGYDILPKTWMYVNAWAIGRDPNSWGRPHVFDPERFMHDSTEASGQDFKLIPFGEGRRICPGKNLGMLMVELVLANLLYSFDWHLPPGMVKEDISMEEAPGVTVHREYALCLMATKYDATTA

SEQ ID NO: 1181 - protein, 491 aa, Musa acuminata
GTRRDRERERERERERERERERERERERERERERERVHLLGSSSLHRSLWELSKKHGPLMHLKFGRVPVVVVSSPEMAKEVLKTHDLECCSRPSLLSFSKFSYGLSDVAFIPYGERWRQLRKLCTVELLSTRKINSFRDIRKEEMERVTKLICSHVRASSMVNLSELLLSLSCNMTCRSAFGSGFDDGGDIQLHDMLREAQEELSGLFLSDYLPLLGWVDRLSGMRSRLERAFLKLDSIYQRRIDYHQDRLRQQGKEDGDVLDALLRMQKDEEGLTEDHIKGVLMDIFIAGTDTSSATVEWAMAELIRQPELMKRAQDEVRRCVGSKGEVEESDLHQLHFFKCVIKETMRLHPPAPLLLPRETMQHFKLNGYDILPKTWMYVNAWAIGRDPNSWGRPHVFDPERFMHDSTEASGQDFKLIPFGEGRRICPGKNLGMLMVELVLANLLYSFDWHLPPGMVKEDISMEEAPGVPVHREYALCLMATKYDATTA

SEQ ID NO: 1182 - protein, 523 aa, Perilla frutescens
MISAAVSLIICTSILGVLVYFLFLRRGGGSNGRPLPPGPRPWPIVGNLPQLGPKPHQSMAALARVHGPLMHLKMGFVHVVVAASATVAEKFLKVHDTNFLSRPPNSGAEHIAYNYNDLVFAPHGPRWRLLRKICALHLFSSKALDDFRHVREEEVGILIRNLASVGEMPASIGQMMYVCATNAISRVMLGRHVLGDEHRGAAGGGDTTAEEFKAMVVELMALAGVFNVGDFIPPLKGLDLQGVVAKMKKLHQRFDAFFSGILHDHKINGSNAAEGHVDLLTTLISLKDVDNNGEGGKLTDTEIKALLLNLFTAGTDTTSSTVEWAITELIRNPNILARVRKELDLIVGKDKLVKESDLGQLTYLQAVIKENFRLHPSTPLSLPRVAQESCEINGYYIPKDSTLLVNVWAIGRDPNVWPDPLEFRPERFLMGGEKPNVDVRGNDFELIPFGSGRRICAGMNLGIRMVQLLIATMVHAFDFELANGQLAKDLNMEEAYGITLQRADPLVVHPRPRLARHVYQAQV

SEQ ID NO: 1183 - protein, 530 aa, Saccharomyces cerevisiae
MSATKSIVGEALEYVNIGLSHFLALPLAQRISLIIIIPFIYNIVWQLLYSLRKDRPPLVFYWIPWVGSAVVYGMKPYEFFEECQKKYGDIFSFVLLGRVMTVYLGPKGHEFVFNAKLADVSAEAAYAHLTTPVFGKGVIYDCPNSRLMEQKKFVKGALTKEAFKSYVPLIAEEVYKYFRDSKNFRLNERTTGTIDVMVTQPEMTIFTASRSLLGKEMRAKLDTDFAYLYSDLDKGFTPINFVFPNLPLEHYRKRDHAQKAISGTYMSLIKERRKNNDIQDRDLIDSLMKNSTYKDGVKMTDQEIANLLIGVLMGGQHTSAATSAWILLHLAERPDVQQELYEEQMRVLDGGKKELTYDLLQEMPLLNQTIKETLRMHHPLHSLFRKVMKDMHVPNTSYVIPAGYHVLVSPGYTHLRDEYFPNAHQFNIHRWNNDSASSYSVGEEVDYGFGAISKGVSSPYLPFGGGRHRCIGEHFAYCQLGVLMSIFIRTLKWHYPEGKTVPPPDFTSMVTLPTGPAKIIWEKRNPEQKI

SEQ ID NO: 1184 - protein, 530 aa, Saccharomyces cerevisiae
MSATKSIVGEALEYVNIGLSHFLALPLAQRISLIIIIPFIYNIVWQLLYSLRKDRPPLVFYWIPWVGSAVVYGMKPYEFFEECQKKYGDIFSFVLLGRVMTVYLGPKGHEFVFNAKLADVSAEAAYAHLTTPVFGKGVIYDCPNSRLMEQKKFVKGALTKEAFKSYVPLIAEEVYKYFRDSKNFRLNERTTGTIDVMVTQPEMTIFTASRSLLGKEMRAKLDTDFAYLYSDLDKGFTPINFVFPNLPLEHYRKRDHAQKAISGTYMSLIKERRKNNDIQDRDLIDSLMKNSTYKDGVKMTDQEIANLLIDVLMGGQHTSAATSAWILLHLAERPDVQQELYEEQMRVLDGGKKELTYDLLQEMPLLNQTIKETLRMHHPLHSLFRKVMKDMHVPNTSYVIPAGYHVLVSPGYTHLRDEYFPNAHQFNIHRWNNDSASSYSVGEEVDYGFGAISKGVSSPYLPFGGGRHRCIGEHFAYCQLGVLMSIFIRTLKWHYPEGKTVPPPDFTSMVTLPTGPAKIIWEKRNPEQKI

SEQ ID NO: 1185 - protein, 512 aa, Torenia hybrida
MSPLALMILSTLLGFLLYHSLRLLLFSGQGRRLLPPGPRPWPLVGNLPHLGPKPHASMAELARAYGPLMHLKMGFVHVVVASSASAAEQCLRVHDANFLSRPPNSGAKHVAYNYEDLVFRPYGPKWRLLRKICAQHIFSVKAMDDFRRVREEEVAILSRALAGKRAVPIGQMLNVCATNALSRVMMGRRVVGHADGTNDAKAEEFKAMVVELMVLSGVFNISDFIPFLEPLDLQGVASKMKKLHARFDAFLTEIVRERCHGQINNGGAHQDDLLSTLISFKGLDDGDGSRLTDTEIKALLLNLFAAGTDTTSSTVEWAVAELLRHPKTLAQVRQELDSVVGKNRLVSETDLNQLPYLQAVVKETFRLHPPTPLSLPRLAEDDCEIDGYLIPKGSTLLVNVWAIARDPKVWADPLEFRPERFLTGGEKADVDVKGNDFELIPFGAGRRICAGVGLGIRMVQLLTASLIHAFDLDLANGLLPQNLNMEEAYGLTLQRAEPLLVHPRLRLATHVY

SEQ ID NO: 1186 - protein, 457 aa, Torenia hybrida
MAKTYGPLMHLKFGLKDAVVASSASVAEQFLKKHDVNFSNRPPNSGAKHIAYNYQDLVFAPYGPRWRLLRKICSVHLFSSKALDDFQHVRHEEICILIRAIASGGHAPVNLGKLLGVCTTNALARVMLGRRVFEGDGGENPHADEFKSMVVEIMVLAGAFNLGDFIPVLDWFDLQGIAGKMKKLHARFDKFLNGILEDRKSNGSNGAEQYVDLLSVLISLQDSNIDGGDEGTKLTDTEIKALLLNLFIAGTDTSSSTVEWAMAELIRNPKLLVQAQEELDRVVGPNRFVTESDLPQLTFLQAVIKETFRLHPSTPLSLPRMAAEDCEINGYYVSEGSTLLVNVWAIARDPNAWANPLDFNPTRFLAGGEKPNVDVKGNDFEVIPFGAGRRICAGMSLGIRMVQLVTASLVHSFDWALLDGLKPEKLDMEEGYGLTLQRASPLIVHPKPRLSAQVYCM

SEQ ID NO: 1187 - protein, 514 aa, Oncorhynchus mykiss
MMVSWSVCRSSLALPACGLPSARHNSSMPVVRQALSPDNSSTVQNFSEIPGLWRNGLANLYSFWKLDGFRNIHRVMVHNFNTFGPIYREKIGYYDSVNIIKPEMPAILFKAEGHYPKRLTVEAWTSYRDYRNRKYGVLLKNGEDWRSNRVILNREVISPKVLGNFVPLLDEVGQDFVARVHKKIERSGQDKWTTDLSQELFKYALESVGSVLYGERLGLMLDYINPEAQHFIDCISLMFKTTSPMLYIPPAMLRRVGAKIWRDHVEAWDGIFNQADRCIQNIYRTMRQDTNTHGKYPGVLASLLMLDKLSIEDIKASVTELMAGGVDTTSITLLWTLYELARHPDLQEELRAEVAVARQSTQGDMLQMLKMIPLVKGALKETLRLHPVAVSLQRYITEEIVIQNYHIPCGTLVQLGLYAMGRDPDVFPRPEKYLPSRWLRTENQYFRSLGFGFGPRQCLGRRIAETEMQLFLIHMLENFRVDKQRQVEVHSTFELILLPEKPILLTLKPLKSGQ

SEQ ID NO: 1188 - protein, 256 aa, Salvelinus alpinus
DCISLMFKTTSPMLYIPPPMLRRVGAKIWRDHVEAWDGIFNQADRCIQNIYRTMRQDTNTHRKYPGVLPSLLMLDKLSIEDIKASVTELMAGGVDTTSITLLWTLYELARHPDLQEELRAEVAVARQSTQGDMLQMLKMIPLVKGALKETLRLHPVAVSLQRYITEDIVIQNYHIPRGTLVQLGLYAMGRDPDVFPRPEKYLPSRWLRAENQYFRSLGFGFGPRQCLGRRIAETEMQLFLIHMLENFRVDKQRQVE

SEQ ID NO: 1189 - protein, 418 aa, Cloning vector pSLJ8313
MQVWPPYGKKKYDTDTATTPQTTDAPAFPSNRSCPYQLPDGYAQLRDTPGPLHRVTLYDGRQAWVVTKHEAARKLLGDPRLSSNRTDDNFPATSPRFEAVRESPQAFIGLDPPEHGTRRRMTISEFTVKRIKGMRPEVEEVVHGFLDEMLAAGPTADLVSQFALPVPSMVICRLLGVPYADHEFFQDASKRLVQSTDAQSALTARNDLAGYLDGLITQFQTEPGAGLVGALVADQLANGEIDREELISTAMLLLIAGHETTASMTSLSVITLLDHPEQYAALRADRSLVPGAVEELLRYLAIADIAGGRVATADIEVEGHLIRAGEGVIVVNSIANRDGTVYEDPDALDIHRSARHHLAFGFGVHQCLGQNLARLELEVILNALMDRVPTLRLAVPVEQLVLRPGTTIQGVNELPVTW

SEQ ID NO: 1190 - protein, 492 aa, Canis familiaris
MLLLGVLLLTVLAGARLLWGKWKLRGLHLPPLVPGCLHLLQPDLPLHLLGLTQKLGPIYRLRLGLQDVEVLNSKRTIEEAMVRKWVDFAGRPQTPSYKLVSLHHQDLSLGDYSLLWKAHKKLTRSALLLGIRSSMEPLVEQLTQEFCERMRAQAGTPVAIQKEFSLLTCAIICHLTFGNKEDTLVHTFHDCVQDLMRTWEHWSIQMLDIIPFLRFFPNPGLWRLKRALENRDHIVEKQLRQHKESMVAGQWRDMTDYMLQRVGRLRAEEGCGQLLEGHVHMSVVDLFIGGTETTATTLSWAVAFLLHHPEIQQRLQEELDRELGPGASGSRIPYRDPTRLPLLSATVAEVLRLRPVVPLALPHCTTRPNSISGYDIPEGMVVIPNLQGAHLDETVWERPQEFRPDRFLVPGASPRVLAFGCGARVCLGEPLARLELLVVLAQLLRAFTLMPAAGTLPSLRPRARCGVNLSMQPFQVQLQPRGAGVLGRGQHP

SEQ ID NO: 1191 - protein, 492 aa, Canis familiaris
MLLLGVLLLTVLAGARLLWGKWKLRGLHLPPLVPGCLHLLQPDLPLHLLGLTQKLGPIYRLRLGLQDVVVLNSKRTIEEAMVRKWVDFAGRPQTPSYKLVSLHHQDLSLGDYSLLWKAHKKLTRSALLLGIRSSMEPLVEQLTQEFCERMRAQAGTPVAIQKEFSLLTCAIICHLTFGDKEDTLVHTFHDCVQDLMRTWEHWSIQMLDIIPFLRFFPNPGLWRLKRALENRDHIVEKQLRQHKESMVAGQWRDMTDYMLQRVGRLRAEEGCGQLLEGHVHMSVVDLFIGGTETTATTLSWAVAFLLHHPEIQQRLQEELDRELGPGASGSRIPYRDPTRLPLLSATVAEVLRLRPVVPLALPHCTTRPSSISGYDIPEGMVVIPNLQGAHLDETVWERPQEFRPDRFLVPGASPRVLAFGCGARVCLGEPLARLELLVVLAQLLRAFTLMPAAGTLPSLRPRARCGVNLSMQPFQVQLQPRGAGVLGRGQHP

SEQ ID NO: 1192 - protein, 354 aa, Anabaena sp.
MEKGIQAYAQQICLITNQIASEWQIGQPFVARSAMQKLSLEVIIQIVFGLADGERYQQIKPLFTDWLNMTDSPLRSSMLFLKSLQKDWGTWTPWGQMKHKQRSIYDLLQAEIEEKRTKENEQRGDVLSLMMAARDENGQAMTDEELKDELLTILFAGHETTATTIAWAFYQILKNVNVQEKLQQELDRLGANPNPMEIAQLPYLTAVSQETLRMYPVLPTLFPRITKSSINIAGYQLEPDTTLMASIYLIHYREDLYPNPQQFRPERFIERQYSPSEYIPFGGGSRRCLGIALALLEIKLVIATVLSNYQLALAEDKPVNVQRRGFTLAPDGGVRVIMTGKKSLKFEQSSKIFN

SEQ ID NO: 1193 - protein, 395 aa, Bacillus subtilis
MTIASSTASSEFLKNPYSFYDTLRAVHPIYKGSFLKYPGWYVTGYEETAAILKDARFKVRTPLPESSTKYQDLSHVQNQMMLFQNQPDHRRLRTLASGAFTPRATESYQPYIIETVHQLLDQVQGEKKMEVISDFAFPLASFVIANIIGVPEEDREQLKEWAASLIQTIDFTRSRKVLTEGNHMAVQAMAYFKELIQKRKRHPQQDMISMLLKGKENDKLTEEEAASTCILLAIAGHETTVNLISNSVLCLLQHPEQLLKLRENPDLIGTAVEECLRYESPTQMTARVASEDIDISGVTIRQGEQVYLLLGAANRDPSIFTNPDVFDITRSPNPHLSFGHGHHVCLGSSLARLEAQIAINTFLQRMPSLKLADFEWRYRPLFGFRALEELPVTFE

SEQ ID NO: 1194 - protein, 467 aa, Arabidopsis thaliana
MDISALFLTLFAGSLFLYFLRCLISQRRFGSSKLPLPPGTMGWPYVGETFQLYSQDPNVFFQSKQKRYGSVFKTHVLGCPCVMISSPEAAKFVLVTKSHLFKPTFPASKERMLGKQAIFFHQGDYHAKLRKLVLRAFMPESIRNMVPDIESIAQDSLRSWEGTMINTYQEMKTYTFNVALLSIFGKDEVLYREDLKRCYYILEKGYNSMPVNLPGTLFHKSMKARKELSQILARILSERRQNGSSHNDLLGSFMGDKEELTDEQIADNIIGVIFAARDTTASVMSWILKYLAENPNVLEAVTEEQMAIRKDKEEGESLTWGDTKKMPLTSRVIQETLRVASILSFTFREAVEDVEYEGYLIPKGWKVLPLFRNIHHSADIFSNPGKFDPSRFEVAPKPNTFMPFGNGTHSCPGNELAKLEMSIMIHHLTTKYSWSIVGASDGIQYGPFALPQNGLPIVLARKPEIEV

SEQ ID NO: 1195 - protein, 463 aa, Arabidopsis thaliana
MDFSGLFLTLSAAALFLCLLRFIAGVRRSSSTKLPLPPGTMGYPYVGETFQLYSQDPNVFFAAKQRRYGSVFKTHVLGCPCVMISSPEAAKFVLVTKSHLFKPTFPASKERMLGKQAIFFHQGDYHSKLRKLVLRAFMPDAIRNMVPHIESIAQESLNSWDGTQLNTYQEMKTYTFNVALISILGKDEVYYREDLKRCYYILEKGYNSMPINLPGTLFHKAMKARKELAQILANILSKRRQNPSSHTDLLGSFMEDKAGLTDEQIADNIIGVIFAARDTTASVLTWILKYLADNPTVLEAVTEEQMAIRKDKKEGESLTWEDTKKMPLTYRVIQETLRAATILSFTFREAVEDVEYEGYLIPKGWKVLPLFRNIHHNADIFSDPGKFDPSRFEVAPKPNTFMPFGSGIHSCPGNELAKLEISVLIHHLTTKYRWSIVGPSDGIQYGPFALPQNGLPIALERKP

SEQ ID NO: 1196 - protein, 457 aa, Arabidopsis thaliana
MDISALFLTLFAGSLFLYFLRCLISQRRFGSSKLPLPPGTMGWPYVGETFQLYSQDPNVFFQSKQKRYGSVFKTHVLGCPCVMISSPEAAKFVLVTKSHLFKPTFPASKERMLGKQAIFFHQGDYHAKLRKLVLRAFMPESIRNMVPDIESIAQDSLRSWEGTMINTYQEMKTYTFNVALLSIFGKDEVLYREDLKRCYYILEKGYNSMPVNLPGTLFHKSMKARKELSQILARILSERRQNGSSHNDLLGSFMGDKEELTDEQIADNIIGVIFAARDTTASVMSWILKYLAENPNVLEAVTEEQMAIRKDKEEGESLTWGDTKKMPLTSRVIQETLRVASILSFTFREAVEDVEYEGYLIPKGWKVLPLFRNIHHSADIFSNPGKFDPSRFEVAPKPNTFMPFGNGTHSCPGNELAKLEMSIMIHHLTTKYRCVCVYYLLITFSFTHFVLFFQIYV

SEQ ID NO: 1197 - protein, 482 aa, Arabidopsis thaliana
MQISSSSSSNFFSSLYADEPALITLTIVVVVVVLLFKWWLHWKEQRLRLPPGSMGLPYIGETLRLYTENPNSFFATRQNKYGDIFKTHILGCPCVMISSPEAARMVLVSKAHLFKPTYPPSKERMIGPEALFFHQGPYHSTLKRLVQSSFMPSALRPTVSHIELLVLQTLSSWTSQKSINTLEYMKRYAFDVAIMSAFGDKEEPTTIDVIKLLYQRLERGYNSMPLDLPGTLFHKSMKARIELSEELRKVIEKRRENGREEGGLLGVLLGAKDQKRNGLSDSQIADNIIGVIFAATDTTASVLTWLLKYLHDHPNLLQEVSREQFSIRQKIKKENRRISWEDTRKMPLTTRVIQETLRAASVLSFTFREAVQDVEYDGYLIPKGWKVLPLFRRIHHSSEFFPDPEKFDPSRFEVAPKPYTYMPFGNGVHSCPGSELAKLEMLILLHHLTTSFRWEVIGDEEGIQYGPFPVPKKGLPIRVTPI

SEQ ID NO: 1198 - protein, 356 aa, Bradyrhizobium japonicum
MFGGTLVAQDGIAHRQARDAIQAALLPKGLTLAGIGELFAPVIRARVQRWRERGDVTILRETGDLMLKLIFSLMGIPAQDLPGWHRKYRQLLQLIVAPPVDLPGLPLRRGRAARDWIDARLREFVRAAREHASRTGLINDMVSAFDRSDDALSDDVLVANIRLLLLGGHDTTASTMAWMVIELARQPGLWDALVEEAQRVGAVPTRHADLAQCPVAEALFRETLRVHPATPLLVRRALRELRIGQQRIPTGTDLCIPLLHFSTSALLHEAPDQFRLARWLQRTEPIRPVDMLQFGTGPHFCMGYHLVWLELVQFCIALALTMHEAGVRPRLLSGVEKGRRYYPTAHPSMTIRIGFS

SEQ ID NO: 1199 - protein, 447 aa, Mesorhizobium loti
MDMLLNPLDRRHRLRDDIPVVPGAFPLVGHLPAIVCDLPRLLRRAERTLGSHFWLDFGPAGHLMTCVDPDAFALLRHKDVSSALIEEIAPELLGGTLVAQDGGAHRQARDAIKAAFLPKGLTQAGIGNLFAPVIQARVQAWRDRGDVTILRETGDLMLKLIFSLMGIPAQDLPGWHRKYRQLLQLIVAPPVDLPGLPLRRGRAARDWIDAQLRQFVRDARAHAARTGLINDMVSSFDRGDDALSDDVLVANIRLLLLAGHDTTASTMAWMVIELARQPGLWDALVEEAQRVGAVPTRHADLAQCPVAEALFRETLRVHPATTLLPRRALQELQLGQRRIPAGTPLCIPLLHFSTSALLHEAPDQFRLARWLQRTEPIRPVDMLQFGTGPHVCIGYHLVWLEMVQFCIALALTMHKAGVRPRLLSAVEKGRRYFPTAHPSMKIRIGFS

SEQ ID NO: 1200 - protein, 445 aa, Mesorhizobium loti
MLLNPLDRRHRLRDDIPVVPGAFPLVGHLPAIVCDLPRLLRRAERTLGSHFWLDFGPAGHLMTCVDPDAFALLRHKDVSSALIEEIAPELLGGTLVAQDGGAHRQARDAIKAAFLPKGLTQAGIGNLFAPVIQARVQAWRDRGDVTILRETGDLMLKLIFSLMGIPAQDLPGWHRKYRQLLQLIVAPPVDLPGLPLRRGRAARDWIDAQLRQFVRDARAHAARTGLINDMVSAFDRGDDALSDDVLVANIRLLLLAGHDTTASTMAWMVIELARQPGLWDALVEEAQRVGAVPTRHADLAQCPVAEALFRETLRVHPATTLLPRRALQELQLGQRRIPAGTHLCIPLLHFSTSALLHEAPDQFRLARWLQRTEPIRPVDMLQFGTGPHVCIGYHLVWLEMVQFCIALALTMHKAGVRPRLLSAVEKGRRYFPTAHPSMKIRIGFS

SEQ ID NO: 1201 - protein, 472 aa, Glycine max
  unsure (1)..(472): unsure at all Xaa locations
MELSTMFXXLCASFLFIVLFRALIKPYYVSSRDLPLPPGSMGWPYIGETFQMYSQDPNVFFASKIKRFGSMFKSHILGCPCVMISSPEAAKFVLNKAQLFKPTFPASKERMLGKQAIFFHQGEYHANLRRLVLRTFMPEAIKNIVPDIESIAQDCLKSWEGRLITTFLEMKTFTFNVALLSIFGKEEILYRDALKRCYYTLEQGYNSMPINVPGTLFHKAMKARKELAQIVAQIIWSRRQRKMNYKDLLGSFMDEKSGLTDDQIADNVIGVIFAARDTTASVLTWIVKYLGENPSVLEAVNEEQECILKSKEEREGLNWEDAKKMPITSRVIQETLRVASILSFTFREAVEDVEYQGYLIPKGWKVLPLFRNIHHSPDNFKEPEKFDPSRFEAAPKPNTFMPFGSGIHMCPGNELAKLEILVLLHHLTTKYRWSVVGAKNGIQYGPFALPQNGLPITLFPKXQVDITQTMAS

SEQ ID NO: 1202 - protein, 480 aa, Glycine max
  unsure (1)..(480): unsure at all Xaa locations
MELSTMFFLCASLLFIVLFFRTLIKPYYVSSRDLPLPPGSMGWPYIGETFQMYSQDPNVFFASKIKRFGSMFKSHILGCPCVMISSPEAAKFVLNKAQLFKPTFPASKERMLGKQAIFFHQGEYHANLRRLVLRTFMPEAIKNIVPDIESIAQDCLKSWEGRLITTFLEMKTFTFNVALLSIFGKEEILYRDALKRCYYTLEQGYNSMPINVPGTLFHKAMKARKELAQIVAQIISSRRQRKQDFHKDLLGSFMDEKSGLTDEQIADNVIGVIFAARDTTASVLTWIVKYLGENPSVLEAVTEEQECILKSKEESEGLNWEDAKKMPITSRVIQETLRVASILSFTFREAVEDVEYQGYLIPKGWKVLPLFRNIHHSPDNFKEPEKFDPSRFEAAPKPNTFMPFGSGIHMCPGNELAKLEILVLLHHLTTKYXXWSVVGCKDGIQYGPFXALPQNGLXPITLXSKSKXIINHTSNTTLAS

SEQ ID NO: 1203 - protein, 515 aa, Penicillium italicum
MDLVPLVTGQILGIAYYTTGLFLVSIVLNVIKQLIFYNRKEPPVVFHWIPFIGSTIAYGMDPYQFFFASRAKYGDIFTFILLGKKTTVYLGVEGNEFILNGKLKDVNAEEVYGKLTTPVFGSDVVYDCPNSKLMEQKKFIKYGLSQEALESYVPLIADETNAYIKSSPNFKGQSGTIDLAAAMAEITIFTAARTLQGEEVRSKLTSEFADLFHDLDLGFSPINFMLPWAPLPHNASAIKHTTYARDLSGNYPSATGSWRRRQRRRQDKSKGTDMISNLMRCVYRDGTPIPDKEIAHMMITLLMAGQHSSSAISCWILLRLASQPEMAEKLHAEQIKNLGADLPPLQYKDMDKLPLLRNVIKETLRLHSSIHTLMRKVKNPMPVPGTDFVVPPSHTLLSSPGVTARDERHFRDPLRWDPHRWESRVEVEDSSDTVDYGYGAVSKGTRSPYLPFGAGRHRCIGEKFAYLNLEVIVATLVREFRFFNPEGMEGVPDTDYSSLFSRPVQPATVRWEVRS

SEQ ID NO: 1204 - protein, 495 aa, Catharanthus roseus
LLFCFILSKTTKKFGQNSQYSNHDELPPGPPQIPILGNAHQLSGGHTHHILRDLAKKYGPLMHLKIGEVSTIVASSPQIAEEIFRTHDILFADRPSNLESFKIVSYDFSDMVVSPYGNYWRQLRKISMMELLSQKSVQSFRSIREEEVLNFIKSIGSKEGTRINLSKEISLLIYGITTRAAFGEKNKNTEEFIRLLDQLTKAVAEPNIADMFPSLKFLQLISTSKYKIEKIHKQFDVIVETILKGHKEKINKPLSQENGEKKEDLVDVLLNIQRRNDFEAPLGDKNIKAIIFNIFSAGTETSSTTVDWAMCEMIKNPTVMKKAQEEVRKVFNEEGNVDETKLHQLKYLQAVIKETLRLHPPVPLLLPRECREQCKIKGYTIPSKSRVIVNAWAIGRDPNYWIEPEKFNPDRFLESKVDFKGNSFEYLPFGGGRRICPGITFALANIELPLAQLLFHFDWQSNTEKLNMKESRGVTVRREDDLYLTPVNFSSSSPA

SEQ ID NO: 1205 - protein, 476 aa, Oryza sativa
SEQAPMGAFLLFVCVLAPFLLVCAVRGRRRQAGSSEAAACGLPLPPGSMGWPYVGETFQLYSSKNPNVFFNKKRNKYGPIFKTHILGCPCVMVSSPEAARFVLVTQAHLFKPTFPASKERMLGPQAIFFQQGDYHAHLRRIVSRAFSPESIRASVPAIEAIALRSLHSWDGQFVNTFQEMKTYALNVALLSIFGEEEMRYIEELKQCYLTLEKGYNSMPVNLPGTLFHKAMKARKRLGAIVAHIISARRERQRGNDLLGSFVDGREALTDAQIADNVIGVIFAARDTTASVLTWMVKFLGDHPAVLKAVTEEQLQIAKEKEASGEPLSWADTRRMKMTSRVIQETMRVASILSFTFREAVEDVEYQGYLIPKGWKVLPLFRNIHHNPDHFPCPEKFDPSRFEVAPKPNTFMPFGNGTHSCPGNELAKLEMLVLFHHLATKYRWSTSKSESGVQFGPFALPLNGLPMSFTRKNTEQE

SEQ ID NO: 1206 - protein, 123 aa, Triticum aestivum
  unsure (1)..(123): unsure at all Xaa locations
QKRREPFVGMAAFILFLCLLVPLVLACAIRARKGGSSSLPLPPGSMGWPYVGETTQLYSSKNPNVFFARKRNKYGPIFKTHILGCPCVMVSSPEAAKFVLVTQAHLFKPTFPASKERMLGPQX

SEQ ID NO: 1207 - protein, 526 aa, Leptosphaeria maculans
MAVLATVAGPLGDFTAKSSNFVLAITGFASFILVAVVLNVLKQLLFKKANEPPVVFHWLPIIGSTVTYGMDPYAFFFRNQKKYGNVFTFILLGRKMTVCLDTTGNNFILNGKIKDVNAEEIYSPLTTPVFGKDVVYDCPNSKLMEQKKFVKFGLTQEALRSYVVIITQETEDFLKRHKAFKGQKGTFDVTKVMAELTIYTASRSLQGEEIRRSFDSKFAELYHDLDMGFSPVNFMLSWAPLPHNRARDHARETMIELYSNIVRKRRAGVAKDSHDMIWHLMDCKYKDGTPVPEHEIAGIMIALLMAGQHSSSSTIAWILLRLAQNPHIIEELFEEQNTVLGADLPALTYEDLQKLPLHAQVVKETLRIHAPIHSIMRRVKQPLVVDGTNFVVPTSHTLMSSPGFSAQLDSHFANPSHWDPHRWDAGNSQYDEEADEKDDEKIDYGWGVVSKGTNSPYLPFGAGRHRCIGEQFAYLQLQTILVAFVREFKLRNVGGSRDIIGTDYTSLFSRPLAPGIIEWERREKVE

SEQ ID NO: 1208 - protein, 150 aa, Litopenaeus setiferus
DTFMFEGHDTTAAAINWSLYLIGSNPEIQARVHEELDSIFGGSDRPITMADLREMKLTENCIKEALRLFPSVPFLARELKEDAVIDDYRIPSGTTATVVTYCLHRDPEQFPNPEVYDPDRFLPENCKSRHPYAYVPFSAGPRNCIRPENR

SEQ ID NO: 1209 - protein, 149 aa, Haliotis rufescens
DTFMFEGHDTTAAAINWSLYLLGSSPEIQARVHEEIDAIFGDSDRPITMNDLRELKLTENCIKEALRLFPSVPFLARELKEDAVINNYRVPSGTTVMVVTYRLHRDPEQFPNPEVFDPDRFLPENIKNRPPYAYVPFSAGPRNCIGQKI

SEQ ID NO: 1210 - protein, 490 aa, Ictalurus punctatus
MLGSWLLVVFCVCLLFLFIRIQRPKNFPPGPRPIPIFGNLFQFNIKNPLKDFEKLAEQYGNICSLYIGTKPAVVLNGLKVIREALVTKSADFSGRPQNMLKDVTEGKGIVIADYGRQWKEHRRFALMTLRNFGLGKQSMENRILGEIEHLVAKLEKYAGSSMYPQTLFHDAASNIIYLVLFGTRYDYGDETLKVYVRLYSENAKLANGTWSIIYDALPILRSLPLPFKKAFDNYSTLKILTANMINKHRTTRVPGKPRDLVDCYLDEIDKKDNESTFSEEQLVVYIMNLHIAGTDTTSNTLLTSILYLMAHPDIQKRCQKEIDVVLEGNSQPSFEDRHNMPYTQAVVHECQRIARTVPLSVFHCTTRDTELMGYTIPKGTMIIPNLSSVLSEEGQWKFPHDFNPSNFLNEQGQFEKPEAFIPFSAGPRVCLGEGLARMELFLFLVTLLRRFQFIWPEDAGEPDFTPIFGLTLTPKPYRMGVKLRQPAREK

SEQ ID NO: 1211 - protein, 980 aa, Malus floribunda
MERTMRVVILLTRFLAIATITFSIGLCNGNPGWPPLCKVSERRALLMFKQDLKDPVNRLASWVAEEDSDCCSWTGVVCDHVTGHIHELHLNSSYSDWEFNSFFGGKINPSLLSLKHLNYLDLSNNDFNGTQIPSFFGSMTSLTHLNLAYSELYGIIPHKLGNLSSLRYLNLSSFYGSNLKVENLQWISGLSLLKHLDLSSVNLSKASDWLQVTNMLPSLVELDMSDCELDQIPPLPTPNFTSLVVLDLSRNSFNCLMPRWVFSLKNLVSLHLSFCGFQSPIPSISQNITSLREIDLSFNSISLDPIPKLLFTQKILELSLESNQLTGQLPRSIQNMTGLTTLNLGGNEFNSTIPEWLYSLNNLESLLLFGNALRGEISSSIGNLKSLRHFDLSSNSISGPIPMSLGNLSSLEKLYISENHFNGTFTEVIGQLKMLTDLDISYNSLEGVVSEISFSNLIKLKHFVAKGNSFTLKTSRDWVPPFQLEILKLDSWHLGPEWPMWLRTQTQLKELSLSGTGISSTIPTWFWNLTFHVQYLNLSHNQLYGQIQNIVAGPSSAVDLSSNQFTGALPIVPTSLMWLDLSNSSFSGSVFHFFCDRPDEPKQLGILRLGNNFLTGKVPDCWMSWPSLAFLNLENNNLTGNVPMSMGYLDWLESLHLRNNHLYGELPHSLQNCTSLSVVDLSENGFSGSIPIWIGKSLSGLNVLNLRSNKFEGDIPNEVCYLKSLQILDLAHNKLSGMIPRCFHNLSAMANFSQSFSPTSFWGMVASGLTENAILVTKGMEMEYTKILGFVKGMDLSCNFMYGEIPEELTGLLALQYLNLSNNRFTGRIPSKIGSMAQLESLDFSMNQLDGEIPPSMTILTFLSHLNLSYNNLTGRIPESTQLQSLDQSSFVGNELCGAPLNKNCSENGVIPPPTVEHDGGGGYSLVEDEWFYVSLGVGFFTGFWIVLGSLLVNMPWSILLSQLLNRIVLKMYHVIVEYV

SEQ ID NO: 1212 - protein, 915 aa, Malus floribunda
MERTMRVVILLTRFLAIATITFSIGLCNGNPGWPPLCKESERQALLMFKQDLKDPTNRLASWVAEEDSDSDCCSWTGVVCDHTTGHIHELHLNNTDPFLDLKSSFGGKINPSLLSLKHLNFLDLSNNYFYPTQIPSFFGSMTSLTHLNLAYSRFGGIIPHKLGNLSSLRYLNLSSNSIYLKVENLQWISGLSLLKHLDLSGVNLSKASDWLQVTNMLPSLVKLIMSDCQLYQIPPLPTTNFTSLVVLDLSFNNFNSLMPRWVFSLKNLVSIHLSDCGFQGPIPSISQNITYLREIDLSDNNFTVQRPSEIFESLSRCGPDGIKSLSLRNTNVSGHIPMSLRNLSSLEKLDISVNQFNGTFTEVIGQLKMLTYLDISYNSLESAMSEVTFSNLTKLKNFVAKGNSLTLKTSRDWVPPFQLEILHLDSWHLGPKWPMWLRTQTQLKELSLSGTGISSTIPTWFWNLTSQVEYLNLSRNQLYGQIQNIVAGPSSVVDLSSNQFTGALPIVPTSLFFLDLSRSSFSESVFHFFCDRPDEPKQLSVLNLGNNLLTGKVPDCWMSWQHLRFLNLENNNLTGNVPMSMGYLQYLGSLHLRNNHLYGELPHSLQNCTWLSVVDLSENGFSGSIPIWIGKSLSGLNVLNLRSNKFEGDIPNEVCYLKSLQILDLAHNKLSGMIPRCFHNLSALADFSESFYPTSYWGTNWSELSENAILVTKGIEMEYSKILGFVKVMDLSCNFMYGEIPEELTGLLALQSLNLSNNRFTGRIPSNIGNMAWLESLDFSMNQLDGEIPPSMTNLTFLSHLNLSYNNLTGRIPESTQLQSLDQSSFVGNKLCGAPLNKNCSTNGVIPPPTVEQDGGGGYRLLEDEWFYVSLGVGFFTGFWIVLGSLLVNMPWSILLSQLLNRIVLKMYHVIVEYV

SEQ ID NO: 1213 - protein, 1015 aa, Malus floribunda
MERTMRVVILLIRFLAIATITFSIGLSNGNPSWPPLCKESERQALLIFKQDLKDPANRLASWVAEEDSNCCSWTGVVCDHITGHIHELHLNNSDSHWDFESFFGGKINPSLLSLKHLNFLDLSYNNFEGTQIPSFFGSMTSLTHLNLGFSWFDGVIPHNLGNLSSLRYLYLSSFYNSNLKAENLQWISGLSLLKHLDLSYVNLSKASDWLQVTNMLPSLVELDMSGCQLDQIPPLPTPNFTSLVVLDLSENFFNSLMPRWVFSLKNLVSLHLRFCGFQGPIPSISQNITSLREIDLSENSISLDPIPKWLFNQKDLALSLKSNQLTGQLPSSFQNMTGLKVLNLESNYFNSTIPKWLYGLNNLESLLLSYNALRGEISSSIGNMTSLVNLNLENNQLQGKIPNSLGHLCKLKVVDLSENHFTVRRPSEIFESLSGCGPDGIKSLSLRYTNISGPIPMSLGNLSSLEKLDISGNHFNGTFTEVIGQLKMLTDLDISYNWFEGVVSEISFSNLTKLKHFVAKGNSFTLKTSRDWVPPFQLETLRLDSWHLGPKWPMWLRTQTQLKELSLSGTGISSTIPTWFWNLTFHVWYLNLSHNQLYGQIQNIVAGRSVVDLGSNQFTGALPIVPTSLVWLDLSNSSFSGSVFHFFCDRPDETKLLYILHLGNNFLTGKVPDCWMSWPQLGFVNLENNNLTGNVPMSMGELPHSLQNCTMLSFVDLSENGFSGSIPIWIGKSLSWLYVLNLRSNKFEGDIPNEVCYLQSLQILDLAHNKLSGMIPRCFHNLSALANFSESFFPFITGNTDGEFWENAILVTKGTEMEYSKILGFVKGMDLSCNFMYGEIPKELTGLLALQSLNLSNNRFTGRIPSKIGNMAQLESLDFSMNQLDGEIPPSMTNLTFLSHLNLSYNNLTGRILESTQLQSLDQSSFVGNELCGAPLNKNCSENGVIPPPTVEHDGGGGYRLLEDEWFYVTLGVGFFTGFWIVLGSLLVNMPWSILLSQLLNRIVLKMYHVIVEYV

SEQ ID NO: 1214 - protein, 633 aa, Leptospira interrogans serovar lai str. 56601
MNFRITLIYLQKITIGLLFLITLSCEIQAEAPEDEPGTYRDLTEALQNPLNVRVLNLSGQNFTTLPKEIEQLKNLQELDLGDNQLATFPAVIVELQKLESLDLSENRLVMLPNEIGRLQNLQELGLYKNKLITFPKEIGQLQNLQTLNLQDNQLATLPVEIGQLQNLEKLNLRKNRLTVLPKEIGQLQNLQTLNLQDNQLATLPVEIGQLQNLQTLGLSENQLTTFPKEIGQLENLQELNLKWNRLTALPKEIGQLKNLENLELSENQLTTFPKEIGQLKKLRDLGLGRNQLTTFPKEIGQLKNLQMLDLCYNQFKTVSKEIGQLKNLLQLNLSYNQLATLPAEIGQLKKLQDLSLGRNQLTTLPKEIGQLKNLYNLDLGTNQLTTLPKEIGQLKNLYNLGLGRNQLATFPKEIGQLENLQELDLWNNRLTALPKEIGQLKNLENLELSENQLTTFPKEIGQLKKLQDLGLSYNRLVILPKEIGQLEKLQDLGLSYNRLVILPKEIGQLKNLQMLDLCYNQFKTVSKEIGQLKNLLQLNLSYNQLATLPAEIGQLKNLYNLDLGTNQLTTLPKEIGQLKNLYNLGLGTNQLTTLPKEIGQLKKLQWLLLSVNPILPQEKERIRKLLPNCEIRF

SEQ ID NO: 1215 - protein, 1192 aa, Arabidopsis thaliana
MAFLTALFLFLFFSFSSSAIVDLSSETTSLISFKRSLENPSLLSSWNVSSSASHCDWVGVTCLLGRVNSLSLPSLSLRGQIPKEISSLKNLRELCLAGNQFSGKIPPEIWNLKHLQTLDLSGNSLTGLLPRLLSELPQLLYLDLSDNHFSGSLPPSFFISLPALSSLDVSNNSLSGEIPPEIGKLSNLSNLYMGLNSFSGQIPSEIGNISLLKNFAAPSCFFNGPLPKEISKLKHLAKLDLSYNPLKCSIPKSFGELHNLSILNLVSAELIGLIPPELGNCKSLKSLMLSFNSLSGPLPLELSEIPLLTFSAERNQLSGSLPSWMGKWKVLDSLLLANNRFSGEIPHEIEDCPMLKHLSLASNLLSGSIPRELCGSGSLEAIDLSGNLLSGTIEEVFDGCSSLGELLLTNNQINGSIPEDLWKLPLMALDLDSNNFTGEIPKSLWKSTNLMEFTASYNRLEGYLPAEIGNAASLKRLVLSDNQLTGEIPREIGKLTSLSVLNLNANMFQGKIPVELGDCTSLTTLDLGSNNLQGQIPDKITALAQLQCLVLSYNNLSGSIPSKPSAYFHQIEMPDLSFLQHHGIFDLSYNRLSGPIPEELGECLVLVEISLSNNHLSGEIPASLSRLTNLTILDLSGNALTGSIPKEMGNSLKLQGLNLANNQLNGHIPESFGLLGSLVKLNLTKNKLDGPVPASLGNLKELTHMDLSFNNLSGELSSELSTMEKLVGLYIEQNKFTGEIPSELGNLTQLEYLDVSENLLSGEIPTKICGLPNLEFLNLAKNNLRGEVPSDGVCQDPSKALLSGNKELCGRVVGSDCKIEGTKLRSAWGIAGLMLGFTIIVFVFVFSLRRWAMTKRVKQRDDPERMEESRLKGFVDQNLYFLSGSRSREPLSINIAMFEQPLLKVRLGDIVEATDHFSKKNIIGDGGFGTVYKACLPGEKTVAVKKLSEAKTQGNREFMAEMETLGKVKHPNLVSLLGYCSFSEEKLLVYEYMVNGSLDHWLRNQTGMLEVLDWSKRLKIAVGAARGLAFLHHGFIPHIIHRDIKASNILLDGDFEPKVADFGLARLISACESHVSTVIAGTFGYIPPEYGQSARATTKGDVYSFGVILLELVTGKEPTGPDFKESEGGNLVGWAIQKINQGKAVDVIDPLLVSVALKNSQLRLLQIAMLCLAETPAKRPNMLDVLKALKEI

SEQ ID NO: 1216 - protein, 1192 aa, Arabidopsis thaliana
MAFLTALFLFLFFSFSSSAIVDLSSETTSLISFKRSLENPSLLSSWNVSSSASHCDWVGVTCLLGRVNSLSLPSLSLRGQIPKEISSLKNLRELCLAGNQFSGKIPPEIWNLKHLQTLDLSGNSLTGLLPSRLSELPELLYLDLSDNHFSGSLPLSFFISLPALSSLDVSNNSLSGEIPPEIGKLSNLSNLYMGLNSFSGQIPSEIGNTSLLKNFAAPSCFFNGPLPKEISKLKHLAKLDLSYNPLKCSIPKSFGELQNLSILNLVSAELIGSIPPELGNCKSLKSLMLSFNSLSGPLPLELSEIPLLTFSAERNQLSGSLPSWIGKWKVLDSLLLANNRFSGEIPREIEDCPMLKHLSLASNLLSGSIPRELCGSGSLEAIDLSGNLLSGTIEEVFDGCSSLGELLLTNNQINGSIPEDLWKLPLMALDLDSNNFTGEIPKSLWKSTNLMEFTASYNRLEGYLPAEIGNAASLKRLVLSDNQLTGEIPREIGKLTSLSVLNLNANMFQGKIPVELGDCTSLTTLDLGSNNLQGQIPDKITALAQLQCLVLSYNNLSGSIPSKPSAYFHQIDMPDLSFLQHHGIFDLSYNRLSGPIPEELGECLVLVEISLSNNHLSGEIPASLSRLTNLTILDLSGNALTGSIPKEMGNSLKLQGLNLANNQLNGHIPESFGLLGSLVKLNLTKNKLDGPVPASLGNLKELTHMDLSFNNLSGELSSELSTMEKLVGLYIEQNKFTGEIPSELGNLTQLEYLDVSENLLSGEIPTKICGLPNLEFLNLAKNNLRGEVPSDGVCQDPSKALLSGNKELCGRVVGSDCKIEGTKLRSAWGIAGLMLGFTIIVFVFVFSLRRWVMTKRVKQRDDPERIEESRLKGFVDQNLYFLSGSRSREPLSINIAMFEQPLLKVRLGDIVEATDHFSKKNIIGDGGFGTVYKACLPGEKTVAVKKLSEAKTQGNREFMAEMETLGKVKHPNLVSLLGYCSFSEEKLLVYEYMVNGSLDHWLRNQTGMLEVLDWSKRLKIAVGAARGLAFLHHGFIPHIIHRDIKASNILLDGDFEPKVADFGLARLISACESHISTVIAGTFGYIPPEYGQSARATTKGDVYSFGVILLELVTGKEPTGPDFKESEGGNLVGWAIQKINQGKAVDVIDPLLVSVALKNSQLRLLQIAMLCLAETPAKRPNMLDVLKALKEI

SEQ ID NO: 1217 - protein, 647 aa, Brassica napus
MSSAPSPGTGSPPSPPSNSTTTTPPPASAPPPTTPSSPPPPSTIPTSPPPSSRSTPSAPPPSPPTPSTPGSPPPLPQPSPPAPTTPGSPPAPVTPPTRNPPPSVPGPPSNPSREGGSPRPPSSPSPPSPSSDGLSTGVVVGIAIGGVALLVIVTLICLLCKKKRRRDEEDAYYVPPPPPPGPKAGGPYGGQQQQWRQQNATPPSDHVVTSLPPPPKAPSPPRQPPPPPPPPFMSSSGGSDYSDRPVLPPPSPGLVLGFSKSTFTYEELARATNGFSEANLLGQGGFGYVHKGVLPSGKEVAVKQLKVGSGQGEREFQAEVEIISRVHHRHLVSLVGYCIAGAKRLLVYEFVPNNNLELHLHGEGRPTMEWSTRLKIALGSAKGLSYLHEDCNPKIIHRDIKASNILIDFKFEAKVADFGLAKIASDTNTHVSTRVMGTFGYLAPEYAASGKLTEKSDVFSFGVVLLELITGRRPVDANNVYVDDSLVDWARPLLNRASEQGDFEGLADAKMNNGYDREEMARMVACAAACVRHSARRRPRMSQIVRALEGNVSLSDLNEGMRPGQSNVYSSYGGSTDYDSSQYNEDMKKFRKMALGTQEYNATGEYSNPTSDYGLYPSGSSSEGQTTREMEMGKIKRTGQGYSGPSL

SEQ ID NO: 1218 - protein, 999 aa, Malus x domestica
MLLFLPLLLLLLLPPLPTTLSLNQEGLYLRHFKLSLDDPDSALSSWNYADSTPCNWLGVTCDDASSSSPVVRSLDLPSANLAGPFPTVLCRLPNLTHLSLYNNSINSTLPPSLSTCQTLEDLDLAQNLLTGALPATLPDLPNLKYLDLSGNNFSGAIPDSFGRFQKLEVLSLVYNLIENTIPPFLGNISTLKMLNLSYNPFHPGRIPAELGNLTNLEVLRLTECNLVGEIPDSLGRLKNLKDLDLAINGLTGRIPPSLSELTSVVQIELYNNSLTGELPPGMSKLTRLRLLDASMNQLSGQIPDELCRLPLESLNLYENNLEGSVPASIANSPNLYEVRLFRNKLSGELPQNLGKNSPLKWFDVSSNQFTGTIPASLCEKGQMEEILMLHNEFSGEIPARLGECQSLARVRLGHNRLSGEVPVGFWGLPRVYLMELAENELSGPIAKSIARATNLSLLILAKNKFSGPIPEEIGWVENLMEFSGGDNKFSGPLPESIVRLGQLGTLDLHSNEVSGELPVGIQSWTNLNELNLASNQLSGKIPDGIGNLSVLNYLDLSGNRFSGKIPFGLQNMKLNVFNLSYNQLSGELPPLFAKEIYRNSFLGNPGLCGDLDGLCDSRAEVKSQGYIWLLRCMFILSGLVFVVGVVWFYLKYKNFKKVNRTIDKSKWTLMSFHKLGFSEYEILDCLDEDNVIGSGASGKVYKVVLNSGEVVAVKKLWRRKVKECEVEDVEKGWVQDDGFEAEVDTLGKIRHKNIVKLWCCCTARDCKLLVYEYMQNGSLGDLLHSSKGGLLDWPTRFKIALDAAEGLSYLHHDCVPAIVHRDVKSNNILLDGDFGARVADFGVAKEVDATGKGLKSMSIIAGSCGYIAPEYAYTLRVNEKSDIYSFGVVILELVTGRLPVDPEFGEKDLVKWVCTTLDQKGVDNVVDPKLESCYKEEVCKVLNIGLLCTSPLPINRPSMRRVVKLLQEVGTEKHPQAAKKEGKLTPYYYEDTSDHGSVA

SEQ ID NO: 1219 - protein, 976 aa, Pisum sativum
MKSITCYLLVFFCVLFTPCFSITDLDALLKLKESMKGEKSKHPDSLGDWKFSASGSAHCSFSGVTCDQDNRVITLNVTQVPLFGRISKEIGVLDKLERLIITMDNLTGELPFEISNLTSLKILNISHNTFSGNFPGNITLRMTKLEVLDAYDNSFTGHLPEEIVSLKELTILCLAGNYFTGTIPESYSEFQKLEILSINANSLSGKIPKSLSKLKTLKELRLGYNNAYDGGVPPEFGSLKSLRYLEVSNCNLTGEIPPSFGNLENLDSLFLQMNNLTGIIPPELSSMKSLMSLDLSNNALSGEIPESFSNLKSLTLLNFFQNKFRGSIPAFIGDLPNLETLQVWENNFSFVLPQNLGSNGKFIFFDVTKNHLTGLIPPDLCKSKKLQTFIVTDNFFHGPIPKGIGACKSLLKIRVANNYLDGPVPQGIFQMPSVTIIELGNNRFNGQLPSEVSGVNLGILTISNNLFTGRIPASMKNLISLQTLWLDANQFVGEIPKEVFDLPVLTKFNISGNNLTGVIPTTVSQCRSLTAVDFSRNMITGEVPRGMKNLKVLSIFNLSHNNISGLIPDEIRFMTSLTTLDLSYNNFTGIVPTGGQFLVFNDRSFFGNPNLCFPHQSSCSSYTFPSSKSHAKVKAIITAIALATAVLLVIATMHMMRKRKLHMAKAWKLTAFQRLDFKAEEVVECLKEENIIGKGGAGIVYRGSMPNGTDVAIKRLVGQGSGRNDYGFKAEIETLGRIRHRNIMRLLGYVSNKDTNLLLYEYMPNGSLGEWLHGAKGCHLSWEMRYKIAVEAGKGLCYLHHDCSPLIIHRDVKSNNILLDADFEAHVADFGLAKFLYDPGASQSMSSIAGSYGYIAPEYAYTLKVDEKSDVYSFGVVLLELIIGRKPVGEFGDGVDIVGWINKTELELYQPSDKALVSAVVDPRLTGYPMASVIYMFNIAMMCVKEMGPARPTMREVVHMLTNPPQSTTHNNLINL

SEQ ID NO: 1220 - protein, 1344 aa, Oryza sativa (indica cultivar-group)
MSQHYTKTICIAVVLVAVLFSLSSSAAAGSGAAVSVQLEALLEFKNGVADDPLGVLAGWRVGKSGDGAVRGGALPRHCNWTGVACDGAGQVTSIQLPESKLRGALSPFLGNISTLQVIDLTSNAFAGGIPPQLGRLGELEQLVVSSNYFAGGIPSSLCNCSAMWALALNVNNLTGAIPSCIGDLSNLEIFEAYLNNLDGELPPSMAKLKGIMVVDLSCNQLSGSIPPEIGDLSNLQILQLYENRFSGHIPRELGRCKNLTLLNIFSNGFTGEIPGELGELTNLEVMRLYKNALTSEIPRSLRRCVSLLNLDLSMNQLAGPIPPELGELPSLQRLSLHANRLAGTVPASLTNLVNLTILELSENHLSGPLPASIGSLRNLRRLIVQNNSLSGQIPASISNCTQLANASMSFNLFSGPLPAGLGRLQSLMFLSLGQNSLAGDIPDDLFDCGQLQKLDLSENSFTGGLSRRVGQLGNLTVLQLQGNALSGEIPEEIGNLTKLISLKLGRNRFAGHVPASISNMSSLQLLDLGHNRLDGMFPAEVFELRQLTILGAGSNRFAGPIPDAVANLRSLSFLDLSSNMLNGTVPAALGRLDQLLTLDLSHNRLAGAIPRRATCRCTSTCRTTRSRARSPAEIGGLVMVQTIDLSNNQLSGGVPATLAGCKNLYSLDLSGNSLTGELPANLFPQLDLLTTLNISGNDLDGEIPADIAALKHIQTLDVSRNAFAGAIPPALANLTALRSLNLSSNTFEGPVPDGGVFGNLTMSSLQGNAGLCGGKLLVPCHGHAAGNKRVFSRTGLVILVVLIALSTLLLLMVATILLIGYRRYRRKRRAAGIAGDSSEAAVVVPELRRFSYGQLAAATNSFDQGNVIGSSNLSTVYKGVLAGDADGGMVVAVKRLNLEQFPSKSDKCFFTELATLSRLRHKNLARVVGYAWEAGKIKALVLDYMVNGDLDGAIHGGAAAPPTAPSRWTVRERLRVCVSVAHGLVYLHSGYDFPVVHCDVKPSNVLLDGDWEARVSDFGTARMLGVHLPAAADAAAQSTATSSAFRGTVGYMAPVISELKTSNSVLKKFRVRVHEDGVDEGGRVQLRGAGDGALHRAAADGDDRGGRRAADAAAAGRQRGLEGARRRPRRPGPPHEGRHRGRPVHGGGRARRCPVLRRVRAGRPARHGRCALVLAQDEQARRRRLNKKKKKRKAKLSLQFCRMQQRKHSSQNFHVYCAIVKSSAILHNAAVKTCKFLGRFRVQFMMIWFFEFFALRTFSIDEVYYLFATVHGQGSVRHGSEVVPKFLPFDPPKTFRAATYLYAQALQVRMEAERLKDSTELKTIYYSSCMSANKSGELITNMLT

SEQ ID NO: 1221 - protein, 1420 aa, Oryza sativa (japonica cultivar-group)
MLSIASRSPSPALIAPHASARATGLRAPFAGNRIVGWGWGDQTKSGTDRNRASICVVLFLRVRSGEPTQAPRDPPAAVGGGGCYVRLPAPPRDRDAVLSFLVPVSKPAYHVCLFTLLLCFIPITALAESDIKNLFALRKAIAVGKGFLHNWFELETPPCNWSGISCVGLTVVAIDLSSTPLYVDFPSQIIAFQSLVRLNVSGCGFSGELPEAMVNLQHLQHLDLSDNQLGGPLPASLFDLKMLKVMVLDNNMFSGQLSPAIAHLQQLTVLSISTNSFSGGLPPELGSLKNLEYLDIHTNAFSGSIPASFSNLSRLLYLDANNNNLTGSIFPGIRALVNLVKLDLSSNGLVGAIPKELCQLKNLQSLILSDNELTGSIPEEIGNLKQLEVLNLLKCNLMDTVPLSIGNLEILEGLYISFNSFSGELPASVGELRNLRQLMAKSAGFTGSIPKELGNCKKLTTLVLSGNNFTGTIPEELADLVAVVLFDVEGNRLSGHIPDWIQNWSNVSSISLAQNMFDGPLPGLPLHLVSFSAESNRLSGSIPAKICQGTFLQILRLNDNNLTGSIDETFKGCKNLTELSLLDNHLHGEIPEYLALLPLVSLDLSHNNFTGMIPDRLWESSTILDISLSDNQLTGMITESIGKLLSLQSLSIDRNYLQGPLPRSIGALRNLTALSLSGNMLSEDIPIQLFNCRNLVTLDLSCNNLTGHIPKAISHLTKLNTLVLSRNRLSGAIPSELCVAFSRESHSELEYVQHIGLIDLSRNRLTGHIPRAINNCSILVELHLQDNLLSGTIPVELAELRNITTIDLSSNALVGPVLPWPVPLASLQGLLLSNNRLSGSIPSGIGNILPQITMLDLSGNALTGTLPLDLLCKESLNHLDVSDNNISGQIPFSCHEDKESPIPLIFFNASSNHFSGSLDESISNFTKLTYLDLHNNSLTGRLPSAIARVTSLYYLDLSSNDFSGTIPCGICGMFGLTFANFSGNRDGGTFTLADCAAEEGGVCAANRVDRKMPDHPFHVLEATICCIATAIVIVLVVILVVYLRRRRKMLRRRQFVLVPAGDNAMADHETTLSNNLLGRRRMKKREPPSINLATFEHAPVRVTVDEIMRATGNFDGMHVVGDGGFGTVYRAELPGGRRVAVKRLHGVGRRFQGGEREFRAEMETVGKVRHPNLVPLLGYCAAGDERFLVYEYMEHGSLEDRLRGGGGAALGWPERLTICGGAARGLAFLHHGFVPHVIHRDVKSSNVLLGEGLQPRVSDFGLARIISACETHVSTVLAGTLGYIPPEYALAMRCTAKGDVYSFGVVMLELLTGRPPTWSSAEVTAEGDDERGGGGSLVGWVRWMAARGRGGEVFDACLPVSGAEREQMARVLDVARDCTADEPWRRPTMAEVARRVGAIEAMEYGPLVVAVSSGEPPAMP

SEQ ID NO: 1222 - protein, 1294 aa, Oryza sativa (japonica cultivar-group)
MVSNSFWLFILLVSFIPISAWAESRDISTLFTLRDSITEGKGFLRNWFDSETPPCSWSGITCIGHNVVAIDLSSVPLYAPFPLCIGAFQSLVRLNFSGCGFSGELPEALGNLQNLQYLDLSNNELTGPIPISLYNLKMLKEMVLDYNSLSGQLSPAIAQLQHLTKLSISMNSISGSLPPDLGSLKNLELLDIKMNTFNGSIPATFGNLSCLLHFDASQNNLTGSIFPGITSLTNLLTLDLSSNSFEGTIPREIGQLENLELLILGKNDLTGRIPQEIGSLKQLKLLHLEECQFTGKIPWSISGLSSLTELDISDNNFDAELPSSMGELGNLTQLIAKNAGLSGNMPKELGNCKKLTVINLSFNALIGPIPEEFADLEAIVSFFVEGNKLSGRVPDWIQKWKNARSIRLGQNKFSGPLPVLPLQHLLSFAAESNLLSGSIPSHICQANSLHSLLLHHNNLTGTIDEAFKGCTNLTELNLLDNHIHGEVPGYLAELPLVTLELSQNKFAGMLPAELWESKTLLEISLSNNEITGPIPESIGKLSVLQRLHIDNNLLEGPIPQSVGDLRNLTNLSLRGNRLSGIIPLALFNCRKLATLDLSYNNLTGNIPSAISHLTLLDSLILSSNQLSGSIPAEICVGFENEAHPDSEFLQHHGLLDLSYNQLTGQIPTSIKNCAMVMVLNLQGNLLNGTIPVELGELTNLTSINLSFNEFVGPMLPWSGPLVQLQGLILSNNHLDGSIPAKIGQILPKIAVLDLSSNALTGTLPQSLLCNNYLNHLDVSNNHLSGHIQFSCPDGKEYSSTLLFFNSSSNHFSGSLDESISNFTQLSTLDIHNNSLTGRLPSALSDLSSLNYLDLSSNNLYGAIPCGICNIFGLSFANFSGNYIDMYSLADCAAGGICSTNGTDHKALHPYHRVRRAITICAFTFVIIIVLVLLAVYLRRKLVRSRPLAFESASKAKATVEPTSTDELLGKKSREPLSINLATFEHALLRVTADDILKATENFSKVHIIGDGGFGTVYKAALPEGRRVAIKRLHGGHQFQGDREFLAEMETIGKVKHPNLVPLLGYCVCGDERFLIYEYMENGSLEMWLRNRADALEALGWPDRLKICLGSARGLAFLHHGFVPHIIHRDMKSSNILLDENFEPRVSDFGLARIISACETHVSTDIAGTFGYIPPEYGLTMKSTTKGDVYSFGVVMLELLTGRPPTGQEEVQGGGNLVGWVRWMIARGKQNELFDPCLPVSSVWREQMARVLAIARDCTADEPFKRPTMLEVVKGLKMTHGMECGPLVVTVSRDM

SEQ ID NO: 1223 - protein, 1021 aa, Daucus carota
MGVLRVYVILILVGFCVQIVVVNSQNLTCNSNDLKALEGFMRGLESSIDGWKWNESSSFSSNCCDWVGISCKSSVSLGLDDVNESGRVVELELGRRKLSGKLSESVAKLDQLKVLNLTHNSLSGSIAASLLNLSNLEVLDLSSNDFSGLFPSLINLPSLRVLNVYENSFHGLIPASLCNNLPRIREIDLAMNYFDGSIPVGIGNCSSVEYLGLASNNLSGSIPQELFQLSNLSVLALQNNRLSGALSSKLGKLSNLGRLDISSNKFSGKIPDVFLELNKLWYFSAQSNLFNGEMPRSLSNSRSISLLSLRNNTLSGQIYLNCSAMTNLTSLDLASNSFSGSIPSNLPNCLRLKTINFAKIKFIAQIPESFKNFQSLTSLSFSNSSIQNISSALEILQHCQNLKTLVLTLNFQKEELPSVPSLQFKNLKVLIIASCQLRGTVPQWLSNSPSLQLLDLSWNQLSGTIPPWLGSLNSLFYLDLSNNTFIGEIPHSLTSLQSLVSKENAVEEPSPDFPFFKKKNTNAGGLQYNQPSSFPPMIDLSYNSLNGSIWPEFGDLRQLHVLNLKNNNLSGNIPANLSGMTSLEVLDLSHNNLSGNIPPSLVKLSFLSTFSVAYNKLSGPIPTGVQFQTFPNSSFEGNQGLCGEHASPCHITDQSPHGSAVKSKKNIRKIVAVAVGTGLGTVFLLTVTLLIILRTTSRGEVDPEKKADADEIELGSRSVVLFHNKDSNNELSLDDILKSTSSFNQANIIGCGGFGLVYKATLPDGTKVAIKRLSGDTGQMDREFQAEVETLSRAQHPNLVHLLGYCNYKNDKLLIYSYMDNGSLDYWLHEKVDGPPSLDWKTRLRIARGAAEGLAYLHQSCEPHILHRDIKSSNILLSDTFVAHLADFGLARLILPYDTHVTTDLVGTLGYIPPEYGQASVATYKGDVYSFGVVLLELLTGRRPMDVCKPRGSRDLISWVLQMKTEKRESEIFDPFIYDKDHAEEMLLVLEIACRCLGENPKTRPTTQQLVSWLENIDVSS

SEQ ID NO: 1224 - protein, 861 aa, Nicotiana tabacum
MMMVGKLFSLLHFFTLFCLFTVTFASTKEATALLKWKATLQNQSNSLLVSWTPSSKACKSWYGVVCFNGRVSKLDIPYAGVIGTLNNFPFSSLPFLEYIDLSMNQLFGSIPPEIGKLTNLVYLDLSFNQISGTIPPQIGSLAKLQTLHILDNHLNGSIPGEIGHLRSLTELDLSINTLNGSIPPSLGNLHNLSLLCLYKNNISGFIPEEIGYLSSLIQLDLNTNFLNGSIPASLENLHNLSLLYLYENQLSGSIPDEIGQLRTLTDIRLNTNFLTGSIPASLGNLTSLSILQLEHNQLSGSIPEEIGYLRTLAVLSLYTNFLNGSIPISLGNLTSLSSLSLYENHLSGPIPSSLGNLDNLVYLYLYANQLSGPIPSELGNLKNLNYMKLHDNQLNGSIPASFGNLRNMQYLFLESNNLTGEIPLSICNLMSLKVLSLGRNSLKGDILQCLINISRLQVLKIPDNNLSEEIPSSICNLTSLRILDLSRNNLKGSIPQCFGDMGGHLEVLDIHKNGISGTLPTTFRIGSVLRSFTLHENELEGKIPRSLANCKELQVLDLGDNLLNDTFPMWLGTLPKLQVLRLKSNKLYGSIRTSKDENMFLELRIINLSYNAFTGNIPTSLFQQLKAMRKIDQTVKEPTYLGKFGADIREYNYSVTVTTKGLELKLVRILTVYIIIDLSSNRFEGHVPSIMGELIALRVLNLSRNGLQGHIPPSLGNLFVIESLDLSFNQLSGEIPQQIASQLTSLAVLNLSYNHLQGCIPQGPQFHTFENNSYEGNDGLRGFPISKGCGNDRVSETNNTVSTLDDQESTSEFLNDFWKAALMGYGSGLCIGLSILYFMISTGKLKWLSRITEWLQNRFII

SEQ ID NO: 1225 - protein, 497 aa, Triticum aestivum
  unsure (1)..(497): unsure at all Xaa locations
XPAPELRAAGAFSYNRLEGPIPSSFSSLSLSEINLSSNRLNGTIPELGSLATFPKSQYENNSGLCGVXPLPACEPHTGQGSSNGGQSNRRKASLAGSVAMGLLFSLFCIFVVIIAIESKKRRQKRRPAGTSRDIYIDSRSHSGTMYSNWRLSGTNALSINLAAFEKPLQKLTLGDLVEATNGFHNESLIGSGGFGDVYKATLKDGRVGAIKKLIHVSGQGDREFTAEMETIGKIKHRNLVPLLGYCKIGEERLLMYDFMKFGSLEDVLHDRKKIGIKLNWAARRKIAIGAARGLAFLHHNCIPHIIHRDMKSSNVLVDENLEARVSDFGMARMMSVVDTHLSVSTLAGTPGYVPPEYDRGFRCTTKGDVYSYGVVLLELLTGKPPTDSTDFGEDHNLVGWVKMHTKLKIADVFDPELLKDDPTLELELLEHLKIACACLDDRPSRRPTMLKVMTMFKEIQAGSTVDSKTSSVATGLSDDPGFAVMDMTLKEAKEEKD

SEQ ID NO: 1226 - protein, 708 aa, Zea mays
  unsure (1)..(708): unsure at all Xaa locations
XTCRNLVTLDLSSNNLSGHIPSAISXLTFLNNLNLSSNQLSSAIPAEICVGFGSAAHPDSEFIQHHGLLDLSYNRLTGNIPTAIKNCVMVTVLNLQGNMLSGTIPPELAELPNVTAIYLSYNTLVGPMLPWSAPLVQLQGLFLSNNHLSGSIPAEIGQILPKIEKLDLSSNALTGTLPESLLCINYLTYLDISNNSLSGQIPFSCSKEKESSSSLILFNGSSNHFSGNLDESISNFTQLSFLDIHNNSLTGSLPFSLSDLSYLNYLDLSSNDFNGPAPCGICNIVGLTFADFSGNHIGMSGLVDCAAEGFCTGKGFDRKALNSSDRVRRAAIICVSILTVVIVLVFLVVYLKRRLLRSRPLALVPVSKAKATIEPTSSDELLGKKFREPLSINLATFEHALLRVTADDIQKATENFSKVHIIGDGGFGTVYRAALPEGRRVAIKRLHGGHQFQGDREFLAEMETIGKVKHPNLVPLLGYCVCGDERFLIYEYMENGSLEMWLKNRADAIETLGWPDRLKICIGSARGLSFLHHGFVPHIIHRDMKSSNILLDENFEPRVSDFGLARIISACETHVSTDIAGTYGYIPSEYALTMKSFTKGDVYSFCAVMLELLTGRPPTGQEEGEGGGNLVGWVRWMMAHGKEGELFDPCLPVSSVWRVQMAHVLAIARDCTVDEPWKRPTMLEVVKGLKMAETIECGPLVVTVTKDM

SEQ ID NO: 1227 - protein, 862 aa, Lycopersicon hirsutum
MDCLELVFLMLYTFLCQLALSSSLPHLCPEDQALALLQFKNMFTVNPNDSDYCYDISTGVDIQSYPRTLSWNNRTSCCSWDGVHCDETTGQVIELDLSCSQLQGKFHSNSSLFQLSNLKRLDLSFNNFTGSLISSRLGEFSSLTHLDLSHSSFTGLIPSEISHLSKLHVLRIGDLNELSLGPHNFELLLENLTQLRELNLNSVNISSTIPSNFSSHLAILTLYDTGLHGLLPERVFHLSDLEFLDLSYNPQLTVRFPTTKWNSSASLMKLYVHSVNIADRIPESFSHLTSLHELDMGYTNLSGPIPKPLWNLTNIESLDLDYNHLEGPIPQLPRFEKLKDLSLRNNNFDGGLEFLSFNRSWTQLEWLDFSSNSLTGPIPSNVSGLQNLEWLYLSSNNLNGSIPSWIFSLPSLIELDLRNNTFSGKIQEFKSKTLSVVSLQKNQLEGPIPNSLLNQSLFYLLLSHNNISGRISSSICNLKMLISLDLGSNNLEGTIPQCVGEMKENLWSLDLSNNSLSGTINTTFSIGNSFRAISLHGNKLTGKVPRSLINCKYLTLLDLGNNQLNDTFPNWLGYLSQLKILSLRSNKLHGPIKSSGNTNLFTRLQILDLSSNGFSGNLPESILGNLQAMKKIDESTRTPEYISDICYNYLTTITTKGQDYDSVRIVDSNMIINLSKNRFEGRIPSIIGDLVGLRTLNLSHNALEGHIPASFQNLSVLESLDLSSNKISGEIPQQLASLTFLEFLNLSHNHLVGCIPKGKQFDTFLNSSYQGNDGLRGFPLSIHCGGDDQLTTPAELDQQQEEEDSSMISWQGVLVGYGCGLVIGLSVIYIMWSTQYPAWFSRMDLKLERIITTRMKKHKKRY

SEQ ID NO: 1228 - protein, 865 aa, Lycopersicon hirsutum
MGCVKLIFFMLYVFLFQLVPSSSLPHLCPEDQALALLQFKNMFTVNPNASDYCYDYTGVEIQSYPRTLSWNKSTDCCSWDGVDCDETTGQVIALDLCCSKLRGKFHTNSSLFQLSNLKRLDLSNNNFTGSLISPKFGEFSNLTHLVLSDSSFTGLIPFEISRLSKLHVLRISDLNELSLGPHNFELLLKNLTQLRELNLDSVNISSTIPSNFSSHLTNLWLPYTELRGVLPERVFHLSDLEFLHLSGNPQLTVRFPTTKWNSSASLMKLYVDSVNIADRIPESFSHLTSLHELDMGYTNLSGPIPKPLWNLTNIESLFLDDNHLEGPIPQLPRFEKLNDLSLGYNNLDGGLEFLYSNRSWTELEILDFSSNYLTGPIPSNVSGLRNLQLLHLSSNHLNGTIPSWIFSLPSLVVLDLSNNTFSGKIQEFKSKTLITVTLKQNKLKGPIPNSLLNQQSLSFLLLSHNNISGHISSSICNLKTLISLDLGSNNLEGTIPQCVGEMKENLWSLDLSNNSLSGTINTTFSVGNFLRVISLHGNKLTGKVPRSLINCKYLTLLDLGNNMLNDTFPNWLGYLPDLKILSLRSNKLHGLIKSSGNTNLFTRLQILDLSSNGFSGNLPESILGNLQTMKKINESTRFPEYISDPYDIFYNYLTTITTKGQDYDSVRIFTSNMIINLSKNRFEGHIPSIIGDLVGLRTLNLSHNALEGHIPASFQNLSVLESLDLASNKISGEIPQQLASLTFLEVLNLSHNHLVGCIPKGKQFDSFGNSSYQGNDGLRGFPLSKLCGVDDQVTTPAELDQEEEEEDSPMISWQGVLVGYGCGLVIGLSVIYIMWSTQYPVWFSRMDLKLEHIITTRMKKHKKRY

SEQ ID NO: 1229 - protein, 806 aa, Lycopersicon hirsutum
MGCVKLVFFMLYVFLFQLVSSSSLPHLCPEDQALALLEFKNMFTVNPNASDYCYDRRTLSWNKSTSCCSWDGVHCDETTGQVIELDLRCIQLQGKFHSNSSLFQLSNLKRLDLSYNDFTGSPISPKFGEFSDLTHLDLSHSSFRGVIPSEISHLSKLYVLRISLNELTFGPHNFELLLKNLTQLKVLDLESINISSTIPLNFSSHLTNLWLPYTELRGILPERVFHLSDLEFLDLSSNPQLTVRFPTTKWNSSASLMKLYLYNVNIDDRIPESFSHLTSLHKLYMSRSNLSGPIPKPLWNLTNIVFLDLNNNHLEGPIPSNVSGLRNLQILWLSSNNLNGSIPSWIFSLPSLIGLDLSNNTFSGKIQEFKSKTLSTVTLKQNKLKGPIPNSLLNQKNLQFLLLSHNNISGHISSAICNLKTLILLDLGSNNLEGTIPQCVVERNEYLSHLDLSNNRLSGTINTTFSVGNILRVISLHGNKLTGKVPRSMINCKYLTLLDLGNNMLNDTFPNWLGYLFQLKILSLRSNKLHGPIKSSGNTNLFMGLQILDLSSNGFSGNLPERILGNLQTMKEIDESTGFPEYISDPYDIYYNYLTTISTKGQDYDSVRILDSNMIINLSKNRFEGHIPSIIGDLVGLRTLNLSHNVLEGHIPASFQNLSVLESLDLSSNKISGEIPQQLASLTFLEVLNLSHNHLVGCIPKGKQFDSFGNTSYQGNDGLRGFPLSKLCGGEDQVTTPAELDQEEEEEDSPMISWQGVLVGYGCGLVIGLSVIYIMWSTQYPAWFSRMDLKLEHIITTKMKKHKKRY

SEQ ID NO: 1230 - protein, 1166 aa, Capsella rubella
MKQKWLFVLILCFFTALGIHGKRLINSDFDETALLMAFKQFSVKSDPNNVLGNWIYESGRGSCSWRGVSCSDDGRIVGLDLRNGGVTGTLNLANLTALPNLQNLYLQGNYFSSSSGGDSSSGSYCYLQVLDLSSNLISDYSLVDYVFSKCSNLVSVNFSNNKLVGKLGFAPSSLKSLTTVDFSYNILSEKIPESFISEFPASLKYLDLTHNNFSGDFSDLSFGMCGNLSFFSLSQNNISGVKFPISLPNCRFLETLNISRNNLAGKIPGGEYWGSFQNLKQLSLAHNRFSGEIPPELSLLCKTLETLDLSGNALSGELPSQFTACVWLQNLNIGNNYLSGDFLSTVVSKITRITYLYVAFNNISGSVPISLTNCTNLRVLDLSSNGFTGNVPSGLCSQQSSPVLEKLLIANNYLSGTVPVELGKCKSLKTIDLSFNELTGPIPKDVWMLPNLSDLVMWANNLTGSIPEGVCVKGGKLETIILNNNLLTGSIPQSISRCTNMIWISLSSNRLTGKIPTGIGNLSKLAILQLGNNSLSGNVPRQLGNCKSLIWLDLNSNNLTGDLPGELASQAGLVMPGSVSGKQFAFVRNEGGTDCRGAGGLVEFEGIRAERLERFPMVHSCPATRIYSGMTMYTFSANGSMIYFDISYNAVSGLIPPGYGNMGYLQVLNLGHNRITGNIPDSLGGLKAIGVLDLSHNDLQGYLPGSLGSLSFLSDLDVSNNNLTGPIPFGGQLTTFPVSRYANNSGLCGVPLRPCGSAPRRPITSSVHAKKQTLATAVIAGIAFSFMCLVMLFMALYRVRKVQKKELKREKYIESLPTSGSCSWKLSSVPEPLSINVATFEKPLRKLTFAHLLEATNGFSAETMVGSGGFGEVYKAQLRDGSVVAIKKLIRITGQGDREFMAEMETIGKIKHRNLVPLLGYCKVGEERLLVYEYMKWGSLETVLHEKSSKKGGIFLNWTARKKIAIGAARGLAFLHHSCIPHIIHRDMKSSNVLLDEDFEARVSDFGMARLVSALDTHLSVSTLAGTPGYVPPEYYQSFRCTAKGDVYSYGVILLELLSGKKPIDPGEFGEDNNLVGWAKQLYREKSGTEILDPELVTEKSGDAELFHYLKIASQCLDDRPFKRPTMIQVMAMFKELKADTEEDESLDEFSLKETPLVEESRDKEP

SEQ ID NO: 1231 - protein, 323 aa, Mus musculus
MYHSSSQKRHWTFASEEQLARLRADANRKFKCKAVANGKVLPNDPVFLEPHEELTLCKYYEKRLLEFCSVFKPAMPRSVVGTACMYFKRFYLNNSVMEYHPRIIMLTCAFLACKVDEFNVSSPQFVGNLRESPLGQERALEQILEYELLLIQQLNFHLIVHNPYRPFEGFLIDIKTRYPMLENPEILRKTADDFLSRIALTDAYLLYTPSQIALTAILSSASRAGITMESYLSESLMLKENRTCLSQLLDIMKSMRNLVKKYEPPRSDEVAVLKQKLERCHSSDLALNAVTKKRKGYEDDDYVSKKPKQEEEEWTDDDLVDSL

SEQ ID NO: 1232 - protein, 323 aa, Rattus norvegicus
MYHNSSQKRHWTFASEEQLARLRADANRKFKCKAVANGKVLPNDPLFLEPHEEMTLCKYYEKRLLEFCSVFKPAMPRSVVGTACMYFKRFYLNNSVMEYHPRIIMLTCAFLACKVDEFNVSSPQFVGNLRESPLGQEKALEQILEYELLLIQQLNFHLIVHNPYRPFEGFLIDIKTRYPMLENPEILRKTADDFLSRIALTDAYLLYTPSQIALTAILSSASRAGITMESYLSESLSRKENRTCLSQLLDIMKSMRNLVKKYEPPRSEEVAILKQKLERCHSSDLALNMVTKKRKGYEDDDYVSKKPKQEEEEWTDDDLVDAL

SEQ ID NO: 1233 - protein, 323 aa, Rattus norvegicus
MYHNSSQKRHWTFASEEQLARLRADANRKFKCKAVANGKVLPNDPLFLEPHEEMTLCKYYEKRLLEFCSVFKPAMPRSVVGTACMYFKRFYLNNSVMEYHPRIIMLTCAFLACKVDEFNVSSPQFVGNLRESPLGQEKALEQILEYELLLIQQLNFHLIVHNPYRPFEGFLIDIKTRYPMLENPEILRKTADDFLSRIALTDAYLLYTPSQIALTAILSSASRAGITMESYLSESLMLKENRTCLSQLLDIMKSMRNLVKKYEPPRSEEVAILKQKLERCHSSDLALNMVTKKRKGYEDDDYVSKKPKQEEEEWTDDDLVDAL

SEQ ID NO: 1234 - protein, 323 aa, Rattus norvegicus
MYHNSSQKRHWTFASEEQLARLRADANRKFKCKAVANGKVLPNDPLFLEPHEEMTLCKYYEKRLLEFCSVFKPAMPRSVVGTACMYFKRFYLNNSVMEYHPRIIMLTCAFLACKVDEFNVSSPQKEGNLRESPLGQEKALEQILEYELLLIQQLNFHLIVHNPYRPFEGFLIDIKTRYPMLENPEILRKTADDFLSRIALTDAYLLYTPSQIALTAILSRASRAGITMESYLSESLMLKENRTCLSQLLDIMKSMRNLVKKYEPPRSEEVAILKQKLERCHSSDLALNMVTKKRKGYEDDDYVSKKPKQEEEEWTDDDLVDAL

SEQ ID NO: 1235 - protein, 319 aa, Gibberella moniliformis
MSANYWHSTQCRFWSFTKEQLVTMRQKLEEDNAELVRMFPLPQQRRLYIYFNQQLIRLAKRLTIRQQSMATAQVYMKRFYSKVEIRRTNPYLVIATAIYLACKIEESPQHIRLIVTEARQMWGDLVAIDTSKLGECEFFMISEMRSQLIVFQPYRTITALRNELSLVDDEVQLARSVINDHFMTDLPLLYPPHIIAMVAILLALVLRPNNSGPGQSTSGAAAAAGLAAAQQALMRAQGQQAQGGMPEPAAAEPKEKRQQDRVSRVQKFAKWLVDSNVEIASMVDATQEIISFYECYEHYNDKLTREQINRFVKARGLDK

SEQ ID NO: 1236 - protein, 341 aa, Anopheles gambiae str. PEST
SGRSGHETLTQQPQTRGKMYSLSSQKKFWTFKTEQELAELRVKQNVRFIAKHGASMTEEQRQAHFLSADEERLLLKQYELQLKEFCKRFEPPMPKYVVGTAFHYFKRFYLNNSSMDYHPKEILATCVYLACKVEEFNVSIAQFVANIKGDRVKAMDIILSNELLLMQELNYYLTIHNPMRPIEGFLIDIKTRCNMSNPDRLRPGIEDFIDKTFLTDAPLMYAPSQIALAAVLHAASKEQENLDSYVTESLFGSAKDKLPVLIEAVRRVRSMVRTIELPPKDRVRFLEKKLEKCRNQENNPDSQIYKQRMKKMYEDEDDLDVMGSSYHMNVSDASLDVSQLN

SEQ ID NO: 1237 - protein, 336 aa, Arabidopsis thaliana
MADFQTSTQRAKWIFTPQKLAERYKAANQRAVQMLEKCGTTQVEVDASGSLTYPKDKVGSGDQADKKLKPLSADEERFMRAFYEAKVQEVCSAFAFPHKIQATALQYFKRFYLQWSVMQHHPKEIMLTCVYAACKIEENHVSAEEIGKGINQDHRIILKYEMAVLQSLEFDLIVYAPYRAIEGFVNNMEEFLQARDDEIQKLESLLKGATAEADKVMLTDAPLLFPPGQLALASLRIANGVLGVIDFDRYLENIVSQPNSEHTTSELTKLLDNIEYLVKNYKCPSEKDMKHINRKLKSCLGHSSSHDESKKREKRSKHKSHRSSNDTPNGAPPPIG

SEQ ID NO: 1238 - protein, 337 aa, Glycine max
  unsure (1)..(337): unsure at all Xaa locations
MADFQTSTHRAKWIFSPQQLVEKYRAANQRAKQILEKCGATLMEVDVDGXSLSYPEPQMTAKDSAEKHSRTKPLTIEEETCIKVFYENKLQEVCNNFRFPHKIQATALIYFKRFYLQWSVMEHQPKHIMLTCIYAACKIEENHVSAEELGKGISQDHQMILNNEMIVYQSLEFDLIVYAPYRSVEGFINDMEEFFNAGDNQLEMLKTLQETARFEVDKMMLTDAPLLFPPGQVLALAALRNSNAFHRVIDFDSYLRGIFSRENSMHTMSELSESLDAIDSWVRKYKSPSEKELKHINRKLKSCWGHHSHDEGKKREKKSKHKSKKSSNEAQNMPSIA

SEQ ID NO: 1239 - protein, 314 aa, Glycine max
  unsure (1)..(314): unsure at all Xaa locations
XEFGTRNQRAKQILEKCGATLMEVDVDGSLSYPEPQMTAKDSAEKHSRTKPLTIEEEQCIKVFYENKLQQVCNNFRFPHKIQATXLIYFKRFYLHPPPIRXTPTHIMLTCIYAACKIEENHVSAEELGKGISQDHQMILNNEMIVYQSLEFDLIVYAPYRSVEGFINDMEEFFNAGDNQLEMLKTLQETARFEVDKMMLTDAPLLFPPGQLALAALRNSNAFHRVIDFDSYLRGIFSRENSMHTMSELSESLNAIDSWVRKYKSPSEKELKHIIRKLKSCWGHSSHDEGKKREKKSKHKSKKSSNEAQNMSSLA

SEQ ID NO: 1240 - protein, 264 aa, Glycine max
  unsure (1)..(264): unsure at all Xaa locations
XYSIAKIYFRIIYLNHYIGNFTACSFFXXRLQMMSIHYFKRFYLLWSVMXHQPKHIILSINYXKTALXKNKGSAVQLDNLISHDQHLILTIDLTLSQCFQCVFIVYAPYRSVEGIINDMDVFFNAGDNQLEMLKTLQETARFEVDKMMLTDAPLLFPPGQLALAALRNSNAFHRVIDFDSYLRGIFSRENSMHTMSELSESLDAIDSWVRKYKSPSEKELKHINRKLKSCWGHHSHDEGKKREKKSKHKSKKSSNEAQNMPSIA

SEQ ID NO: 1241 - protein, 110 aa, Glycine max
  unsure (1)..(110): unsure at all Xaa locations
MADFQTSTHRAKWIFSPQQLVEKYRAANQRAKQILEKCGATLMEVDVNGSLSYPEPHMTAKDSAEKHYRTKPLSIEEEQCIKVFYENKLQEVCNNFRFPHKIQVSVLLIX

SEQ ID NO: 1242 - protein, 69 aa, Glycine max
  unsure (1)..(69): unsure at all Xaa locations
XCIKVFYDNKLQLVCTXIFRFHHKIQATAVIYFKRFYLQWSVMEHQPKHIMLTCIYAACKIEENYVXGX

SEQ ID NO: 1243 - protein, 103 aa, Glycine max
  unsure (1)..(103): unsure at all Xaa locations
TLQETARFEVDKMMLTDAPLLFPPGQLALAALRNSNAFHRVIDFDRXRKYKSPSEKELKHINRKLKSCWGHXXSHDEGKKREKKSKHKSKKSSNEAQNMPSIA

SEQ ID NO: 1244 - protein, 328 aa, Oryza sativa (japonica cultivar-group)
MADFRTSTHRERWIFQTNDLMDRWGAANQRATETLVQYGTTRLKVDPVDGSLSYPEPAPDHVVGSSGVKPLSCEEERLMRVFYEQKIQEVCSAFKFPHKIQATAIIYFKRFYLQWSVMEHHPKHIMLTCIYSSCKVEENHVSAEELGKGIQQDHQIILNNEMIVLKSLDFDLIVYAPYRSIEGFVDDMEDFCRAGNGEHQRLQDLRQTAISQVDKMMLTDAPLLYTPGQLALAALHKSNDMHKILNFERYLESVFSRQHSDCPIEQFVGSINMINYLQLKIPTPKDMRHIDRKLKHCLDPSSQDEHKKKEKKSKHKSKRAANEAQLDS

SEQ ID NO: 1245 - protein, 255 aa, Dictyostelium discoideum
MAANFWESSHCTEWLLDRNKIEESNPKDKQYLTPIELKKLRTHYCFVIQNLGNALKLRQRAISTAIVYFKRFYLKNSFVDCEPRLVAVTCLYLSSKVEECITQAKKCAAKMKEIDHSFNYLMNDILECEFFVLEELDFCLIIYHPYKSLPFYLQSSGLDPASIEIIWGIVNDSYRTDVCLLYPPFVVGLGCILLGSYLLKKDIKQWLSELNVEMKDIWEVSKDLIDYYEFEKQQSLQNQSELDLLYNKLPIRNKK

SEQ ID NO: 1246 - protein, 216 aa, Triticum aestivum
  unsure (1)..(216): unsure at all Xaa locations
MSDFQTSTHRERWIFQPQDLVNKWTTANRRSAEILAQYGTTRLKVDPVDGSISNPEPVPDHVVGSSSVKPLSCEEEQVMRIFYEQKIQEVCRAFKFPHKIQATAIIYFKRFYLQWSVMEHHPKHIMLTCVYASCKVEENHVSAEELGKGIQQDHQIILNNEMIVLKSLDFDLIXVYAPYRSIEGFIDDLDDLCRARNGAHQRLKDLHQTANSEVDT

SEQ ID NO: 1247 - protein, 438 aa, Zea mays
  unsure (1)..(438): unsure at all Xaa locations
MADFRTSTQRERWIFQSHDLMERWAAANQRAAQTLAQYGTTRLNVDLLDGSVSYPESMPDHVEGSSVVKPLSYEEEQLTRVFYEQKIQEVCAAFKFPHKIQATAIIYFKRFYLQWSVMEHQPKHIMLTCVYASCKVEENHVSAEELGKGIQQDHQIILNNEMILLKTLDFDLIVYAPYRSIEGFIDDLEDFCRAGNGPFQRLKELRQAAISHVDKMMLTDAPLLYTPGQLALAALHKSNDLLRVVDFERYLEIIFSRQHSDCPIEQFVQSINEINYLVDQLNIPTVKDMRHVDRKLKHCWDPSSHDEHNKKKEKKSKHKSKRTSTDAQLXEAYGPAVALCKSTTGLQMIETELRHLSTAALRQLSTPAEAYLRSSNFVTMWAMELHCSNGRVAAKIQTKRCNIGCLSPKYGELQILYGRLCVSHNYLSSFCYGCSIVY

SEQ ID NO: 1248 - protein, 92 aa, Zea mays
MADFRTSTQRERWIFQSHDLMERWAAANQRAAQTLAQYGTTRLNVDLLDGSVSYPESMPDHGMRHLLVYNSPVLCVFQNMKYICTTSSLQKA

SEQ ID NO: 1249 - protein, 332 aa, Populus tremula x Populus tremuloides
MADFQSSSHKAKWIFTPQQLAEKYKATNNRAKQMLEKYGTTRMRVDVDGSLSYPEPQVNMTENADKHSRSKPISVEEEQFMRVYYEYKLREVCSAFYFPHKIQATALLYFKRFYLQWSVMEHDPKHVMLTCIYAACKIEENHVSAEELGKGISQDHQMILNYEMIVYQSLEFDLIVYAPYRSVEGFVADIEEFCHPTDENIEKLKEIAVAEVDKIMLTDAPVMFPPGQLALAALQSANEMHRVLDFERYLESVLSRQNSAHMISEISESLHAVEKWVRKYSFPTDKDMKHINRKLKSCWGHNSHDDNKKREKKSKHKSHKSSNEMQNGPGLT

SEQ ID NO: 1250 - protein, 322 aa, Schizosaccharomyces pombe
MSADKFRDSTHYRDWIFTEEDLSKTRAKVNEKFTNIVRERMLEELSLQNKEASLEVLPPTLTVEEELELVNYYSFQLNALSSALSLPTHIRSTAILFFKRFYLINSVMEYSPKIISFTSLFLATKCNDHYISIEQFCKNMPKTTPEEVLEYEFNVCQSLKWDLYVWLPFRPLQGFLLDCQTVLPKVAVEKFYECHDLSKKFLIETLHSDIYFLHSPSIIALGAIYHTNPTICLQYIEAKKIPELQPLIISISANLKATKKFKIEKKKAQDYGRKLYFCMNPLRNKSSALYLKRKAEEESTNNNKWAKKFSTSSNVLDKNPFE

SEQ ID NO: 1251 - protein, 393 aa, Saccharomyces cerevisiae
MTDIQLNGKSTLDTPSATMSAKEKEAKLKSADENNKPPNYKRISDDDLYRHSSQYRMWSYTKDQLQEKRVDTNARAIAYIEENLLKFREAHNLTEEEIKVLEAKAIPLTMEEELDLVNFYAKKVQVIAQHLNLPTEVVATAISFFRRFFLENSVMQIDPKSIVHTTIFLACKSENYFISVDSFAQKAKSTRDSVLKFEFKLLESLKFSLLNHHPYKPLHGFFLDIQNVLYGKVDLNYMGQIYDRCKKRITAALLTDVVYFYTPPQITLATLLIEDEALVTRYLETKFPSREGSQESVPGNEKEEPQNDASTTEKNKEKSTESEEYSIDSAKLLTIIRECKSIIEDCKPPSTEEAKKIAAKNYYCQNPSTLIQKLKRKLNGEDTSSTVEKKQKT

SEQ ID NO: 1252 - protein, 427 aa, Neurospora crassa
MASEDARYRETSQFQAWSFSPAQLAAMREKTNAIARQRIAERMLASASNPPTSNNTSHANTPDPSGHGTPNPTENSTPTLPDFLKPEEEALLVSFYVSELLRAADHLGVPDEVRATATVFFRRFFLTNSIMTYPPQEMILVALFVGSKAEGRFPRIIEFQQKFNTKQDILAGEFLLCQGNRFNFEVRHPFRALMGATMELRSYGDIDEQRIIAAEKRAHEILLFSPLMTDAYFHYTPSQIMFAALSLADRGLAERLIQETFHFVPPTTNNDNTPAVTPLPGLENQGIGRKEGGSKGITTNDERAAIVGPGIRDKVMGTIEACRNMLSTELPERKSHWTSESIFKSQIRPVRKKLTKCRDPDRWNLSELQRQRREAGVRRADSEERPAASNGSKDAAIFGGDLSADAPEKKRRKVDGNGLEDPFGGPL

SEQ ID NO: 1253 - protein, 335 aa, Echinococcus multilocularis
MAYVTSTQLYNWRFTQDELANQRQECNAAVRRRLSAQYRAKAEVKGGDVPAEPTFLTAEEEFIIVKRYIFAMKELFHQFSDSGLPVDVFGFAATYLKRFYLNNSVMDYFPREMMLTALYLACKAADYPLGLQTFAAHIPRNREHYSEIVVHSELFLMEKLQYDIWIHTPYRPLSGLLVDLLAYRKTQLGEPMTIEAGEVATADMMTSLKKEGYEIIHKWFQTDLCLTHSPSQFALAVLLELGQKHPDLGVEKFVKNSVCEYNSSDELMEQKWTALNEKMEQIQTMIGEFEFLSDLTYGSDLEAVLMQCRNPLYDPLSEEYAAAKEQAEKLMSFLD

SEQ ID NO: 1254 - protein, 296 aa, Caenorhabditis elegans
MQPDELELFVTPEEELRMQRSIEDAALKFADKFRPHIWPSVKWTALAFFKRAFLVWVPSDTSIRMVMMACFYLAMKIDEFYITIEDFVKNMNVGEPRQNAERILKLEPELMKILDYNLTVHCPYRPYEGHLMDMKTRMLLLNFDLESIRRDSMRFFQNALQTDVLLLYPPSQIALAAINFGLHAQGKSDEILREFLRKLIGIEEDSWAHRDARPEDLEKLEKTVTRVNQIMREVDRNFVAVTEQERENHKSQLARIQALIPALDERRKEQWLAGGGVGLMPGELAEQPVDSDDEIN

SEQ ID NO: 1255 - protein, 324 aa, Drosophila melanogaster
MYPVSSQKRSWTFANEGQLMEFRVEQNSKYIESHEEEAQGRDLNEHFLTSAEERLLLKQYEIYLFDFCRRFEPTMPKCVVGTAFHYFKRFYLNNSPMDYHPKEILATCVFVACKVEEFNVSINQFVNNIKGDRNKATDIVLSNELLLIGQLNYYLTIHNPFRPIEGFLIDIKTRSNMQNPDRLRPHIDSFIDSTYYSDACLLHTPSQIALAAVLHAASREQENLDSYVTDLLFVSAREKLPGLIDAVRKIRIMVKQYQQPDREKVKAIEKKLDKCRNQANNPDSELYKERLRRLYTDEDDMPAEDASFHIADVSSDTSAMNISQ

SEQ ID NO: 1256 - protein, 325 aa, Drosophila melanogaster
FTYPVSSQKRSWTFANEGQLMEFRVEQNSKYIESHEEEAQGRDLNEHFLTSAEERLLLKQYEIYLFDFCRRFEPTMPKCVVGTAFHYFKRFYLNNSPMDYHPKEILATCVFVACKVEEFNVSINQFVNNIKGDRNKATDIVLSNELLLIGQLNYYLTIHNPFRPIEGFLIDIKTRSNMQNPDRLRPHIDSFIDSTYYSDACLLHTPSQIALAAVLHAASREQENLDSYVTDLLFVSAREKLPGLIDAVRKIRIMVKQYQQPDREKVKAIEKKLDKCRNQANNPDSELYKERLRRLYTDEDDMPAEDASFHIADVSSDTSAMNISQ

SEQ ID NO: 1257 - protein, 323 aa, Xenopus laevis
MYHNSTQKKHWTFLSEDEPLRRRIQANVRYRARIRATEKPRLSEIFSLEPHEELAICKYYEKRLLDFCNAFKPTMPKSVLGTACMYFKRFYLNNSVMEHHPRIIMLTCVFLACKVDEFNVSSIQFVGNLGENPLGQEKILEQILEYELLLIQQLNFHLIVHNPYRPFEGFLIDVKTRYPMLENPEVLRKSADEFLNRVALTDACLLFAPSVIALTAILSTASRAGLNMESYLTECLSLKDNQETMSHLLDGMRRLKILVSKYEPARPEEVAALKKRLDHCHSTEVTLSVHGRKRKGYEDDGYISKKPKTEEDEWTDEDFGDSL

SEQ ID NO: 1258 - protein, 283 aa, Gallus gallus
MAGNFWQSSHYLQWILDKQDLLKERQKDLKFLSEEEYWKLQIFFTNVIQALGEHLKLRQQVIATATVYFKRFYARYSLKSIDPVLMAPTCVFLASKVEEFGVVSNTRLISAATSVLKTRFSYAFPKEFPYRMNHILECEFYLLELMDCCLIVYHPYRPLLQYVQDMGQEDMLLPLAWRIVNDTYRTDLCLLYPPFMIALACLHVACVVQQKDARQWFAELSVDMEKILEIIRVILKLYEQWKNFDERKEMATILSKMPKPKPPPNSEGEQGPNGSQNSSYSQS

SEQ ID NO: 1259 - protein, 272 aa, Gallus gallus
LQWILDKQDLLKERQKDLKFLSEEEYWKLQIFFTNVIQALGEHLKLRQQVIATATVYFKRFYARYSLKSIDPVLMAPTCVFLASKVEEFGVVSNTRLISAATSVLKTRFSYAFPKEFPYRMNHILECEFYLLELMDCCLIVYHPYRPLLQYVQDMGQEDMLLPLAWRIVNDTYRTDLCLLYPPFMIALACLHVACVVQQKDARQWFAELSVDMEKILEIIRVILKLYEQWKNFDERKEMATILSKMPKPKPPPNSEGEQGPNGSQNSSYSQS

SEQ ID NO: 1260 - protein, 323 aa, Homo sapiens
MYHNSSQKRHWTFSSEEQLARLRADANRKFRCKAVANGKVLPNDPVFLEPHEEMTLCKYYEKRLLEFCSVFKPAMPRSVVGTACMYFKRFYLNNSVMEYHPRIIMLTCAFLACKVDEFNVSSPQFVGNLRESPLGQEKALEQILEYELLLIQQLNFHLIVHNPYRPFEGFLIDLKTRYPILENPEILRKTADDFLNRIALTDAYLLYTPSQIALTAILSSASRAGITMESYLSESLMLKENRTCLSQLLDIMKSMRNLVKKYEPPRSEEVAVLKQKLERCHSAELALNVITKKRKGYEDDDYVSKKSKHEEEEWTDDDLVESL

SEQ ID NO: 1261 - protein, 333 aa, Homo sapiens
MSHHHHHHGSMYHNSSQKRHWTFSSEEQLARLRADANRKFRCKAVANGKVLPNDPVFLEPHEEMTLCKYYEKRLLEFCSVFKPAMPRSVVGTACMYFKRFYLNNSVMEYHPRIIMLTCAFLACKVDEFNVSSPQFVGNLRESPLGQEKALEQILEYELLLIQQLNFHLIVHNPYRPFEGFLIDLKTRYPILENPEILRKTADDFLNRIALTDAYLLYTPSQIALTAILSSASRAGITMESYLSESLMLKENRTCLSQLLDIMKSMRNLVKKYEPPRSEEVAVLKQKLERCHSAELALNVITKKRKGYEDDDYVSKKSKHEEEEWTDDDLVESL

SEQ ID NO: 1262 - protein, 323 aa, Homo sapiens [sequence omitted]

SEQ ID NO: 1263 - protein, 323 aa, Homo sapiens
MYHNSSQKRHWTFSSEEQLARLRADANRKFRCKAVANGKVLPNDPVFLEPHEEMTLCKYYEKRLLEFCSVFKPAMPRSVVGTACMYFKRFYLNNSVMEYHPRIIMLTCAFLACKVDEFNVSSPQFVGNLRESPLGQEKALEQILEYELLLIQQLNFHLIVHNPYRPFEGFLIDLKTRYPILENPEILRKTADDFLNRIALTDAYLLYTPSQIALTAILSSASRAGITMESYLSESLMLKENRTCLSQLLDIMKSMRNLVKKYEPPRSEEVAVLKQKLDRCHSAELALNVITKKRKGYEDDDYVSKKSKHEEEEWTDDDLVESL

SEQ ID NO: 1264 - protein, 298 aa, Mesocricetus auratus
MENFQKVEKIGEGTYGVVYKAKNKLTGEVVALKKIRLDTETEGVPSTAIREISLLKELNHPNIVKLLDVIHTENKLYLVFELLHQDLKKFMDASAVTGIPLPLIKSYLFQLLQGLAFCHSHRVLHRDLKPQNLLINAEGSIKLADFGLARAFGVPVRTYTHEVVTLWYRAPEILLGCKYYSTAVDIWSLGCIFAEMVTRRALFPGDSEIDQLFRIFRTLGTPDEVVWPGVTSMPDYKPSFPKWARQDFSKVVPPLDEDGRSLLSQMLHYDPNKRISAKAALAHPFFQDVTKPVPHLRL

SEQ ID NO: 1265 - protein, 346 aa, Mesocricetus auratus
MENFQKVEKIGEGTYGVVYKAKNKLTGEVVALKKIRLDTETEGVPSTAIREISLLKELNHPNIVKLLDVIHTENKLYLVFELLHQDLKKFMDASAVTGIPLPLIKSYLFQLLQGLAFCHSHRVLHRDLKPQNLLINAEGSIKLADFGLARAFGVPVRTYTHEVVTLWYRAPEILLGCKYYSTAVDIWSLGCIFAEMHLVCTQHHAKCCGEHRRNGRHSLCPLCSYLEVAASQGGGMTAVSTPYPVTRRALFPGDSEIDQLFRIFRTLGTPDEVVWPGVTSMPDYKPSFPKWARQDFSKVVPPLDEDGRSLLSQMLHYDPNKRISAKAALAHPFFQDVTKPVPHLRL

SEQ ID NO: 1266 - protein, 346 aa, Mus musculus
MAVDVKSRAKRYEKLDFLGEGQFATVYKARDKNTNQIVAIKKIKLGHRSEAKDGINRTALREIKLLQELSHPNIIGLLDAFGHKSNISLVFDFMETDLEVIIKDNSLVLTPSHIKAYMLMTLQGLEYLHQHWILHRDLKPNNLLLDENGVLKLADFGLAKSFGSPNRAYTHQVVTRWYRAPELLFGARMYGVGVDMWAVGCILAELLLRVPFLPGDSDLDQLTRIFETLGTPTEEQWPDMCSLPDYVTFKSFPGVPLQHIFIAAGDDLLELIQGLFLFNPCTRTTASQALKTKYFSNRPGPTPGCQLPRPNCPVEALKEPANPTVATKRKRAEALEQGILPKKLIF

SEQ ID NO: 1267 - protein, 346 aa, Mus musculus
MAVDVKSRAKHNEKLDFLGRGQFATVYKARDKNTNQIVAIKKIKLGHRSEAKDGINRTALREIKLLQELSHPNIIGLLDAFGHKSNISLVFDFMETDLELIIKHNSLVLTPSHIKAYMLMTLQGLEYLHHNWILHRDLKPNNLLLDENGVLKLADFGLAKSFGSPNRAYTHQVVTRWYRAPELLFGARMYGVGVDMWAVGCILAELLLRVPFLPGDSDLDQLTRIFETLGTPTEEQWPDMCSLPDYVTFKSFPGVPLQHIFIAAGDDLLELIQGLFLFNPCTRTTASQALKTKYFSNRPGPTPGCQLPRPNCPVEALKEPANPTVATKRKRAEALEQGILPKKLIF

SEQ ID NO: 1268 - protein, 309 aa, Mus musculus
MAVDVKSRAKRYEKLDFLGEGQFATVYKARDKNTNQIVAIKKIKLGHRSEAKDGINRTALREIKLLQELSHPNIIGLLDAFGHKSNISLVFDFMETDLEDLKPNNLLLDENGVLKLADFGLAKSFGSPNRAYTHQVVTRWYRAPELLFGARMYGVGVDMWAVGCILAELLLRVPFLPGDSDLDQLTRIFETLGTPTEEQWPDMCSLPDYVTFKSFPGVPLQHIFIAAGDDLLELIQGLFLFNPCTRTTASQALKTKYFSNRPGPTPGCQLPRPNCPVEALKEPANPTVATKRKRAEALEQGILPKKLIF

SEQ ID NO: 1269 - protein, 346 aa, Mus musculus
MDQYCILGRIGEGAHGIVFKAKHVETGEIVALKKVALRRLEDGIPNQALREIKALQEIEDSQYVVQLKAVFPHGAGFVLAFEFMLSDLAEVVRHAQRPLAPAQVKSYLQMLLKGVAFCHANNIVHRDLKPANLLISASGQLKIADFGLARVFSPDGGRLYTHQVATRWYRAPELLYGARQYDQGVDLWAVGCIMGELLNGSPLFPGENDIEQLCCVLRILGTPSPRVWPEITELPDYNKISFKEQAPVPLEEVLPDASPQALDLLGQFLLYPPRQRIAASQALLHQYFFTAPLPAHPSELPIPQRPGGPAPKAHPGPPHVHDFHVDRPLEESLLNPELIRPFIPEG

SEQ ID NO: 1270 - protein, 252 aa, Mus musculus
MAVDVKSRAKRYEKLDFLGEGQFATVYKARDKNTNQIVAIKKIKLGHRSEAKDGINRTALREIKLLQELSHPNIIGLLDAFGHKSNISLVFDFMETDLEVIIKDNSLVLTPSHIKAYMLMTLQGLEYLHQHWILHRDLKPNNLLLDENGVLKLADFGLAKSFGSPNRAYTHQVVTRWYRAPELLFGARMYGVGVDMWAVGCILAELLLRVPFLPGDSDLDQLTRIFETLGTPTEEQWPGFSPYPGCPELFVD

SEQ ID NO: 1271 - protein, 329 aa, Rattus norvegicus
  unsure (1)..(329): unsure at all Xaa locations
ANRNEKLDFLGEGQFATVYKARDKNTNQIVAIKKIKLGHRSEAKDGINRTALREIKLLQELSHPNIIGLLDAFGHKSNISLVFDFMETDLEVIIKDNSLVLTPSHIKAYMLMTLQGLEYLHQHWILHRDLKPNNLLLDENGVLKLADFGLAKSFGSPNWAYTHQVVTRWYRAPELLFGARMYGVGVDMWAVGCILAELLLRVPFLPGDSDLDQLTRIFETLGTPTEEQWPDMCSLPDYVTFKSFPGIPLQHIFIAAGDDLLELIQGLFLFNPCTRITASQALRTKYFSNRPGPTPGCQLPRPNCPVEALKEQXNPAMATKRKRAEALEQ

SEQ ID NO: 1272 - protein, 312 aa, Rattus norvegicus
ANRNEKLDFLGEGQFATVYKARDKNTNQIVAIKKIKLGHRSEAKDGINRTALREIKLLQELSHPNIIGLLDAFGHKSNISLVFDFMETDLEVIIKDNSLVLTPSHIKAYMLMTLQGLEYLHQHWILHRDLKPNNLLLDENGVLKLADFGLAKSFGSPNWAYTHQVVTRWYRAPELLFGARMYGVGVDMWAVGCILAELLLRVPFLPGDSDLDQLTRIFETLGTPTEEQWPDMCSLPDYVTFKSFPGIPLQHIFIAAGDDLLELIQGLFLFNPCTRITASQALRTKYFSNRPGPTPGCQLPRPNCPVEALKEQ

SEQ ID NO: 1273 - protein, 303 aa, Oryzias curvinotus
MEDYVKIEKIGEGTYGVVYKGRHKSTGQVVAMKKIRLESEEEGVPSTAVREVSLLQELKHPNVVRLLDVLMQESRLYLIFEFLSMDLKKYLDSIPSGQYMDPMLVKSYLYQILEGIYFCHRRRVLHRDLKPQNLLIDNKGVIKLADFGLSRAFGVPVRVYTHEVVTLWYRAPEVLLGSPRYSTPVDVWSTGTIFAELATKKPLFHGDSEIDQLFRIFRTLGTPNNDVWPDVESLPDYKSTFPKWKGGSLSSMVKNLDKNGLDLLAKMLIYNPPKRISAREAMTHPYFDDLDKSTLPAACINGV

SEQ ID NO: 1274 - protein, 303 aa, Oryzias luzonensis
MEDYVKIEKIGEGTYGVVYKGRHKSTGQVVAMKKIRLESEEEGVPSTAVREVSLLQELKHPNVVRLLDVLMQESRLYLIFEFLSMDLKKYLDSIPSGQYMDPMLVKSYLYQILEGIYFCHRRRVLHRDLKPQNLLIDNKGVIKLADFGLARAFGVPVRVYTHEVVTLWYRAPEVLLGSPRYSTPVDVWSTGTIFAELATKKPLFHGDSEIDQLFRIFRTLGTPNNDVWPDVESLPDYKNTFPKWKGGSLSSMVKNLDKNGLDLLAKMLIYNPPKRISAREAMTHPYFDDLDKSTLPAACINGV

SEQ ID NO: 1275 - protein, 483 aa, Hordeum vulgare subsp. vulgare
  unsure (1)..(483): unsure at all Xaa locations
MERYNIITEVGDGTFGSVWRAINKESGEVVAIKKMKKKYFSWEECINLREVKSLRRMNHPNIVKLKEVIRENDMLFFVFEYMECNLYQLMKSKGKPFSETEIRNWCFQVFQALSHMHQRGYFHRDLKPENLLVTKELIKVADFGLAREIISEPPYTEYVSTRWYRAPEVLLQSSVYSSAVDMWAMGAIIAELFSHRPLFPGSSEADEIYKICNILGTPNQHTWAGGLQLAASIHFQFPQSGSINLSEVVPTASEDALNLISWLCSWDPRKRPTAVEVLQHPFFQPCFYVPPSLRYRSTGYATPPPSVGAKGAMDQKNARRYPVGTLSNGRPAVNNSYLSTNAPARAAGVQRKLELDHQVKPEGNHKLTTKENAMNQPWSRLPPAPVRNNMNYLAAXEQIPRGGAPDIAEKLSQLSMSSTTNRAPIMPSDRFVDLKATTRAHGEPVRRPVPLGPRDTWHARNDPFRRTYEMPGERALLQRKLVS

SEQ ID NO: 1276 - protein, 303 aa, Oryzias javanicus
MEDYVKIEKIGEGTYGVVYKGRHKSTGQVVAMKKIRLESEEEGVPSTAIREVSLLQELKHPNVVRLLDVLMQESRLYLIFEFLSMDLKKYLDSIPSGQYMDPMLVKSYLYQILEGIYFCHRRRVLHRDLKPQNLLIDNKGVIKLADFGLARAFGVPVRVYTHEVVTLWYRAPEVLLGSPRYSTPVDVWSTGTIFAELATKKPLFHGDSEIDQLFRIFRTLGTPNNDVWPDVESLPDYKNTFPKWKEGSLSSMVKNLDKNGLDLLAKMLTYNPPKRVSAREAMTHPYFDDLDKSTLPAASINGV

SEQ ID NO: 1277 - protein, 303 aa, Oryzias javanicus
MEDYVKIEKIGEGTYGVVYKGRHKSTGQVVAMKKIRLESEEEGVPSTAVREVSLLQELKHPNVVRLLDVLMQESRLYLIFEFLSMDLKKYLDSIPSGQYMDPMLVKSYLYQILEGIYFCHRRRVLHRDLKPQNLLIDNKGVIKLADFGLARAFGVPVRVYTHEVVTLWYRAPEVLLGSPRYSTPVDVWSTGTIFAELATKKPLFHGDSEIDQLFRIFRTLGTPNNDVWPDVESLPDYKNTFPKWMEGSLSSMVKNLDKNGLDLLAKMLIYNPPKRISAREAMTHPYFDDLDKSTLPAACINGV

SEQ ID NO: 1278 - protein, 209 aa, Coffea arabica
DQYEKVEKIGEGTYGVVYKARDRLTNEMIALKKIRLEQEDEGVPSTAIREISLLKEMQHNNIVRLQDVVHSEKRIYLVFEYLDLDLKKHMDSCPELAKDPCLIKTFLYQILHGIAYCHSHRVLHRDLKPQNLLIDRRTNALKLADFGLARAFGIPVRTFTHEVVTLWYRAPEILLGSRHYSTPVDIWSVGCIFAEMVNQRPLFPVDSEI

SEQ ID NO: 1279 - protein, 337 aa, Acrosiphonia duriuscula
MPRNRDDSPDGAYLIHGRYEKIEKLGEGTYGKVYKARDSKTDQVVALKKCRLQLDAEGVPPTTIREVSLLQVLSRSNHVVKLLGVEQIEEDGKVVLYLIFEYLQHDLKKFMDFKKKEKHNPLQPELVKPYLFQLIRGMAFMHQHGVMHRDLKPQNLLVDPKTNVLKIADLGLGRVFALPCKAYTHEIVTLWYRAPEVLLGTKIYSLPVDVWSIGCIFAEMVKGIPFFPADCEIAQLFMIFQVLGTPNEEVWPGVTSLRDWHMYPQWQPMDLHTHLEGLLDHQGCDLLKKMLVYNPNKRIPAKQAMKHPYFDDLDMEVMDALENPEVLNAGMEYQENA

SEQ ID NO: 1280 - protein, 417 aa, Malus micromalus
MAAKESNSAAAAASSDGKIKRMLTHGGRYAQYNVFGNLFEVSSKYVPPIRPIGRGAYGIVCAAVNAEAREEVAIKKIGNAFDNRIDAKRTLREIKLLRHMDHENVIATKDIIRPPQKENFNDVYIVYELMDTDLHQIIRSNQPLNDDHCRYFLYQLLRGLKYVHSAGVLHRDLKPSNLFMNANCDLKIGDFGLARTTSETDFMTEYVVTRWYRAPELLLNCSEYTAAIDIWSVCCILGEIMTRKPLFPGKDYVHQLRLITELLGSPDDSSLGFLRSDNARRYVRELPQYPKRSFSLGFPNMSPSSIDLLEKMLIFDPNRRITVDEALSHPYLAPLHDINEEPVCPMPFNFDFEQPSFTEENIKELIWRESVRFNPESHFSMDHDIICCILLQTNLKTDCNDMFVDTVIVECVKGVDS

SEQ ID NO: 1281 - protein, 264 aa, Axinella corrugata
GEGTYGVVFKGRNKKTDEIVAMKKIRLESEEEGVPSTALREISLLKELQHPNIVGLNDVIMQEVKLYLIFEFLTMDLKKFMDTKTKMDMNLVKSYTYQILQGILFCHQRRVIHRDLKPQNLLIDKEGSIKIADFGLARAFGVPVRVYTHEVVTLWYRAPEILLGATKYSCPIDIWSIGCIFAEMCNKRPLFQGDSEIDQLFRIFRVLRTPNEEIWPGVTQLPDFKVTFPAWTSNNLVAQMKNLDDDGLDLLQEMLHYDPAKRIS

SEQ ID NO: 1282 - protein, 599 aa, Beta vulgaris
MGCVFGKESLAPEGRERGGRREKENLGTESGRKVDLPVADVVSGWDTGKDGENGGVELNDGGKKDEEKNGEEDGEEKREGEGKGRSQKPRGERRRTKANPRLSNPPKNVHGEQVAAGWPSWLSAVAGEAIDGWVPRRADTFEKIDKIGQGTYSNVYKARDSLTGKIVALKKVRFDNLEPESVKFMAREILILRRLDHPNVVKLEGLVTSRMSCSLYLVFEYMEHDLAGLAASPDIKFTEPQVKCYMHQLISGLEHCHNRGVLHRDIKGSNLLLDNGGILKIADFGLATFFDPNKKHPMTSRVVTLWYRAPELLLGATDYGVGIDLRSAGCILAELLAGRPIMPGRTEVEQLHKIYKLCGSPSDEYWKKSKLPNATIFKPREPYKRCIRETFRDFPPSALSLIDSLLAIDPAERKTATDALNSDFFSTEPLACDPSTLPKYPPSKEMDAKRRDDEARRLRAASKAQGDATKKTRTRDRPRAMPAPEANAELQANLDRRRIITHANAKSKSEKFPPPHQDGGLGYPLGASQHIDPSNIPPDIPYSSTSFTYSKGVGQHWSGPLVDPASAGGPRRKKKNVVEGNEPKSTGRRDISSSRARGK

SEQ ID NO: 1283 - protein, 434 aa, Beta vulgaris
MDRYKLLKELGDGTCGTVYKAVNRESYEIVAVKKMKRKFYFWEECVNLREVKSLPSIESSHIIKLKEVVRENNDLFFIFEYMQYNLYQIMKDRHRPFTEEEIRNFLTQVLQGLAHMHRNGYFHRDLKPENLLVTNDVIKIADFGLAREVSSIPPYTEYVSTRWYRAPEVLLKSSLYTPAIDMWAVGAVLAELFTSCPIFPGESETDQLYKICCVLGAPDWAVFPEAKNISQLTSISYSQMLPANLSEIIPNANWEAIDLISQLCSWDPLKRPTAEQALHHPFFHVALRVPRPIHDPFHSKPDYTKTKPNLELNLWDFDSKADDCFLGLTLAVNPGVSSLEMGPRVSGSTRQDVYFCSSFQDHPEQSVFWSLFSPCRNGATPPVDPSLSLSFSSITHPRIAVPHSGGFGLAALQPGILDGPLLVVSSPHQPSHYL

SEQ ID NO: 1284 - protein, 323 aa, Emericella nidulans
MENYQKIEKIGEGTYGVVYKARELTHPNRIVALKKIRLEAEDEGVPSTAIREISLLKEMNDPNIVRLLNIVHADGHKLYLVFEFLDLDLKKYMEALPVSEGGRGRALPDGSTLSRNLGLGDAMVKKFMAQLIEGIRFCHSHRVLHRDLKPQNLLIDRDGNLKLADFGLARAFGVPLRTYTHEVVTLWYRSPEILLGGRQYSTGVDMWSCGAIFAEMCTRKPLFPGDSEIDEIFKIFRILGTPDETIWPGVTSFPDFKPTFPKWKREDIQNVVPGLEEDGLDLLEALLEYDPARRISAKQACMHPYFQHGSSYYSGRARRNGFH

SEQ ID NO: 1285 - protein, 320 aa, Emericella nidulans
MDKSQQPSSFQQLEKLGEGTYATVFKGRNRQTGELVALKEIHLDSEEGTPSTAIREISLMKELKHESIVSLYDVIHTENKLMLVFEYMDKDLKKYMDTRGDRGQLDQATIKSFMHQLMSGIAFCHDNRVLHRDLKPQNLLINKKGQLKLGDFGLARAFGIPVNTFSNEVVTLWYRAPDVLLGSRTYNTSIDIWSAGCIMAELYTGRPLFPGTTNEDQLQKIFRLMGTPSERSWPGISQLPEYRANFHVYATQDLGLILPQIDPLGLDLLNRMLQLRPEMRIDAHGALQHPWFHDLPQLQAQLQQQQMAGYGGMMPPQQAY

SEQ ID NO: 1286 - protein, 366 aa, Emericella nidulans
MTSQRPTSSSSSLLDIVANLASPKSLLFNAHHTNPPPSLPSQRAPTMDKSQQPSSFQQLEKLGEGTYATVFKGRNRQTGELVALKEIHLDSEEGTPSTAIREISLMKELKHESIVSLYDVIHTENKLMLVFEYMDKDLKKYMDTRGDRGQLDQATIKSFMHQLMSGIAFCHDNRVLHRDLKPQNLLINKKGQLKLGDFGLARAFGIPVNTFSNEVVTLWYRAPDVLLGSRTYNTSIDIWSAGCIMAELYTGRPLFPGTTNEDQLQKIFRLMGTPSERSWPGISQLPEYRANFHVYATQDLGLILPQIDPLGLDLLNRMLQLRPEMRIDAHGALQHPWFHDLPQLQAQLQQQQMAGYGGMMPPQQAY

SEQ ID NO: 1287 - protein, 355 aa, Fusarium solani
MSRSNPPNPTGSRKISFNVSEQYDIQDVVGEGAYGVVCSAIHKPSGQKVAIKKITPFDHSMFCLRTLREMKLLRYFNHENIISILDIQKPRNYESFNEVYLIQELMETDMHRAIRTQDLSDDHCQYFIYQTLRALKAMHSANVLHRDLKPSNLLLNANCDLKVCDFGLARSAASQEDNSGFMTEYVATRWYRAPEIMLTFKEYTKAIDVWSVGCILAEMLSGKPLFPGKDYHHQLTLILDVLGTPTMEDYYGIKSRRAREYIRSLPFKKKVPFRTLFPKTSDLALDLLEKLLAFNPVKRITVEEALKHPYLEPYHDPEDEPTAPPIPEEFFDFDKHKDNLSKEQLKQLIYQEIMR

SEQ ID NO: 1288 - protein, 345 aa, Anopheles gambiae str. PEST
LSMEILNRLNRYEKIDFLGEGQFATVYKARDAETNEIVAVKKIKIGNREEAADGINRTALREIKLLHELQHENIIGLLDVFGHKSNVSLVFDFMDTDLEIIIKDPKIILTPANIKSYMIQTLRGLEYLHQHWILHRDLKPNNLLISGTGVLKIGDFGLAKFFGSPNRINTNQVVTRWYRCPELLFGARQYGIGVDIWAVGCILAELLLRVPFLPGESDLDQLTRIFQVLGTPNETNWPDVKSLPDYVQYKFYPPIPLRDIFTAASDDLIELANKMLALYPLHRCSCTEALKMAYFSNKPAPTVGPRLPMPASYNAANSKPEEKPSLKRKLLDSIDGGTVPKRLQF

SEQ ID NO: 1289 - protein, 310 aa, Kluyveromyces lactis
MTLKSTVDDYTKEKKAGEGTYAVVYLGTKKSTGRSIAVKEIKTSQFKDGLDMSALREVKFLQELKHVNVIELVDVFMANDNLNLVLEFLPADLEIIIKDTSIMFSPADIKSWILMTLRGVHHCHRNFILHRDLKPNNLLLAPDGQLKIADFGLARLMASPQEILTSNVVTRWYRAPELLFGAKHYTSAVDIWSVGVIFAELMLRIPYLPGKDDVDQINVTFRALGTPTDADWPEVSSFSNYNKIQIYPPPSREELRRRFIAATENALELISGMMIMNPKKRWDAVKCLQSQYFQELPEPTLPQDLPKLNK

SEQ ID NO: 1290 - protein, 356 aa, Gaeumannomyces graminis
MSRAANPPSNSGSRKISFNVSEQYDIQDVVGEGAYGVVCSAIHKPSGQKVAIKKITPFDHSMFCLRTLREMKLLRYFNHENIISILDIQKPRSYETFNEVYLIQELMETDMHRVIRTQDLSDDHCQYFIYQTLRALKAMHSANVLHRDLKPSNLLLNANCDLKVCDFGLARSAASQEDNSGFMTEYVATRWYRAPEIMLTFKEYTKAIDVWSVGCILAEMLSGKPLFPGKDYHHQLTLILDVLGTPTMEDYYGIKSRRAREYIRSLPFKKKVPFRTLFPQDVGSRLDLLEKLLAFNPVKRITVEEALKHPYLEPYHDPDDEPTAPPIPEEFFDFDKHKDNLSKEQLKQFIYQEIMR

SEQ ID NO: 1291 - protein, 341 aa, Sporothrix schenckii
MDNYQKLEKVGEGTYGVVYKARDLTAGGRIVALKKIRLEAEDEGVPSTAIREISLLKEMRDPNIVRLYNIVHAEGHKLYLVFEFLDLDLKKYMDSLPVSDGGRGKALPEGTGTRLHTLGLGDDIIKKFMSQLCAGIRYCHSHRILHRDLKPQNLLINKEGNLKLADFGLARAFGVPLRTYTHEVVTLWYRAPEILLGGHQYSTGVDMWSVGCIFAEMAMRKPLFPGDSEIDEIFKIFRLLGTPTEDVWPGVTTYPDFKASFPRWVQDTETPICPTLDPMGQELLELMLVYDPASRLSAKQACNHPYFDDLEKALPGTAAAAARQHTTTAAAGGAYNGSGYH

SEQ ID NO: 1292 - protein, 306 aa, Sporothrix schenckii
MDGKRQLNSFQQLEKLGEGTYATVFKGRNRHTGEFVALKEIHLDSEEGTPSTAIREISLMKELKHENIVALHDVIHTESKLMLVFEYMDGDLKKYMDTNGERGALKPMLIKSFMYQLLKGIDFCHQNRVLHRDLKPQNLLINGKGQLKLGDFGLARAFGIPVNTFSNEVVTLWYRAPDVLLGSRTYNTSIDIWSVGCIMAEMYTGRPLFPGTTNEDQMLRIFRIMGTPAEHNWPGISQFPEYKATAPRYATQDLRQILPQIDATGIDLLQRLLQLRPELRISAHDALQHPWFHDILQYQHCQQAAG

SEQ ID NO: 1293 - protein, 306 aa, Sporothrix schenckii
MDGKRQLNSFQQLEKLGEGTYATVFKGRNRHTGEFVALKEIHLDSEEGTPSTAIREISLMKELKHENIVALHDVIHTESKLMLVFEYMDGDLKKYMDTNGERGALKPMLIKSFMYQLLKGIDFCHQNRVLHRDLKPQNLLINGKGQLKLGDFGLARAFGIPVNTFSNEVVTLWYRAPDVLLGSRTYNTSIDIWSVGCIMAEMYTGRPLFPGTTNEDQMLRIFRIMGTPTEHNWPGISQFPEYKATAPRYATQDLRQILPQIDATGIDLLQRLLQLRPELRISAHDALQHPWFHDILQYQHCQQAAG

SEQ ID NO: 1294 - protein, 1104 aa, Takifugu rubripes
MFNSGSSLKSKIRQVYNEKETNELVAIKKFKDSEENEEVKETTLRELKMLRTLKQDNIVELKEAFRRRGKLYLVFEYVERNMLELLEEHPTGAPPDKVRSYIYQLIKAINWCHKNEIVHRDIKPENLLISSDDILKLCDFGFARNLSEGTDANYTEYVATRWYRSPELLLGAPYGKAVDMWSVGCILGELSDGQPLFPGESEIDQLFTIQKVLGPLPAEQMKLFYNNPRFHGIRFPSVTHPQTLERRYQGILSGLMLDLMKNLLLLNPTERYLTEQSLNHPAFQPLRQVERERPAPPASPNPPRSSKRKTHHHGENTVPTRSHSKSTSRRSNSKECSSLPRHGDLHHLGSKSFLNGNKPPPSSLSPTLHPKSQYMSQTLNRSPSSSKDLVNNNLPHLLSPKEVKGKTEFDFNLGPSPKLPDQGHGAKYSHSKPSSSRSQQQQQQLQQQQQQQLQQQQLQLQQQQQQLQQQQLQQQQQQQQQQAIRHTFLENKNNTLQSGAEKQHSRHTHSMADSAHGSMSSSSKSSASYLSLSKSHSALSDAKSVGNLSDGRLHPDDPNSNTAGLGPGARFFPTSCLDLNAPTGPPGPPGSPSARHSDRSGHSPASRSSGNIRMESSTLDSSSRHKSRHKSSAPEEAGAPELLDPGGAAMPSTHTLPSPHESYHYGLGYTSPFSSQQRPQRHSMYVRRERHRPHGVEGGMAGLPAPGQGIPMRASSLQLLSPQLQHRTTLTGHSVSSSREDCTDDMTRSEQSPKDMGHPCAPIKDSARDNTAAFHTQRSKNEAGLYHDPHGEDGASSKENRMIFTESMPRRVGSFYRVPSPRPDNSSSFHDAVGQGRVPVGPVVPVDPVAMVGHSKRQTAFDWTAAEAMVMNPLEPVKEKEKQGFFRAIKKKKKKTQLVPGNGQEHLSLQRSTKSSSHHSSRRKNRERSRDRHREREQSRDRDRERERERERDRERERERGRELERSQPLKSLRRLLHLSPSSSNQRQQSPASPAPPPDLRFQAPLPNPPQPPSKAGYPETRGHADSRGHSGVSSSSQPKSRKASYPIPGQIESSWHVSALQRAEGAQFTPEQLGIKPGQNGPTFTRASRTRIPNLNDLKETAL

SEQ ID NO: 1295 - protein, 563 aa, Physcomitrella patens
  unsure (1)..(563): unsure at all Xaa locations
MMAVALPGQLNLDETPTWGSRSVDVYEKIEHIGEGTYGQVYMAKDKSTGEVVALKKVRMDNEKEGFPITAIREIKILKKLQHANVIKLKEIVTSKGPEKEDNIKPGDASKFKGSIYMVFEYMDHDLTGLADRPGMRFSIPQIKCYMKQLLTGLHYCHVNQVLHRDIKGSNLLIDNNGILKLADFGLARSFSNDQNGQPLTNRVITLWYRPPELLLGSTKYTPAVDMWSVGCIFAELLNGKPILPGRNESEQFQKICELCGSPDEXNWPRVSQLPYYNQFKPERLMKRRVKDVFKHFDRHALELLERMLTLDPDHRISAKDALDAEYFWVEPFPCQPSSLPKYEASHEYQTKKKRQQQRQQQEEQAKRMKVLHHPAPHTRLPPIQQQPLRPGPHQPGHNLGPPIHANGMANQHNNYNRGQGASNQGRAPGGGRPPHGGPNQNGGYGGPNRGGPGGAYGGPAQPGGFAAPNMGHQGGRGGAYGGPAGGVYPAGPYGGGRGPPVGGRGQQFGGMPGGPQPPAYGGQHYMQQPTAQYVDIDGAYARASHSGFQPPSPHRPDYRQQQR

SEQ ID NO: 1296 - protein, 303 aa, Physcomitrella patens
MDQYEKVEKIGEGTYGVVYKARDRLTNETIALKKIRLEQEDEGVPSTAIREISLLKEMHHGNIVRLQDVVHSEKRLYLVFEYLDLDLKKHMDTCPDLAKDPRLIKTFLYQILRGIAYCHAHRVLHRDLKPQNLLIDRRTNALKLADFGLARAFGIPVRTFTHEVVTLWYRAPEILLGSRHYSTPVDVWSVGCIFAEMVNQRPLFPGDSEIDELFKIFRTLGTPNEEVWPGVTSLPDFKTAFPKWPPKPLSSVVPSLEPAGIDLLEVCDLSTPASEFCVVLFFFIISTFSLIVRLKQCMQSYAS

SEQ ID NO: 1297 - protein, 294 aa, Picea abies
MEQYEKVEKIGEGTYGVVYKARDRLTNETIALKKIRLEQEDEGVPSTAIREISLLKEMQHGNIVRLQDVVHSEKRLYLVFEYLDLDLKKHMDSCPELAKDPRLIKTFLYQILRGIAYCHSHRVLHRDLKPQNLLIDRKTNALKLADFGLARAFGIPVRTFTHEVVTLWYRAPEILLGSRHYSTPVDVWSVGCIFAEMVNQRPLFPGDSEIDELFKIFRVLGTPNEETWPGVTSLPDFKSAFPKWPAKDLATVVPGLEPAGIDLLSKMLCLEPSKRITARSALEHEYFKDLGFVP

SEQ ID NO: 1298 - protein, 294 aa, Pinus contorta
MEQYEKVEKIGEGTYGVVYKARDRLTNETIALKKIRLEQEDEGVPSTAIREISLLKEMQHGNIVRLQDVVHSEKRLYLVFEYLDLDLKKHMDSCPELAKDPRLIKTFLYQILRGIAYCHSHRVLHRDLKPQNLLIDRKTNALKLADFGLARAFGIPVRTFTHEVVTLWYRAPEILLGSRHYSTPVDVWSVGCIFAEMVNQRPLFPGDSEIDELFKIFRVLGTPNEETWPGVTSLPDFKSAFPKWPAKDLATVVSGLEPAGIDILSKMLCLEPSRRITARSALEHEYFKDLGFVP

SEQ ID NO: 1299 - protein, 294 aa, Chenopodium rubrum
MDQYEKVEKIGEGTYGVVYKARDKVTNETIALKKIRLEQEDEGVPSTAIREISLLKEMQHGNIVRLQDVVHSEKRLYLVFEYLDLDLKKHMDSCPDFAKDPRMIKRFLYQILRGIAYCHSHRVLHRDLKPQNLLIDRQTNALKLADFGLARAFGIPVRTFTHEVVTLWYRAPEILLGSRHYSTPVDVWSVGCIFAEMVNQKPLFPGDSEIDELFKIFRTLGTPNEETWPGVTSLPDFKSSFPKWISKDLSAVVPNLDPAGIDLLNKMLCLDPSKRITARNALEHEYFKDIGFVP

SEQ ID NO: 1300 - protein, 288 aa, Plasmodium falciparum 3D7
MEKYHGLEKIGEGTYGVVYKAQNNYGETFALKKIRLEKEDEGIPSTTIREISILKELKHSNIVKLYDVIHTKKRLVLVFEHLDQDLKKLLDVCEGGLESVTAKSFLLQLLNGIAYCHDRRVLHRDLKPQNLLINREGELKIADFGLARAFGIPVRKYTHEVVTLWYRAPDVLMGSKKYSTTIDIWSVGCIFAEMVNGTPLFPGVSEADQLMRIFRILGTPNSKNWPNVTELPKYDPNFTVYEPLPWESFLKGLDESGIDLLSKMLKLDPNQRITAKQALEHAYFKENN

SEQ ID NO: 1301 - protein, 324 aa, Plasmodium falciparum 3D7
MENNSTERYIFKPNFLGEGSYGKVYKAYDTILKKEVAIKKMKLNKISNYIDDCGINFVLLREIKIMKEIKHKNIMSALDLYCEKDYINLVMEIMDYDLSKIINRKIFLTDSQKKCILLQILNGLNVLHKYYFMHRDLSPANIFINKKGEVKLADFGLCTKYGYDMYSDKLFRDKYKKNLNLTSKVVTLWYRAPELLLGSNKYNSSIDMWSFGCIFAELLLQKALFPGENEIDQLGKIFFLLGTPNENNWPEALCLPLYTEFTKATKKDFKTYFKIDDDDCIDLLTSFLKLNAHERISAEDAMKHRYFFNDPLPCDISQLPFNDL

SEQ ID NO: 1302 - protein, 368 aa, Prunus armeniaca
MATLVEPPDGIRQRGKHYYSMWQTLFEVDTKYVPIKPIGRGAYGIVCSSINRATNEKVAIKKINNVFENRIDALRTLRELKLLRHIRHENVIALKDVMMPIHRTSFKDVYFVYELMDTDLHQIIKSSQPLSSDHCKYFLFQLLRGLKYLHSANILHRDLKPGNLLINANCDLKICDFGLARTSGGTGQFMTEYVVTRWYRAPELLLCCDNYGTSIDVWSVGCIFAEILGRKPIFPGTECLNQLKLIINVLGSQHEPDLAFIDNPKARKYIKSLPYSRGTHFSRLYPQADPLAIDLLQRMLVFDPTKRISVTEALQHPYMSGLYDPRCNPPAQVPINLDIDENLAEPMIREMMWHEMLHYHPEAAFVNA

SEQ ID NO: 1303 - protein, 412 aa, Medicago sativa subsp. X varia
MTELDPSKKVADRYLKREVLGEGTYGVVYKAIDTQTGQTVAIKKIRIGKQKEGVNFTALREIKLLKELKDPNIIELIDCFPHKGNLHLVFEFMETDLEAVIRDRNIFLAPGDIKSYLQMTLKGLAHCHKKWILHRDMKPNNLLIGPNGQLKLADFGLARIFGSPDRRFTHQVFARWYRAPELLFGTKQYGPGVDVWAAACIFAELLLRRPFLQGSSDIDQLGKIFAAFGTPSPSQWPDMVYLPDYVEYQFVPAPPLRSLFPMATDDALDLLSKMFTYDPKDRISVQQALEHRYFTCPPQPTDPVKLPRPAPKKEIKPSDLNPPEGPTVLSPPRKTRRVMPGRDGLEGNSLQGDRVDDNHGNLKQTGGDNTGKNEPAPMSLDFSVFGLKPPNRPTINSADRSHLKRKLDLEFQ

SEQ ID NO: 1304 - protein, 391 aa, Arabidopsis thaliana
MPEQPKKVADRYLKQEVLGQGTYGVVFKATDTKTEQTVAIKKIRLGKQREGVNITALREIKMLKELKHPHIILLIDAFPHKENLHLVFEFMETDLEAVIRDSNIFLSPADIKSYLLMTFKGLAYCHDKWVLHRDMKPNNLLIGVDGQLKLADFGLARIFGSPNRKFTHQVFARWYRAPELLFGAKQYGAAVDVWAVACIFAELLLRRPFLQGNSDIDQLSKIFAAFGTPKADQWPDLTKLPDYVEYQFVPAPSLRSLFPAVSDDALDLLSKMFTYDPKARISIKQALEHRYFTSAPAPTDPAKLPKPVPKQDGKSSYGKHEAITVQSPPRKLRRVMPERGRVDSLKSHVDKDQQAPMSLDFTILAERPPNRPTITSADRSHLKRKLDLEFQ

SEQ ID NO: 1305 - protein, 398 aa, Arabidopsis thaliana
MEQPKKVADRYLKREVLGQGTYGVVFKATDTKNGETVAIKKIRLGKEKEGVNVTALREIKLLKELKHPHIIELIDAFPHKENLHIVFEFMETDLEAVIRDRNLYLSPGDVKSYLQMILKGLEYCHGKWVLHRDMKPNNLLIGPNGQLKLADFGLARIFGSPGRKFTHQVFARWYRAPELLFGAKQYDGAVDVWAAGCIFAELLLRRPFLQGNSDIDQLSKIFAAFGTPKADQWPDMICLPDYVEYQFVPAPSLRSLLPTVSEDALDLLSKMFTYDPKSRISIQQALKHRYFTSAPSPTDPLKLPRPVSKQDAKSSDSKLEAIKVLSPAHKFRRVMPDRGKSGNGFKDQSVDVMRQASHDGQAPMSLDFTILAERPPNRPTITSADRSHLKRKLDLEFL

SEQ ID NO: 1306 - protein, 348 aa, Arabidopsis thaliana
MSKSGDNQPVDRYLRRQILGEGTYGVVYKATDTKTGKTVAVKKIRLGNQKEGVNFTALREIKLLKELNHPHIVELIDAFPHDGSLHLVFEYMQTDLEAVIRDRNIFLSPGDIKSYMLMTLKGLAYCHKKWVLHRDMKPNNLLIGENGLLKLADFGLARLFGSPNRRFTHQVFATWYRAPELLFGSRQYGAGVDVWAAGCIFAELLLRRPFLPGSTEIDQLGKIFQAFGTPVPSQWSDMIYLPDYMEFSYTPAPPLRTIFPMASDDALDLLAKMFIYDPRQRITIQQALDHRYFSSSPSPTEPGKLQIPASKGDALEPKASEQNQHGNSPAVLSPPGKMRRVMGPEGFT

SEQ ID NO: 1307 - protein, 294 aa, Brassica napus
MDQYEKVEKIGEGTYGVVYKARDKVTNETIALKKIRLEQEDEGVPSTAIREISLLKEMQHSNIVKLQDVVHSEKRLYLVFEYLDLDLKKHMDSSPDFSKDLHMIKRYVYQILRGIAYCHSHRVLHRDLKPQNLLIDRRTNSLKLADFGLARAFGIPVRTFTHEVVTLWYRAPEILLGSHHYSTPVDIWSVGCIFAEMISQKPLFPGDSEIDQLFKIFRIMGTPTEDTWPGVTSLPDYKSAFPKWKPTDLESFVPNLDPNGIDLLSKMLLMDPTKRINARAALEHDYFKDIGVMP

SEQ ID NO: 1308 - protein, 203 aa, Isochrysis galbana
GEGTYGVVYKAQDTEDPQGATVALKKIWLDDRDEGVPVTTLREVALLRNLDHVNIVRMREFVTIPPRIYLVFEYLDHDLKACLDTKFRSGMPAPLVKSCALQILRGLAFCHSHRILHRDLKPQNVLIDNAGIVKLADFGLARASLLLNSQLYTNEVVTLWYRAPELLLGTQNYINSVDVWAAGCIFTELSCRMPLFPGDSEIE

SEQ ID NO: 1309 - protein, 428 aa, Glycine max
MTLSHAPLFAFTFISDMDHSKKVADRYLKREVLGEGTYGVVYKAIDTHTGQTVAIKKIRLGKRKEGVNFTALREIKLLKELKDPNIVELIDAFPHKGNLHLVFEFMETDLEAVIRDRNIFLSPSDTKSYLQMTLKGLAYCHKKWVLHRDMKPNNLLIGSNGQLKLADFGLARMFGSPDRRFTHQVFARWYRAPELLFGAKQYGPGVDVWAAGCIFAELLLRRPFLQGTSDIDQLGKIFSAFGIPTAPQWPDMVYLPDYVEYQYVLAPPLRSLFPMATDDALDLLSKMFTYDPKTRISVHQALEHRYFSSAPLPSDPDKLPRPAPKRESRVSDFNSQEGPTILSPPRKSRRVMPGRDGFEGNSLQADKVDASFGDFRQTTDDNTGKNESAPMSVDFSIFGLKPPNRPTINSADRSYLKRKLDLEFQQPE

SEQ ID NO: 1310 - protein, 436 aa, Glycine max
  unsure (1)..(436): unsure at all Xaa locations
MSDMDPSKKVADRYLKREVLGEGTYGVVYKAIDTHTGQTVAIKKIRLGKQKEGVNFTALREIKLLKELKDPNIVELIDAFPHKGNLHLVFEFMETDLEAVIRDRNIFLSPSDTKSYLQMTLKGLAYCHKKWVLHRDMKPNNLLIGSNGQLKLADFGLARMFGSPDRRFTHQVFARLXRAMEGLFVAQXXNPGVDVWAAGCIFAELLLRRPFLQGTSDIDQLGKIFSAFGTPTASQWPDMVYLPDYVEYQYVPAPPLRSLFPMVTDDALDLLSKMFTYDPKARISVQQALEHRYFSSAPLPSDPDKLPRPAPKRESRTSDFNLQEGPTVLSPPRKSRRVMPGRDGFEGSSLQADKVDASFGDFRQTTDDNTGKNESAPMSVEYYILRLKPPNRPTINSADRSYFQSKLDLRKKIKNLYPPLPLVPPCTFLFCTFSKN

SEQ ID NO: 1311 - protein, 397 aa, Glycine max
  unsure (1)..(397): unsure at all Xaa locations
MSDMDPSKKVADRYLKREVLGEGTYGVVYKAIDTHTGQTVAIKKIRLGKQKEGVNFTALREIKLLKELKDPNIVELIDAFPHKGNLHLVFEFMETDLEAVIRDRNIFLSPSDTKSYLQMTLKGLAYCHKKWVLHRDMKPNNLLIGSNGQLKLADFGLARMFGSPDRRFTHQVFARWYRAPELLFGAKQYGPGVVGSSAGCIFAELLLRRPFLQGTSDIDQLGKIFSAFGTPTASQWPDMVYLPDYVEYQYVPAPPLRSLFPMVTDDALDLLSKMFTYDPKARISVQQALEHRYFSSAPLPSDPDKLPRPAPKRESRTSDFNLQEGPTVLSPPRKSRRVMPGRDGFEGSSLQADKVDASFGDXXTDDNTVWVISTDDNXSADRSYLKRKLDLEFQQPE

SEQ ID NO: 1312 - protein, 229 aa, Glycine max
MAELDLSKKVADRYLKREVLGEGTYGVVYKAIDTKTGQTVAIKKIRLGKQKEGVNFTALREIKLLKELKDPNIIELIDAFPHKGNLHLVFEFMETDLEAVIRDRNIVLSPSDIKSYLQMTLKGLAICHKKWVLHRDMKPNNLLIGSNGQLKLADFGLARVFGSPDRRFTHQVFARWYRAPELLFGTKQYGPGVDVWAAACIFAELLLRRPFLHGSSDIDQLGKNFRAFG

SEQ ID NO: 1313 - protein, 291 aa, Medicago sativa
GENVEKIGEGTYGVVYKARDRVTNETIALKKIRLEQEDEGVPSTAIREISLLKEMQHRNIVRLQDVVHSDKRLYLVFEYLDLDLKKHMDSSPEFIKDPRQVKMFLYQMLCGIAYCHSHRVLHRDLKPQNLLIDRRTNSLKLADFGLARAFGIPVRTFTHEVVTLWYRAPEILLGSRHYSTPVDVWSVGCIFAEMANRRPLSPGDSEIDELFKIFRILGTPNEDTWPGVTSLPDFKSTFPRWPSKDLATVVPNLEPAGLDLLNSMLCLDPTKRITARSAVEHEYFKDIKFVP

SEQ ID NO: 1314 - protein, 294 aa, Medicago sativa
MEQYEKVEKIGEGTYGVVYKARDRATNETIALKKIRLEQEDEGVPSTAIREISLLKEMQHRNIVRLQDVVHSEKRLYLVFEYLDLDLKKFMDSSPEFAKDQRQIKMFLYQILCGIAYCHSHRVLHRDLKPQNLLIDRSSNAVKLADFGLARAFGIPVRTFTHEVVTLWYRAPEILLGSRHYSTPVDVWSVGCIFAEMINQRPLFPGDSEIDELFKIFRITGTPNEETWPGVTSLPDFKSAFPKWPAKDLATQVPNLEPAGLDLLSSTCRLDPTRRITARGALEHEYFKDIKFVP

SEQ ID NO: 1315 - protein, 280 aa, Phaseolus vulgaris
GEGTYGVVYKARDRVTNEAIALKKIRLEQEDEGVPSTAIREISLLKEMQHRNIVRLQDVVHSGKRLYLVFEYLDLDLKKHMDSSPEFAKDLRQVKMFLYQILCGIAYCHSHRVLHRDLKPQNLLIDRSTNSLKLADFGLARAFGIPVRTFTHEVVTLWYRAPEILLGSPRYSTPVDIWSVGCIFAEMVNQRPLFPGDSEIDELFKIFRILGTPNEDTWPGVTSLPDFKSAFPKWQPKDLKTVVPNLDPAGLDLLSRMLHLDPSKRITGRSALEHEYSERH

SEQ ID NO: 1316 - protein, 294 aa, Pisum sativum
MEQYEKVEKIGEGTYGVVYKARDRVTNETIALKKIRLEQEDEGVPSTAIREISLLKEMQHRNIVRLQDVVHSEKRLYLVFEYLDLDLKKHMDSSPEFSKDQRQVKMFLYQILCGIAYCHSHRVLHRDLKPQNLLIDRSSNALKLADFGLARAFGIPVRTFTHEVVTLWYRAPEILLGSRHYSTPVDVWSVGCIFAEMINQRPLFPGDSEIDELFKIFRITGTPNEDTWPGVTSLPDFKSAFPKWPSKDLATLVPSLEPSGLDLLSSMLRLDPSRRITARGALEHEYFKDIKFVP

SEQ ID NO: 1317 - protein, 293 aa, Oryza sativa (japonica cultivar-group)
MEQYEEEKIGEGTYGVVYKARDKVTNETIALKKIRLEQEDEGVPSTAIREISLLKEMHHRNIVRLHDVIHSEKRIGLVFEYLDLDLKKFMDSCPEFAKNPTLIKSYLYQILRGVAYCHSHRVLHRDLKPQNLLIDRRTNTLKLADFGLARAFGIPVRTFTHEVVTLWYRAPEILLGSRQYSTPVDMWSVGCIFAEMVNQKPLFPGDSEIDELFKIFRVLGTPNEQSWPGVSSLPDYKSAFPKWQAQALATIVPTLDPAGLDLLSKMLRYEPNKRITARQALEHEYFKDLEMER

SEQ ID NO: 1318 - protein, 294 aa, Daucus carota
MDQYEKVEKIGEGTYGVVYKARDRVTNETIALKKIRLEQEDEGVPSTAIREISLLKEMQHENIVRLQDVVHSEKRLYLVFEYLDLDLKKHMDSCPEFAKDPRLIKMFLYQILRGIAYCHSHRVLHRDLKPQNLLIDRRTNALKLADFGLARAFGIPVRTFTHEVVTLWYRAPEILLGSRHYSTPVDVWSVGCIFAEMVNQQPLFPGDSEIDELFKIFRIVGTPNEDTWPGVTALPDFKSAFPKWPSKELGNVVPNLDVAGLNLLKKMLCLDPSRRITARSALEHEYFKDIGIVP

SEQ ID NO: 1319 - protein, 441 aa, Cryptococcus neoformans var. neoformans
MDNTPRHLFQTPNNVYILQQPWQFVKELGQGAYGCVSSARNSSTGETCAVKKVTNVFQKKILTKRCLRELRLLHHFRGHKNITCLYDMDIVFDPPGSGQFREVYLYEELMEADLHAIIRSGQPLSDAHFQSFLYQTLCGLKYIHSANVLHRDLKPGNLLVNADCELKICDFGLARGFQPGAVQTDQGQAGFMTEYVATRWYRAPEIMLSFANYTSSIDMWSVGCILAELLGGKPIFKGEDYVDQLNKILNLLGTPTEDTLRRVGSPRAQDYIRSLPIKPRVKFGTLYPNASPLALDLLSKLLTFDPAKRYGCEEALEHPYLAVWHDPADEPLCEVPFDFSFEEEDSVSGMRDLILEEVRSFRYLVRQQTMPPVRKDSHELPPAPPAPQHPGAGVGPAFHEKRTAKAIWRNILGLHWRNSWRGRNYHRIIFVESVTVIGKHR

SEQ ID NO: 1320 - protein, 365 aa, Cryptococcus neoformans var. neoformans
MADFVKLSIFGTVFEVTTRYVDLQPVGMGAFGLVCSAKDQLSGTSVAIKKIMKPFSTPVLSKRTYRELKLLKHLRHENIISLSDIFISPLEDIYFVTELLGTDLHRLLTSRPLEKQFIQYFLYQILRGLKYVHSAGVVHRDLKPSNILVNENCDLKICDFGLARIQDPQMTGYVSTRYYRAPEIMLTWQKYDVAGDIWSTGCIFAEMLEGKPLFPGKDHVNQFSIITELLGTPPDDVIQTIASENTIRFVQSLPKREKVPFSTKFPNADPVSLDLLEKMLVFDPRTRISAAEGLAHEYLAPYHDPTDEPVAAEVFDWSFNDADLPVDTWKVMMYSEILDFHNLGDISQNEAEGPVTGEVPAAPAS

SEQ ID NO: 1321 - protein, 294 aa, Petroselinum crispum
MDQYEKVEKIGEGTYGVVYKARDRVTNETIALKKIRLEQEDEGVPSTAIREISLLKEMQHGNIVRLQDVVHSEKRLYLVFEYLDLDLKKHMDSCPEFAKDPRLIKMFLYQILRGIAYCHSHRVLHRDLKPQNLLIDRRTNALKLADFGLARAFGIPVRTFTHEVVTLWYRAPEILLGSRHYSTPVDVWSVGCIFAEMVNQRPLFPGDSEIDELFKIFRITGTPNEDTWPGVTSLPDFKSAFPKWPSKELETVVPNLDSAGLNLLKKMLCLDPSRRITARIALEHEYFKDIGIVP

SEQ ID NO: 1322 - protein, 355 aa, Botryotinia fuckeliana
MTARAPNPASGSRKISFNVSEQYDIQDVVGEGAYGVVCSALHKPSGQKVAIKKITPFDHSMFCLRTLREMKLLRYFNHENIISILDIQKPRNYESFTEVYLIQELMETDMHRVIRTQDLSDDHCQYFIYQTLRALKAMHSANVLHRDLKPSNLLLNANCDLKVCDFGLARSAASQEDNSGFMTEYVATRWYRAPEIMLTFKEYTKAIDVWSVGCILAEMLSGKPLFPGKDYHHQLTLILDVLGTPTMEDYYGIKSRRAREYIRSLPFKKKVPFKTMFPKTSDLALDLLEKLLAFNPVKRITVEEALKHPYLEPYHDPEDEPTANPIPEEFFDFDKNKDNLTKEQLKKLIYDEIMR

SEQ ID NO: 1323 - protein, 394 aa, Capsicum annuum
MDGPAQQTDTVMAEAAAAQQPAPPSQPVAGIDNIPATLSHGGRFIQYNIFGNVFEVTAKYKPPIMPIGKGAYGIVCSALNSETNEHVATKKIANAFDNKIDAKRTLREIKLLRHMDHENIVAIRDIIPPPQREAFNDVYIAYELMDTDLHQIIRSNQGLSEEHCQYFLYQILRGLKYIHSANVLHRDLKPRNLLLNANCDLKICDFGLARVTSETDFMTEYVVTRWYRPPELLLNSSDYTAAIDVWSVGCIFMELMDRKPLFPGRDHVQQLRLLMELIGTPSEAEMEFLNENAKRYIRQLPLYRRQSFVEKFPHVNPAAIDLVEKMLTFDPRRRLTVEDALAHPYLTSLHDISDEPVCTTPFSFDFEQHALTEEQMKELIYREGLAFNPEYQHM

SEQ ID NO: 1324 - protein, 375 aa, Capsicum annuum
MVDANMGAAGGQFPEFPNIVTHGGQYVQYDIFGNFFEITTKYRPPIMPIGRGAYGIVCSVFNAELNEMVAVKKIANAFDNYMDAKRTLREIKLLRHLDHENVIGLRDVIPPPLRREFSDVYIATELMDTDLHQIIRSNQGLSEDHCQYFMYQLLRGLKYIHSANVIHRDLKPSNLLLNANCDLKICDFGLARPNLENENMTEYVVTRWYRAPELLLNSSDYTEAIDVWSVGCIFMELMNRKPLFAGKDHVHQIRLLTELLGTPTESDLSFLRNEDAKRYIRQLPQHPRQQLAKVFPHVNSLAIELVDKMLTLNPTGRITVEEALAHPYLAKLHDAADEPVCPVPFSFDFEQQGIGEEQIKDMIYQEALVLNPEYA

SEQ ID NO: 1325 - protein, 294 aa, Lycopersicon esculentum
MDQYEKVEKIGEGTYGVVYKARDRVTNETIALKKIRLEQEDEGVPSTAIREISLLKEMQHANIVRLQDVVHSEKRLYLVFEYLDLDLKKHMDSCPEFSKDPRLVKMFLYQILRGIAYCHSHRVLHRDLKPQNLLIDRRTNALKLADFGLARAFGIPVRTFTHEVVTLWYRAPEILLGSRHYSTPVDVWSVGCIFAEMVNQPPLFPGDSEIDELFKIFRVLGTPNEDTWPGVTSLPDYKSAFPKWPPKDLAIIVPNVDGAGLDLLGKMLSLDPSKRITARNALEHEYFKDIGYVP

SEQ ID NO: 1326 - protein, 294 aa, Lycopersicon esculentum
MDQYEKVEKIGEGTYGVVYKARDRVTNETIALKKIRLEQEDEGVPSTAIREISLLKEMQHGNIVRLQDVVHSEKRLYLVFEYLDLDLKKHMDSCPEFSKDPRLVKMFLYQILRGIAYCHSHRVLHRDLKPQNLLIDRRTNVLKLADFGLARAFGIPVRTFTHEVVTLWYRAPEILLGSRHYSTPVDVWSVGCIFAEMVNQRPLFPGDSEIDELFKIFRVVGTPNEDTWPGVTSLPDFKSAFPKWPSKDLGTVVPNLGAAGLDLIGKMLTLDPSKRITARSALEHEYFKDIGFVP

SEQ ID NO: 1327 - protein, 294 aa, Nicotiana tabacum
MDQYEKVEKIGEGTYGVVYKARDRVTNETIALKKIRLEQEDEGVPSTAIREISLLKEMQHANIVRLQDVVHSEKRLYLVFEYLDLDLKKHMDSSPEFSKDPRLVKMFLYQILRGIAYCHSHRVLHRDLKPQNLLIDRRTNALKLADFGLARAFGIPVRTFTHEVVTLWYRAPEILLGSRHYSTPVDVWSVGCIFAEMVTQRPLFPGDSEIDELFKIFRVMGTPNEDTWPGVTTLPDFKSAFPKWPSKDLATIVPNLDGAGLDLLDKMLRLDPSKRITARNALEHEYFKDIGYVP

SEQ ID NO: 1328 - protein, 294 aa, Nicotiana tabacum
MDQYEKVEKIGEGTYGVVYKARDRVTNETIALKKIRLEQEDEGVPSTAIREISLLKEMQHANIVRLQDVVHSEKRLYLVFEYLDLDLKKHMDSSPEFSEDPRLVKMFLYQILRGIAYCHSHRVLHRDLKPQNLLIDRRTNALKLADFGLARAFGIPVRTFTHEVVTLWYRAPEILLGSRHYSTPVDVWSVGCIFAEMVTQRPLFPGDSEIDELFKIFRVMGTPNEDTWPGVTTLPDFKSAFPKWPSKDLATIVPNLDGAGLDLLDKMLRLDPSKRITARNALEHEYFKDIGYVP

SEQ ID NO: 1329 - protein, 294 aa, Nicotiana tabacum
MDQYEKVEKIGEGTYGVVYKARDRVTNETIALKKIRLEQEDEGVPSTAIREISLLKEMQHANIVRLQDVVHSEKRLYLVFEYLDLDLKKHMDSSPEFSKDPRLVKMFLYQILRGIAYCHSHRVLHRDLKPQNLLIDRRTNALKLADFGLARAFGIPVRTFTHEVVTLWYRAPEILLGTRHYSTPVDVWSVGCIFAEMVTQRPLFPGDSEIDELFKIFRVMGTPNEDTWPGVTTLPDFKSAFPKWPSKDLATIVPNLDGAGLDLLDKTSRLDPSKRITARNALEHEYFKDIGYVP

SEQ ID NO: 1330 - protein, 293 aa, Nicotiana tabacum
MDQYEKVEKIGEGTYGVVYKARDRVTNETIALKKIRLEQEDEGVPSTAIREISLLKEMQHANIVRLQDVVHSEKRLYLVFEYLDLDLKNTWITTPEFSEDPRLVKMFLYQILRGIAYCHSHRVLHRDLKPQNLLIDRRTNALKLADFGLARAFGIPVRTFTHEVVTLWYRAPEILLGSRHYSTPVDVWSVGCIFAEMVTQRPLFPGDSEIDELSRFRVMGTPNEDTWPGVTTLPDFKSAFPKWPSKDLATIVPNLDGAGLDLLDKIVRLDPSKRITARNALEHEYFKDIGYVP

SEQ ID NO: 1331 - protein, 393 aa, Nicotiana benthamiana
MDGSGQQSDTMMSDAGAEQPPPAAQPVAGMDNIPATLSHGGRFIQYNIFGNIFEVTAKYKPPILPIGRGAYGIVCSALNSETIENVAIKKIANAFDNKIDAKRTLREIKLLRHMDHENIVAIRDIIPPPQREAFNDVYIAYELMDTDLHQIIRSNQGLSEEHCQYFLYQILRGLKYIHSANVLHRDLKPSNLLLNANCDLKICDFGLARVTSETDFMTEYVVTRWYRPPELLLNSSDYTAAIDVWSVGCIFMELMDRKPLFPGRDHVHQLRLIMELIGTPSEAEMEFLNENAKRYIRQLPLYRRQSFTEKFPHVHPDAIDLVETMLTFDPRRRITVEGALAHPYLNSLHDISDEPICMTPFSFDFEQHALTEEQMKELIYRESLAFNPEYQHM

SEQ ID NO: 1332 - protein, 376 aa, Nicotiana benthamiana
MADANMGGGGGGQFPDFPSVLTHGGQYVQYDIFGNFFEITTKYRPPIMPIGRGAYGIVCSVLNTELNEMVAVKKIANAFDNYMDAKRTLREIKLLRHLDHENVIGLRDVIPPPLRREFSDVYIATELMDTDLHQIIRSNQGLSEDHCQYFMYQLLRGLKYIHSANVLHRDLKPSNLLLNANCDLKICDFGLARPNIENENMTEYVVTRWYRAPELLLNSSDYTAAIDVWSVGCIFMELMNRKPLFAGKDHVHQIRLLTELLGTPTEADLGFLQNEDAKRYIRQLPQHPRQQLANVFPHVNPLAIDLVDKMLTLDPTRRITVEEALDHPYLAKLHDAGDEPICPVPSSFDFEQQGIGEEQIKDMIYQEALSLNPEYA

SEQ ID NO: 1333 - protein, 307 aa, Petunia x hybrida
MDQYEKVEKIGEGTYGVVYKARDRVTNETIALKKIRLEQEDEGVPSTAIREISLLKEMQHANIVRLQDVVHTVKSDCILSFEYLDLDLKKHMDSSPEFSKDPRLVKMFLYQILRGIAYCHSHRVLHRVLHRDLKPQNLLIGRRTNALKLADFGLARAFGIPVRTFTHEVVTLWYRAPEILLGSRHYSTPVDVWSVGCIFAEMVTQRPLFPGDSEIDELFKIFRVMGTPNEDTWPGVTTLPDFKSALPKWPSKDLATIVPNLDGAGLDLLDKTVRLDPSKRITARNALEHEYFKDIGYVFRSKGSSRV

SEQ ID NO: 1334 - protein, 365 aa, Ipomoea batatas
MVGGGDFLAVQTHGGQYVQYDIFGNLFEVTSKYAPPITPIGRGAYGIVCSALNAETNEMVAIKKIADAFDNYMDAKRTLREIKLLRHLEHENVIAIKDVIPPPLRREFNDVYIATELMDTDLHQIIRSNQGLSEEHCQYFLYQILRGLKYIHSANVIHRDLKPSNLLLNSNCDLKICDFGLARTNLDNEFMTEYVVTRWYRAPELLLNSSDYTAAIDVWSVGCIFMELMNRKPLFQGKDHVHQMRLITELLGTPTDSDLGSIQNENARRYIRQLPLRPRQQLANGFPHVHPLAIDLMDKMLTFNPSKRITVEEALAHPYLAQLHDKSDEPICPVPFTDFEKQAYGEEQIKDMIYQEALAMNPGYA

SEQ ID NO: 1335 - protein, 302 aa, Antirrhinum majus
MVSSHRSLMEQYEKVEKIGEGTYGVVYKARDRVTNETIALKKIRLEQEDEGVPSTAIREISLLKEMQHGNIVRLQDVVHSEKRLYLVFEYLDLDLKKHMDSCPEFSQDPRLVKMFLYQILRGIAYCHSHRVLHRDLKPQNLLIDRRTNALKLADFGLARAFGIPVRTFTHEVVTLWYRAPEILLGSRHYSTPVDVWSVGCIFAEMVNQRPLFPGDSEIDELFKIFRVMGTPNEETWPGVTSLPDFKSAFPKWPAKELAAVVPNLDASGLDLLDKMLRLDPSKRITARNALQHEYFKDIGFVP

SEQ ID NO: 1336 - protein, 294 aa, Antirrhinum majus
MEQYEKVEKIGEGTYGVVYKARDRVTNETIALKKIRLEQEDEGVPSTAIREISLLKEMQHGNIVRLQDVVHSEKRLYLVFEYLDLDLKKHMDSCPEFSQDPRLVKMFLYQILRGIAYCHSHRVLHRDLKPQNLLIDRRTNALKLADFGLARAFGIPVRTFTHEVVTLWYRAPEILLGSRHYSTPVDVWSVGCIFAEMVNQRPLFPGDSEIDELFKIFRVMGTPNEETWPGVTSLPDFKSAFPKWPAKELAAVVPNLDASGLDLLDKMLRLDPSKRITARNALQHEYFKDIGFVP

SEQ ID NO: 1337 - protein, 280 aa, Antirrhinum majus
AYGVVYKARDIETNEDIALKKIRLEQEDEGVPSTAIREISLLKEMHHENIVNLKDVVHREKRLYLVFEYLDLDLKKHMDSCPEFSQDLHMVKMFLCQILRGVAYCHSHRVLHRDLKPQNLLIDRGSNTIKLADFGLARAFGIPVRTFTHEVVTLWYRAPEVLLGSRHYSTPVDVWSVGCIFAEMVNQKPLFPGDSEIDELHKIFRIIGTPNEDIWPGVTSLPDFKSSFPKWPPKELATIVPNLGATGLDLLCKMLQLDPSKRITAKKALEHEYFKDIVLP

SEQ ID NO: 1338 - protein, 294 aa, Helianthus annuus
MEQYEKVEKIGEGTYGVVYKARDKVTNETIALKKIRLEQEDEGVPSTAIREISLLKEMQHGNIVRLQDVVHSDKRLYLVFEYLDLDLKKHMDSCPEFSKDPRLVKTFLYQILRGIAYCHSHRVLHRDLKPQNLLIDRRTNALKLADFGLARAFGIPVRTFTHEVVTLWYRAPEILLGSRHYSTPVDVWSVGCIFAEMVNQRPLFPGDSEIDELFKIFRIMGTPNEETWPGVTSLPDFKSAFPKWSSKDLATVVPNLEKTGLDLLRKMLCLDPSKRITARTALEHEYFKDIGFVP

SEQ ID NO: 1339 - protein, 294 aa, Helianthus tuberosus
MEQYEKVEKIGEGTYGVVYKARDKVTNETIALKKIRLEQEDEGVPSTAIREISLLKEMQHGNIVRLQDVVHSDKRLYLVFEYLDLDLKKHMDSCPEFSKDPRLVKTFLYQILRGIAYCHSHRVLHRDLKPQNLLIDRRTNALKLADFGLARAFGIPVRTFTHEVVTLWYRAPEILLGSRHYSTPVDVWSVGCIFAEMVNQRPLFPGDSEIDELFKIFRIMGTPNEETWPGVTSLPDFKSAFPKWSSKDLATVVPNLEKAGLDLLCKMLWLDPSKRITARTALEHEYFKDIGFVP

SEQ ID NO: 1340 - protein, 362 aa, Dictyostelium discoideum
MDKYMIEALIGEGTYGVVSRATVKATGQIVAIKKIRKILIQNQTDDGINFSAIREIKILQELKHDNVVNLLDIFAHKSNVYLVFELMQWDLQEVIEDKSIILKPADIKSYMKMLLQGIEACHRNWVLHRDLKPNNLLMSINGDLKLADFGLARQYGSPNKVFSPQAVTIFYRAPELLFGAKSYGPSVDIWSIGCIFAELMLRTPYLPGTGEIDQLRKICSALGTPNESNWPGVTCLPNYIKFTDHPATPFKQLFTAASDEAIDLISKMLLFNPSNRISAADALNHPYFTSGVKHTNPADLPVPFAKKASLLQQRQVLAQVQQQLLQKQQQQQQQQQQQIQSQPEPIQGDNVEQTQQAQQGKK

SEQ ID NO: 1341 - protein, 362 aa, Dictyostelium discoideum
MDKYNIEALIGEGTYGVVSRATVKATGQIVAIKKIRKILIQNQTDDGINFSAIREIKILQELKHDNVVNLLDIFAHKSNVYLVFELMQWDLQEVIEDKSIILKPADIKSYMKMLLQGIEACHRNWVLHRDLKPNNLLMSINGDLKLADFGLARQYGSPNKVFSPQAVTIFYRAPELLFGAKSYGPSVDIWSIGCIFAELMLRTPYLPGTGEIDQLRKICSALGTPNESNWPGVTCLPNYIKFTDHPATPFKQLFTAASDEAIDLISKMLLFNPSNRISAADALNHPYFTSGVKHTNPADLPVPFAKKASLLQQRQVLAQVQQQLLQKQQQQQQQQQQQIQSQPEPIQVDNVEQTQQAQQVKK

SEQ ID NO: 1342 - protein, 369 aa, Avena sativa
MDGAPVAEFRPTMTHGGRFLLYNIFGNQFEITSKYQPPIMPIGRGAYGIVCSVMNFETREMVAIKKIANAFDNNMDAKRTLREIKLLRHLDHENIVGLRDVIPPSIPQSFNDVYIATELMDTDLHHIIRSNQELSEEHCQYFLYQLLRGLKYIHSANVIHRDLKPSNLLLNANCDLKICDFGLARPSSESDMMTEYVVTRWYRAPELLLNSTDYSAAIDVWSVGCIFMELINRAPLFPGRDHMHQMRLITEVIGTPTDDDLGFIRNEDARRYMRHLPQFPRRPFPGQFPKVQPAALDLIERMLTFNPLQRITVEEALEHPYLERLHDVADEPICTDPFSFDFEQHPLTEDQMKQLIFNEALELNPNFRY

SEQ ID NO: 1343 - protein, 308 aa, Sorghum bicolor
MEINIVDKYEKLEKVGEGTYGKVYKAQDKATGQLVALKKTRLEMDEEGIPPTALREISLLNLLSHSIYVVRLLAVEQAAKNGKPVLYLVFEFLDTDLKKYLDVYRRGPAARPLPATLIKNFLYQLCKGVAHCHGHGVLHRDLKPQNLLVDKDKGILKIADLGLGRAFTVPMKSYTHEIVTLWYRAPEVLLGATHYSTGVDMWSVGCIFAEMARRQALFPGDSELQQLLHIFRLLGTPSEEQWPGVSELRDWHEFPQWKPQSLARVVPTLEPEGVDLLSKMLQLDPSNRISAIAAMEHPYFDSLDKSQF

SEQ ID NO: 1344 - protein, 285 aa, Triticum aestivum
  unsure (1)..(285): unsure at all Xaa locations
MASGGGDDAGEKRVTDRYLKREVLGEGTYGVXVFKAIDTKTGETVAIKRIRLGKYKEGVNFTALREIKLLKELKDPNIIELIDAFPYKGNLHLVFEFMETDLEAVIRDRNIVLSPADIKSYIQMMLKGLAFCHKKWVLHRDMKPNNLLIGAEGQLKLGDFGLARIFGSPERNFTHQVFARWYRAPELLFGTKQYGSAVDVWAAXGCIFAELLLRRPFLQGSSDIDQLGKIFAAFGTPKSSQWPDMVCLPDYVEYQFVSAPPLRSLFPMASDDALDLLSRMFTYDP

SEQ ID NO: 1345 - protein, 429 aa, Zea mays
  unsure (1)..(429): unsure at all Xaa locations
MASAGNSGSGDDDAGGKLLADRYQKGEVLGEGTYGVVFKAIDTKTGNTVAVKRIRIGKDKKEGVNFTALREIKLLKELKDPNIIELIDCFPYKENLHLVFEFMETDLEALIKDKNIILSPADTKSYVQMMLKGLAFCHKKWVLHRDMKPNNLLIGADGQLKLADFGLARVFGSPGRNFTHQVFARWYRAPELLFGSKQYGSGVDIWAAGCIFAELLTRRAFLQGSSDIDQLGKIFAALGTPKSSQWPDMVYLPDYVEYQYVAAPPLRTLFPMASDDALDLLSKMLTYDPKARISAQQALEHRYFSSLPAPTRPSQLPRPRRKGDQGNNKIPDLNLQDGPMVLSPPRKLRRVTAHEGMEXXMHRTDKVDEHPSGMRHTDDMPSQSSRIPMSVDVGAVFGTRPAPRPTLNSADKSRLKRKLDMDPEFGYAE

SEQ ID NO: 1346 - protein, 430 aa, Zea mays
  unsure (1)..(430): unsure at all Xaa locations
MASAGISGSGDDDAGGKLLADRYQKGEVLGEGTYGVVFKAIDTKTGNTVAVKRIWVGKDKKEGVNFTALREIKLLKELKGPNIIELIDCFPYKENLHLVFEFMETDLEALIKDKNIILSPADTKSYLQMLLKGLSFCHKKWVIHRDMKPNNLLIGADGQLKLADFGLARMFGSPGRNFTHQVFARWYRAPELLFGSKHYGSGVDIWAAGCIFAELLTRRAFLQGSSDIDQLGKIFAALGTPKSSQWPDMVYLPDYVEYQYVAAPPLRTLLPMASDDALDLLSRMLTYDPKARISAQQALEHRYFSSLPAPTRPSQLLRSRWKGDQGNNKMPDLNLQHGPLVLSPPRKLRRVIAHEWMEXXMHRADKVDEHPSGMRHTDDMPSQKSSRIPMSVDVGALFGTRPAPRPTLNSADKSRLKRKLDMDPEFGFAE

SEQ ID NO: 1347 - protein, 372 aa, Zea mays
  unsure (1)..(372): unsure at all Xaa locations
XPRVRVNFTALREIKLLKELKGPNIIELIDCFPYKENLHLVFEFMETDLEALIKDKNIILSPADTKSYLQMLLKGLSFCHKKWVIHRDMKPNNLLIGADGQLKLADFGLARMFGSPGRNFTHQVFARWYRAPELLFGSKQYGSGVDIWAAGCIFAELLTRRAFLQGSSDIDQLGKIFAALGTPKSSQWPDMVYLPDYVEYQYVAAPPLRTLLPMASDDALDLLSKMLTYDPKARISAQQALEHRYFSSLPAPTRPSQLLRSRWKGDQGNNKMPDLNLQHGPLVLSPPRKLRRVIAHEWMEXXMHRADKVDEHPSGMRHTDDMPSQKSSRIPMSVDVGAVFGTRPAPRPTLNSADKSRLKRKLDMDPEFGFAE

SEQ ID NO: 1348 - protein, 204 aa, Zea mays
  unsure (1)..(204): unsure at all Xaa locations
XDSWADSWVSYALGTPKSSQWPDVVYLRDYVEYQYVAAPPLRTLLPMASDDALDLLSRMLTYDPKARISAQQALEHRYFSSLPAPTRPSQLPRPRRKGDQGNNKMPDLNLQHGPLVLSPPRKFRRVTAHEGMEXXMHRADXVDEHPSGMRHTDDMPSQSSRIPMSVDVGAVFGTRPAPRPTLNSADKSRLKRKLDMDPEFGYAE

SEQ ID NO: 1349 - protein, 294 aa, Allium cepa
MDQYEKVEKIGEGTYGVVYKARDRLTNETIALKKIRLEQEDEGVPSTAIREISLLKEMQHANIVRLQDVVHSEKRIYLVFEYLDLDLKKHMDSCPDFAKDSRLAKTFLYQLLRGIAYCHSHRVLHRDLKPQNLLIDRRTNSLKLADFGLARAFGIPVRTFTHEVVTLWYRAPEILLGARQYSTPVDIWSVGCIFAEMVNQRPLFPGDSEIDELFKIFRIMGTPNEDTWPGVTSLPDFKSAFPKWPAKDLATIVPKLDSAGIDLLYKMLHLEPSKRITARKALEHEYFRDLGTIP

SEQ ID NO: 1350 - protein, 300 aa, Pneumocystis carinii
MEQYQRLEKIGEGTYGVVYKAKDLESGTIVALKKIRLEAEDEGVPSTAIREISLLKEMHNDNVVRLLNIIHQESRLYLVFEFLDLDLKKYMNSIPKDMMLGAEMIKKFMSQLVSGVKYCHSHRILHRDLKPQNLLIDREGNLKLADFGLARAFGVPLRGYTHEVVTLWYRAPEVLLGGRQYATALDIWSIGCIFAEMATKKPLFPGDSEIDEIFRIFRILGTPDENSWPGITSYPDFKATFPKWSPKNLGELITELDSDGIDLLQKCLRYYPAERISAKKALDHPYFDDFININRSNVVL

SEQ ID NO: 1351 - protein, 300 aa, Pneumocystis carinii
MEQYQRLEKIGEGTYGVVYKAKDLESGTIVALKKIRLEAEDEGVPSTAIREISLLKEMHNDNVVRLLNIIHQESRLYLVFEFLDLDLKKYMNSIPKDMMLGAEMIKKFMSQLVSGVKYCHSHRILHRDLKPQNLLIDREGNLKLADFGLARAFGVPLRGYTHEVVTLWYRAPEVLLGGRQYATALDIWSIGCIFAEMATKKPLFPGDSEIDEIFRIFRILGTPDENSWPGITSYPDFKATFPKWSPKNLGELITELDSDGIDLLQKCLRYYPAERISAKKALDHPYFDDFINLNRSNVVL

SEQ ID NO: 1352 - protein, 294 aa, Populus tremula x Populus tremuloides
MDQYEKVEKIGEGTYGVVYKARDRVTNETIALKKIRLEQEDEGVPSTAIREISLLKEMQHGNIVRLQDVVHSEKRLYLVFEYLDLDLKKHMDSSPEFAKDPRLVKTFLYQILRGIAYCHSHRVLHRDLKPQNLLIDRRTNALKLADFGLARAFGIPVRTFTHEVVTLWYRAPEILLGSRHYSTPVDVWSVGCIFAEMVNQKPLFPGDSEIDELFKIFRILGTPNEDTWPGVTSLPDFKSAFPKWPSKDLATVVPTLEKAGVDLLSKMLFLDPTKRITARSALEHEYFKDIGFVP

SEQ ID NO: 1353 - protein, 335 aa, Schizosaccharomyces pombe
MDIEKSDKWTYVKERKVGEGTYAVVFLGRQKETNRRVAIKKIKVGQFKDGIDISALREIKFLRESRHDNVIELVDVFSTKSNLNIILEFLDSDLEMLIKDKFIVFQPAHIKSWMVMLLRGLHHIHSRFILHRDLKPNNLLISSDGVLKLADFGLSRDFGTPSHMSHQVITRWYRPPELFMGCRSYGTGVDMWSVGCIFAELMLRTPYLPGESDLDQLNVIFRALGTPEPEVIKSMQQLPNYVEMKHIPPPNGGMEALFSAAGHEEIDLLKMMLDYNPYRRPTAQQALEHHYFSALPKPTHPSLLPRKGGEEGIKHVSSDLQRQNNFPMRANIKFV

SEQ ID NO: 1354 - protein, 426 aa, Pichia pastoris
MSGDHKSFTVFNQEFIIDRDFELIKALGQGAYGVVCSAQYKGNEDGGKVAIKKVTNIFSKKILAKRALREIKLLRHFRGHKYITCLYDLDVIPDQNNNFNEIYLYEELMECDLHHIIKSKQPLTDSHYQSFIYQILGGLKYIHSADVLHRDLKPVNLLVNSDCELKICDFGLARGYSSDAEKNAGFLTEYVATRWYRAPEIILSFQTYTKAIDIWSVGCILAELLGGRPIFRGRDYVDQLNLILSTLGTVSEETLQSIRSERAQDYVRSLPFMPKIPFSQLFPGANPEAIDLLDRMLTVDPTHRITVTEALEHPYLKVWHDPNDEPVCSSKFDFSFEVVDDIETMKQMIVDEVLSLREFVRRPIQEQQLPFTEPDKHFDVSFDQPQIEPPAENYRDDHLPRPHELESQILDLEHELQYGLDRYGTQ

SEQ ID NO: 1355 - protein, 306 aa, Saccharomyces cerevisiae
MKVNMEYTKEKKVGEGTYAVVYLGCQHSTGRKIAIKEIKTSEFKDGLDMSAIREVKYLQEMQHPNVIELIDIFMAYDNLNLVLEFLPTDLEVVIKDKSILFTPADIKAWMLMTLRGVYHCHRNFILHRDLKPNNLLFSPDGQIKVADFGLARAIPAPHEILTSNVVTRWYRAPELLFGAKHYTSAIDIWSVGVIFAELMLRIPYLPGQNDVDQMEVTFRALGTPTDRDWPEVSSFMTYNKLQIYPPPSRDELRKRFIAASEYALDFMCGMLTMNPQKRWTAVQCLESDYFKELPPPSDPSSIKIRN

SEQ ID NO: 1356 - protein, 352 aa, Cochliobolus heterostrophus
MPPAGSGSSRKISFNVSEQYDIQDVVGEGAYGVVCSALHKPSGQKVAIKKITPFDHSMFCLRTLREMKLLRYFNHENIISILDIQKPRNYETFTEVYLIQELMETDMHRVIRTQELSDDHCQYFIYQTLRALKAMHSANVLHRDLKPSNLLLNANCDLKVCDFGLARSAASTEDNSGFMTEYVATRWYRAPEIMLTFKEYTKAIDVWSVGCILAEMLSGKPLFPGKDYHHQLTLILDVLGTPTMEDYYGIKSRRAREYIRSLPFKKKIPWKAIFPKTNDLALDLLERLLAFNPVKRISVEDALKHPYLEPYHDPDDEPGADPIPEEFFDFDKNKDNLTKEQLKLLIYQEIMR

SEQ ID NO: 1357 - protein, 352 aa, Leptosphaeria maculans
MPPTGSGSSRKISFNVSEQYDIQDVVGEGAYGVVCSALHKPSGQKVAIKKITPFDHSMFCLRTLREMKLLRYFNHENIISILDIQKPRNYETFTEVYLIQELMETDMHRVIRTQELSDDHCQYFIYQTLRALKAMHSANVLHRDLKPSNLLLNANCDLKVCDFGLARSAASTEDNSGFMTEYVATRWYRAPEIMLTFKEYTKAIDVWSVGCILAEMLSGKPLFPGKDYHHQLTLILDVLGTPTMEDYYGIKSRRAREYIRSLPFKKKIPWKAMFPKTNDLALDLLERLLAFNPVKRITVEEALKHPYLEPYHDPDDEPTADPIPEEFFDFDKNKDNLTKEQLKLLIYQEIMR

SEQ ID NO: 1358 - protein, 324 aa, Ajellomyces capsulatus
MENYQKIEKIGEGTYGVVYKARDLTHPNRIVALKKIRLEAEDEGVPSTAIREISLLKEMHDPNIVRLLNIVHADGHKLYLVFEFLDLDLKKYMEALPVSEGGRGKALPDGSTLDMNRLGLGEAMVKKFMAQLVEGIRYCHSHRVLHRDLKPQNLLIDREGNLKLADFGLARAFGVPLRTYTHEVVTLWYRAPEILLGGRQYSTGVDMWSVGAIFAEMCTRKPLFPGDSEIDEIFKIFKLLGTPDENTWPGVTSFPDFKASFPKWKREDTRKLVPGLERNGLDLLDAMLEYDPARRISAKQACMHPYFQAGSSAYSGRERLQPYP

SEQ ID NO: 1359 - protein, 365 aa, Aspergillus fumigatus
MAEFVRAQIFGTTFEITSRYNLQPVGMGAFGLVCSARDQLTGQPVAVKKIMKPFSTPVLSKRTYRELKLLKHLRHENIISLSDIFISPLEDIYFVTELLGTDLHRLLTSRPLEKQFIQYFLYQILRGLKYVHSAGVVHRDLKPSNILINENCDLKICDFGLARIQDPQMTGYVSTRYYRAPEIMLTWQKYDVEVDIWSAGCIFAEMLEGKPLFPGKDHVNQFSIITELLGTPPDDVIQTICSENTLRFVKSLPKRERQPLANKFKNADPEAVDLLERMLVFDPKKRIRAGEALAHEYLSPYHDPTDEPEAEEKFDWSFNDADLPVDTWKIMMYSEILDFHNIDQGNDAGQVLMEGGVAQAQQNYA

SEQ ID NO: 1360 - protein, 358 aa, Cryphonectria parasitica
MAEFVRAQIFGTTFEITSRYSDLQPVGMGAFGLVCSARDQLTNQNVAIKKIMKPFSTPVLAKRTYRELKLLKHLRHENIISLSDIFISPLEDIYFVTELLGTDLHRLLTSRPLEKQFIQYFLYQIMRGLKYVHSAGVVHRDLKPSNILVNENCDLKICDFGLARIQDPQMTGYVSTRYYRAPEIMLTWQKYDVEVDIWSAGCIFAEMLEGKPLFPGKDHVNQFSIITELLGTPPDDVINTIASENTLRFVKSLPKRERQPLASKFKNADEQAVDLLERMLVFDPKKRITASDALAHEYLAPYHDPTDEPVAEEKFDWSFNDADLPVDTWKIMMYSEILDYHNVDASGASAAMGEFNGQ

SEQ ID NO: 1361 - protein, 355 aa, Gibberella fujikuroi
MSRSNPPNAAGSRKISFNVSEQYDIQDVVGEGAYGVVCSAIHKPSGQKVAIKKITPFDHSMFCLRTLREMKLLRYFNHENIISILDIQKPRNYESFNEVYLIQELMETDMHRVIRTQDLSDDHCQYFIYQTLRALKAMHSANVLHRDLKPSNLLLNANCDLKVCDFGLARSAASQEDNSGFMTEYVATRWYRAPEIMLTFKEYTKAIDVWSVGCILAEMLSGKPLFPGKDYHHQLTLILDVLGTPTMEDYYGIKSRRAREYIRSLPFKKKVPFRTLFPQDLGSALDLLEKLLAFNPVKRITVEEALKHPYLEPYHDPEDEPTAPPIPEEFFDFDKHKDNLSKEQLKQLIYQEIMR

SEQ ID NO: 1362 - protein, 337 aa, Neurospora crassa
MDGRKHPSSFQQLEKLGEGTYATVFKGRNRQTGELVALKEIHLDSEEGTPSTAIREISLMKELKHENIVALHDVIHTENKLMLVFEYMDGDLKKFMDTNGERGALKPHVIKSFMHQLLKGIDFCHKNRVLHRDLKPQNLLINSKGALKLGDFGLARAFGIPVNTFSNEVVTLWYRAPDVLLGSRTYNTSIDIWSAGCIMAEMFTGRPLFPGTTNEDQIVRIFRIMGTPTERTWPGLTSFPEYKPNWQMYATQSLSSILPQIDRDGIDLLQRMLQLRPELRISAHDALQHHWFNDLVHQQHHHQAQQSMMQQPPMMQQQPMMQQHRGYGQPQPNYEGY

SEQ ID NO: 1363 - protein, 328 aa, Neurospora crassa
MENYQKLEKIGEGTYGVVYKARDLANSGRIVALKKIRLEAEDEGVPSTAIREISLLKEMRDPNIVRLLNIVHADGGQGHKLYLVFEFLDLDLKKYMEALPVSDGGRGKALPEGTGAGLHNLGLGEDIIKKFMSQLCEGVRYCHSHRVLHRDLKPQNLLIDRDGNLKLADFGLARAFGVPLRTYTHEVVTLWYRAPEILLGGRQYSTGVDMWSVGCIFAEMCTRKPLFPGDSEIDEIFKIFRLLGTPTEDIWPGVTSYPDFKASFPKWVRDYNVPLCQNLDDVGLELLESMLVYDPAGRISAKAACNHPYFEDYNPKPKSKYRDSSRYA

SEQ ID NO: 1364 - protein, 407 aa, Neurospora crassa
MANSPLVARPTDALQPPKSLPPSSGGTPSGGLPRSARGQQIAALARPTMDLMEQMNEDEKNKYIKGKKLGEGTYANVYLGHSRLDSSTQVAIKKIKVQKEYQDGIAPDAIREMKYLQKLRGHANIIILHSVFSSKDQNLNLVLEYLPLGDLEMLIRDVDHVRYGAADIKAWMGMLTRAIWWCHDNYVLHRDIKPNNLLIAADGEVKLADFGLARSFADPGVRMTANVITRWYRPPELLFGARHYSGAVDIWSVGLVFAELIIRAPYLPGNSEVEQIALICREIGTPTEENWPGVTQLKEYTVPSDVVPVAGKDKYMGRFGAVGSDGVDLLTKTLVLDPRRRITAREMLEHRWWKADPKPTPKHDLPKKTAGAEEKLAADLKRRNGMVEDDDVRGSKVARKLDFGTAR

SEQ ID NO: 1365 - protein, 366 aa, Filobasidiella neoformans
MTIDQSQINFNVPSTYKLEEIVGEGAYGLVVAGTHLPSGTQVAIKRITPFDHTMFCQRTLREIKLLRHFHHENIISILDLIQPESYEVFNEVYLVQELMETDLHRVIRSQELSDDHCQYFVYQTLRGLKALHSADVLHRDLKPSNLLLNANCDLKICDFGLARSSAKPPPGTSDGGQGFMTEYVATRWYRAPEVMLSFQEYTKAIDLWSVGCILAEMINGKPLFPGRDYHHQLSLILQVLGTPTMDDFNEITSQRSKDYLRALEFTRRQDFSAICPKAKPAAVDLLKQTLTFSPSKRITVEEALMHSYVEAYHDPHDEPNAEPLKPGFFDFEFHQEKLSRDQWKRMIYDEVQDPVPTILSQWTESH

SEQ ID NO: 1366 - protein, 354 aa, Ustilago maydis
MSHAHGQQPNHSTTFKVGETYKVVDVVGEGAYGVVCSAIHVPSSSRVAIKKITPFDHSMFCLRTLREIKLLRHFNHENIISILDIVKPDDYDSFSEVYLIQELMETDMHRVIRTQELSDDHCQYFIYQTLRGLKALHSAQVLHRDLKPSNLLLNANCDLKICDFGLARSANQPEAEGTGFMTEYVATRWYRAPEIMLTFKEYTKAIDVWSVGCILAEMLAGKPLFPGRDYHHQLSLTLEILGTPSLDDFYAITSTRSRDYIRALPFRKRRNLSLMFPNANPLAVDLMEKCLTFSPRKRITVEEALAHPYLEPYHDPEDEPTAEPLDPSFFDFDYCKEQLSRSELKRLIYNEIMR

SEQ ID NO: 1367 - protein, 352 aa, Pyrenophora teres
MPPAGSGSSRKISFNVSEQYDIQDVVGEGAYGVVCSALHKPSGQKVAIKKITPFDHSMFCLRTLREMKLLRYFNHENIISILDIQKPRNYETFTEVYLIQELMETDMHRVIRTQELSDDHCQYFIYQTLRALKAMHSANVLHRDLKPSNLLLNANCDLKVCDFGLARSAASTEDNSGFMTEYVATRWYRAPEIMLTFKEYTKAIDVWSVGCILAEMLSGKPLFPGKDYHHQLTLILDVLGTPTMEDYYGIKSRRAREYIRSLPFKKKIPWKAMFPKTNDLALDLLERLLAFNPVKRITVEEALKHPYLEPYHDPDDEPTADPIPEEFFDFDKNKDNLTKEQLKLLIYQEIMR

SEQ ID NO: 1368 - protein, 317 aa, Candida albicans
MVELSDYQRQEKVGEGTYGVVYKALDTKHNNRVVALKKIRLESEDEGVPSTAIREISLLKEMKDDNIVRLYDIIHSDSHKLYLVFEFLDLDLKKYMESIPQGVGLGANMIKRFMNQLIRGIKHCHSHRVLHRDLKPQNLLIDKEGNLKLADFGLARAFGVPLRAYTHEVVTLWYRAPEILLGGKQYSTGVDMWSVGCIFAEMCNRKPLFPGDSEIDEIFRIFRILGTPNEEIWPDVNYLPDFKSSFPQWKKKPLSEAVPSLDANGIDLLDQMLVYDPSRRISAKRALIHPYFNDNDDRDHNNYNEDNIGIDKHQNMQ

SEQ ID NO: 1369 - protein, 326 aa, Candida albicans
MTGSSSQFQQLEKLGEGTYATVYKGRNRATGALVALKEISLDSEEGTPSTAIREISLMKELDHENIVTLYDVIHTENKLTLVFEYMDKDLKKYMEVHGQQSALDLKVVKSFMFQLLKGIMFCHDNRVLHRDLKPQNLLINNKGELKLGDFGLARAFGIPFNTFSNEVVTLWYRAPDVLLGSRAYTTSIDIWSAGCIFAEMCTGKPLFPGTANEDQLIKIFRLMGTPNERTWPGISQYTNYKNNWQIFVPQDLRLIVPNLDSMGLNLLQSLLQMRPESRITARQALQHPWFHEITMPNAVPQHLSDPYQQQQQQQQHPHQPIIDQQY

SEQ ID NO: 1370 - protein, 303 aa, Guillardia theta
MDNYKRIEILGQGAYGKVYKAQDLRNGNLVALKKALSSSDEEGIPPTTLREISILKSVSECEFIVKLLDVVNTKSKNGKISIYIVFQYLDSDLKSYMISNYGKGRGMDENSAKKFCFQLLIGMYHCHKLGIIHRDLKPQNILIEKGEKLKIADFGLSRNFSIPVGKYTHEVVTLWYRAPEILLGARTYSSPVDIWSIGCIFAEMLTGNPLFCGESEIEQLLSIFKTIGTPTSQTWPEVLNFKDWHEFPIWPQINLKYSFENISEETLEFIQVFLRLNPNKRISILGAITNTYFEHFFKDYNLY

SEQ ID NO: 1371 - protein, 363 aa, Leishmania donovani
MAQLVPLVELPSGKKIYSVRGQQFEVDRQYDLVKVVGFGACGTVCSAVANGSGERVAIKRLSRVFGDLREGKRILREMEIMTSLKHNNLIRLHHFMRPQSKETFEDIYLVMDLYDTDLNRIIRSRQKLTDEHLQYFMIQAFRGLHYLHSAKVMHRDLKPSNLLVNADCALAICDFGLARDDQVMSSSDLTQYVVTRWYRPPEVLGMGSNQYTSAVDVWSLGLIFAELMLGRTLLPGTDYIGQLVMIVNLLGSPSIDDMEFLSSEAKAFILSQPRRPALSFRDLFPMATEEATDLLSKLLVFHPARRLTAKQVMEHPYFSKYRDAAEEADAPDPFVWNHSHIETKEQLREDLWRVVEAHSQSNG

SEQ ID NO: 1372 - protein, 311 aa, Leishmania major
MSSFGRVTARSGDAGTRDSLDRYNRLDVLGEGTYGVVYRAVDKITGQYVALKKVRLDRTEEGIPQTALREVSILQEFDHPNIVNLLDVICSDGKLYLVFEYVEADLKKAIEKQEGGYSGMDLKRLIYQLLDGLYFCHRHRIIHRDLKPANILLTSGNVLKLADFGLARAFQVPMHTYTHEVVTLWYRAPEILLGEKHYTPAVDMWSVGCIFAELTRRKVLFRGDSEIGQLFEIFQVLGTPTDTEGSWPGVSRLPDYRDVFPKWTAKRLGQVLPELHPDAIDLLSKMLKYDPRERISAKEALQHPWFSDLRW

SEQ ID NO: 1373 - protein, 301 aa, Leishmania major
MTSRYERQEKIGEGTYGVVYKARDTSTSATVALKRIRLDSEEEGVPCTAIREISLLKELRHENIVKLLDVCHSEHRLTIVFEYLDLDLKKYLDRENGNLDAATIQHFMRDLLRGVAFCHQRSVLHRDLKPQNLLISREKELKLGDFGLGRSFAIPVRKFTNEVVTLWYRPPDVLLGSMQYGPPVDVWSVGCIFSEMATGTPLFAGKNDADQLMRIFRFLGTPNNRVWPSMNQYPNSNNMLSQPEFLQNFEPEWSNVLGSVPGYEKLGCAGVDLLEKLLRYEPSERITAADALNHPYFSLQF

SEQ ID NO: 1374 - protein, 311 aa, Leishmania mexicana
MSSFGRVTARSGDAGTRDSLDRYNRLDVLGEGTYGVVYRAVDKITGQYVALKKVRLDRTEEGIPQTALREVSILQEFDHPNIVNLLDVICSDGKLYLVFEYVEADLKKAIEKQEGGYSGMDLKRLIYQLLDGLYFCHRHRIIHRDLKPANILLTSGNVLKLADFGLARAFQVPMHTYTHEVVTLWYRAPEILLGEKHYTPAVDMWSVGCIFAELARRKVLFRGDSEIGQLFEIFQVLGTPTDTEGSWPGVSRLPDYRDVFPKWTAKRLGQVLPELHPDAIDLLSKMLKYDPRERISAKEALQHPWFSDLRW

SEQ ID NO: 1375 - protein, 301 aa, Leishmania mexicana
MTSRYERQEKIGEGTYGVVYKARDTSTAATVALKRIRLDSEEEGVPCTAIREISLLKELRHENIVKLLDVCHSEHRLTIVFEYLDLDLKKYLDRENGNLDAATIQHFMRDLLRGVAFCHQRSVLHRDLKPQNLLISREKELKLGDFGLGRSFAIPVRKFTNEVVTLWYRPPDVLLGSMQYGPPVDVWSVGCIFSEMATGTPLFAGKNDADQLMRIFRFLGTPNNRVWPSMNQYPNSNNMLSQPEFLQNFEPEWSNVLGSVPGYEKLGCAGVDLLERLLRYEPSERITAADALNHPYFSLQF

SEQ ID NO: 1376 - protein, 363 aa, Leishmania panamensis
MTQLVPLAELPSGKKIYSVRGQRFEVDRQYDLVKVVGFGACGTVCSAVVNGSGERVAIKRLSRVFGDLREGKRILREMEIMTSLKHNNLIRLPTFMRPQSKETFEDIYLVMDLYDTDLNRIIRSRQKLTDEHLQYFMIQAFRGLHYLHSAKVMHRDLKPSNLLVNADCALAICDFGLARDDQVMSSSDLTQYVVTRWYRPPEVLGMGSNQYTSAVDVWSLGLIFAELMVGRALLPGTDYIGQLVMIVNLLGSPSIDDMEFLSSEAKAFILSQPHRPALSFRDLFPMATEEATDLLSKLLVFHPARRLTAKQVMEHPYFSKYRDAAEEADAPDPFVWNHSHIETKEQLREDLWRVVEVHSQSNG

SEQ ID NO: 1377 - protein, 657 aa, Trypanosoma brucei
MDAYETLGMLGEGTYGVVVKARHRATSRIVAIKKYKQAEDDDHVRKTSLREVRVLKQLRHPNVIALLDVFRRDGKLYLVFEYVENTILQLIEEKKYGLSPDEVRRYTFQLLNGVSYCHAHNIIHRDVKPENILVSRDGVLKLCDFGFARQLSCRGNYTEYVATRWYRAPELLVGDVSYGKAVDVWAIGCVFSELSDGQPLFPGDSDLDQLSLIMRACGPVPQQMVSTFEHNALYRRVTFPSVDVEETLQQRFPTAASPWLEFLTSCLRMDPVERPSCTALMSMAYFTENNFRATYELELRELFQHCQPPLVDVAPTSPDHNFSREQQHQQQTLGNDRVDAELTLPRLAAPSLDAETTDKVDSAESKNTTMGVSSEVVGGVGGSVVVDSNSNSFHQLGALWSHYIGSTVGATMALSGELPNIGPRQAHPYPSGLPPGVQVTKPVPRSGTNSVGDKNYNGVQAMKVTGCLRLSAKNISRSPDVQRVKASAAQSGPKVKQAKSEVKPEQKREWKSCSALGKSVKPNYLFPLLPNGTNNSGITSYGPSGVAVGAGPAPQDACSPLVSKGLRPPSSNGIPGAGLHSNGSTTSFSAHKDEKMDLGCGEQNNNGSDHKQRKKHVKRTHDNGELEGPPRKVSDKPSSQHSVAGHRYSFRDGATKR

SEQ ID NO: 1378 - protein, 325 aa, Trypanosoma brucei
MSDTLSSKLDDVDADVLRGAYEPVAIIGEGTYGVVFRARGVASGAEFVIKKLRSDKLKEGVPATTLREVTLLHEMSDNPNVVRLLDVLCSKRRVYLVFELLNEDLRSFIRRNYPQPSATASSSVVPLRLVKNFTCQMLHALWRCHQNRIIHRDLKPANVLLGVKKSTRNDGEDSYILKLADFGLARTYEMTLLTYTKEVMTLWYRAPEILLGERHYTPAADVWSVGCIVLEMIVGCPVFRGESNRDQLDRIFYTVGTPTEETWAGVAMMPGYDKATKIYKVAPLHERLPTFDKEAVQFVAFLLQVNPKSRPTIPTILQHPFLQGD

SEQ ID NO: 1379 - protein, 301 aa, Trypanosoma congolense
MGSRYQRLEKIGEGSYGVVYRARDITTDVIVALKRIRLESVEEGVPCTAIREISILKELRHENIVRLLDVCHSENRLNLVFEYMEMDLKKYMDRASGNLDPATIQEFMRSLLKGVRFCHERNVLHRDLKPPNLLISREKELKLADFGLGRAFGIPVKKYTHEVVTLWYRSPDVLLGSTQYGTPVDIWSVGCIFAEMAIGAPLFAGKNDADQLLRIFRFLGTPSSQVWPSMNLYPNSTNMLSKPEFQQNLIATCDEQFQTHPAYAKLGPQGIDLLRRLLRYEPGERLTAAQALEHPYFSVEF

SEQ ID NO: 1380 - protein, 301 aa, Trypanosoma cruzi
MSTRYERQEKIGEGTYGVVYRARDTATGATVALKRIRLDTEEEGVPCTAIREISLLKELRHANIVKLLDVCHSESRLTLVFEYMELDLKKYMDQEEGNLDAATIQDFMRDLLNGVRFCHDRNVLHRDLKPPNLLISREKSLKLADFGLGRAFGIPVKKFTHEVVTLWYRSPDVLLGSTQYGTPVDIWSVGCIFAEMVIGAPLFAGKNDADQLLRIFRFLGTPNNQVWPSMNQYPNSTNMLFKPEFLQNLAAECETQFRTVPAYAKLGPGGIDLLRRLLKYEPSERLTAAQALEHPYFSVEF

SEQ ID NO: 1381 - protein, 311 aa, Trypanosoma cruzi
MTTLTTLPSRPLSSNTREQFERYNRMDILGEGTYGVVYRAVDKITGQIVALKKVRLDRTEEGIPQTALREVSILQEIHHPNVVNLLDVICTDGKLYLIFEYVDYDLKKAIEKRGCTFTGVTLKKLVYQLLDGLFFCHRHRIVHSDLKPANILITSDNVLKLADFGLARTFQIPMHTYTHEVVTLWYRAPEILLGEKHYTPAVDIWSVGCIFAELARGKVIFRGDSEIGQLFEIFQILGTPMDNEGSWPGVSSLPDYRDVFPRWAGKPLAQVIPQLDSEAIDLISRMLKYSPAERISAKEALQHSWFSEIRT

SEQ ID NO: 1382 - protein, 311 aa, Trypanosoma brucei brucei
MTMLGALTGRQLSSGLKDQFDRYNRMDILGEGTYGVVYRAVDRATGQIVALKKVRLDRTDEGIPQTALREVSILQEIHHPNIVNLLDVICADGKLYLIFEYVDHDLKKALEKRGGAFTGTTLKKIIYQLLEGLSFCHRHRIVHRDLKPANILVTTDNSVKIADFGLARAFQIPMHTYTHEVVTLWYRAPEILLGEKHYTPAVDMWSIGCIFAELARGKVLFRGDSEIGQLFEIFQVLGTPMDAEGSWLGVSSLPDYRDVFPKWSGKPLTQVLPTLDGDAVDLLSQMLRYNPAERISAKAALQHPWFSDAMF

SEQ ID NO: 1383 - protein, 301 aa, Trypanosoma brucei brucei
MGSRYERLQKIGEGSYGVVFRARDVTTGTIVAVKRIRLEKEEEGVPCTAIREISILKELRHENIVRLLDVCHSEKRLTLVFECMEMDLKKYMDHVGGDLDAGTIQEFMRSLLSGVRFCHERNVLHRDLKPPNLLISREKELKLADFGLGRAFGIPVKKFTQEVVTLWYRSPDVLLGSTQYGTPVDIWSVGCIFAEMAIGAPLFTGKNDADQLLRIFQFLGTPNRQVWPSMDTYPNSSNMLSRPEFQQTLAATCEEQFQTNPAYAKLGPQGIDLLRWLLRYEPSERLTAAQALEHPYFSVEF

SEQ ID NO: 1384 - protein, 345 aa, Trypanosoma brucei brucei
MQVQVQEGQTACDGSLRPLPSAGPASFVPRSLRPAPLRGTSTPDRYSRIEKVGEGSYGIVYKCHDNFTGRTVAMKRIPLIVNDGGVPSTAVREVSLLRELNHPYVVRLLDVVLHEAKLLLIFEYMEQDLQGMLKQRNTAFVGGKLRRIMFQLLLGLHECHSRRFVHRDIKPSNILIDRKESVVKLADFGLGRAFRVPLQTYTTEVMTLWYRAPEVLLGDKQYLPAVDVWSMGCVFAELARRRSLFAGDTAINQLFSIFQLLGTPTEATWRGVTSLPHHNVNFPRWTAKPLRTAVPALDDDGVDLLRRMLCYNPRERITAYEALQHSYFDEVREEEVEKLMRFNGA

SEQ ID NO: 1385 - protein, 291 aa, Entamoeba histolytica
MTRYEKKQQLGEGTYGVVCKAWDTVCNRYVALKKIKQEREDDGIPVTSVREIAVLLELKHPNVVDLYDIYLEDKFLYLVFEFCDEDLYQFMSRSSKIPINETRSIVYQILQGLAFCHYHQILHRDMKPQNILINKNGTIKLGEFGLARLTTINDRKYTSEVVTLWYRAPEILLGATQYGGAIDIWSTAAIFGELINKEELFKGRCKIDQLFKIFSQLGTPTEDIWNGVTKLPFYLSTFPKWKAKDLHTIFHTDERAVDLLQKMFIYTPEKRISAADALKHPFFDPLNKPNN

SEQ ID NO: 1386 - protein, 294 aa, Cryptosporidium parvum
MEKYQKLEKVGEGLTGLVYKAKDSQGRIVALKRIRLDAEDEGIPSTAIREISLLKELHHPNIVSLIDVIHSERCLTLVFEFMEKDLKKVLDEDKTGLQDSQIKIYLYQLLRGVAHCHQHRILHRDLKPQNLLINSDGALKLADFGLARAFGIPVRSYTHEVVTLWYRAPDVLMGSKKYSTSVDIWSIGCIFAEMITGKPLFPGVTDDDQLPKIFSILGTPNPREWPQVQELPLWKQRTFQVFEKKPWSSIIPGFCQEGIDLLSNMLCFDPNKRISARDAMNHPYFKDLDPQIMI

SEQ ID NO: 1387 - protein, 300 aa, Toxoplasma gondii
MEKYQKLEKIGEGTYGVVYKAQDHSGEISALKKIRLEAEDEGIPSTAIREISLLKELHHPNIVRLRDVIHTDRRLTLVFEYLDQDLKKLLDVCDGGLEPSTTKSFLFQLLCGIAYCHEHRVLHRDLKPQNLLINREGALKLADFGLARAFGIPVRSYTHEVVTLWYRAPDVLMGSKTYSTPVDIWSVGCIFAEMVNGRPLFPGTGNEDQLMKIFKVLGTPQVSEHPQLAELPHWNRDFPQFPPLPRDQVVPKLDPLGTDLLSRMLRFDSNQRISARQAMQHPYFSDLADNIKRLATFRGE

SEQ ID NO: 1388 - protein, 300 aa, Toxoplasma gondii
MEKYQKLEKIGEGTYGVVYKAQDHSGEISALKKIRLEAEDEGIPSTAIREISLLKELHHPNIVRLRDVIHTDRRLTLVFEYLDQDLKKLLDVCDGGLEPSTTKSFLFQLLCGIAYCHEHRVLHRDLKPQNLLINREGALKLADFGLARAFGIPVRSYTHEVVTLWYRAPDVLMGSKTYSTPVDIWSVGCIFAEMVNGRPLFPGTGNEDQLMKIFKVLGTPQVSEHPQLAELPHWNRDFPQFPPLPWDQVVPKLDPLGTDLLSRMLRFDSNQRISARQAMQHPYFSDLADNIKRLATFRGE

SEQ ID NO: 1389 - protein, 288 aa, Plasmodium berghei
MEKYHGLEKIGEGTYGVVYKAQNSDGESFALKKIRLEKEDEGIPSTAIREISILKELRHSNIVKLYDVIHAKKRLILVFEQLDQDLKKLIDVCDGGLESVTAKSFLLQLLNGIAYCHEHRVLHRDLKPQNLLINREGELKIADFGLARAFGIPARRYTHEVVTLWYRAPDILMGSKKYSTPIDIWSVGCIFAEMVNGRPLFPGASETDQLMRIFKILGTPNSQNWPDVFKLPKYDPNFPVYNPLPWETFIKGLDDTGIDLLSKMLKLDPNQRITAKYTIEHPYFKETN

SEQ ID NO: 1390 - protein, 324 aa, Plasmodium falciparum
MENNSTERYIFKPNFLGEGSYGKVYKAYDTILKKEVAIKKMKLNKISNYIDDCGINFVLLREIKIMKEIKHKNIMSALDLYCEKDYINLVMEIMDYDLSKIINRKIFLTDSQKKCILLQILNGLNVLHKYYFMHRDLSPANIFINKKGEVKLADFGLCTKYGYDMYSDKLFRDKYKKNLNLTSKVVTLWYRAPELLLGSNKYNSSIDMWSFGCIFAELLLQKALFPGENEIDQLGKIFFLLGTPNENNWPEALCLPLYTEFTKATKKDFKTYFKIDDDDCIDLLTSSLKLNAHERISAEDAMKHRYFFNDPLPCDISQLPFNDL

SEQ ID NO: 1391 - protein, 324 aa, Plasmodium falciparum
MENNSTERYIFKPNFLGEGSYGKVYKAYDTILKKEVAIKKMKLNEISNYIDDCGINFVLLREIKIMKEIKHKNIMSALDLYCEKDYINLVMEIMDYDLSKIINRKIFLTDSQKKCILLQILNGLNVLHKYYFMHRDLSPANIFINKKGEVKLADFGLCTKYGYDMYSDKLFRDKYKKNLNLTSKVVTLWYRAPELLLGSNKYNSSIDMWSFGCIFAELLLQKALFPGENEIDQLGKIFFLLGTPNENNWPEALCLPLYTEFTKATKKDFKTYFKIDDDDCIDLLTSFLKLNAHERISAEDAMKHRYFFNDPLPCDISQLPFNDL

SEQ ID NO: 1392 - protein, 719 aa, Plasmodium falciparum
MGKGHDVKKERGKKDEDEHNEYHPYRRDNKSFYSKNYKMKNKHSYNSSDEYKKYVSHDTYNSYDTYNSYKSHEEHKNNKHISIKPVNKNKYVHSPSPKKTKKIYDELSDYNKHKKYSSSKMDKKKDSYYKEQSNKYKEKRKYDESSQDTYDKKRKRKRKKKKYDYEREEEKYNRYDERRDSSYYTSNYSEDSSKREGGKKEKEDLYISRKEFSGKKKSHKGEHNNNNHHTDQHIKNNYHTDQHIKNNYHTDQHNNNNHHTDQHNNNNHHTDQHNNNNHYTDQHNNNNHHTDQHNNTISDQINIFPEKNKRDNRINEEKYTIKEHLIYEDEQNISYESNKDSSSEENTILNEYSSDEEKNKIDCILNGCRNVKNYKKLNKISEGTYGAVYRAQNKRTKKIVALKKLKNFSSMHNEGFAMTSLREINILLQLQHDNILSIKEVVFGKHLNDIYLVMEYIEHELKMILDNKSPSFTISELKCLLKQLLSGINYLHRNWVMHRDLKPTNLLYSNKGILKICDFGMARKFGHVTNHNFTKNVVTLWYRAPELLLGEQCYTNKIDIWSAGCIFAEMILKKPLFVGENEIDQLFKILCLLGLPDKESYPEFYEYSFISKNKELFKKKKIKMNVNNIRSHFPNIANQFSGLYLSDNGLDLLQKMLHYNPQCRISAQEALNHPYFNEFPKPLDIKDMPIVPDSNKFIRSNKMANHFKLNSQNNIQFHS

SEQ ID NO: 1393 - protein, 670 aa, Plasmodium falciparum
MNIRNMFHMIRTIHMIHIIHINHMKSIKITNIFHQASKQKQICTFPVSQKTKKIYDELSDYNKHKKYSSSKMDKKKDSYYKEQSNKYKEKRKYDESSQDTYDKKRKRKRKKKKYDYEREEEKYNRYDERRDSSYYTSNYSEDSSKREGGKKEKEDLYISRKEFSGKKKSHKGEHNNNNHHTDQHIKNNYHTDQHIKNNYHTDQHNNNNHHTDQHNNNNHHTDQHNNNNHYTDQHNNNNHHTDQHNNTISDQINIFPEKNKRDNRINEEKYTIKEHLIYEDEQNISYESNKDSSSEENTILNEYSSDEEKNKIDCILNGCRNVKNYKKLNKISEGTYGAVYRAQNKRTKKIVALKKLKNFSSMHNEGFAMTSLREINILLQLQHDNILSIKEVVFGKHLNDIYLVMEYIEHELKMILDNKSPSFTISELKCLLKQLLSGINYLHRNWVMHRDLKPTNLYYSNKGILKICDFGMARKFGHVTNHNFTKNVVTLWYRAPELLLGEQCYTNKIDIWSAGCIFAEMILKKPLFVGENEIDQLFKILCLLGLPDKESYPEFYEYSFISKNKELFKKKKIKMNVNNIRSHFPNIANQFSGLYLSDNGLDLLQKMLHYNPQCRISAQEALNHPYFNEFPKPLDIKDMPIVPDSNKFIRSNKMANHFKLNSQNNIQFHS

SEQ ID NO: 1394 - protein, 288 aa, Plasmodium knowlesi
MEKYHGLEKIGEGTYGVVYKAQNNYGETFALKKIRLEKEDEGIPSTAIREISILKELKHSNIVKLYDVIHTKKRLILVFEHLDQDLKKLLDVCDGGLESVTAKSFLLQLLSGIAYCHEHRVLHRDLKPQNLLINREGELKIADFGLARAFGIPVRKYTHEVVTLWYRAPDILMGSKKYSTPIDIWSVGCIFAEMVNGRPLFPGVSETDQLMRIFRILGTPNSANWPSVTELPKYDPDFIVYEPLPWETFLKGLDDTGIDLLSKMLRLDPNQRITAKEALQHAYFKESS

SEQ ID NO: 1395 - protein, 288 aa, Plasmodium vivax
MEKYHGLEKIGEGTYGVVYKAQNNYGETFALKKIRLEKEDEGIPSTAIREISILKELKHSNIVKLYDVIHTKKRLILVFEHLDQDLKKLLDVCDGGLESVTAKSFLLQLLSGIAYCHEHRVLHRDLKPQNLLINREGELKIADFGLARAFGIPVRKYTHEVVTLWYRAPDILMGSKKYSTPIDMWSVGCIFAEMVNGRPLFPGVSETDQLMRIFRILGTPNSENWPNVTELPKYDPDFMVYEPLPWETFLKGLDDTGIDLLSKMLRLDPNQRITAKQALEHAYFKESN

SEQ ID NO: 1396 - protein, 298 aa, Theileria annulata
MRRYHKMEKIGEGTYGVVYKAQNNHGEICALKKIRVEEEDEGIPSTAIREISLLKELHHPNIVWLRDVIHSEKCLTLVFEYLDQDLKKLLDACDGGLEPTTAKSFLYQILRGISYCHDHRILHRDLKPQNLLINREGVLKLADFGLARAFAIPVRSYTHEVVTLWYRAPDVLMGSKKYSTAVDIWSVGCIFAEMINGVPLFPGISEQDQLKRIFKILGTPNVDSWPQVVNLPAYNPDFCYYEKQAWSSIVPKLNESGIDLISRMLQLDPVQRISAKEALKHDYFKDLHRPSEFLNGVH

SEQ ID NO: 1397 - protein, 298 aa, Theileria parva
MRRYHKMEKIGEGTYGVVYKAQNNHGEICALKKIRVEEEDEGIPSTAIREISLLKELHHPNIVWLRDVIHSEKCLTLVFEYLDQDLKKLLDACDGGLEPTTAKSFLYQILRGISYCHDHRILHRDLKPQNLLINREGVLKLADFGLARAFAIPVRSYTHEVVTLWYRAPDVLMGSKKYSTAVDIWSVGCIFAEMINGVPLFPGISEQDQLKRIFKILGTPSVDSWPQVVNLPAYNPDFSYYEKQSWSSIVPKLNESGIDLISRMLQLDPVQRISAKEALKHDYFKDLHRPPEFLNGVH

SEQ ID NO: 1398 - protein, 301 aa, Paramecium tetraurelia
MDLAQSEERYQKLEKIGEGTYGLVYKARDNQTGDIVALKKIRMDHEDEGVPSTAIREISLLKEVQHPNIVPLKDVVYDESRLYLIFDFVDLDLKKYMESVPQLDRMQVKKFINQMIQALNYCHQNRVIHRDLKPQNILVDIKQQNTQIADFGLARAFGLPLKTYTHEVITLWYRAPEILLGQRQYSTPVDIWSLGCIFAEMAQKRPLFCGDSEIDQLFKIFKIMGTPKESTWPGVSTLPDFKSTFPRWPTPTNPAATLGKDITNLCPLGLDLLSKMITYDPYARITAEEALKHAYFDELNN

SEQ ID NO: 1399 - protein, 308 aa, Paramecium tetraurelia
MKSNKLEKYEKKEKLGEGTYGIVYKALDRNTNEYVAIKKIRLESEEEGIPSTAIREISLLKELNHPNIVKLMEVVHSNKKLVLVFEYFEMDLKKFLAQFPKEKGMEPVIVKSFLYQLLRGIQACHQQKILHRDLKPQNLLGSKDGILKLADFGLARASGIPVKSFTHEVVTLWYRPPDVLLGSKNYNTSIDIWSVGCIFGEMSNLKPLFAGSNETDQLKKIFRVLGTPSPIEYPKLNDLPSWKPENFEQYQPDNLAKFCPRLDPDGLDLLVKMLKINPDQRITAKAACEHPFFKELPEQVKKLYVNVK

SEQ ID NO: 1400 - protein, 309 aa, Paramecium tetraurelia
MDLAQSEERYQKLEKIGEGTYGLVYKARDNQTGDIVALKKIRMDHEDEGVPSTAIREISLLKEVQHPNIVPLKDVVYDESRLYLIFDFVDLDLKKYMESVPKYMESVPQLDRMQVKKFINQMIQALNYCHQNRVIHRDLKPQNILVDIKQQNTQIADFGLARAFGLPLKTYTHEVITLWYRAPEILLGQRQYSTPVDIWSLGCIFAEMAQKRPLFCGDSEIDQLFKIFKIMGTPKESTWPGVSTLPDFKSSFPRWPNPYQSSCNVQEKILLIYVHQDQISLSKMITYDPLARIPAEEALKHAYFDELNN

SEQ ID NO: 1401 - protein, 307 aa, Paramecium tetraurelia
MKSNKLEKYEKKEKLGEGTYIVYKALDRNTNEYVAIKKIRLESEEEGIPSTAIREISLLKELNHPNIVKLMEVVHSNKKLVLVFEYFEMDLKKFLAQFPKEKGMEPVIVKSFLYQLLRGIQACHQQKILHRDLKPQNLLGSKDGILKLADFGLARASGIPVKSFTHEVVTLWYRPPDVLLGSKNYNTSIDIWSVGCIFGEMSNLKPLFAGSNETDQLKKIFRVLGTPSPIEYPKLNDLPSWKPENFEQYQPDNLAKFCPRLDPDGLDLLVKMLKINPDQRITAKAACEHPFFKELPEQVKKLYVNVK

SEQ ID NO: 1402 - protein, 318 aa, Tetrahymena thermophila
MNNNTFGSDRYEKLLKVGEGTYGEVYKAKDIQSSEIVALKKIKLENEDEGVPSTALREISILKELQPHPNIVCMHEVIYQPQEKKLYLVFEFVDQDLKKFLDQYRKDKKLQLRPYQIKLMMYQILNGLNFCHSRRIIHRDLKPQNILIDAKGNIKIADFGLARAFGVPIKTLTHEVETLWYRAPEILLGQKAYSLGVDIWSLGCIFHEMVEKRALFMGDSEIDQIFKIFQYHGTPTEQTWPALKECPYFKPIYPRFKTADPKTYFKNFCDKGFDLIQQMIALDPAKRISVKDALRHPYFEDLSREDIAKFEPNQVHMY

SEQ ID NO: 1403 - protein, 308 aa, Encephalitozoon cuniculi
MKTYIRERRLGEGTYAVIYLGYRALPQDKPLVSSGTRIEDVPVAIKKIKPTKYTQGHEISAIREIKSLKRIDSKYVVRLIDTFVYDKCVHIVLEYVETNLENVIRNSDKIIMPGDIKAWILMVLRGVYECHRLFIIHRDIKPNNILITSEGMVKLADFGLTRGIGNRMTPQAVTRWYRAPELLMGSRDYGSPVDMWSVGCVFAELFLRVPLFAGDTDIQQLDMIFRALGTPVEREWPGVSTLPEFLDFQQYPKASLNGLFSAASSDALDLLEKLLTLNPCNRISCDDAIKHPYFKSSPPPTPIGKLPV

SEQ ID NO: 1404 - protein, 296 aa, Encephalitozoon cuniculi
MTESFQKLEKIGEGTYGVVYKARERNTNRVVALKKIRLENENEGIPATTIREILLLKNLKHSTIVELSDVIYNNNKMYLVFEYVELDLRRYLDRMSDEGRLVEEGFVRKMSQQLLTAMEYCHSRNIFHRDLKPQNILVDPKENIKLADFGLGRAAGIPLRTYTTEVVTLWYRPPELLLGCKYYDASVDVWSAACIMAEVVLMRPFFPGDSEIDQLFRIFKVLGTPNNSRWSNVENFPNYKVEFPVWDPVDLKTIFRGDPDFVDLISKMLEYDPKMRMTAKNGLSHKYFEGMPLIME

SEQ ID NO: 1405 - protein, 330 aa, Caenorhabditis elegans
MSRRYDTIKHLGEGQFANVYLAQDLESGECVAIKKIKLGSREEAKDGINRTAIREIKLLKEIHHDNIIGLRDVIGHRTSIQLVFDFMDTDLEHVIKDKEIILMPAHIKNITMQMLLGLEFLHVHWILHRDLKPNNLLMNKMGRVKLTDFGLARFFGSPNRNYTHQVVTRWYRAPELLFGARSYGVGIDIWSVGCIIAELLLRNPIFPGESDIDQLVKIFNILGCPTPETWPNMTEMNSYVIIKPQTEYMALNYYFSAAPQDLLDLMAGMWTFDPIKRLTCTQSLQMEYFRTQPFCCLDEELPLPKKQQPQKRSRRLDDDGTRPVRRLNFD

SEQ ID NO: 1406 - protein, 351 aa, Aplysia californica
EIVRGQTFEVAPRYTNLTYIGEGAYGMVVSATDNQTKQKVAIKKISPFEHQTYCQRTLREIKILTRFKHENIIDIRDILRAPTVEDMKDVYIVQCLMETDMYKLLKTQQLSNDHVCYFLYQILRGLKYIHSANVLHRDLKPSNLLLNTTCDLKICDFGLARVADPDHDHTGFLTEYVATRWYRAPEIMLNSKGYTKSIDVWSVGCILAEMLANRPLFPGKHYLDQLNHILGVLGSPSQEDLQCIINDKARGYIQSLPFKPKVPWNKLYPNADVKALDLLEKMLTFNPNKRITVEQALAHPYLEQYYDPADEPVAEEPFTFEMELDDLPKERLKELIFQETLQIQDKNLEHS

SEQ ID NO: 1407 - protein, 319 aa, Bombyx mori
MDDFLKIEKIGEGTYGVVYKGKNKITGQFVAMKKIRLESEDEGIPSTAIREISLLKELNHPNIVKLEDVLMEESRLYLIFEFLSMDLKKYMDSLGSGKFMDPSVVKSYLYQINNAILYCHQRRILHRDLKPQNLLIDKTGIIKVADFGLGRAFGVPVRVYTHEVVTLWYRAPEVLLGSQRYSCPIDIWSVGCIFSEMSSKKPLFQGDSEIDQLFRIFRMLRTPTEEIWPGVSLLPDYKPTFPNWNTYNLHNHVQNLDEVGMDLLQKMLVYDPVKRISAKDARRHKYFRDVKLPPGLTVHDAYIRVTPEYPYDTDSVQSV

SEQ ID NO: 1408 - protein, 302 aa, Rana dybowskii
MDEYAKIEKIGEGTYGVVYKGVHKATGQIVAMKKIRLENEEEGVPSTAIREISLLKELQHPNIVCLLDVLMQDSRLYLIFEFLSMDLKKYLDSIPSGQYLEAMLVKSYLYQILQGIIFCHARRVLHRDLKPQNLLIDSKGVIKLADFGLARAFGIPVRVYTHEVVTLWYRAPEVLLGSVRYSTPVDVWSIGTIFAEIASKKPLFHGDSEIDQLFRISELWGTPNNEVWPEVESLQDYKNTFPKWKGGSLAANVKNIDKEGLDLLAKMLVYDPAKRISARKALLHPYFDDLDKSSLPANQIRN

SEQ ID NO: 1409 - protein, 353 aa, Drosophila melanogaster
MLPNANDKTERYAKLSFLGEGQFATVYKARDTVTNQIVAVKKIKKGSREDARDGINRTALREIKILQELQHENIIGLVDVFGQLSNVSLVFDFMDTDLEVIIKDNKIILTQANIKAYAIMTLKGLEYLHLNWILHRDLKPNNLLVNSDGILKIGDFGLAKSFGSPNRIYTHHVVTRWYRSPELLFGARQYGTGVDMWAVGCILAELMLRVPFMPGDSDLDQLTRIFSTLGTPTEAEWPHLSKLHDYLQFRNFPGTPLDNIFTAAGNDLIHLMQRLFAMNPLRRVSCREALSMPYFANKPAPTVGPKLPMPSAILAAKEGANPQTGDTKPALKRKLVETTVRGNGLAQKKRLQF

SEQ ID NO: 1410 - protein, 289 aa, Plasmodium yoelii yoelii
MEKYHGLEKIGEGTYGVVYKAQNSDGESFALKKIRLEKEDEGIPSTVSIREISILKELRHSNIVKLYDVIHAKKRLILVFEHLDQDLKKLIDVCDGGLESVTAKSFLLQLLNGIAYCHEHRVLHRDLKPQNLLINREGELKIADFGLARAFGIPARRYTHEVVTLWYRAPDILMGSKKYSTPIDIWSVGCIFAEMVNGRPLFPGVSETDQLMRIFKILGTPNSQNWPDVFKLPKYDPNFPVYEPLPWETFIKGLDDTGIDLLSKMLKLDPNQRITAKQAIEHPYFKETN

SEQ ID NO: 1411 - protein, 324 aa, Plasmodium yoelii yoelii
MEHNSNERYIFKPNFLGEGSYGKVYKAYDTVLKKEVAIKKMKLNKISNYIDECGINFLILREIKIMKEIKHKNVMNALDLYCEKDYINLVMEIMDYDLAKLINRKILLTDSQKKCILLQILNGLNTLHKYYFMHRDLSPANIFINKKGEVKIADFGLSSKYAFDMHSGKMANDKYSKRALNLTSKVVTLWYRAPELLMGSNKYNSSIDMWSFGCIFAELLLQKALFPGENEIDQLGKIFFLLGTPNENNWPEAKHLPLYTDFTKSSKKNLKNIIKIEDDDCIDLLASLLKLNSHERITAEEALKHRYFLNDPLPCDASQLFIDM

SEQ ID NO: 1412 - protein, 412 aa, Haematobia irritans irritans
ENRTKISKQLGSIRLYFMQNSFLILCRMNKEVDPVAPVTRKGYLISIKTGEPIEIRERDVHGRCRAVTEFEKLNRIGEGTYGIVYRARDTRTNEIVALKKVRMDQEKDGLPVSGLREITILKKCKHENIVHLREVVVGKSLESMFLVMEYCEQDLASLLDNMTQPFAESEVKCIVLQVLQGLKYMHSHYIIHRDLKVSNLLMTDKGCVKIADFGLARLFGLPSGPMTPQVVTLWYRSPELLLGSTTQTTAVDMWAVGCILGELLSHKPLLPGNTEIAQLELIIDLLGTPSEAIWPDYPKMPAIQNFTLKKQPYNNLKPKFQYLSAAGLRLLNFLFMYDPKKRATADECLHSTYFKEPPLPCDPKLMPSFPQHRNMHQHNSTKTARGSSHTSMPELPAISDLLGSLIKRKKNE

SEQ ID NO: 1413 - protein, 300 aa, Asterina pectinifera
MEDYSKIEKIGEGTYGVVYKGRCKKDGSIVALKKIRLESEEEGVPSTAIREISLLKELQHPNVVNLSNVLMQESRLYLVFEFLTMDLKKYMETLRGTTMDPALVKSYLHQIVQGILFCHCRRVLHRDLKPQNLLIDEKGIIKLADFGLARAFGIPVRVYTHEVVTLWYRAPEVLLGSPRYSTPVDVWSIGCIFAEMVTKRPLFHGDSEIDQLFRIFRTPGTPTDKTWPGVTELPDHKSTFPKWTTNNLAKSVKTLTLRNDLLQKMLIYDPAKRISCKAALSHPYLKDFEGGTVLPTRLGQ

SEQ ID NO: 1414 - protein, 209 aa, Marthasterias glacialis
VYKAKDTEEKNRIVAVKKIKLGHRSERKDGVNRTALREIKLLQELKHDNIIGLLDVFGHRSNISLVFDFMDTDLEVIIQDNSIVLKPGDIKAYTLMTLKGLEYLHRHWILHRDMKPNNSLIDTRGVLKIGDFGLAKFYGTGNRVYTHQVVTRWYRCPELLFGARIYGVGVDMWALGCILAELLLRVPFLPGESDLDQLTRISQTLGTVT

SEQ ID NO: 1415 - protein, 301 aa, Hemicentrotus pulcherrimus
MEDFTKIEKLGEGTYGVVYKGRHKRTGKIVALKKIRLESEEEGVPSTAIREISLLKELYHPNIVLLEDVLMEPNRLYLVFEYLTMDLKKYMESLKGKQMDPALVKSYLHQMVDGILFCHSRRILHRDLKPQNLLIDNNGTIKLADFGLARAFGIPVRVYTHEVVTLWYRAPEVLLGSTRYACPIDMWSLGCIFAEMVTKRPLFHGDSEIDQLFRIFRTLGTPTDEIWPGVTQLQDYKSTFPMWTKPNIKGAVKGMDEEGLDLLEKMLIYDPAKRITAKASMRHPYFDNIPDLSDRLQPIRS

SEQ ID NO: 1416 - protein, 371 aa, Lytechinus variegatus
MASPVPSQSSPERYVQAAEIGSGAYGIVYKARDTETGHFVALKSVRIPIGEEGMPVSTIREISLLRHLCQLDHPNIVKLLDVCDVMDVGRSEMMLTLVFELVDQDLAQYLERCPPPGLSSSTIKVLMQQLLSGVEYLHSHRVTHRDLKPQNILIACDKKLKLTDFGLSRVYSFQMALTPVVVTMWYRAPEVLLQASYATPVDMWSVGCIFAELHRRRPLFRGQSDKDQLHKIFEVIGLPPEDQWPDVALPWSSFRQTGQRSFLDLVQEICNHGLDLLERMLCFNPDHRITAEQSLSHSYFDDEQGDEEEEDDDDTEVEEEDDDEGVDVGQERSLSVASSRMSLSTDDSGSHSQFGVSDDSQSQEITPTNVR

SEQ ID NO: 1417 - protein, 373 aa, Strongylocentrotus purpuratus
MASSVPSRSTPERYVQAAEIGSGAYGIVYKARDTETGHFVALKSVRIPIGEEGMPVSTIREISLLRHLCQLDHPNIVKLLDVCDVMDVGRSEMMLTLVFELVDQDLAQYLEKCPPPGLSSCTIKFLMHQLLSGVEYLHSHRVTHRDLKPQNILVASDKKLKLTDFGLSRVYSFQMALTPVVVTMWYRAPEVLLQASYATPVDMWSVGCIFAELYRRRPLFRGQSDKDQLHKIFEVIGLPPEDQWPDVALPWSSFRQTGQRSFLDLVQEICNQGLDLLERMLCFNPDHRMTAEQGLLHGFFGDEEEDDEEDDDTEVEDDDDEEDEDDEGVDVGQERSQSASTSSMSQATDDSGSHSQFFSDSSQSQDVTPTNKR

SEQ ID NO: 1418 - protein, 362 aa, Halocynthia roretzi
MSGMKAMSGVKVTVRGQVFDVGPRYVDLSYIGEGAYGMVVSATDNFTGHKVAIKKISPFEHQTYCQRTLREIKILLSFNHENIIAIQDIIRSSAMEMMKDVHIVQDLMETDLYKLLKTQKISNDHVCYFLYQILRGLKYIHSANVIHRDLKPSNLLLNTTCDLKVCDFGLARVSDPDHDHTGFLTEYVATRWYRAPEIMLNSKGYTKSIDIWSVGCILAEMLNNRPLFPGKHYLDQLNHILGVLGSPNNEDLSCIINEKARAYLLSLPLKPKVPWVGMYPNADKKALDLLDKMLTFNPNKRITVVEALAHPYLEQYYDPADEPVAEKPFTFEEELDDLPKEKLKQMIYDTTDPAKFPGPHPT

SEQ ID NO: 1419 - protein, 344 aa, Carassius auratus
MALDVKSRAKLYEKLDFLGEGQFATVYKARDKTTNTIVAIKKIKVGHRTEAKDGINRTALREIKLLQELSHPNIIGLLDAFGHKSNISLLCFMETDLEVIIKDTSLVLTPANIKAYILMSLQGLEYMHNHWILHRDLKPNNLLLDENGVLKLADFGLAKAFGSPNRVYTHQVVTRWYRAPELLFGARMYGVGVDMWAVGSILAELLLRVPFLAGDSDLDQLTGIFEALGTPTEETWPGMSNLPDYVSFKLFPGTPLEHIFSAAGDDLLELLKGLFTFNPCTRTTASQALKMRYFSIRPGPTPGPQLPRPNSSTEALKEKENLLIGIKRKRDSIEQGTLKKKLVF

SEQ ID NO: 1420 - protein, 392 aa, Cyprinus carpio
MAESGSSAAAAGAAGSSSSAAGAGAAVAVGGANGAAGPKPGLESVKGQNFDVGPRYTDLQYIGEGAYGMVCSAFDNVNKIRVAIKKISPFEHQTYCQRTLREIKILLRFRHENIIGINDILRARRIEYMRDVYIVQDLMETDLYKLLKTQQLSNDHVCYFLYQILRGLKYIHSANVLHRDLKPSNLLINTTCDLKICDFGLARIADPEHDHTGFLTEYVATRWYRAPEIMLNSKGYTKSIDMWSVGCILAEMLSNRPIFPGKHYLDQLNHILGILGSPTQDDLNCIINMKARNYLQALPQKPKIPWNKLFPKADNKALDLLDRMLTFNPIKRITVEEALAHPYLEQYYDPSDEPVAEEPFTFNMELDDLPKEKLKELIYEETARFQATYQGS

SEQ ID NO: 1421 - protein, 369 aa, Cyprinus carpio
MATAAVSAPAGGGPNPGSGAEMVRGQAFDVGPRYTNLSYIGEGAYGMVCSAYKRDNKVRVAIKKISPFEHQTYCQRTLREIKILLRFKHENIIGINDIIRTTTIDQMKDVYIVQDLMETDLYKLLKTQHLSNDHICYFLYQILRGLKYIHSANVLHRDLKPSNLLLNTTCDLKICDFGLARVADPDHDHTGFLTEYVATRWYRAPEIMLNSKGYTKSIDIWSVGCILAEMLSNRPIFPGKHYLDQLNHILGILGSPSQEDLNCIINIKARNYLLSLPLRCKVPWNRLFPNADPKALDLLDKMLTFNPHKRIEVEEALAHPYLEQYYDPTDEPVAEAPFKFDMELDDLPKETLKELIFEETARFQPGYRP

SEQ ID NO: 1422 - protein, 361 aa, Cyprinus carpio
MSHKERPTFYRQELNKTIWEVPERYQNLSPVGSGAYGSVCSALDTKSGLRVAVKKLSRPFQSMIHAKRTYRELRLLKHMKHENVIGLLDAFSPATCLAGFNDVYLVTHLMGADLNNIVKCQKLTDDHVQFLIYQILRGLKYIHSADIIHRDLKPSNLAVNEDCELKILDFGLARLTDDEMTGYVATRWYRAPEIMLNWMHYNMTVDIWSVGCIMAELLTGRTLFPGTDHINQLQQIMRLTGTPPASLISRMPSHEARNYINSLSYMPKRNFADVFVGANPMAVDLLEKMLVLDTDKRITASQALAHPYFAQYHDPDDEPEADPYDQSFESRDLDIEEWKRLTYEEVISFEPPVFDGDEMES

SEQ ID NO: 1423 - protein, 303 aa, Oryzias latipes
MEDYVKIEKIGEGTYGVVYKGRHKSTGQVVAMKKIRLESEEEGVPSTAVREVSLLQELKHPNVVRLLDVLMQESRLYLIFEFLSMDLKKYLDSIPSGQYMDPMLVKSYLYQILEGIYFCHRRRVLHRDLKPQNLLIDNKGVIKLADFGLARAFGVPVRVYTHEVVTLWYRAPEVLLGSPRYSTPVDVWSTGTIFAELATKKPLFHGDSEIDQLFRIFRTLGTPNNDVWPDVESLPDYKNTFPKWKEGSLSSMVKNLDKNGLDLLAKMLIYNPPKRISAREAMTHPYFDDLDKSTLPAACINGV

SEQ ID NO: 1424 - protein, 395 aa, Paralichthys olivaceus
  unsure (1)..(395): unsure at all Xaa locations
MADLCCTAAEVGAAGSDSAAADGADGTVALDVGGAPVAAVPKIESESVKGQIFDVGPRYTNLCYIGEGAYGMVCSAMDNVTTXRVAIKKISPFEHQTYCQRTLREIKILLRLDHENIIGINDILMYKLRARHIDNMGDVYIVQTLMETDLKSQRLSNDHVCYFLYQILRGLKYIHSANVLHRDLKPSNLLINTTCDLKMCDFGLARIADPEHDHTGFLTEYVATRWYRAPEIMLNSKGYSKSIDIWSVGCILAEMLSNKPIFPGKDYLDQLNHMLGVLGSHLKMNLNCIINMKARNYLQSLPEKPKIPWEKIFNRADSKALDLLGRMLTFNPIRRISVEEALGHPYLEQYYDPSDEPVAEEPFTFTMELDDLPKEKLKELIFEETARFQETYQGS

SEQ ID NO: 1425 - protein, 365 aa, Xenopus laevis
MLAIDCGKGAAGRMEGIAARGVDVRSRAKQYEKLDFLGEGQFATVYKARDKNTDRIVAIKKIKLGHRAEANDGINRTALREIKLLQELSHPNIIGLLDAFGHKSNISLVFDFMETDLEVIIKDTSLVLTPAHIKSYMLMTLQGLEYLHHLWILHRDLKPNNLLLDENGVLKLADFGLAKSFGSPNRIYTHQVVTRWYRSPELLFGARMYGVGVDMWAVGCILAELLLRVPFLPGDSDLDQLTRIFETLGTPTEEQWPGMSSLPDYVAFKSFPGTPLHLIFIAAGDDLLELLQGLFTFNPCARCTASQALRKRYFSNRPAPTPGNLLPRPNCSIEALKEQQNLNLGIKRKRTEGMDQKDIAKKLSF

SEQ ID NO: 1426 - protein, 352 aa, Xenopus laevis
MEGIAARGVDVRSRAKQYEKLDFLGEGQFATVYKARDKNTDRIVAIKKIKLGHRAEANDGINRTALREIKLLQELSHPNIIGLLDAFGHKSNISLVFDFMETDLEVIIKDTSLVLTPAHIKSYMLMTLQGLEYLHHLWILHRDLKPNNLLLDENGVLKLADFGLAKSFGSPNRIYTHQVVTRWYRSPELLFGARMYGVGVDMWAVGCILAELLLRVPFLPGDSDLDQLTRIFETLGTPTEEQWPGMSSLPDYVAFKSFPGTPLHLIFIAAGDDLLELLQGLFTFNPCARCTASQALRKRYFSNRPAPTPGNLLPRPNCSIEALKEQQNLNLGIKRKRTEGMDQKDIAKKLSF

SEQ ID NO: 1427 - protein, 303 aa, Gallus gallus
MEDYTKIEKIGEGTYGVVYKGRHKTTGQVVAMKKIRLESEEEGVPSTAIREISLLKELHHPNIVCLQDVLMQDARLYLIFEFLSMDLKKYLDTIPSGQYLDRSRVKSYLYQILQGIVFCHSRRVLHRDLKPQNLLIDDKGVIKLADFGLARAFGIPVRVYTHEVVTLWYRSPEVLLGSALYSTPVDIWSIGTIFAELATKKPLFHGDSEIDQLFRIFRALGTPNNDVWPDVESLQDYKNTFPKWKPGSLGTHVQNLDEDGLDLLSKMLIYDPAKRISGKMALNHPYFDDLDKSTLPANLIKKF

SEQ ID NO: 1428 - protein, 365 aa, Pan troglodytes
  unsure (1)..(365): unsure at all Xaa locations
MSLIRKKGFYKQDVNKXXXELXKTYVSPTHVGSGAYGSVCSAIDKRSGEKVAIKKLSRPFQSEIFAKRAYRELLLLKHMQHENVIGLLDVFTPASSLRNFHDFYLVMXFMQTDLQKIMXMEFSEEKIQYLVYQMLKGLKYIHSAGVVHRDLKPGNLAVNEDCELKILDFGLARHADAEMTGYVVTRWYRAPEVILSWMHYNQTVDIWSVGCIMAEMLTGKTLFKGKDYLDQLTQILKVTGVPGTEFVQKLNDXAAKSYIQSLPQTPRKDFTQLFPRASPQAADLLEKMLELDVDKRLTAAQALTHPFFEPFRDPEEETEAQQPFDDSLEHEKLTVDEWKQHIYKEIVNFSPIARKDSRRRXGXKL

SEQ ID NO: 1429 - protein, 346 aa, Homo sapiens
MALDVKSRAKRYEKLDFLGEGQFATVYKARDKNTNQIVAIKKIKLGHRSEAKDGINRTALREIKLLQELSHPNIIGLLDAFGHKSNISLVFDFMETDLEVIIKDNSLVLTPSHIKAYMLMTLQGLEYLHRHWILHRDLKPNNLLLDENGVLKLADFGLAKSFGSPNRAYTHQVVTRWYRAPELLFGARMYGVGVDMWAVGCILAELLLRVPFLPGDSDLDQLTRIFETLGTPTEEQWPDMCSLPDYVTFKSFPGIPLHHIFSAAGDDLLDLIQGLFLFNPCARITATQALKMKYFSNRPGPTPGCQLPRPNCPVETLKEQSNPALAIKRKRTEALEQGGLPKKLIF

SEQ ID NO: 1430 - protein, 346 aa, Homo sapiens
MALDVKSRAKRYEKLDFLGEGQFATVYKARDKNTNQIVAIKKIKLGHRSEAKDGINRTALREIKLLQELSHPNIIGLLDAFGHKSNISLVFDFMETDLEVIIKDNSLVLTPSHIKAYMLMTLQGLEYLHQHWILHRDLKPNNLLLDENGVLKLADFGLAKSFGSPNRAYTHQVVTRWYRAPELLFGARMYGVGVDMWAVGCILAELLLRVPFLPGDSDLDQLTRIFETLGTPTEEQWPDMCSLPDYVTFKSFPGIPLHHIFSAAGDDLLDLIQGLFLFNPCARITATQALKMKYFSNRPGPTPGCQLPRPNCPVETLKEQSNPALAIKRKRTEALEQGGLPKKLIF

SEQ ID NO: 1431 - protein, 346 aa, Homo sapiens [sequence omitted]

SEQ ID NO: 1432 - protein, 346 aa, Homo sapiens
MDQYCILGRIGEGAHGIVFKAKHVETGEIVALKKVALRRLEDGFPNQALREIKALQEMEDNQYVVQLKAVFPHGGGFVLAFEFMLSDLAEVVRHAQRPLAQAQVKSYLQMLLKGVAFCHANNIVHRDLKPANLLISASGQLKIADFGLARVFSPDGSRLYTHQVATRWYRAPELLYGARQYDQGVDLWSVGCIMGELLNGSPLFPGKNDIEQLCYVLRILGTPNPQVWPELTELPDYNKISFKEQVPMPLEEVLPDVSPQALDLLGQFLLYPPHQRIAASKALLHQYFFTAPLPAHPSELPIPQRLGGPAPKAHPGPPHIHDFHVDRPLEESLLNPELIRPFILEG

SEQ ID NO: 1433 - protein, 303 aa, Sus scrofa
MATSRYEPVAEIGVGAYGTVYKARDPHSGHFVALKSVRVPNGGGAGGGLPISTVREVALLRRLEAFEHPNVVRLMDVCATARTDRETKVTLVFEHVDQDLRTYLDKAPPPGLPVETIKDLMRQFLRGLDFLHANCIVHRDLKPENILVTSGGTVKLADFGLARIYSYQMALTPVVVTLWYRAPEVLLQSTYATPVDMWSVGCIFAEMFRRKPLFCGNSEADQLGKIFDLIGLPPEDDWPRDVSLPRGAFSPRGPRPVQSVVPEMEESGAQLLLEMLTFNPHKRISAFRALQHSYLHKAEGNPE

SEQ ID NO: 1434 - protein, 292 aa, Bos taurus
MQKYEKLEKIGEGTYGTVFKAKNRETHEIVALKRVRLDDDDEGVPSSALREICLLKELKHKNIVRLHDVLHSDKKLTLVFEFCDQDLKKYFDSCNGDLDPEIVKSFLFQLLKGLGFCHSRNVLHRDLKPQNLLINRNGELKLADFGLARAFGIPVRCYSAEVVTLWYRSPDVLFGAKLYSTSIDMWSAGCIFAELANAGRPLFPGNDVDDQLKRIFRLLGTPTEEQWPAMTKLPDYKPYPMYPATTSLVNVVPKLNATGRDLLQNLLKCNPVQRISAEEALQHPYFSDFCPP

SEQ ID NO: 1435 - protein, 297 aa, Bos taurus
MEDYTKIEKIGEGTYGVVYKGRHKTTGQVVAMKKIRLESEEEGVPSTAIREISLLKELRHPNIVSLQDVLMQDSRLYLIFEFLSMDLKKYLDSIPPGQFMDSSLVKSYLYQILQGIVFCHSRRVLHRDLKPQNLLIDDKGTIKLADFGLARAFGIPIRVYTHEVVTLWYRSPEVLLGSAGYSTPVDIWSIGTIFAELATKKPLFHGDSEIDQLFRIFRALGTPNNEVWPEVESLQDYKSTFPKWKPGSLASHVKNLDENGLDLLSKMLIYDPAKRISGKMALNHPYFNDLDSQIKKM

SEQ ID NO: 1436 - protein, 566 aa, Oryctolagus cuniculus
MEKYENLGLVGEGSYGMVMKCRNKDSGRIVAIKKFLESDDDKMVKKIAMREIKLLKQLRHENLVNLLEVCKKKKRWYLVFEFVDHTILDDLELFPNGLDDQVVQKYLFQIINGIGFCHSHNIIHRDIKPENILVSQSGVVKLCDFGFARTLAAPGEVYTDYVATRWYRAPELLVGDVKYGKAVDVWAIGCLVTEMLMGEPLFPGDSDIDQLYLIMRCLGNLIPRHQELFYKNPVFAGVRLPEIKESEPLERRYPKLSEVVIDLAKKCLHVDPDKRPFCAELLHHDFFQMDGFAERFSQELQMKVQKDARNISLSKKSQNRKKEKEKDDSLGEERKTLVVQDTNVDSKFKDSKVFKIKGSKIDGEKVDKGNRAAVSMTVGPSHIKAVPSTSLRDCSNVSVDHTRNPGMAIPPLTHNLSAVAPGINSGMGTIPGVQSYRVDEKTKKYCIPFVKPNKHSPSGIYNMNVTTSVSSEKNLLQANKKRGEYSKTDVRLPELNYNHLPELRALEGIARNSRLIRKENKILSESRIPSLAAIDLHTPNIAVHQVSGSPLSDGSEADSPWMEHQH

SEQ ID NO: 1437 - protein, 311 aa, Leishmania donovani donovani
MSSFGRATARSGDAGTRDSLDRYNRLDVLGEGTYGVVYRAVDKITGQYVALKKVRLDRTEEGIPQTALREVSILQEFDHPNIVNLLDVICSDGKLYLVFEYVEADLKKAIEKQEGGYSGMDLKRLIYQLLDGLYFCHRHRIIHRDLKPANILLTSGNVLKLADFGLARAFQVPMHTYTHEVVTLWYRAPEILLGEKHYTPAVDMWSVGCIFAELARRKVLFRGDSEIGQLFEIFQVLGTPTDTEGSWPGVSRLPDYRDVFPKWTAKRLGQVLPELHPDAIDLLSKMLKYDPRERISAKEALQHPWFSDLRW

SEQ ID NO: 1438 - protein, 155 aa, Axinella corrugata
GEGTYGVVYKARVKESGRTVALKKIRLDTECEGVPSTAIREISLLKELGHPNIVSLLEVLHCDRKLFLVFEYLDYDLKKFMDKSAPTGIPPNSAKSYLYQLLDGISFCHSHRVLHRDLKPQNLLLNSHGVIKLADFGLARAFGVPVRTYTHEVVT

SEQ ID NO: 1439 - protein, 699 aa, Plasmodium falciparum 3D7
MGKGHDVKKERGKKDEDEHNEYHPYRRDNKSFYSKNYKMKNKHSYNSSDEYKKYVSHDTYNSYDTYNSYKSHEEHKNNKHISIKPVNKNKYVHSPSPKKTKKIYDELSDYNKHKKYSSSKMDKKKDSYYKEQSNKYKEKRKYDESSQDTYDKKRKRKRKKKKYDYEREEEKYNRYDERRDSSYYTSNYSEDSSKREGGKKEKEDLYISRKEFSGKKKSHKGEHNNNNHHTDQHIKNNYHTDQHNNNNHHTDQHNNNNHHTDQHNNNNHHTDQHNNTISDQINIFPEKNKRDNRINEEKYTIKEHLIYEDEQNISYESNKDSSSEENTILNEYSSDEEKNKIDCILNGCRNVKNYKKLNKISEGTYGAVYRAQNKRTKKIVALKKLKNFSSMHNEGFAMTSLREINILLQLQHDNILSIKEVVFGKHLNDIYLVMEYIEHELKMILDNKSPSFTISELKCLLKQLLSGINYLHRNWVMHRDLKPTNLLYSNKGILKICDFGMARKFGHVTNHNFTKNVVTLWYRAPELLLGEQCYTNKIDIWSAGCIFAEMILKKPLFVGENEIDQLFKILCLLGLPDKESYPEFYEYSFISKNKELFKKKKIKMNVNNIRSHFPNIANQFSGLYLSDNGLDLLQKMLHYNPQCRISAQEALNHPYFNEFPKPLDIKDMPIVPDSNKFIRSNKMANHFKLNSQNNIQFHS

SEQ ID NO: 1440 - protein, 479 aa, Arabidopsis thaliana
MDKQPATSWSIHTRPEIIAKYEIFERVGSGAYADVYRARRLSDGLIVALKEIFDYQSAFREIDALTILNGSPNVVVMHEYFWREEENAVLVLEFLRSDLAAVIRDGKRKKKVEGGDGFSVGEIKRWMIQILTGVDACHRNLIVHRDLKPGNMLISDDGVLKLADFGQARILMEHDIVASDENQQAYKLEDKDGETSEPPEVIPDYENSPRQGSDGQEREAMSKDEYFRQVEELKAKQVVRDDTDKDSNVHDGDISCLATCTVSEMDDDLGRNSFSYDADEAVDDTQGLMTSCVGTRWFRPPELLYGSTMYGLEVDLWSLGCVFAELLSLEPLFPGISDIDQISRVTNVLGNLNEEVWPGCVDLPDYKSISFAKVESPLGIEGCLPNHSGDVISLLKKLICYDPASRATTMEMLNDKYLSEEPLPVPVSELYVPPTMSGPDEDSPRKWNDYREMDSDSDFDGFGPMNVKPTSSGFTIEFP

SEQ ID NO: 1441 - protein, 313 aa, Cicer arietinum
ETVAIKKVLQDKRYKNRELQTMRLLDHPNVVTLKHCFFSTTEKDELYLNLVLEYVPETVYRVIRHYSKMNQRMPLIYVKLYFYQICRALAYIHNCVGVSHRDIKPQNLLVNPHTHQLKLCDFGSAKVLVKGEPNISYICSRYYKAPELIFGATEYTTAIDIWSAGCVLGELLLGQPLFPGASGVDQLVEIIKVLGTPTREEIKCMNPNYTEFKFPQIKAHPWHKIFRKRMPPEAVDLVSRLLQYSPNLRSTALEALVHPFLDELRDPNTRLPNGRHLPPLFNFKANELKGVSAEMLVKLIPLHARKQCALFVS

SEQ ID NO: 1442 - protein, 341 aa, Trifolium repens
QTISYMAERVVGHGSFGVVFQAKCLETGETVAIKKVLQDKRYKNRELQTMRLLDHPNVVSLKHCFFSTTEKDELYLNLVLEYVPETVHRVIKHYNKLNQRMPMIYVKLYTYQIFRALSYIHRCIGVCHRDIKPQNLLVNPHTHQVKLCDFGSAKVLVKGEPNISYICSRYYRAPELIFGATEYTTAIDVWSVGCVLAELLLGQPLFPGESGVDQLVEIIKVLGTPTREEIKCMNPNYTEFKFPQIKAHPWHKIFHKRMPPEAVDLVSRLLQYSPNLRCQALDALTHPFFDELRDPNARLPTGRFLPPLFNFKPHELKGIPVETLVKLVPEHARKQCPFLGL

SEQ ID NO: 1443 - protein, 294 aa, Vigna unguiculata
MEQYEKVEKIGEGTYGVVYKARDRVTDETIALKKIRLEQEDEGVPSTAIREISLLKEMQHRNIVRLQDVVHSEKRLYLVFEYLDLDLKKHMDSSPEFVKDPRQVKMFLYQILCGIAYCHSHRVLHRDLKPQNLLIDRRTNSLKLADFGLARAFGIPVRTFTHEVVTLWYRAPEILLGSRHYSTPVDVWSVGCLFAEMVNRRPLFPGDSEIDELFKIFRILGTPNEETWPGVTALPDFKSTFPKWPPKDLATMVPNLDAAGLNLLSSMLSLDPSKRITARIAVEHEYFKDIKFVP

SEQ ID NO: 1444 - protein, 294 aa, Vigna unguiculata
  unsure (1)..(294): unsure at all Xaa locations
MEQYEKVEKIGEGTYGVVYKARDRVTDETIALKKIRLEQEDEGVPSTAIREISLLKEMQHRNIVRLQDVVHSEKRLYLVFEYLDLDLKKHMDSSPEFVKDPRQVKMFLYQILCGIAYCHSHRVLHRDLKPQNLLIDRRTNSLKLADFGLARAFGIPVRTFTHEVVTLWYRAPEILLGSRHYSTPVDVWSVGCLFAEMVNRRPLFPGDSEIDELFKIFRILGTPNEETWPGVTALPDFKSTFPKWPPKDLATMVPNLDAAGLNLLSXMLSLDPSKRITARIAVEHEYFKDIKFVP

SEQ ID NO: 1445 - protein, 480 aa, Euphorbia esula
MEQLPPSPPPHAKSWSIHTRPEIIAKYEIQERVGSGAYSDVYKARRLSDNLIVALKEIHDYQSAFREIEALHIVQNCPNIVVLHEYFWREDEDAVLVLEFLRTDLASLIKEGKKNGGIGVNAGEIKRWMMQILSGLDACHRNMVVHRDLKPSNLLISDDGVLKLADFGQARILMEPGFVATATDETMHPDEQNLAVNEQKVVTSPENIPQVNPVPIEVQSNQEQVIVKGYESFRETGESKPYDYLDETSIRDGDTSCLATGTASDMGDDFMRSTYNYETDEVDNERYGSLTSCVGTRWFRAPELLYGSTDYGLEIDLWSLGCIFAELLTLEPLFPGTSDIDQLSRIINVLGNLTEQVWPGCLKLPDYGTISFNKVENPTGIESYLTNHSPEEIALVKKLVCYDPAARATAMELLRDEYFSKEPFPVPKFELGGPLLNSGQDEDFPGRYDDYFERDFDSDFDNFAPVKIRSTRTGFSKQFS

SEQ ID NO: 1446 - protein, 396 aa, Solanum tuberosum
MDASAPQMDTMMPDVAAPAVQQPPPPPQPLPGMDNIPATLSHGGRFIQYNIFGNIFEVTAKYKPPIMPIGKGAYGIVCSALNSETNENVAIKKIANAFDNKIDAKRTLREIKLLRHMDHENIVAIRDIIPPPQREAFNDVYIAYELMDTDLHQIIRSNQGLSEEHCQYFLYQILRGLKYIHSANVLHRDLKPSNLLLNANCDLKICDFGLARVTSETDFMTEYVVTRWYRPPELLLNSSDYTAAIDVWSVGCIFMELMDRKPLFPGRDHVHQLRLIMELIGTPSEAEMEFLNENAKRYIRQLPLYRRQSFTEKFPHVNPAAIDLVEKMLTFDPRRRITVEDALAHPYLASLHDISDEPICMTPFNFDFEQHALTEEQMKELIYRESIAFNPEYQRM

SEQ ID NO: 1447 - protein, 394 aa, Solanum tuberosum
MDGSAQQTDTVMSDAAAGQQPATPPLPMAGMENIPATLSHGGRFIQYNIFGNIFEVTAKYKPPIMPIGKGAYGIVCSALNSETNEHVAIKKIANAFDNKIDAKRTLREIKLLRHMDHENIVAIRDIIPPPQREAFNDVYIAYELMDTDLHQIIRSNQGLSEEHCQYFLYQILRGLKYIHSANVLHRDLKPSNLLLNANCDLKICDFGLARVTSETDFMTEYVVTRWYRPPELLLNSSDYTAAIDVWSVGCIFMELMDRKPLFPGRDHVHQLRLLMELIGTPSEAEMEFLNENAKRYIRQLPLYRRQSFVEKFPHVNPAAIDLVEKMLTFDPRRRLTVEGALAHPYLTSLHDISDEPVCMTPFSFDFEQHALTEEQMKELIYREGLAFNPEYQHM

SEQ ID NO: 1448 - protein, 379 aa, Solanum tuberosum
MANQTGGASSTGSRDIRGVLIHGGQYVRYNVYGSLFEVSSKYVPPIRPIGRGAYGLVCAAVNSETREEVAIKKIGNAFDNRIDAKRTLREIKLLRHLDHENIVAIKDLIRPPKKEAFNDVYIVSELMDTDLHQIIRSEQPLTNDHCQYFMYQLLRGLKYVHSANVLHRDLKPSNLFLNANCDLKIGDFGLARTTSETDFMTEYVVTRWYRAPELLLNCSEYTGAIDVWSVGCILGEIMTREPLFPGKDYVQQLRLITELLGSPDDASLQFLRSDNARRYVRQLPQYPKQQFSARFPSMSPLAVDLLEKMLVFDPTRRITVDEALCHPFLSSLHDLNDEPICPSPFSLDFDEPSITEEKIKELIWRESVKFYPDFVDQNI

SEQ ID NO: 1449 - protein, 206 aa, Oryza sativa
  unsure (1)..(206): unsure at all Xaa locations
EEGMLEEESGAFTSCVGTRWFRAPELLYGSTNYGQEVDLWSLGCISGARFNFRALFPGPIWIPIQIGRIIRVLGNLTEETFPXGCSNLPXDYNKIFFNKVEXSPIGLEACLPDRSASEVSIIKRLLCYDPXTKRASAADLLNDPYFAEEPLPVPIEGLQVPESKDEDDDSTEEWANFRGGDSDSDFDEFGSMDVTKTDKGFSIRFS

SEQ ID NO: 1450 - protein, 451 aa, Triticum aestivum
  unsure (1)..(451): unsure at all Xaa locations
MAIGGGGGGGSWSIHGRPDVTSRYDVLGRAGSGAYADVYRGRRRSDGAPVALKEVHDAVSAQREVDALLAAASESSPHVITLLDHFPGGDHDDDVLVLEWLPLDLAAVVREGRRAGGLPAGQLKRWMLQVIEGVAACHRAGLVHRDLKPGNLLISEDGVLKVADFGQARILQEXXPSDEPEIXXAAQEPETLTAADYLHEIDQLRAKSTYGDVDRMSLQDGNTSCLATCSTADIDDDPFRASYSYDAEEDIGDEESGAFTSCVGTRWFRAPELLYGSTSYGQEIDLWSLGCILAELLSLEPHIPKANPDIAQIGRIIGVLGNITQESFPGCSNLPDYNKIFFSKVEKPTGLEASLPNRSASEVSIVKRLLCYDPAKRASASELLNDPYFTEEPLPVPTEALQVPASKGEDDDSSAEEWGNYRDGNSDSDIDEFGSMDVTKTDKGFSIRFXR

SEQ ID NO: 1451 - protein, 485 aa, Zea mays
  unsure (1)..(485): unsure at all Xaa locations
FNRIQILFPNPTPMARSWSIHGRADVTSRYEVLGRAGSGSYADVYRGRRRSDGAAVALKEVHDAVSARSEVEALLAIPPSPNVVALIDHFPGGDCDASXVLVLEWLPLDLAAVVREGGGEGGEGIPASQLKRWMLQVLEGVAACHRAGVVHRDLKPENLLISEDGVLKVADFGQARILQQSAPTFQEMYPHEQSSGMETWVPQQQPAVLQGTEEEPTSYESDATAGQEPETLTAADYLRELDQLRENPAMXDKMSFQDEHASCLCTCSTGDIGDDPYPALYSDDMEGIGEDSGAFTSCVGTRWFRAPELLYGSTNYGLEIDLWSLGCILAELMKLEALFPGISDIDQISRIINVLGDITEETFPGCSNLPDYNKISFNKVEKPTGLEACLPNRSPTEVSIIKQLICYDTAKRTSAVDLLNDRYFTEEPLPAPIEGLHVPASKDEDDDSSTEEWGNYRDGVSRVDFDEFGSMDATKTEKGFSIQFS

SEQ ID NO: 1452 - protein, 1106 aa, Leishmania mexicana
MEAYETLGILGEGTYGVVVKARSRVTGKLVAIKRFKQTEQDEHVRKTSSREVRMLQLLQHPNVIRLEDVFRREGKLYLVFEFIDHTILQLLESTTRGFHRHELRRYTYQLLRGIEFCHNQNIIHRDVKPENVLIDESGLLKLCDFGFARQTSAKGKYTDYVATRWYRAPELLVGDVAYGKPVDVWALGCMFAELSDGQPLFPGESDLDQLCLIMQTCGPVPQRLVFIFMHNPLYNGISFPHTDILYTLKDRYHRESNDWIEFLSSCLHTDPAQRLTCTELMELPYFTRDGFRDRYEAELRAATGLPQLRSTPTTSAPSTQRRAPDQAAALGGDIKADAVVPPHTRRSSENISPALQGQQPPTAKNSFSEPHISKTALKPAAHDANPGKGKGAGAPTLRLTSPHKTASEHPLQLPMILNVSSERAIAAALTDYLNQMPTSSSTVVSSPAQATPAEVAEAFTKADPLSRSCGAALPLQTSQTINASTTRDKKKKRNSSLAETELHRRSSASISNDTEYAVTTDGTKGEPARHISDHPRASATLPPNGVRDGGDSHEPRREGEKTNVSPPLPSHGVAESNMRALLTTAAPGKDGGETAVLSHRALKPASAEKAAATTATAFSPPPLTATHGAPLAECLQDLPALSLHLPRHLQSERQTPAAEQPQPHTSLSAETSMSSFHVRTRNPLAAASSVNDGVSHGKANIETTGSSVAKPRLGLSNSSVSTAASEVKKRKSARHKSNTSRLQDKAVGPVSGSASRRPVPGNASDVVAYRAGFASVVNSLKSTVSQSLSHVLGQQQRHRLLSPESDGVHTAEPHLHGVGAGPSAPDSTRNRNVDATGPQPRKERRCKPLAASTHALQGSDQRHRQQSQPRLDGPLHPDGGASQRATATLMALSALRNVSGPPPAKSAGDANKSSYVHHTRSHTNNNGGETVIPVVGGDGNDTNTCVTSRARRPIVACAVHGNNRDSDELMATRRVQKKNAVATHGRTGNGAVGSIGCTDSSTTSSYQATSIMYGAPYHPFARASKVDGDVCGAQQRQTLQRLKKKIADHRGSGIANTTSSIGSRHSLTPARQIQHQPQLAKEDGGSGDGKTPQFNAATAASPDTGI

SEQ ID NO: 1453 - protein, 385 aa, Toxoplasma gondii
MAAPQVKPEVGDSPEATRQGVLLPSASEEAAANGSSSPRLVPIKREGKQRYRQCDAFLGEGTYGRVEKAEDLRTHQIVAIKKVKASAGSLFASGDSGSVGSGEKTRAQLLRQNVGSVGLHFTTVRELKVMREIEEENVMGVVGVCRAGLHLPRDGTHARRPEEAGRQQDPPRDPTCQVHRLQILRGLHALHKRYIVHRDLAPANVFINDQGICKVADFGLSRCFGCPVVSGTLSKQEQSKGETSQPGKESSVESASKTAPVAISRKELMTSKVVTLWYRPPELLFGADRYGQAVDMWSVGCIMAELLTGETEKLLEIHAQHRRHTMDFKDSERVGQGEPGGSGVDRWVITSKKVREVKKAREVKKAQRIRERGGSLKQRERCEVT

SEQ ID NO: 1454 - protein, 430 aa, Tetrahymena pyriformis
MDKKLSSRNFQDWEAGDRYELVKVVGSGSYGSVREAIDKKTGKKVAIKRLNGIFEDNVDCKRILREIHLLRILNHPNLIRINEIIEPKDFANFDTLYVVTEYCQSDLKKLFKSPIHLCMIQVETLTYNILTGIKYLHSAEVLHRDLKPANVLINEDCSVKICDFGLARSVEGIEGAHIYDERDGGSNSPQKIAPSSQSPEKPATGGRPKLTKEKNLNSKSSKRELTGHVVTRWYRAPELILLEKDYTAAIDIWSIGCIFAELMNMIKENSPTFLDRSPLFPGSSCFPLSPDRNNTVKQGGFPHSHSDQLNVIFSVLGTPSEEDMDFVTDAKAIEYLKSFKQKKRVDFKDLFPAATPECIDFLNQTLVFNPRKRITIDAALNHPLFTPVRDIKKEVFAEGSVILPFEKEGDMPIARLRELFIEEIKRYHVK

SEQ ID NO: 1455 - protein, 363 aa, Pisaster ochraceus
MNNPVTGSGETLSDDGYHRYELNKTTWEVPVQYQKLSAVGAGAYGSVCSSLNTKTGIKIAIKKLSRPFQSAIHAKRTYRELRLLQHMDHENIISLLDVFCRGDTLSSFRDVYMVTHLMGADLNSITKTQKLSDEHVQFLVYQILRGLKYIHSVGVIHRDLKPSNLAVNEDCELRILDFGLARQADDEMTGYVATRWYRAPEIMLNWMHYTNTVDMWSVGCIMAELLTGKTLFPGSDHIDQLSRIMDLTGTPDDEILAKIQSEDARNFVKSQPKTKKKDFRGYFAGANEIAVDLLEKMLLLDVDKRITAEEALSHPYVAKYHDESDEPIGKQFDDSFEQQDLTVQQWKELTFQLIQAVRHQSRR

SEQ ID NO: 1456 - protein, 369 aa, Strongylocentrotus purpuratus
MADQGGAKTKRTNEEKPETVRGQVFDVGPRYVTLNYIGEGAYGMVCSAVDTRHGGKVAIKKISPFEHQTYCQRTLREIKILTRFNHENIINIQDIIKADTIEAMRDVYIVQSLMETDLYKLLKTQPLSNDHICYFLYQILRGLKYIHSANVLHRDLKPSNLLLNTTCDLKICDFGLARIADPGHDHTGFLTEYVATRWYRAPEIMLNSKGYTKSIDIWSVGCILAEMLSNRPIFPGKHYLDQLNHILGVLGSPSQDDLKCIINEKARAYLQGLPFKSKIPLKSLFPKADNKALDFLERMLSFNPDKRITVEEALAHPYLEQYYDPDDEPVKEEPFTFVTELDDLPKEKLKEMIFEEASKFNPSPSPNTS

SEQ ID NO: 1457 - protein, 407 aa, Ciona intestinalis
MHGAPKTTLGNMKGSRDKESKITTVVATHGHGPDRPQEVAYTDTKVIGNGSFGVVYQARLIESNEMVAIKKVLQDKRFKNRELQIMRKLDHCNIVRLRYFFYSSGDKKDEIYLNLVLDFVPETVYRVARQYSKSKQTIPILYVKLYMYQLFRSLAYIHSQGTCHRDIKPQNLLLDPETAVLKLCDFGSAKQLVRGEPNVSYICSRYYRAPELIFGATDYTSSIDVWSAGCVLAELLLGQPIFPGDSGVDQLVEIIKVLGTPTRDQIREMNPNYTEFKFPQIKAHPWSKVFRPRTPPEAIALCSRLLEYSPDNRISPLESCAHSFFDELRLPNTKLPNGRSLPPLFNFTDKELSIKSPLNNILIPLHARNANSAGSTGDYSMGNSIENNGSTSAIGAGGVIATSAPQP

SEQ ID NO: 1458 - protein, 118 aa, Equus caballus
CCAAVKHLHDNWILHRDLKTSNLLLSHAGILKVGDFGLAREYGSPLKAYTPVVVTLWYRAPELLLGAKEYSTAVDMWSVGCIFGELLTQKPLFPGKSEIDQINKVFKDLGTPSEKIWP

SEQ ID NO: 1459 - protein, 309 aa, Mus musculus
MDDQGCPRCKTTKYRNPSLKLMVNVCGHTLCESCVDLLFVRGAGNCPECGTPLRKSNFRVQLFEDPTVDKEVEIRKKVLKIYNKREEDFPSLREYNDFLEEVEEIVFNLTNNVDLENTKKKMEIYQKENKDVIQKNKLKLTREQEELEEALEVERQEHEQRQLFIQKEEELQQALKRKNKQAFLDELESSDLPVALLLAQHKDRSTQLEMQLEKPRSMKPVTFSTGIKMGQQISLAPIQKLEEALYEYQPLQIETCGPQVPEQELLGRLGYLNHVRAASPQDLAGGYTSSLACHRALQDAFSGLFWQPR

SEQ ID NO: 1460 - protein, 309 aa, Mus musculus
MDDQGCPRCKTTKYRNPSLKLMVNVCGHTLCESCVDLLFVRGAGNCPECGTPLRKSNFRVQLFEDPTVDKEVEIRKKVLKIYNKREEDFPSLREYNDFLEEVEEIVFNLTNNVDLENTKKKMEIYQKENKDVIQKNKLKLTREQEELEEALEVERQEHEQRRLFIQKEEELQQALKRKNKQAFLDELESSDLPVALLLAQHKDRSTQLEMQLEKPRSMKPVTFSTGIKMGQQISLAPIQKLEEALYEYQPLQIETCGPQVPEQELLGRLGYLNHVRAASPQDLAGGYTSSLACHRALQDAFSGLFWQPR

SEQ ID NO: 1461 - protein, 309 aa, Mus musculus
MDDQGCPRCKTTKYPNPSLKLMVNVCGHTLCESCVDLLFVRGAGNCPECGTPLRKSNFRVQLFEDPTVDKEVEFRKKVLKIYNKREEDFPSLREYNDFLEEVEEIVFNLTNNVDLEKTKKKMEIYQKENKDVIQKNKLNVTREQEELEEALEVERQEHEQRRLFIQKEEELQQALKRKNKQAFLDELESSDLPVALLLAQHKDRSTQLEMQLEKPRSMKPVTFSTGIKMGQQISLAPIQKLEEALYEYQPLQIETCGPQVPEQELLGRLGYLNHVRAASPQDLAGGYTSSLACHRALQDAFSGLFWQPR

SEQ ID NO: 1462 - protein, 309 aa, Rattus norvegicus
MDDQGCPRCKTTKYRNPSLKLMVNVCGHTLCESCVDLLFVRGAGNCPECGTPLRKSNFRVQLFEDPTVDKEVEIRKKVLKIYNKREEDFPSLREYNDFLEEVEEIVFNLTNNVDLENTKKKMEIYQKENKDVIQKNKLKLTREQEELEEALEVERQESEQRRLFIQKEEELQQILKRKNKQAFLDELESSDLPVALLLAQHKDRSTQLEMQLEKPKSMKPVTFSTGIKMGQQISLAPIQKLEEALYEYQPLQIETCGPQVPEQELLGRLGYLNHVRAASPQDLAGGYTSSLACHRALQDAFSGLFWQPR

SEQ ID NO: 1463 - protein, 314 aa, Anopheles gambiae str. PEST
MDDQVCPRCKTTKYRNPSLKLMVNVCGHTLCESCVELLFLKGSGSCPECNVALRRSNFRVQLFEDSNVDKEVQIRKRILKDFNKKEDDFGSLDEYNDYLEMIEELVFNLCNNIDIINTNKRIEQYKRDNRDVIMKNKLKLSKDELELEQIVEYEKEQFDQRRKELAMIEAENRKQKTKNKEELIDSLMASYEDASAIVDKFTQKAEQSQIQLPKPVAPPPVAKHTHFSSGIATGFQGQHGFLAVPKLEEGPLYVYEPQGFETDGPAPPSLEEVINNGYIRHIRVENLAEKAGGFQTNISCLRAIQEALAGLYHG

SEQ ID NO: 1464 - protein, 178 aa, Arabidopsis thaliana
MVMVSNSTHQNKEIHVRRRISEIYNRREEEFPSLKDYNDYLEEVECMVFDLIDGINVEAIEQKIKRYSKENAEQIMINRARKAEELTAALAACKAKPPQTDADTSSNHGVTAGATYGQASRPTGMGPQPVPIVGGAERQHYAMEDEATRRMKAERAGGFSLEISKRRALEEAFASIWV

SEQ ID NO: 1465 - protein, 178 aa, Arabidopsis thaliana
MVMVSNSTHQNKEIHVRRRISEIYNRREEEFPSLKDYNDYLEEVECMVFDLIDGINVEAIEQKIKRYSKENAEQIMINRARKAEELTAALAACKAKPPQTDADTSSNHGVTAGTTYGQASRPTGMGPQPVPIVGGAERQHYAMEDEATRRMKAERAGGFSLEISKRRALEEAFASIWV

SEQ ID NO: 1466 - protein, 187 aa, Glycine max
KREQEVDGSRMVVSSTNPHNKEIAIRRRIASIFNKREDDFPSLREYNDYLEEVEDMTFNLIEGIDVSDIEAKIAKYQEENAEQIMINRARKAEELAAAMAASKGQPAQTDDDSATNQNSQAGTFAGGQPRPTGMAPQPLPLGGGDMPGFAGDDEETKRLRTERAGGWSGDISRKRALEEAFGSIWVC

SEQ ID NO: 1467 - protein, 188 aa, Glycine max
  unsure (1)..(188): unsure at all Xaa locations
KREQEVDGSRMVVSSTNPHNKEIAIRRRIASIFNKREDDFPSLREYNDYLEEVEDMTXFNLIEGIDVSDIEAKIAKYQQENAEQIMSARIKQAEELAAAMAASKGQPAQTDDDSVSTQGQYAPTFAGGQPRPTGMAPQPLPLGGGDMPGFAGDDEETKRLRTERAGGWSGDISRKRALEEAFGSIWVC

SEQ ID NO: 1468 - protein, 113 aa, Glycine max
LSGGGLLAFLINVKTRRAEELAAAMAASKGQPAQTDDDSVSTQGQYAPTFAGGQPRPTGMAPQPLPLGGGDMPGFAGDDEETKRLRTERAGGWSGDISRKRALEEAFGSIWVC

SEQ ID NO: 1469 - protein, 232 aa, Oryza sativa (japonica cultivar-group)
MVVASGGGRNAWAKEMTIRRRITSIKDLAVKFMSLMLCVDNDLRFNKTREHFPSLKDYNDYLEEVEDMSWSSFNTFNLIEGIDVEVIEAKIARYQQENAEQIYLSRAKRAEDLAAALKASRMNPGKAGANDTKDVVFIPILGTLATCNRLLEALRALVVAREFRKASMRLLLFPPRPTGMAPQPIGGSSVPLQGDDEETMRLRAESGARAGGWSIEMCKRRALQEAFSTIFV

SEQ ID NO: 1470 - protein, 237 aa, Oryza sativa
  unsure (1)..(237): unsure at all Xaa locations
MVVASGGGRNAWAKEMTIRRRITSIKDLAVKFMSLMLCVDNDLRFNKTREHFPSLKDYNDYLEEVEDMSWSSFNTFNLIEGIDVEVIEAKIARYQQENAEQIYLSRAKRAEDLAAALKASRMNPGKAGANDTKDVVFIPILGTLATCNRLLEALRALVVAREFRKASMRLLLFPVGXLXPRPTGMAPQPIGGSSVPLQGDDEETMRLRAESGARAGGWSIEMCKRRALQEAFSTIFV

SEQ ID NO: 1471 - protein, 165 aa, Oryza sativa
  unsure (1)..(165): unsure at all Xaa locations
MVVASGGGRNAWAKEMTIRRRITSIFNKTREHFPSLKDYNDYLEEVEDMTFNLIEGIDVEVIEAKIARYQQENAEQIYLSRAKRAEDLAAALKASRMNPGKAGANDXXLLEALRALVVAREFRKASMRLLLFPVGXLXPRPTGMXPQPIGGSSVPLQGDDEETMX

SEQ ID NO: 1472 - protein, 115 aa, Oryza sativa
  unsure (1)..(115): unsure at all Xaa locations
MVVVSSGGGGGGNAWAKEMTIRRRMASIFNKTQDHFPCLKDYNDYLEEVEDMTFNLIEGIDVEEIEAKIARYQQENAEQIYLSRAKRAEDLAAALKASRMNPGKAAASDTAAGSX

SEQ ID NO: 1473 - protein, 189 aa, Triticum aestivum
  unsure (1)..(189): unsure at all Xaa locations
MVVVGGGSGNAWAKEMTLRRRMASIFNKTREHFPSLKDYNDYLEEVEDMXXIDVEAIEARIARYQQENAEQIYLSRAKRAEDLAAALKASRMVTVKAGPSDTAAGTSQGISGGAGVQGQYAPAAVPGGLNQPRPTGNAPQPIGGSSDPLHGYDEETMRLRAERGARAGGWTAELGRRRALEEAFNSIFV

SEQ ID NO: 1474 - protein, 318 aa, Schizosaccharomyces pombe
MDDEGARKVDEKCPLCQADRYLNPNMKLLINPECYHKMCESCVDRIFTTGPAQCPTPGCNKILRKAKFREQTFEDAQIEREVDVRKRISRIFNKGQQEFDSLQAYNDYLEEVEILTFNLIYKIDVEETEEKVKQYEKQNRDSIAANSARAAAEARILAQNEILLKRQKQEAREAAIREHQKEKERREQVEQQIIFDLATSGKDPNKIIQLSDSLKKQQENIASSVSNISRSSSILLSDVQQVAEDTTPFSPLAGEKDGSKYFSYSKNTYQDLYLEKVSHEPGRKCGFRIEDCHLRCLYEAFSGIDYDLESLKKLEVAS

SEQ ID NO: 1475 - protein, 362 aa, Neurospora crassa
MARPLDPLGFEDEMCPVCKSRKYLNPDIVFVFNPECYHSMCLNCANRLFNDGPNQCPHAGCNKTLRRKGFRSAFFGDLAVEREVDIRRRVAAVFNQVEDDFETLQDYNNYLQMVEDLTFELVNGTDERRRQAEAQLQAWEAEHRADIERNKKAGREADEISRVRLAAERDAVRQRRIEAIKEAEAEKRERVRSREMELDNLAKGTTAMTAEPATKVQLKRRGQVNRVAETASNPAIATTGMGTGASEVERLSIRGLKEKPKAPAPQGPYDPFGGMDFAPSRYKLHGGLSHPLMEKYRLDRQHVAGGYSFDDFAARALYEAFAGLGVFVEDEKEVGSGIGLSQETSMAAGIAAVVDADKMDLD

SEQ ID NO: 1476 - protein, 320 aa, Drosophila melanogaster
MDDQACPRCKTTKYRNPSLKLMVNVCGHTLCESCVDLLFLKGSGACPECMVPLRRNNFRVQLFEDPMVEKEVDIRRRILRDYNKREEDFASLAEYNDYLEEIEDIVYNLCNNIDIIETNKRIEAYKRDNREVIQRNKTRVGRDEYALEEMLELEKVQEEARRKELEELENEHKKKKARDKQALIEELMYSGKDAAQIVTEFAEKAEKQREEEKQLPPPKPANEFSTGIKFGQTADPSLLPVPKSEEGPLFVYEPLVPFSEGPAMPPTNEIVSRGYIAHIRAETPQENAGGFTSALACERALQEALQGLYYTATTGVVSGT

SEQ ID NO: 1477 - protein, 320 aa, Drosophila melanogaster
MDDQACPRCKTTKYRNPSLKLMVNVCGHTLCESCVDLLFLKGSGACPECMVPLRRNNFRVQLFEDPMVEKEVDIRRRILRDYNKREEDFASLAEYNDYLEEIEDIVYNLCNNIDIIETNKRIEAYKRDNREVIQRNKTRVGRDEYALEEMLELEKVQEEARRKELEELENEHKKKKARDKQALIEELMYSGKDAAQIVTEFAEKAEKQREEEKQLPPPKPANEFSTGIKFGQTADPSLLPVPKSEEGPLFVYEPLVPFSEGPAMPPTNEIVSGGYIAHIRAETPQENAGGFTSALACERALQEALQGLYYTATTGVVSGT

SEQ ID NO: 1478 - protein, 324 aa, Marthasterias glacialis
MMEEQACPRCKSTKYRNPSLKLLVNVCGHTLCENCVEILFVRGSGSCPSCNTPLRRNQFRVQEFEDAYVEKEVDIRKRILKDFNKQEEEFPALKDYNDYLEEIETIIFNLANGTELEATKRKVDQYRKNNRESIMKNRSKQSSDQAYLEALLQQENEDEEEKKQQLQFMERQTKNQKKRDKEALIDELIHSNMPADHVIASHTANVEMQEAPVFKLPKKTTFSTGIKVGFGYQDTFLPIPKQEEILFTYEEETYETYGPSAPSTDELDTQRYNKHVRPASPQGIAGGYSQNLACLRALQEAFSGLLYFPSQHKNTDDSSSMETS

SEQ ID NO: 1479 - protein, 309 aa, Xenopus laevis
MDDQGCPRCKTTKYRNPSLKLMVNVCGHTLCESCVELLFVRGSGSCQECDTPLRKSNFKVQLFEDPTIDKEVEIRKKILKIYNKREEDFPSLREYNDFLEEIEEIVLNLTNNVDLDNTRRKIDMYQKENKDTIQRNKIKMTREQEELEEALEMEKHENEQRRLHLQKEEQFQQMMKRKNKQELLDQLETSHLPASILLAQHKGKSVQAEMQVEKPRSFKTDTFSTGIKKGHHIASVPVTKIEEALYQYQPIHIETYGPQVPHIEMLGRQGYLNHVRAAAPQDLAGGYVSSLACHRALQDAFSGLFWQTH

SEQ ID NO: 1480 - protein, 267 aa, Homo sapiens
  unsure (1)..(267): unsure at all Xaa locations
MDDQGCPRCKTTKYRNPSLKLMVNVCGHTLCESCVDLLFVRGAGXCPECGTPLRKSNFRVQLFEDPTVDKEVEIRKKVLKIYNKREEDFPSLREYNDFLEEVEEIVFNLTNNVDLDNTKKKMEIYQKENKDVIQKNKLKLTREQEELEEALEVERQENEQRRLFIQKEEQLQQILKRKNKQAFLDELGQHISLAPIHKLEEAXYDNQPLQIETYGPHVPELEMLGRLGYLNHVRAASPQDLAGGYTSSLACHRALQDAFSGLFWQPS

SEQ ID NO: 1481 - protein, 309 aa, Homo sapiens
MDDQGCPRCKTTKYRNPSLKLMVNVCGHTLCESCVDLLFVRGAGNCPECGTPLRKSNFRVQLFEDPTVDKEVEIRKKVLKIYNKREEDFPSLREYNDFLEEVEEIVFNLTNNVDLDNTKKKMEIYQKENKDVIQKNKLKLTREQEELEEALEVERQENEQRRLFIQKEEQLQQILKRKNKQAFLDELESSDLPVALLLAQHKDRSTQLEMQLEKPKPVKPVTFSTGIKMGQHISLAPIHKLEEALYEYQPLQIETYGPHVPELEMLGRLGYLNHVRAASPQDLAGGYTSSLACHRALQDAFSGLFWQPS

SEQ ID NO: 1482 - protein, 308 aa, Giardia lamblia ATCC 50803
MSVSAAPSATSIDRYRRITKLGEGTYGEVYKAIDTVTNETVAIKRIRLEHEEEGVPGTAIREVSLLKELQHRNIIELKSVIHHNHRLHLIFEYAENDLKKYMDKNPDVSMRVIKSFLYQLINGVNFCHSRRCLHRDLKPQNLLLSVSDASETPVLKIGDFGLARAFGIPIRQFTHEIITLWYRPPEILLGSRHYSTSVDIWSIACIWAEMLMKTPLFPGDSEIDQLFKIFEVLGLPDDTTWPGVTALPDWKQSFPKFRGKTLKRVLGALLDDEGLDLLTAMLEMDPVKRISAKNALEHPYFSHNDFDP

SEQ ID NO: 1483 - protein, 291 aa, Giardia lamblia ATCC 50803
MTDPLNRYERIQGLGEGTYGVVFKAKDKETGQIVALKRIRLENADEGIPATAIREIAILKEMKHKNVVDLLSVIHTEAKLTLVFEYLDMDLKKYIDSKQGKLTPKEVKSFMGQLMTGLTYIHNKRVLHRDLKPQNLLVTSSGLLKLADFGLARGSGIPVRSYTHEVVTLWYRCPSVLLGCRKYGGALDIWSCGCIFYECVTGKPLFPAKTEKDELIKIFKTLGTPDKQSWPDVDTLPQWQKDFPVYPGINVAELLPTLDEAGRDLFSKMMALDPSKRPSARDCLKHPYFAK

SEQ ID NO: 1484 - protein, 356 aa, Hypocrea virens
MSRSNPPNNASASRKISFNVSEQYDIQDVVGEGAYGVVCSAIHKPSGQKVAIKKITPFDHSMFCLRTLREMKLLRYFNHENIISILDIQKPRSYDSFNEVYLIQELMETDMHRVIRTQDLSDDHCQYFIYQTLRALKAMHSANVLHRDLKPSNLLLNANCDLKVCDFGLARSAASQEDNSGFMTEYVATRWYRAPEIMLTFKEYTKAIDVWSVGCILAEMLSGKPLFPGKDYHHQLTLILDVLGTPTMEDYYGIKSRRAREYIRSLPFKKKVPFRTLFPKTSDLALDLLEKLLAFNPVKRITVEDALKHPYLEPYHDPDDEPTAPPIPEEFFDFDKHKDTLSKEQLKQLIYQEIMR

SEQ ID NO: 1485 - protein, 314 aa, Dunaliella tertiolecta
MDAYEKLEKIGEGTYGKVYKARDINTGKLVALKKTRLEMEEEGVPSTTLREVSLLLMLSESNHVVKLIAVEHVEENGKPCLYLVFEYLSTDMKKWMDRNGRGPAHPLPKPAIKSLTYQLIKGLAHCHKHGVMHRDLKPQNLLVDDSIMCCKIADLGLGRAFSIPIKSYTHEIVTLWYRAPEVLLGSTHYSTPVDMWSVGCIFAELVRKTPLFPGDCELQQLLHIFKLLGTPNEEVWPGVSKLRDWHEFPQWHPQDLSRIFPTLEPEGVDLLKRMIEYDPAKRISAKEALKHPYFDDPMIREVDQQENPEVRARD

SEQ ID NO: 1486 - protein, 443 aa, Takifugu rubripes
MAAYNGGSSAVAAHHPHHHHQLQHLPPPHMHHHHHHQHHQQQHQQHHLQQQLDIEPDRPIGYGAFGVVWSVTDPRDGKRVALKKMPNVFQNLVSCKRVFRELKMLCFFKHENVLSALDMLQPPHIDYFEEIYVVTELMQSDLHKIIVSPQPLSSDHAKVFLYQILRGLKYLHSAGILHRDIKPGNLLVNSNCVLKICDFGLARVEESDEARHMTQEVVTQYYRAPEILMGSRHYSNSIDIWSVGCIFAELLGRRILFQAQSPIQQLDLITDLLGTPSMEAMRTACEGARAHILRGPHKQPSLPVLYTLSSQATHEAVHILCRMLVFDPSKRISAKDALAHPYLDEGRLRYHTCMCKCCYTTSSGRVYTSDFEPVTNPKFDDGFEKNLSSVRQVKEIIHQFILEQQKGSRVPLCINPQSAAFKSFISSTVPQPSEMPPSPLVWE

SEQ ID NO: 1487 - protein, 294 aa, Sesbania rostrata
MEQYEKVEKIGEGTYGVVYKARDRVTNETIALKKIRLEQEDEGVPSTAIREISLLKEMQHRNIIRLQDVVHSEKRLYLVFEYLDLDLKKHMDSSPEFVKDPRQVKMFLYQILCGIAYCHSHRVLHRDLKPQNLLIDRRTNSLKLADFGLARAFGIPVRTFTHEVVTLWYRAPGILLGSRHYSTPVDIWSVGCIFAEMVNRRPLFPGDSEIDELFKIFRILGTPNEDTWPGVTSLPDFKSTFPKWPPKDLATVVPNLEQAGLNLLSSMLCLDPSKRITARSAVEHEYFKDIKFVP

SEQ ID NO: 1488 - protein, 294 aa, Vigna aconitifolia
MEQYEKVEKIGEGTYGVVYKARDRVTNETIALKKIRLEQEDEGVPSTAIREISLLKEMQHRNIVRLQDVVHSEKRLYLVFEYLDLDLKKHMDSSPEFVKDPRQVKMFLYQILCGIAYCHSHRVLHRDLKPQNLLIDRRTNSLKLADFGLARAFGIPVRTFTHEVVTLWYRAPEILLGSRHYSTPVDVWSVGCIFAEMVNRRPLFPGDSEIDELFKIFRILGTPNEETWPGVTALPDFKSTFPKWPPKDLATVVPNLDAAGLNLLSSMLCLDPSKRITARIAVEHEYFKDIKFVP

SEQ ID NO: 1489 - protein, 424 aa, Oryza sativa; identical to SEQ ID NO: 417

SEQ ID NO: 1490 - protein, 424 aa, Oryza sativa; identical to SEQ ID NO: 417

SEQ ID NO: 1491 - protein, 384 aa, Oryza sativa
  unsure (1)..(384): unsure at all Xaa locations
MASGDGGDDAGVKRVADRYLKREVLGEGTYGVVFKAVDTKTGNTVAIKKIRLGKYKEGVNFTALREIKLLKELKDSNIIELIDAFPYKGNLHLVFEFMETDLEAVIRDRNIVLSPADTKSYIQMMDMKPNNLLIGADGQLKLADFGLARIFGSPERNFTHQVFARWYRAPELLFGTKQYGSAVDIWAAGCIFAELLLRRPFLQGSSDIDQLGKIFAAFGTPKSSQWPDMVYLPDYVEYQFVSAPPLRSLFPMASDDALDLLSRMFTYDPKARITAQQALEHRYFLSVPAPTKPSQLPRPPPKGDSGNNKIPDLNLQDGPVVLSPPRKLRRVTAHEGMEVHMHRADRTEEHPSGARHMDDMSSQSXRIPMSVDVGAXFGTRPAPX

SEQ ID NO: 1492 - protein, 353 aa, Podospora anserina
MSNAQARGGARKISFNVSEQYDIQDVVGEGAYGVVCSAIHKPSGQKVAIKKITPFDHSMFCLRTLREMKLLRYFNHENIISILDIQKPRSYESFNEVYLIQELMETDMHRVIRTQELSDDHCQYFIYQTLRALKAMHSANVLHRDLKPSNLLLNANCDLKVCDFGLARSAASQEDNSGFMTEYVATRWYRAPEIMLTFKEYTKAIDVWSVGCILAEMLSGKPLFPGKDYHHQLTLILDVLGTPTMEDYYGIKSRRAREYIRSLPFKKKVPFRTLFPNTSDMALDLLEKLLAFNPVKRITVEEALKHPYLEPYHDPEDEPTAPPIPEEFFDFDKHKDNLSKEQLKQLIYQEIMR

SEQ ID NO: 1493 - protein, 355 aa, Glomerella cingulata
MSRANPPNASGSRKISFNVSEQYDIQDVVGEGAYGVVCSAIHKPSGQKVAIKKITPFDHSMFCLRTLREMKLLRYFNHENIISILDIQKPRSYETFNEVYLIQELMETDMHRVIRTQDLSDDHCQYFIYQTLRALKAMHSANVLHRDLKPSNLLLNANCDLKVCDFGLARSAASQEDNSGFMTEYVATRWYRAPEIMLTFKEYTKAIDVWSVGCILAEMLSGKPLFPGKDYHHQLTLILDVLGTPTMEDYYGIKSRRAREYIRSLPFKKKVPFRTLFPKTSDLALDLLEKLLAFNPVKRITVEDALKHPYLEPYHDPDDEPTAPPIPEEFFDFDKHKDNLSKEQLKQLIYQEIMR

SEQ ID NO: 1494 - protein, 308 aa, Giardia intestinalis
MSVSAAPSATSIDRYRRITKLGEGTYGEVYKAIDTVTNETVAIKRIRLEHEEEGVPGTAIREVSLLKELQHRNIIELMSVIHHNHRLHLIFEYAENDLKKYMDKNPDVSMRVIKSFLYQLINGVNFCHSRRCLHRDLKPQNLLLSVSDASETPVLKIGDFGLARAFGIPIRQFTHEIITLWYRPPEILLGSRHYSTSVDIWSIACIWAEMLMKTPLFPGDSEIDQLFKIFEVLGLPDDTTWPGVTALPDWKQSFPKFRGKTLKRVLGALLDDEGLDLLTAMLEMDPVKRISAKNALEHPYFSHNDFDP

SEQ ID NO: 1495 - protein, 355 aa, Fusarium oxysporum f. sp. lycopersici
MSRSNPPNAAGSRKISFNVSEQYDIQDVVGEGAYGVVCSAIHKPSGQKVAIKKITPFDHSMFCLRTLREMKLLRYFNHENIISILDIQKPRNYESFNEVYLIQELMETDMHRVIRTQDLSDDHCQYFIYQTLRALKAMHSANVLHRDLKPSNLLLNANCDLKVCDFGLARSAASQEDNSGFMTEYVATRWYRAPEIMLTFKEYTKAIDVWSVGCILAEMLSGKPLFPGKDYHHQLTLILDVLGTPTMEDYYGIKSRRAREYIRSLPFKKKVPFRTLFPKTSDLALDLLEKLLAFNPVKRITVEEALKHPYLEPYHDPEDEPTAPPIPEEFFDFDKHKDNLSKEQLKQLIYQEIMR

SEQ ID NO: 1496 - protein, 355 aa, Trichoderma atroviride
MSRSTAPNASASRKISFNVSEQYDIQDVVGEGAYGVVCSAIHKPSGQKVAIKKITPFDHSMFCLRTLREMKLLRYFNHENIISILDIQKPRSYDSFNEVYLIQELMETDMHRVIRTQDLSDDHCQYFIYQTLRALKAMHSANVLHRDLKPSNLLLNANCDLKVCDFGLARSAASQEDNSGFMTEYVATRWYRAPEIMLTFKEYTKAIDVWSVGCILAEMLSGKPLFPGKDYHHQLTLILDVLGTPTMEDYYGIKSRRAREYIRSLPFKKKVPFRTLFPKTSDLALDLLEKLLAFNPVKRITVEDALKHPYLEPYHDPEDEPTAPPIPEEFFDFDKHKDTLSKEQLKQLIYQEIMR

SEQ ID NO: 1497 - protein, 290 aa, Juglans nigra x Juglans regia
MDQYEKVEKIGEGTYGVVYKARNRKTNQTLALKKIRLEQEDEGVPSTAIREISLLKEMQHGNIVKLQDVVHGEKRLYLVFEYLDLDLKKHMDSSPEFANDLRQIKMFLHQILRGIAYCHSHRVLHRDLKPQNLLIDRRSNSLKLADFGLARAFGIPVRTFTHEVVTLWYRAPEILLGSRHYSTPVDVWSVGCIFAEMVNQRPLFPGDSEIDELFKIFRVLGTPNEDTWPGVTSLPDYKGAFPKWPPKDLAAVVSSLDSTGVDLLSKMLSLDPSRRITARTALEHEYFKDI

SEQ ID NO: 1498 - protein, 876 aa, Streptomyces coelicolor A3(2)
MGHGVPELVLESNGRTWTLDPSRSYALGRDPQGELVFDDARVSWRHATISFNGRGWVVEDHGSTNGTFVHGQRVQQMELGAGTVLNLGNATDGPRVSLTGAQAPAGAPQAQPQQQPQQPQQQPYAAQGANAGWAQQAPPAQEPFQQQAPQQAPQHGQQHQAQQAGWQQQQPPQQVAPQPQQAAPHFPQQQGPGGAAGAPPVHGDRSPTTFHQFSLGRVMRIGRALENDLVVSDLQVSRNHAEFHSTPDGRMEIRDLGSHNGTYVNGQPIAKGGTQLLGPTDVVGVGHSTFQIVGDRLEEFVDTGEVSFSARHLTVTVDGGKQILKDVSFGVPEKSLIAVIGPSGSGKSTLLKALTGYRPADQGEVLYDNRNLYKQFAELRQRIGLVPQDDILHKELTVKKALKYAAKLRFPADTTGAERNARIDEVLRELKLDIHKDKKVTSLSGGQRKRVSVALELLTKPSLIFLDEPTSGLDPGMDRDVMQLLRGLADDGRTVLVVTHSVAELATCDKLLVMAPGGSVAYFGPPEEALNFFGYDTWADVFSAFENYRDYDWAGRWKGSQHYQMYAADLDAVAPQSVQVPPMQAMRPPKPQGWMSQFVTLVRRYTSVIASDKGFLALMVILPAVLGAVSLLIDADKGLLPNPANPQTGRIIPNGTATTVLLILAVGACFAGAANSVRELIKERVIYERERATGLSRSAYLMSKVFVLGLITVFQGLLVGVIGFASREIPDEGLILGGATLVELSLPIMALGFASMMFGLVISSLVKTAEKTMPLLVMFAIIQVVFTGCLFALNDAVGVNQFSYLMPSRWAVGAAGATLDFNRISPPEKGAEADPLWEHTVGAWGMDMAALIVLGVICGFFVARFLRRHEPEVMRK

SEQ ID NO: 1499 - protein, 276 aa, Streptomyces coelicolor A3(2)
MMNYPTEHSSPPPEGQGGDPAPPAVHAEDLTVVRGPRTVLRVLGFTVPRGRITGLLGPSGCGKSTLMRAIVGTQAKVTGTLDVLGRPAGHPALRTRIGYVTQAPSVFDDLTVRQNLDYFAEILDPGRAASDRRRDDVTRVIADVDLTAHADALAGNLSGGQRSRVSLAVALLGAPELLVLDEPTVGLDPVLRRDLWTLFHSIAADRGATLLVSSHVMDEAERCHRLLLMREGEVLADDTPDALRTRTGSETVEEAFLHLVDEAKDKAAARTKETTR

SEQ ID NO: 1500 - protein, 615 aa, Nostoc sp. PCC 7120
MLTRRRAGLRLDAIDLRKYSHPILASTTLLNEISLSFLPNEFIVIAGVSGGGKSTLIDALNGQRKARGKVLIDGVDLYKNYHAFKNLIGYVPQDDIVHLDLTVWEAFMFAAQLRVPFLSISEQQQWVEAILQRLHLVERKNVPVKQLSGGQRKRVSIGVELISSPSLFFLDEATSGLDPGTELQIMSLLRSFCDQASTVVLITHATKNVGIADQVVFLAKGGRLAYVGPPKLALDYFGVQDFDAIYHKVEHQLSPAQWEERFKSSGYYKKFVSERLQSLPQQKQAPTADKPNLREQLVVLCQRNLSILLKNKLSLALMLLGAPILGSLNFVLWKSDLFSTKTGNAGQSISMLFVVVVMAIMSGSLAMMPEIAKERPIYKRERSVGLGLAPYLISKLLLAWVLALYQSAVLFYLMLGAVDVPGADTNTAAMYLTLFLASFGSMVLGLIVSAVAPNQSVAPLIILVLLVFQIVFGGGIQPTENLNSNPDAKAFSQLMLSKYSFENLVFLSKMGADIADDFCWQKSESQRKTLPTALIAQCNCYNKNVFTKCEFPGLGKIKRTSSLNNDLLKANLLIQSILDGYERLIYTDVSRNNWNLIYLIGVMISILFMILLFRG

SEQ ID NO: 1501 - protein, 297 aa, Nostoc sp. PCC 7120
MLNIHNLNKSYGDRHVLQDLTLNIINGEVYGLLGANGSGKTTTINIICNLLKADSGDIKLNNQVISESTKKLIGVAPQENILYKTLTCEENLQFFAEIYGLSKENIQKQIKDILAAVNLSDRAKSPVETLSGGMQRRLNIAVALVHQPKLVILDEPTTGLDIEARYEIWELIRQLKAQGITVLLTTHLLDEAERLCEKIGILKNGQILVEGSLAELRNLIPAQEILSLKTTQEKEAIARAKMYGFTHRHYDKELAFWLHESLELKEIISRFEGINIDAISRQPVRLEHIYLEVTQQI

SEQ ID NO: 1502 - protein, 339 aa, Nostoc sp. PCC 7120
MAPAVLIQNLQKRYGTVEAVKDVSFQVEPGEIFGLLGPNGAGKTTTLRALCTLTTPDAGKIEVSGISVLDNPRVARQRLGYVAQEVALDKVLTGKELLQLQAALYHLPNAIAKQRIDTVLDLLGLQEYANKKTGTYSGGLRKRLDLAAGLLHSPDVLVLDEPTVGLDIESRFVVWEFLRKLRVSGTTVVITSHYLEEIDALADRVAIIDRGVVIAVGTPSELKDRVGGDRITLRIREFSPTAEAEQAKSLLQGLPFVKEVIINNAQGNSLNLVVTPQNDALITIQQALNNASLPIFGIAQSRPSLDDVYLAATGRTLLDAELAAVANRDPKAEKKQNMR

SEQ ID NO: 1503 - protein, 267 aa, Rhodopseudomonas palustris
MPSFSTSARCSPKASRPTWCATRKSSLLILGIVMLSVREVTTAYKGLVAISNVSIEVEQGEIVCVAGANGAGKSTLLKSIAGAERIRSGQVLFDGERLDGVPQHVITKRGVAYVPENRRLFPRLSVHDNLRLGSYLYRGEADREKPLEFVFSLFPRLQERLEQRAETLSGGEQQMLAIGRALMTRPRLLMLDEPSQGIMPKLVSEIFQSVKKIRDAGMTVLIVEQRMAECLEIADRAYILQTGRVLMQGKAAELMDNPDVRKAYLGL

SEQ ID NO: 1504 - protein, 168 aa, Thanatephorus cucumeris
TLTALMGVSGAGKTTLLDCLATRTTMGVITGQMLVDGKPRDDSFQRKTGYAQQQDLHLSTSTVREALTFSAVLRQPAHVSRKEKVEYVEEVIKLLEMTEYADAVVGVPGEGLNVEQRKRLTIGVELAAKPALLLFLDEPTSGLDSQTSWAILDLLDKLKKNGQAILCT

SEQ ID NO: 1505 - protein, 864 aa, Chloroflexus aurantiacus
MAPAQPSVCPFCQAPLGRSDARFCPACGRSLPVPAATGPSTIITTGSATLHISEPGVERDVVLGVQPLTIGRAPDNDIVLQSRFVSGRHARIEPNGQGHRIVDVGSRNGLLFAGQRITMRELADGDVLRIGDPATGNFVSLTYHNTALTTTAALREVPSRFPLDPNDPEITIGRIGCDIILDNPQVSRFHARLDRAPGGGVLLRDMGSTNGTFVNGQRVTAPVVLKPGDVIQIGAFKLVYNVTSLDRYDQRGALRIDARNLSRVVSRNGVQRVILHDVSLSIAPREFVAIVGGSGTGKSTLMKALCGYAPADQGEVLVNGDDFYRNFAAYRSVLGYVPQDDILHRTLVVQRALEYAARLRLPADTTDQEIVARIERVLDDVEMSAHRDKSIEALSGGQRKRVSIGAELLADPSLFFLDEPTSGLDPGLEKKMMYTLRRLADSGRTVVLVTHATANITQCDHVIFMAGNGRMVFFGPPAAALNFFQITSGDFADIYTKIEGVATADHPVVRQDLRAEYEAWQAAHPQAASPPSLAELWEMRYRQSALYRQYVAERLAATPAGPHVESGQTSQTTQRISAWRQFGLLTRRYLDLMLQDRRNLLILLLQAPIIALLLLLVARSDALTGVQAQDLIQRGEAKKVLFMLATVSVWFGIINAAREITKEQAVYRRERLVNLQIGPYLFSKVTVLSLLILVQTIVLLGMLLFKVALPGETGILLPPLIETFLTLFLSSGAGMALGLAISAASATPDRAISLVPFALIPQILFAGLIFAIEGLATPLSWLTISRWSMDALGASLDLNRLCDLPNTDDQGSIPAGCTPGFLEIEAAFTHDPLHLIGRWAALLGYAGICLLITAWLLRRRDRVI

SEQ ID NO: 1506 - protein, 301 aa, Sulfolobus tokodaii
MIDVFGLVKKYSKREVLSNVSLGVRKGEFVSLIGPNGAGKTTLIRSILTLIKPDKGEVRIMGKDPFKDKSIFKNLGYVQELPNLPPFMTGREVLMLSAKLKGAKKDDVDELLDIVGMAEFADRQIAKYSKGMTQRIAIAEALLGNPEVMILDEPNIGIDPIFSVKVREMFNKLKKNGSSILMTSHELEDVKKLSDRVYMIYKGKIVFEGSVEQLVREFLGINVIIETNEVEKVLNLVSSLEYVKRVYRENSRVVVSLSEDKREELLKSLIQSNISVKGFYLDLNLEEAYARAINSVGNNAL

SEQ ID NO: 1507 - protein, 790 aa, Synechocystis sp. PCC 6803
MVMNQNNRPYIIVTNQGQSLPPFELTKSKHILGRDSQFADLIVPTDWSIISRCQATLVEDQGNYFIYDGDRLNPSSNKLFINHHLITHDIGYPLQNGDVIKIGQNINILITIKYFTPNGSSPTNLTSLLSINLKQKSVVIGRDETANLQLLSSAVSRQHAVLDYLEPNTYLLHDYSTNGVYVNGTKVNGKILINTAAIIKIVPYTLVLQNDQLFIADTGDNIRLDARNIVRTVQGNQSEEITLLNQISLPIEPGQLVALVGGSGAGKSTFMRTLLGIEPTTSGTVYLNGEDLRNNFNLYRNQIGYVPQKDIIHSSLTVEEALRYAAKLRLPQDADIDEIVEKTLGQIEMQERRHVLVKKLSGGQLKRVSIGVELLVDPKLFFLDEPTSGLDPGLDKKMMQLLRKLADQGRTIVLVTHATGNINLCDRLVFLGQGGNLCYFGTFSDACQFFNLHNGDFADVYIQLDNQSAVIKAAQRYSRSSYQHQYIDQRLGVSNSAVAAPRPSPPRVSPLRQTWILCQRYWQIMARDPVNIGISIATAPIGILLIDLAIATREPFILGSEADPKLAPLAQTVLLVFSCAAIWVGLASSLQEIVKENDIYSRERLVNLNLFAYIASKVTVLSGLALLQTLAMVVIILIAFDHPQPPLLPWGLGLIITSYLTLFSSICLGLMVSTLVKSETQANTALPILLLPQIIFSGVLFQIKGVSQYLSWFMVSRWSIGAYGTLLDINSLVPEPVIFPDGTVLESPFKATLVYDPSWNNLLVNWEILLLQGFVCLVVIFLFKKREDII

SEQ ID NO: 1508 - protein, 244 aa, Anabaena variabilis
MRQEAVIAIKSLNHYYGKGALKRQILFDINLEIYPGEIVIMTGPSGSGKTTLLSLIGGLRSVQEGNLQFLGVELSGASQNKLVQIRRSIGYIFQAHNLLGFLTARQNVQMAVELNEHISQEEAIAKAEAMLKAVGLENRVDYYPDNLSGGQKQRVAIARALVNNPPLVLADEPTAALDKQSGRDVVEIMQRLAKDQGTSILLVTHDNRILDIADRIVEMEDGILARDSQTAIVSYDSGAWSETP

SEQ ID NO: 1509 - protein, 297 aa, Ralstonia metallidurans
MRNVRKLYGDHVVVDNLDLEVQPGQCFGLLGPNGAGKTTTLRMLLGLTTPASGTLMLCGEPIPQRAPQARMRVGVVPQFDNLDPDFSVIENLRIFGRYFGLSSAQIAERVPKLLEFARLESRADAQVRDLSGGMRRRLTVARALINDPDLLIMDEPTTGLDPQARHLIWERLKSLLSAGKTILLTTHFMEEAERLCNHLCVIDAGRKIAEGKPHELIDSEIGCDVVEVYGDELEPLRDTLTPLAERTEMRGETLFFYVREPAPLLAALHGKGGVRYLHRPANLEDVFLKLTGREMRD

SEQ ID NO: 1510 - protein, 292 aa, Streptococcus suis
MIEVQALEKIIKGRTILSTISFEIKSGECVALIGPNGAGKTTLMSCLLGDRKATKGQVLLDGLAPQARSNKETVAVLPQENAIPTDLKVKELLRFFQAIYKDSLTDVEIDSLLCFSQEQKNQLAGKLSGGQKRLLAFVICLIGKPKLLFLDEPTAGMDTSTRQRFWEIVHELKAQGVTIFYTSHYIEEVEHTAERILVLHQGRLLRDTTPFAMRSEEQEKEVTLPIAFAAVVESLAEINGISYKQDTVSFKTRAIEQVWASLQEAGCRISDLEVQNKTLLNSLFDKTREEES

SEQ ID NO: 1511 - protein, 248 aa, Lactococcus lactis subsp. lactis
MKSPIAINDISVKFGDKAILDHLSYEFESGKIICLIGPSGAGKSTFIKAIVGMQKLDSGNVKILERKIPDREVLGKLGYMAQEDALFKELTGKQNLEFFGSLQGIKKKDLQGKLDKAAATVNLTKQLNQSISNYSGGMQRRLSLAIALQTDAPILLLDEPTVGIDPELRQEIWEELRNQANQGKTILITTHVMDEAERCDVVLMLRNGKFIAEGSPKEIKEKYQVASVEEAFIVAGKNLELQNKGAAK

SEQ ID NO: 1512 - protein, 162 aa, Chaetodiopsis meigenii
LFIGSLTAREHLIFQAMVRMPRALTYRQKLQRVDQVIQDLSLGKCQNTIIGVPGRIKGLSGGERKRLAFASEALTDPPLLICDEPTSGLDSFMAHSVVQVLKKLSEKGKTVILTIHQPSSELFELFDKILLMAEGRVAFLGTPIEAVDFFSYIGAQCPTNYN

SEQ ID NO: 1513 - protein, 162 aa, Cyrtodiopsis currani
LFIGSLTAREHLIFHAMVRMPGTLTKHQKVERVDQVIQDLSLGKCQNTIIGVPGRVKGLSGGERKRLAFASEALTDPPLLICDEPTSGLDSFMAHSVVQVLKKLSEKGKTVILTIHQPSSELFELFDKILLMAEGRVAFLGTPLEAVDFFSYIGAQCPADYN

SEQ ID NO: 1514 - protein, 162 aa, Cyrtodiopsis dalmanni
LFIGSLTAREHLIFHAMVRMPGTLTYRQKVERVDQVIQDLSLGKCQNTIIGVPGRVKGLSGGERKRLAFASEALTDPPLLICDEPTSGLDSFMAHSVVQVLKKLSEKGKTVILTIHQPSSELFELFDKILLMAEGRVAFLGTPLEAVDFFSYIGAQCPANYN

SEQ ID NO: 1515 - protein, 162 aa, Cyrtodiopsis quinqueguttata
LFIGSLTAREHLIFHAMVRMPEALTYRQKIERVDQVILDLSLGKCQNTIIGVPGRVKGLSGGERKRLAFASEALTDPPLLICDEPTSGLDSFMAHSVVQVLKKLSEKGKTVILTIHQPSSELFELFDKILLMAEGRVAFLGTPVEAVDFFSYIGAQCPANYN

SEQ ID NO: 1516 - protein, 162 aa, Cyrtodiopsis whitei
LFIGSLTAREHLIFHAMVRMPGTLTYRQKVERVDQVIQDLSLGKCQNTIIGVPGRVKGLSGGERKRLAFASEALTDPPLLICDEPTSGLDSFMAHSVVQVLKKLSEKGKTVILTIHQPSSELFELFDKILLMAEGRVAFLGTSLEAVDFFSYIGAQCPANYN

SEQ ID NO: 1517 - protein, 162 aa, Diasemopsis aethiopica
LFIGSLTAREHLIFQAMVRMPRALSYRQKLQRVDQVIQDLSLGKCQNTIIGVPGRIKGLSGGERKRLAFASEALTDPPLLICDEPTSGLDSFMAHSVVQVLKKLSEKGKTVILTIHQPSSELFELFDKILLMAEGRVAFLGTPIEAVDFFSYIGAQCPTNYN

SEQ ID NO: 1518 - protein, 162 aa, Diasemopsis albifacies
LFIGSLTAREHLIFQAMVRMPSALTYRQKLQRVDQVIQDLSLGKCQNTIIGVPGRTKGLSGGERKRLAFASEALTDPPLLICDEPTSGLDSFMAHSVVQVLKKLSEKGKTVILTIHQPSSELFELFDKILLMAEGRVAFLGTPIEAVDFFSYIGAQCPTNYN

SEQ ID NO: 1519 - protein, 162 aa, Diasemopsis dubia
LFIGSLTAREHLTFQAMVRMPRALTYRQKLQRVDQVIQDLSLGKCQNTIIGVPGRIKGLSGGERKRLAFASEALTDPPLLICDEPTSGLDSFMAHSVVQVLKKLSEKGKTVILTIHQPSSELFELFDKILLMAEGRVAFLGTPIEAVDFFSYIGAQCPTNYN

SEQ ID NO: 1520 - protein, 162 aa, Diasemopsis elongata
LFIGSLTAREHLIFQAMVRMPHVLTYRQKLQRVDQVIQDLSLGKCQNTIIGVPGRIKGLSGGERKRLAFASEALTDPPLLICDEPTSGLDSFMAHSVVQVLKKLSEKGKTVILTIHQPSSELFELFDKILLMAEGRVAFLGTPVEAVDFFSYIGAQCPTNYN

SEQ ID NO: 1521 - protein, 162 aa, Diasemopsis nebulosa
  unsure (1)..(162): unsure at all Xaa locations
LFIGSLTAREHLIFQAMVRMPRALTYRQKVQRVDQVIQDLSLGKCQNTIIGVPGRIKGLSGGERKRLAFASEALTDPPLLICDEPTSGLDSFMAHSVVQVLKKLSEKGKTVILTIHQPSSXLFELFDKILLMAEGRVAFLGTPIEAVDFFSYIGAQCPTNYN

SEQ ID NO: 1522 - protein, 162 aa, Diasemopsis sp.
LFIGSLTAREHLTFQAMVRMPRALTYRQKLQRVDQVIQDLSLGKCQNTVIGVPGRIKGLSGGERKRLAFASEALTDPPLLICDEPTSGLDSFMAHSVVQVLKKLSEKGKTVILTIHQPSSELFELFDKILLMAEGRVAFLGTPIEAVDFFSYIGAQCPTNYN

SEQ ID NO: 1523 - protein, 162 aa, Diasemopsis sp.
LFIGSLTAREHLTFQAMVRMPRAFTYRQKLQRVDQVIQDLSLGKCQNTIIGVPGRIKGLSGGERKRLAFASEALTDPPLLICDEPTSGLDSFMAHSVVQVLKKLSEKGKTVILTIHQPSSELFELFDKILLMAEGRVAFLGTPIEAVDFFSYIGAQCPTNYN

SEQ ID NO: 1524 - protein, 162 aa, Diopsis apicalis
LFIGSLTAREHLIFQAMLRMPNALSYRQKVERVDQVIQDLSLGKCQNTIIGVPGRVKGLSGGERKRLAFASEALTDPPLLICDEPTSGLDSFMAHSVVQVLKKLSEKGKTVILTIHQPSSELFELFNKILLMAEGRVAFLGTPTEAVDFFSYIGAQCPANYN

SEQ ID NO: 1525 - protein, 162 aa, Diopsis fumipennis
LFIGSLTAREHLIFQAMLRMPSALSYRQKVERVDQVIQDLSLGKCQNTIIGVPGRVKGLSGGERKRLAFASEALTDPPLLICDEPTSGLDSFMAHSVVQVLKKLSEKGKTVILTIHQPSSELFELFNKILLMAEGRVAFLGTPTEAVDFFSYIGAQCPANYN

SEQ ID NO: 1526 - protein, 162 aa, Diopsis gnu
LFIGSLTAREHLIFQAMLRMPGSLTYQQKVERVDQVIQDLSLGKCQNTIIGVPGRVKGLSGGERKRLAFASEAITDPPLLICDEPTSGLDSFMAHSVVQVLKKLSEKGKTIILTIHQPSSELFELFNKILLMAEGRVAFLGTPIEAVDFFSYIGAQCPANYN

SEQ ID NO: 1527 - protein, 162 aa, Diopsis longicornis
LFIGSLTAREHLIFQAMLRMPSALSYRQKVERVDQVIQDLSLGKCQNTIIGVPGRVKGLSGGERKRLAFASEALTDPPLLICDEPTSGLDSFMAHSVVQVLKKLSEKGKTVILTIHQPSSELFELFNKILLMAEGRVAFLGTSAEAVDFFSYIGAQCPANYN

SEQ ID NO: 1528 - protein, 162 aa, Eurydiopsis argentifera
  unsure (1)..(162): unsure at all Xaa locations
LFIGSLTAREHLIFQAMVRMPGVLSHRQKIERVDQVIQDLSLGKCQNTIIGXPGRVKGLSGGERKRLAFASEALTDPPLLICDEPTSGLDSFMAHSVVQVLKKLSEKGKTVILTIHQPSSELFELFDKILLIAEGRVAFLGTPTEAVDFFSYIGAQCPANYN

SEQ ID NO: 1529 - protein, 162 aa, Sphyracephala beccarii
LFIGSLTAREHLIFQAMVRMPRNMTYRQKIQRVDQVIQDLSLGKCQNTIIGVPGRVKGLSGGERKRLAFASEALTDPPLLICDEPTSGLDSFMAHSVVQVLKKLSQKGKTVILTIHQPSSELFELFDKILLMAEGRVGFLGTPIEAVDFFSYIGAQCPTNYN

SEQ ID NO: 1530 - protein, 162 aa, Sphyracephala bipunctipennis
LFIGSLTAREHLVFQAMVRMPRNMTHRQKIQRVDQVIQDLSLGKCQYTIIGVPGRVKGLSGGERKRLAFASEALTDPPLLICDEPTSGLDSFMAHSVVQVLKKLSQKGKTVILTIHQPSSELFELFDKILLMAEGRVGFLGTPIEAVDFFSYIGAQCPTNYN

SEQ ID NO: 1531 - protein, 162 aa, Sphyracephala munroi
LFIGSLTAREHLIFQAMVRMPRTMTHRQKIQRVDQVIQDLSLGKCQNTIIGVPGRVKGLSGGERKRLAFASEALTDPPLLICDEPTSGLDSFMAHSVVQVLKKLSQKGKTVILTIHQPSSELFELFDKILLMAEGRVAFLGTPIEAVDFFSYIGAQCPTNYN

SEQ ID NO: 1532 - protein, 162 aa, Teleopsis breviscopium
  unsure (1)..(162): unsure at all Xaa locations
LFIGSLTAREHLIFHAMVRMPGXLTYRQKVERVDQVIQDLSLGKCQNTIIGVPGRVKGLSGGERKRLAFASEALTDPPLLICDEPTSGLDSFMAHSVVQVLKKLSEKGKTVILTIHQPSSELFELFDKILLMAEGRVAFLGTPTEAVDFFSYIGAQCPANYN

SEQ ID NO: 1533 - protein, 162 aa, Teleopsis quadriguttata
LFIGSLTAREHLIFHAMVRMPGALTYRQKVDRVDQVIQDLSLGKCQNTIIGVPGRLKGLSGGERKRLAFASEALTDPPLLICDEPTSGLDSFMAHSVVQVLKKLSEKGKTVILTIHQPSSELFELFDKILLMAEGRVAFLGTPLEAVDFFSYIGAQCPANYN

SEQ ID NO: 1534 - protein, 161 aa, Teleopsis rubicunda
  unsure (1)..(161): unsure at all Xaa locations
XIGSLTAREHLIFHAMVRMPGALTYRQKVERVDQVIQDLSLGKCQNTIIGVPGRVKGLSGGERKRLAFASEALTDPPLLICDEPTSGLDSFMAHSVVQVLKKLSEKGKTVILTIHQPSSELFELFDKILLMAEGRVAFLGTPTEAVDFFSYIGAQCPANYN

SEQ ID NO: 1535 - protein, 162 aa, Teloglabrus entabenensis
LFIGSLTAREHLIFQAMVRMPRSMTHRQKIQRVDQVIQDLSLGKCQNTIIGVPGRVKGLSGGERKRLAFASEALTDPPLLICDEPTSGLDSFMAHSVVQVLKKLSQKGKTVILTIHQPSSELFELFDKILLMAEGRVAFLGTPNEAVDFFSYIGAQCPTNYN

SEQ ID NO: 1536 - protein, 1619 aa, Magnaporthe grisea
MSQPVEDPSHDQARNDNAQTTTDTGNASMPKTNGHDQESSATGISSSPADTLMDKEKQAAPTPEPSTEKAAVPDPAASVASDTAEDEFFDDNDSEQRRRNEMVQQLARTYTSRSNASAAADEYGNANPFLIASEDPDSPLNPSGNNFKAYAWAKAIAGMVAAEGGSFRTIGICFQNMNVFGFGAATDFQKTVSNVWLEAANMLRTAVGMGKTTRIDILRGFNGVVRNGEMLVVLGPPGSGCSTFLKTIAGETNGLNVDQSAYFNYQGLSAEEMHKRHRGEAIYTAEVDVHFPQLSVGDTLTFAANARAPRRAPPGVSKTLFANHIRDVVMAIFGISHTINTRVGNEYIRGVSGGERKRVTIAEAALSGAPLQCWDNSTRGLDSANAIEFCKTLRVCTRLFQTTACVSIYQAPQSAYDMFDKAVVLYEGYQIYFGPADEAKQYFVNLGFECPARTTPDFLTSMTAPHERIVRPGFEGKAPRTPEEFAIAWENSAEYTALQADIEEYKSSHPINGPDAEAFRKSRAAQQGRGQRPNSPYTLSFYQQTKLCLWRGWKRLLGDPTLTVGALFANTLMALVISSIFFNLQMTTSSFFQRGALLFFACLLNGFAAALEILILFAQRPIVEKHDRYALYHPSAEAVASMLCDMPYKVFNAIVFNLVLYFMANLRREPGAFFFYLLISFATVLAMSMMFRTIASMSRSLSQAMVPAAAIILILIIFTGFVIPLDYMLPWCRWLNYIDILAYSFESLLINEFAGQRYTCTEFVPRAEFPGYGDLSGTNRVCQAVGSVAGQPFVKGEDYLYSSFRYESANKWRNFGILIAFMIFFCSRTWLRPRMCERKKSKGEVLVFRRGQRPAAIKDAKTDPEAGPPKVGGAVVAANMTGENAGFIQRQTSTFGWRDVCYEVQIKKETRRILDHVDGWVKPGTLTALMGVSGAGKTTLLDCLADRTSMGVITGEMLVDGHQRDASFQRKTGYVQQQDLHLQTTTVREALNFSALLRQPAHVPRAEKLAYVDEVIRLLDMQEYADAVVGVPGEGLNVEQRKRLTIGVELAAKPPLLLFVDEPTSGLDSQTSWAILDLLEKLTKSGQAILCTIHQPSAMLFQRFDRLLFLAKGGKTVYFGDIGENSKIMTDYFERNGGFPCPHDANPAEWMLEVIGASPGTTSDIDWHQAWRESPECADVHAELDRLKEQVPNTPPPTEDKASYREFAAPFHQQIYAVTHRVFQQYWRTPSYIYAKAALCAVTALFIGFVFYDAPNTQQGLQNQMFAIFNILTVFGQLVQQTMPHFVIQRDLYEVRERPSKVYSWKVFMLSQIIVEIPWNSLMAVIMFFCWYYPVGLERNAILADQVTERGALAFLYLWGFLIFTSTFTDLMIAGFETAEAGGNIANLFFSLCLIFCGVLANPDTMPRFWIFMYRVSPFTYIVSGLLSVAVANSEVRCASNEFLHFDPLNGTCAEFMRNYINGTTIPGLGRIPGAGGYLRPDTESSRSNCAFCPIKDTNIFLQGAHANYNDRWRNFGLIFVYIIFNIIAALFVYWAVRVPKKKLGGKDAAAGVGAGAGAARASASNEKGKMQREKGEVEGLTTAVLGTSVAGSDAPMTTTTEGEGERAKRRTSGDEVVR

SEQ ID NO: 1537 - protein, 310 aa, Clostridium acetobutylicum
MLELTNITKKYGDFTAVNNISFKIEDGEVFGLLGPNGAGKSTIVSMISTVISPTSGDITVDNKLLRQKPTEIKKVMGIVPQDIALYESLSAKDNLEFFGCLYGLNGKELKERVNEVLKIIELEDKKDQAVEEFSGGMKRRVNIGVALMNNPKLLILDEPTVGIDPQSRNHILETVKKLNKERGMTVIYTSHYMEEVEYLCKRIAIVDHGKLIALGTKDELKEKSKAKDTLTVIYSNGDKGALDKIKSINGIENVSISNNQISMLVDQHKRNIIDIVEDVRNLGVKLTSFKYEEVNLESIFLQITGKSLRD

SEQ ID NO: 1538 - protein, 238 aa, Clostridium acetobutylicum
MVEVKGLTKRFKDITAVDNISFEVKEGEIVGLLGENGAGKTTTLRMLATMLKITDGKAIINGYDAQKESDKVRGEIGILFGGEVGIYDRLTARENIMYFAELNGMSNEEAKKSIDNLTKSLQMEEYIDKRVGKFSRGMKQKVSIARSIVHNPSVVLFDEPTTGLDVSASRIVQDFILHCKNENKAVVFSSHSMPEVEKLCDRVIIIHKGKIVEEGSIEALKKKHNNNNLEEVFLELIK

SEQ ID NO: 1539 - protein, 1501 aa, Emericella nidulans
MSSQPSPPAPSGDVAPPGAVQQPSETVSRITDDNGAPSTAKEKAESSDITCASSEKDIDRDRKDIDQESELKITALARNLSRLSQKSGAVDGTNTFLDSSSDPELDPNSGQFNARKWTKNFLSVANRDPDRYPRRTAGVSFRNLSAFGYGTAADYQMDVANMWLKGFGWIRRKLGFVDRVRIDILRDFEGFVRSGEMLVVLGRPGSGCSTFLKTIAGETHGLWLDDGTDIQYQGISWDEMHSRFRGEVIYQAETEIHFPNLTAGETLLFAAQARTPANRFPGVTRDQYAHHMRDVTMAMLGLSHTMNTLIGNEFIRGVSGGERKRVSIAETILCGCPLQCWDNSTRGLDSSTALEFVRNLRLSTEYTGSTAIVAIYQASQAIYDVFDKAIVLYEGRQIYFGSASDARRFFVEMGFECPDRQTTGDFLTSLTSPTERLVRKGFENLVPRTPDEFAERWKQSAERKRLLEEIEAFQNEHPLGGSKYEEFTRSRAAEKAKGTRAASPYTLSYPMQIRLCLSRGFLRLKGDMSMTLATTIGNSIMALIISSIFYNMNGTTEKFFSRGALLFFAILLNAFSSALEILTLWQQRPIVEKHYKYALYHPSAEAISSMIVDLPAKVLVSIVFNIILYFMTNLRRTAGHFFVFYLFSFTTTLTMSNIFRWIGAISRSMAQAMVPSSIFMLILVIYTGFTIPVRNMHPWFRWLNYLNPIGYAFESLMVNEFSGRRFDCAMYVPDGPGYADVPLSSKICSGRGAVAGQDYIDGDTYLNTSFQYYRSHLWRNYGVLLAFMFFFLAAYIICSELVRAKPSKGEILVFPRGKIPAFAKEVRRDEEDAKTVEKPQLVGEKSDDHVGAISKQTAIFHWQDVCYDIKIKGENRRILDHIDGWVKPGTLTALMGVTGAGKTSLLDVLADRMTMGVITREMLVDGRLRDDSFQRKTGYVQQQDLHLETSTVREALIFSAMLRQPASIPRKEKLAYVEEVIKMLGMEEYAEAVVGILGEGLNVEQRKRLTIGVELAAKPDLLLFFDEPTSGLDSQTAWSICSLMRKLADHGQAILCTIHQPSAILMQQFDRLLFLAKGGKTIYFGELGENMGTLIEYFEKKGSTPCPKNANPAEWMLEVIGAAPGSHADRDWSEVWNQSPEREQVRAELARMKAELLQKPEPPRTPEYGEFAMPLWSQFLICLKRMFQQYWRSPSYIYSKATMCVIPPIFIGFTFWREPLSLQGMQNQMFAIFMLLVIFPNLVQQMMPYFVTQRALYEVRERPSKAYSWKAFMMASICVELPWNILMAVPAYFCWYYPIGLYRNAGPGETVERGGTMFLLILIFMMFTSTFSSMVIAGIEHPDTGSNIAQLLFSLCLIFNGVLATPQQMPRFWIFMYRVSPFTYLVSSVLSTGLSGAEVECSDIEILKIPPPDGQNCTSYLGPYAEGIHAKLLSDAPNGDCRLCSISSTNQFLASLSINPDDNWRNVGILFVYIVFNAFAAVFLYWLVRVPKKKSQQVKKQ

SEQ ID NO: 1540 - protein, 1515 aa, Emericella nidulans
MSSFLGTGTFNTSVSPSQAVESRGIENHGNAITETETLHNESHAESPGEKLASSSNSILSSTETAREKDERDYELDAEEEVTRLAQQLTHQSTKYSTHNIENPFLEVGEDSTLNPHSPNFKAKNWMKNLLALSSRDPERYLPRQAGVSFTNLSVHGYGSPTDYQKDVFNSVLQIGGLVRSMMGHGKQKIEILRNFDGLVKAGEMLVVLGRPGSGCSTFLKTIAGEMNGIFMDEKSQLNYQGIPAKQMRKQFRGEAIYTAETDVHFPQLSVGDTLKFAALARCPRNRLPGVSREQYAVHMRDVVMAMLGLSHTINTRVGNDFVRGVSGGERKRVSIAEATLSASPLQCWDNSTRGLDSANALEFCRTLNLMAKYSGATMAVAIYQASQSAYDVFDKVTVLYEGRQIYFGRTDDAKQFFIDMGFECPERQTTADFLTSLTSPAERIVRKGYEGRVPQTPDEFAAAWKNSDAYAQLMREIEEYNQEFPLGGESVNKFIESRRAMQSKNQRVKSPYTMSVMEQVHLCMIRGFQRLKGDASLTLSQLIGNFIMALVIGSVFYDLDNDTGSFYSRGALLFFAVLLNAFGSALEVCLILRLFLSLADSLQILTLYAQRPIVEKQARYAMYHPFAEAIASMLCDMPYKITNTFTFNIPLYFMTNLRREPGAFFIFLLFSFVTTLTMSMLFRTMAATSRTLSQALVPAAILILGLVIYTGFTIPTRNMLGWSRWMNYIDPIAYGFESLMVNEFHGRLFPCSESELVPSYGDTANRVCAVVGATPGELMVNGTTYLRESYQYTKSHEWRNLGIMFAFMAFFLFTYLTATEYISEAKSKGEVLLFRRGQAPPSVNDVETHSPATAGEKVDQSTQDVANIQRQTAIFHWKDVCYDIKIKNEPRRILDHVDGWVKPGTCTALMGVSGAGKTTLLDVLATRVTMGVVTGEMLVDGRPRDQSFQRKTGYVQQQDLHLHTTTVREALRFSALLRQPAKTPRQEKLDYVEEVIKLLGMEAYADAVVGVPGEGLNVEQRKRLTIGVELAAKPQLLLFLDEPTSGLDSQTSWSILDLIDTLTQHGQAILCTIHQPSAMLFQRFDRLLFLAKGGKTVYFGEIGEKSSTLASYFERNGAPKLPADANPAEWMLEVIGAAPGSHSDIDWPAVWRESPERQAVHQHLAELKETLSQKPTETSASDPSEYNEFAAPFSVQLWECLVRVFSQYWRSPVYIYSKAALSILTSLYIGFSFFQAQNTRQGLQNQMFSIFMLMTIFGNLVQQIMPNFVTQRALYEVRERPSKAYSWKAFMTANILVELPWNTLMAVIMYFCWYYPVGLYRNAEPTDSVHERGALMFLLILAFLLFTSTFAHMIIAGIETAETGGNIAQLLFSLCLIFCGVLAGPDVLPGFWIFMYRVSPFTYLVSAMLSTGVSGTTAYCEQVEYLTLYPPSNTTCSEYMDPYISQVGGYLQNPDATSECTFCQISSTDTFLSAVYSNYDDAWRNFGLMWAYIAFNIAAAVFIYWLARVPKGKKN

SEQ ID NO: 1541 - protein, 1498 aa, Emericella nidulans
MSFLGSISPNLPRSQSVVSHNLPQAHGLDENDDIYHNHSTTAQPGASEKDKSEDGETLHENEPDGEARVTLLARQLTRHSTRLTAKSTLENPFFLDDSDSTLNPNSPNFRVRDWMKMLLEIRSRDPERYPDRTAGIAFKNLSVHGFGSPTDYQKDVMNVLLEIGTIARRLAGMKMPKIQILRDFEGLVRSGEMLVVLGRPGSGCSTFLKTIAGEMNGIQVSDDAVLNYQGISSKNMQNSFRGEAIYTAENDIHFPQLSVGDTLMFSALARAPRNRLEGVSRKQYAEHMRDVVMAMLGLSHTINTRVGNDFIRGVSGGERKRVSIAEATLSQAPLQCWDNSTRGLDSANALEFCKNLALMSKYTGSTACVAIYQASQSAYDVFDKVTVLYEGRQIYFGNTKDAKKFFVDMGFECPERQTTADFLTSLTSPAERLVRPGYEGRVPCTPDEFAAAWKRSEERAKLMAEIEEYERQYPIGGPSYDAFVDARKAMQSKRQRVNSPYTISIWQQVSLCVVRGFQRLRGDFSLTTTSLIGNFMMALIIGSVFFDLPDDTSSFYYRGALLFFAVLLNAFSSALEILTLYSQRPIVEKQSRYAFYHPFAEAVASMICDTPYKLINSFTFNVPLYLMTNLRRDAAAFFTFWIFSVVTTFTMSMIFRTIASTSRSLSQALVPAAMLILGMVIYTGFTIPTQNMLGWSRWMNYINPIAYSFESFMVNEFDGRQFECVSIIPSGDEYNNVSMQYRICSTVGAESGSRIVDGGQYLELSYQYTKSHLWRNMGILIGFMVFFAFTYLLGTEYISEQKAKGEVLLFRRGRQPDLSTTEADPENPIQPSNAPKTEESAPQNTARIQRQTAIFHWEDVCYDIKIKGQPRRILDNVDGWVKPGTCTALMGVSGAGKTTLLDVLATRVTMGVVSGSMLVDGRLRDQSFQRKTGYVQQQDLHLATSTVREALRFSAILRQPAHLSRQEKLDYVEEVIKLLGMEAYADAIVGVPGQGLNVEQRKRLTIGVELAAKPQLLLFLDEPTSGLDSQTSWSILDLIDTLTQHGQAILCTIHQPSAMLFQRFDRLLLLASGGKTIYFGEIGPNSSTLSNYFVRNGSHGLPPGDNPAEWMLEVIGAAPGSNTEIDWVKTWRESPEYAKVREHLAELRATLSAKPADSSDPSALSEFAAPFSVQLWECLVRVFAQYYRTPTYIWSKAALCALTALYIGFSFFNAPTSIQGLQNQMFSVFMLMTIFGNLVQQIMPNFVTQRSLYEARERPSKAYSWKAFMAANIIVELPWNSLMAALIFFCWYYPIGLYNNAKPTDAVTERGGLMFLLIWTFLLFTSTFAHMIIAGIELAETGGNVAQLLFSLCLIFCGVLSTPDAMPGFWIFMYRVSPFTYLVSAMLSTGLSGTDVECEPVEYLTFAPPNNQTCGDYMRAYIDEVQSGYLLDPSATDQCSFCSMDKTDTFLLSVGSTFDEAWRNFGLMWAYILFNIVGAVFIYWLARVPKGKKMAGTA

SEQ ID NO: 1542 - protein, 1498 aa, Emericella nidulans
MSFLGSISPNLPRSQSVVSHNLPQAHGLDENDDIYHNHSTTAQPGASEKDKSEDGETLHENEPDGEARVTLLARQLTRHSTRLTAKSTLENPFFLDDSDSTLNPNSPNFRVRDWMKMLLEIRSRDPERYPDRTAGIAFKNLSVHGFGSPTDYQKDVMNVLLEIGTIARRLAGMKMPKIQILRDFEGLVRSGEMLVVLGRPGSGCSTFLKTIAGEMNGIQVSDDAVLNYQGISSKNMQNSFRGEAIYTAENDIHFPQLSVGDTLMFSALARAPRNRLEGVSRKQYAEHMRDVVMAMLGLSHTINTRVGNDFIRGVSGGERKRVSIAEATLSQAPLQCWDNSTRGLDSANALEFCKNLALMSKYTGSTACVAIYQASQSAYDVFDKVTVLYEGRQIYFGNTKDAKKFFVDMGFECPERQTTADFLTSLTSPAERLVRPGYEGRVPCTPDEFAAAWKRSEERAKLMAEIEEYERQYPIGGPSYDAFVDARKAMQSKRQRVNSPYTISIWQQVSLCVVRGFQRLRGDFSLTTTSLIGNFMMALIIGSVFFDLPDDTSSFYYRGALLFFAVLLNAFSSALEILTLYSQRPIVEKQSRYAFYHPFAEAVASMICDTPYKLINSFTFNVPLYLMTNLRRDAAAFFTFWIFSVVTTFTMSMIFRTIASTSRSLSQALVPAAMLILGMVIYTGFTIPTQNMLGWSRWMNYINPIAYSFESFMVNEFDGRQFECVSIIPSGDEYNNVSMQYRICSTVGAESGSRIVDGGQYLELSYQYTKSHLWRNMGILIGFMVFFAFTYLLGTEYISEQKAKGEVLLFRRGRQPDLSTTEADPENPIQPSNAPKTEESAPQNTARIQRQTAIFHWEDVCYDIKIKGQPRRILDNVDGWVKPGTCTALMGVSGAGKTTLLDVLATRVTMGVVSGSMLVDGRLRDQSFQRKTGYVQQQDLHLATSTVREALRFSAILRQPAHLSRQEKLDYVEEVIKLLGMEAYADAIVGVPGQGLNVEQRKRLTIGVELAAKPQLLLFLDEPTSGLDSQTSWSILDLIDTLTQHGQAILCTIHQPSAMLFQRFDRLLLLASGGKTIYFGEIGPNSSTLSNYFVRNGSHGLPPGDNPAEWMLEVIGAAPGSNTEIDWVKTWRESPEYAKVREHLAELRATLSAKPADSSDPSALSEFAAPFSVQLWECLVRVFAQYYRTPTYIWSKAALCALTALYIGFSFFNAPTSIPGLQNQMFSVFMLMTIFGNLVQQIMPNFVTQRSLYEARERPSKAYSWKAFMAANIIVELPWNSLMAALIFFCWYYPIGLYNNAKPTDAVTERGGLMFLLIWTFLLFTSTFAHMIIAGIELAETGGNVAQLLFSLCLIFCGVLSTPDAMPGFWIFMYRVSPFTYLVSAMLSTGLSGTDVECEPVEYLTFAPPNNQTCGDYMRAYIDEVQSGYLLDPSATDQCSFCSMDKTDTFLLSVGSTFDEAWRNFGLMWAYILFNIVGAVFIYWLARVPKGKKMAGTA

SEQ ID NO: 1543 - protein, 1466 aa, Emericella nidulans
MGVPDELPPGSSETDTIVSSSQPTNRSPMDLISEAESLNLRRIATNQSKAQCRPGSAAVPSHDNPPNDDLEDATLDPNSASFSLEKWLRAAVSDASQQGLSTPSGGIPLQKSDRPRAQTAALQLQPTVGSVLTAPLRSRVCCDTGEYEPRRILHGFDGVMKTGELLLVLGRPGTGCSTFLKAVCGETNGLHIDADSVLHYNGVSQQRMMKEFKGEVVYNQEVDKHFPHLTVRQTLEFGAAARTPAHRFQNMSRDEFASYAASVVMAIFGLSHTHNTKVGNDFVRGVSGGERKRVSIAEMALAMTPFAAWDNSSRGLDSATALKFVQALRLSADLAGAAHAVAIYQASQSIYEVFDKVTVLYEGRMIFFGPTGTAKEYFERMGWVCPARQTTGDFLTSITNPLERKARAGMEDVVPKTPKDFEIYWRQSPEYKTLLGEMTGVRDQHPTGNDEQASAELRARKENSQSRNSRAASPYILSIPMQIKLNTKRAYQRIWNDMSSTMSTVVGQIVIALITGVVFYDSPNTTAGFQSKGGTLFYAVLLNALTAMSEITSLYSQRPIVEKQASYAFYHPATEAIAGVVSDVPVKFLLAVAFNVIMYFLANLRREPAQFFIYFLMSFTVMFVMSAVFRTMAAVTKNAAQAMGLAGVLMLALVVYTGYVLPVPSMHPWFEWIHYLNPIYYAFEAMIANEFHGRDFDCIAFVPSMQIWTGDSFSCSSLGSVAGERMVSGDSYINFNYTYTYSHVWRNFGVLLAFLIGFMAIYFLASELNSSTTSTAEALVFRRGHVPEYMRPGYTRPTDEEKAVTQSDIKPSSPSPTNPILPLPPQRDIFTWKDISYDIEIKGEPRRLLDDVSGWVKPGTLTALMGVSGAGKTTLLDVLAHRTTMGVITGDMFVNGKGLDASFQRKTGYVQQQDLHLETATVRESLRFSALLRQPASVSIREKHDYVESVIEMLGMGDFCRACCGTPGEGLNVEQRKLLTIGVELPPSPKLLLFLDEPTSGLDSQSSWAICTFLRKLADSGQAVLCTIHQPSAILFQEFDQLLFLAKGGKTVYFGPIGPNSRTLLDYFESNGARKCDEAENPAEYMIEVVNAEVNDHGTDWFDVWKGSKECQAVKEEIERIHEKKRGTAGAIEETDDGSTKSEFADAILVPAVCRHVRVFQQYWRMPEYIISKGALAIVAGLFIGFSFYDAKTSLAGLQTLVFSLFMVCALFAPLVNQIMPLFITQRSLYEVRERPSKAIPGKLPDCNILVEIPYQVLMGILTFVCYYYPLSVPAKDQTERALVLLFCIQFYVYASTFAHMCIAAMPNAETASPIVILLFSMCLTFCGVMQPPDALPGFWIFMYRVSPFTYWVAGMATTQVHGREVVCGENELSIFDPPTNQTCGQYMERYISVAGGQVLNPSATAGCEYCSLTVADEYLAASQIYWSDRWRNFGLIWVYIGFNIFVATAVYYLFRVKKWNGRRKK

SEQ ID NO: 1544 - protein, 255 aa, Listeria innocua
METVLQAKNVRKIYGSKGNVYTALENISIDIKEGEFTGIMGPSGAGKSTLLNVLSTIDKPTSGEIMISGQELENMNEQQMSTFRRDKLGFIFQDYNLLDTLTIRENIILPLALAKRPVKEMEEKLANISEKFGITEILDKYPSEISGGQKQRTAASRAIITSPSLIFADEPTGALDSKSATNLLESLRDLNEQDKATIMMVTHDAFAASFCKRILFIKDGELYTEIYRGTKTRKEFFQKILDVLAKLGGDTDDVI

SEQ ID NO: 1545 - protein, 255 aa, Listeria monocytogenes EGD-e
METVLQAKNVRKIYGSKGNVYTALENISIDIKEGEFTGIMGPSGAGKSTLLNVLSTIDKPTSGQIVISGQELENMNEQQMSTFRRDKLGFIFQDYNLLDTLTIRENIILPLALAKRPVKEMEEKLAIISEKFGITEILDKYPSEISGGQKQRTAASRAIITSPSLIFADEPTGALDSKSATNLLESLRDLNEQDKSTIMMVTHDAFAASFCKRILFIKDGELYTEIYRGTKTRKEFFQKILDVLAKLGGDSDDVI

SEQ ID NO: 1546 - protein, 294 aa, Streptococcus pneumoniae TIGR4
MNMIKVESLNKNIKGKAILKGISFEVAEGECVALIGPNGAGKTTLLDCLLGDKLVTSGQVSIQGLSVTSSQLDYIRGYLPQENVIVQKLKVKELIAFFQRIYPNSLSDQEIDQLLQFDQQQKEQFAEKLSGGQKRLFSFVLTLIGRPKLVFLDEPTAAMDTSTRQRFWEIVRDLKAQGVTILYSSHYIEEVEHTADRILVLNKGELIRDTTPLAMRSEGIEKHFILPLAYKEVIEQSNLVENWSQKQDALQVVTREADAFWELLVQAGCGIQEIEVNNRSLLDTIFEETQKGDN

SEQ ID NO: 1547 - protein, 294 aa, Streptococcus pneumoniae R6
MTVVKVEKLSKKIKDKEILRNISFEINDGECVALIGPNGAGKTTLLDCLLGDKLVTSGQVSIQGLPVTSSKLDYTRAYLPQENIIVQKLKVKELIAFFQRIYPNPLSNQEIDQLLQFVKQQKEQLAEKLSGGQKRLFSFILTLIGRPKIVFLDEPTASMDTSTRQRFWEIVQELKAQGVTILYSSHYIEEVEHTADRILLLNKGELIRDTTPLAMRSEEIEKHFILPIAYKEVVEQSNLVENWTLKQDSLQVVTREADAFWELLAQAGCRMQEIEVNNRSLLNTIFEETQKGDN

SEQ ID NO: 1548 - protein, 424 aa, Propionibacterium thoenii
MRLAVDGLTVRYRKRVAVDAVSWRLDEGFHALLGPNGAGKSSLLRAIATLQPTVSGTVELDGRSGTEIRAHLGYCPQENLGRSRFTVREHLAYMCWLHRIPDSRVPSEVDRVIELVDLAERADDRISALSGGMRRRVGIGSALVGRPSLVILDEPSAGLDVAQREALSSVLQRVSAEAITIVSTHIVEDVLDHADTLTVMNQARFAHSGAFDEFAGSRDLEAVRIALPGDGDTVRHTGVMLWARHHRVGPSVAVAVIASAVVRGLVLPISSDGSEIEVAPLWIATVCVVPLLFMFTTETDTDRTAPRSLTARRWALLGIAVLTSAVIALAAFPTTIGEWGLIATWRDAVALLGLGLLSLAVLPPAAIWVAPLVAALASMMFSWPLHPGTVPGTVGSAARRGRPAAGPGRDRSEYSAVPADQGGR

SEQ ID NO: 1549 - protein, 242 aa, Staphylococcus epidermidis ATCC 12228
MSDKILELKNATKYYGDKKVLNDINIELSSGKILGLIGPSGSGKTTTIKCLMGMESLNEGYAKIFDTNMPNRKLLNDIGYMGQSDALYESLSARENLVFFGNLMGLKGKELKQAITDNMKLVNLENELDKTVSNFSGGMKRRLSLAITLLSNPNLIILDEPTVGIDPSLRKEIWKQLRELTNKDKSVIVTTHVMDEAERCDYVGLIVNGKLFTIGTPQELKEKFKVDSIEEVFIKAELEVKS

SEQ ID NO: 1550 - protein, 249 aa, Staphylococcus epidermidis ATCC 12228
MLLEVKNVKKVYGRGMNTTMALNQMNLEIDENEFVAIMGESGSGKSTLLNLIATFDRTTEGLIKLDGLPLNQLKNKDIARFRREMMGFVFQDFNVLNTMSNKDNILMPLVLANERPKIMQKRLMEISEQLGIEDLLEKYPSEISGGQKQRIAIARALIARPKLLLADEPTGALDSKTSKNLMCLFRKINQKHQTILMVTHSNIDASYANRVIFIKDGRLYHEIYRGEESQTDYQKRIADSLAILNGVGD

SEQ ID NO: 1551 - protein, 655 aa, Anopheles gambiae str. PEST
PGSCLSSPTAPPPPPAGSGTGRCYQSSLRSYSKWSPTEQGATLVWRDLCVYATAGPAKGGGCGGGGGPPGCHRPTIKRIINNVSGAVTPGTLIALMGSSGAAKSTLMSALAYRTPPGTVVQGDILVNGQPVGPYMYRLSGFVHQDDLFVGSLTVHEHMYFMAKLRLDRRVGHRAIDQTIRDLLERVGLARCAGTRIGEAGDGKMLSGGEKKRLAFATELLTKPTLLFCDEPTTGLDSYGAQALVSTLQQLARRGTAIICTIHQPSSQLFSMFDQVMLLAEGRVAYAGRPHEALAFFARHGHACPPSYNPAEYLIGALATAPGYEQASQRAAHRLCDLFAVSEAAGQRDVLINLEVHMAESGDYRVTDEVQHLAGRPHWLHTTAWLTYRALLTVVRDPTVQYLRLLQKIAIALMAGLCFTGAIEPTQLGVQATQGLLFILISENTFTPMYAVLAVFPETFPLFMRETKNGLYHPSQYYVANVAAMLPGLVLEPLVFVLIAYWLAALRPTLHAFLVTAAAATLVMNVSTACGCFFSAAFNSLPLAMAYLVPFDYILMITSGVFIHLNTMPAATRWLPYISWMMYANEAMSIAQWEGVSNITCPAVDDKLPCLRTGGEVLEHYSFSETHLAPNLWAMVLLYFGFHLLGYLFLWRKTKR

SEQ ID NO: 1552 - protein, 665 aa, Anopheles gambiae str. PEST
MLSFWHARNHHPPSVMSAREAVVSTAVCCTVDNLDGMPGVTVAQHEVAAAAADDDVTLIWQNLTITPIRSKPGAGEQHPVLNDISGTLQPGTLVALMGPSGAGKTTLMSALAYRMSDKMTIAGDIRVNGCPIGPYMYNISGYIYQDELLPDSITVQEHLQLMANLKLGKSVTAERKRAMIAHILSRTGLERCANTKIADATGIGKTLSGGEKKRLAFAVELLSKPKFLFCDEPTTGLDSYSARQLVEMMKSLTRTGTTVLCSIHQPAEKLLYEFDSLILLTGGRTGFIGAPSEAVQFLRLQGLECEAGYNTADFLLKVLSSTTTTTRKGNQFTTGAIGPKTICNNYSASEAARRQEALISVELYRTTVDSGGDEAFRRRLTESRDRCWFYTLYWLMYRHVLQSHRNPNLQYFKIVQRIAIAVLVGLCFSDAIELSQRGVQAMQGVIFLIVSENTFLPMYAALSLFPERFPLFQREKKANLYSTAQFYISTIMSMTPFVLLETCAFILIVYFLANLRPTLLGLLVTVVVSVLVMNVSIACGCFFSVLFPTVASAMSYLVPFDYILMITSGIFIKIWSMPTYLQWMPFISWMMFASEAISIAQWDGVKSIECSNIIPSVCLHNGEQVLDQYSFSRQHLRTDLVVLVGQYFIYHLMAMLCLARRVSRN

SEQ ID NO: 1553 - protein, 744 aa, Anopheles gambiae str. PEST
IRKLPTTRRTKTPRQVKVCARKNYFRYVPNVPKMNVQQSEVRNPRPTNNVSNPTAAMAATALAITTTANTTSSSGAFGCCPTANGESSSIDDSIELNDSQEGGNNNTLYHNGLLEKQDYHFPKRPPVDIVFRDIRYDVRRFNIAKAKFESKEILHGLNGSFKSGELTAIMGPSGAGKSTLLNIMAGYVSSGVSGMVQVNGKSRSHNSESFRKLSCYIQQHDALRPWLTVTEAMTCATHLKLGFGIGMAEKRRLIEKILFMLGLEQKGNTPTMGLSGGQKKRLAIALEMISNPPILFLDEPTTGLDSSSCAQCISLLKRLAQDGRTIVCTIHTPSALLFEMFDQLYTVVQGHCFYQGPTKEMLPFLGDLGYHCPSYHNPADFMMEIAVGEYGADVGKVIKAALKKYYEISSRCIELDSTFDDNVKLMESYSIGGGGKAEEMCKLQKQQEALDNSSYEEEDIFSKTKPASLVMQFLLLFYRNLLMTRRNYFLLFCRIIAHAAVATIFGYLYLGVGPNANQVLANYVYLYGSMLMMVYTGKMAVVLSFQIEMESLTREHFNRWYKLGPYFLSVLVLEIPIQICCSLIYVVISYHLTGNYVNMERFCIFALFCVAGSICAQSWGFFVGATLSVKLAVFIGPILAVLFSVFGFCTRYVDITPVFKWMWHISYYRASFHGIMNSVYGMNRGDLHCPETQIYCHFKNPVLFQKDMDIEHVDMQSNFVLIMLIIITMYISTVLVLWYKLNKR

SEQ ID NO: 1554 - protein, 352 aa, Giardia lamblia ATCC 50803
MKNKMQPTLSVSHLYYDVPITIKAKFHAYLHHRLLRKPRDWDQMPGYKRILRDINFKIYPGEFVAIIGPSGSGKTSLINILANRVITETYCGEVKLKGKQLGPWIKPYLGYVQQEDTLYATDTARETLQFTANLKLKGDSQMKKSIIDSIINSLNLSHVADQLMGAAAGQGFDASNVKTGLSGGERRRVSIANEIISSPRLLLLDECTSGLDTSTATTVVSTLRKIADSRYSKDVSRFLESNTDKDPSKRGDNITVMATLHQPSSFMWNLFDKILVLAAGRTIFYGRPEHFWTAMHSIGYQVPPSYNPADYLIEVVSKDENKFPPLLRGQVRPNPCHFANVRCRSKHNQLHH

SEQ ID NO: 1555 - protein, 1085 aa, Giardia lamblia ATCC 50803
MVLGEDSPLAKSRRNRQWLGVFLKNWTLFCASFGGFLSVLVLTFVLMLCIILLHRYYLNSVSTASLKYDVTGGPSGDSSNDSNIVVGNWISNPYPSLAPTNIFNIHYLSHFDLGSLLYSNTLGQSKGYLSALEKPFNDISLGLALRTEYGTTSVIRTNPAHELVSDSTQNYLALKAKVPYYTNFTSYYDNYLYMNFTGPGVEYSKAPDNITAAGVSNEDKLFYHAKRTSELYRDAVSNTSNPIYYNDGIVGIKVNEIPSFGIRFGQAVSPSPIRIARESDGDVLSIDYSYDTFFYSKMQAYYIDQTDHDRLLEIQVLHFHLCLRNMVNQIYGVSTSATGSVEVDGPLIIGKNAPFWRRSTGDFLGPDGMTPLLLGLVIPLLMFIVSPLMIFALVEEKSSGMVHLHSMMGQRYTNRWLADFTYNFILSFCVAVLLVIMCYAGDLNGIRMNTFAAWLPMFLLFSANVAIFSAFIAAFFESGRIAALLAVVIAFGYAVGGFLGTANFASTTIIDRSISPWFALIPFFGPISVHSQLQSLAILQTDSLYLHITDLRFYVYDSLLSRAYVGQSVSISLILSVISTVLMALLSMYIDLVMPKKTGIPNHWLFFLLPVVNKVDKLRGRRTKHITTGSICKAVTWALVHPDRMCCSQRRNTHISLMDSTDFKPYIPESERSKEEHVPGHLLSTAVDPLSPNGGRFESSTQVTSNAMSIDHLKTIKSTTHIDCISESDVSAESKRAKCATKGFNERPVLIRAIDLTKTYPATRLSPEKHAVRGVSFTVAEGECLGLLGPNGAAKTTTINILTMLHRATTGEAYVLDKSLVDPYNKAYIQSVTGICPQFDILYPTLTCRQHLKYSCRLKNIAKEDEKTHIDELLESVGLVEKANSKVKSLSGGQKRRLSVAIALTGSPSVLYLDEPSTGLDPVSKRLLWNIILRIRSHRAILLTTHAMDEAQALCNRIAIMDRGLLKCIGKCTYLQERYGGALQIMVEVTHDSKPGSGVTVNGVSLNYELEEMGHKLMEETFGSSVLLRNNVAGTLTYDVSDKLTAPHAFIEMAKLARTQKKVICDWSLLQASLDRVFFNVILSS

SEQ ID NO: 1556 - protein, 294 aa, Pyrococcus furiosus DSM 3638
MIIALEIKGLKKRYGNVEALKGITLEVYEGEIFALLGPNGAGKTTLIRILAEGLKYDEGEIKVFGRTLSRETRRLIGYVPQESIAYDLLTVKENLEFYADIYNAPRERIKELIELFSLPEKKKAKELSGGFKRRLNLAIALLYDPKILILDEPTTGLDVPSRRDFWEIIRGFKKDGKTVLLATHYMEEAEELADRVAIMNEGKVISIGTPEELKRLIGEESIITIKGLLKGLEEISYPFIEKDNEIRVRVRNPREALPKIVENLIKAGSIIKEIRVEEPTLEDVFIKLTGRRLE

SEQ ID NO: 1557 - protein, 333 aa, Methanosarcina acetivorans C2A
MTANVIEVNGLEHSYGSVKAVDNISFAVKEGEIFSFLGPNGAGKSTVINILTTLRKIQKGEAKVNGYDVERESKHVRQSIGIVFQMLCIDHEMTVCENLEYHGKIYSMSKKERKERIDELLKLIELEHKRDTLVKDLSGGMKRRLELARGLMTKPAVLFLDEPTIGFDIQTRMRMWEYLREIKREGTTIFLTTHYMEEADQLSDRISIIDHGKIIVTGTSEELKNKLGKDLIYLETDDNNTVAEILRTIGSVKTVTEDTKSLRVMIGEDVTHVLPQIIDKIRKAGIDITTINIKKPSMDDVFVHYTGHGLREGEPQEKVEGLEPMGEPMGVSA

SEQ ID NO: 1558 - protein, 235 aa, Methanopyrus kandleri AV19
MPPAIVAEDLRKEYGEVVALRDVSVEIEAGELVAILGPNGAGKSTFIKIVCGVTRPTSGRIEVLGGDPADPEIKRRVGIVPQQGGLYPEQTVRENLRFYSKLYGREPDPEPLEMLEVDRFMDRKAGQLSGGMRKRAAIAITLALEPEVLVLDEPTNELDPMARRDVIRVTKEFHRRGTTVLYVSHDVYEVEQLRPDRVLIFLEGRKELDEPFDEVMERHGSVLEAYEGVASCPGE

SEQ ID NO: 1559 - protein, 336 aa, Methanosarcina mazei Goe1
MKVLFNMSAIMVKELTKRFGEFTAVDRVSFSVETGELFGLLGPNGAGKTTIINMLTTLLLPTAGDAEIAGYDLRRDPARVRNNIGIIFQDPSLDIGLTGRENLEFHAMMYSIVSDEREERIREVLEVVGLSDKADILVEYYSGGMKRRLEIARGLIHYPKVLFLDEPTLGLDAQTRRSIWDHIRKLNRNYGTSVILTTHYMEEADYLCDRIAIIDQGKIIALDTPSGLKKRLKGDCVSLDIEGKVDLIASALGKKEWVKEVARNEKMLDVIISDYEKNIPDIFRTASSLGIGIRSINFSKPSLEDVFLRLTGSTIREQEGSRLSVRRERMRRRMLR

SEQ ID NO: 1560 - protein, 329 aa, Methanosarcina mazei Goe1
MTANVIEVNNLEHSYGSVKAVDNISFSVKEGEIFSFLGPNGAGKSTVINILTTLRKIQKGEARVNGYDVAKEAKSVRKSIGIVFQMLCLDHEMTVCENLEYHGKIYSMPKNERKKRIEELLILTELEHKKDTLAKDLSGGMKRRLELARGLMTKPAVLFLDEPTIGFDIQTRMRMWEYLREIKREGTTIFLTTHYMEEADQLSDRISIIDHGKIIVTGTADELKNKLGKDLIYLETSDNKIAADILRAIKSVKTVTEDTKSLRVMIGEDVTHVLPQIIEQIRKAGLEITTVNIKKPSMDDVFVHYTGHGLREGEPQEKPEGIEVLGASE

SEQ ID NO: 1561 - protein, 256 aa, Clostridium perfringens str. 13
MGKEVLKVSNIEKYYGKKGNVTKAINDISFTVSEGEFVGIMGASGSGKTTLLNCISTIDKVTSGHIYLEGEDVTSFSSKKLAKFRREKIGFIFQDFNLLDTLTAYENIALALTIQRVNNKEIDKRVRLVAEALNISNELNKYPYEMSGGQKQRVASARAIVTNPSLVLADEPTGALDSKAATMLLESLEDLNKNLNATIMMVTHDAFTASYANRILFIKDGKIFNELIKGTDSRKEFFNRIIEVITLLGGDSNNVF

SEQ ID NO: 1562 - protein, 247 aa, Corynebacterium glutamicum ATCC 13032
MSTVTAVQVNGLKVSISSGFSRKKTKTILHDLDFTVETGKITGLLGPSGSGKTTLMRAIVGVQNFDGTLEVFDQPAGAASLRGKIGYVTQNASVYHDLSVIENLKYFGALAKGTSTPRTPEKILEVLDIADLAQRQVSTLSGGQRGRVSLGCALIASPELLVMDEPTVGLDPITRQALWEEFTTIAKAGAGVVISSHVLEEAARCDNLILLRDGRIIWRGTPTRLLEDTGKSSYEDAFLAAIDGVRS

SEQ ID NO: 1563 - protein, 1009 aa, Thermosynechococcus elongatus BP-1
MTILVTKWKWGFSTRDMAVPILSLLGADGSRQQIQLGRDRLIIGTDPQSQVILVGEGISRHHALILATETGYQVVDLGSASGTFLNGTKLQPRTPVVLKAGDRLKIGDFEAIFDPDGRATTALPGTVVMGAASTPILQVATPHWLQEFPLLKEELILGRDPKADIILDHPFVSFHHAKLVRSGDHYKIIDLGSKNGLHWRGTTISEHILAPGDVIHVGESLRLTYLLMPATQVVEQTRPLQLRDRQQVRIGRDPSNDMVLDHPVVSRFHARLYLQEGQWYLVDLESANGTFVNNRRLEPRKPVVLPTGALVRIGPYSSVFTPDETIVPHNDSGNLRLDAIHLSKTTAKGAKLLQDISLSILPREFVAIVGGSGAGKSTLLDALSGFRPATRGTVLVNGYDLYRSFGTYRTQIGYVPQDDIIHRELTVAQALDYAARLRLPADFTDQERQEQVNQVLAELELTAQRHVLVKELSGGQRKRVSIGVELLTRPSLFFLDEATSGLDPGTETQMMRLLRQLADQGRTILLITHATKNVMLCDLVVFLARGGHLAYFGPPDQALSYFDVQDFDEIYLKIESEPNPALWQQRYCQSHLYQTYVVERQRPLNVDTEATRQVQPQRQKATIPRVAPWRQWWILIQRNLAILRQDRAALILMLSLAPILAALDFVLWKPTILDPDQGDAGQAFTMAFVTVLIAVMVGSLATMREIVKELEIYRRERMVGLGLWPYIFSKLGPAVVLALYQAAIFLGMKFLAIHLSLGIGAIAGLYLTLFLVTFGGMVMGLLVSALSPTQTVAPLLTILFLVPQITFAGAIIPLKDLGPVGNWISDVTLTRWSYANVVSLLGFGQDVAQDPCWQQPKSLREKLSPEALAQCPCFGENLFRRCRFPGVRKEYHPAVDEPEPPQPAEPGDPPALPKSVLEFNQAYRDRVEAYNQQVKDYQRAMDRWQDQFALWKEQRGRAIASGEALIDRFWSLQGQTFNANVTANQLRLGGIIALMLGLVGVFQKRKDVL

SEQ ID NO: 1564 - protein, 1029 aa, Thermosynechococcus elongatus BP-1
MTQAAWLELVKSVSEQGVRLPVSGLKVGRAPDNDIVLNDISVSRHHAFFEWREGQVHLVDLGSKAGTHLNGQAVVPNTPIPLEDGDLITLGNSAVRFRLIWQYHNYQPGATEVSKDAAVPVIEVCTKTWRQRWGLQEQTALLGTHPACDVVVDTPELLPCHLKLRFAEQHLQVVDLSDPQPAMNVHLGIGESYALTEFVRLTYVGQQLPDRIDKERHALVFSPATELGLTGTATVLAVPEADAPPSVPVKTISLVGYNTFTIGRDPNNDLVIGHPTVSRHHAKIERRNGDFLLTDLGSSNGTFVNGREVEEPTLLRVGDSIRIGSDRLVLNVDETLTQYAESGHMRLDAINLRKLVGKGTQILHDISLSIMPKEFVAILGPSGSGKSTLLDALNGLRPATTGTVLVNGTNFYRNYQAFQAQLGYVPQKNIIHEELTIAQALEYAAKLRMPPDTTAAERQQRVTEVLTELGLNHRRDVPIARLSGGQQRRVCIGAELLTQPSLFFLDEATSGLDPGTEADLMFLLRQLADQGRTILIITHATQNIRECDLVIYLAEGGRLAYFGPPNQLLPYFRATFGDRLSGIKLEDFSGIYRALDKEKNPHAPTSEELEQAYRRSRLYQEYVVGRQQMLVHLPDESQQGTKGKSRRSSEPKSKISPWQQFLILTQRNLTLLSQDRIHLLLTLLIAPLLGSLSFVSWRRDVFNPETGNGGQALTMIFVTSLIAVMIGAMTTMRELVKEVEVYQRERMIGLRLLPYLGSKGAIALGLALYQAATYLAVTKLAVDLPGDWGVTFAMYITLALAIFGGMAMGLLVSALAPSQNIVPLLVLMFLVPQIIFSGGIQPVSSFGLPGQMMSHLTVIKWPFEAMVKLTGMGDDIANDPCWREPEEERQNMTEQMQRDFCLCYGPGLFQTCNFPGIRSKYVPAVDEPAPPQPEPPGDPPTDPAALQDYLRRLQAYQAAMDQWEVKYSEWNRQRSRAINEAQGTISRFQRDQGYMFTVDVQRHWRNQSLLILAMLVALPFCQKRRDFGR

SEQ ID NO: 1565 - protein, 821 aa, Thermosynechococcus elongatus BP-1
MRSPPPKTVVDLPTVILTLESQGKTLTYSLTQPEHRLGRDHQWADLVVPDDPLWSVISSRHAVFKQQGATYYLWDGDGHQRRSTNGTFYNQRRIGIEEGFALGETLRLEIGQDPKNKVQLLVQIQFSATASPPPLPQQRRLVLKTLKEWPLTLGRQASNSYRHWQLDAPTVSLHHASIDRTSAGLYVLRDLGSSNGTYVNAKLLKGPYTLRNGDQIRIGPFVLLYHHETLEIRDQGSHLRIDAWGLERRVKTPAGDRALLQEVAFVAEPRQLVGIVGGSGTGKSTLLKVLMGLDPPQEGQVLLNGLNLHRHLASYRHQIGYVPQDDIVHARLTVAEVLNYAAQLRLPADTDAQNRRAAVERVLEQVQLRGTEHQRVASLSGGQRKRVSIAVELLANPKLFFLDEPTSGLDPGLDFLLMQLLRQLADQERTIVLVTHATSHVYLCDRLLVLGPGGRLCYFGPADEARQFFSPTGDRPLNSVAEIYALLTPENSAAWSQKFRQSAHYQRYLASHLSIGPHYESTSVLGAESRPNAETPPQQPAPPHLYQWRVLCHRQWQLLWRDRLSLVLNLISVPIALLLTRFASDRSPFVPQDPPSLLQAAQTLRILFVFTCACLWVGLSGWAQALITEAAIYRRERLANLSLWAYMAAKLTLGKGMALAQTLLITLVGLLAFGLPKGALLPWPLGFGITTFLTLVASLCLGLLISAAVHNSDQASKILPPLLLPQIIFAGVLFKLTGIATALSWLTIGRWTMGAYGALIDVNSMVPPPLDFGLFEPPPQPFDPTPVYAPTWGNLLLNWGMLMLHSLTYMGVATYLQRRKG

SEQ ID NO: 1566 - protein, 186 aa, Coccidioides posadasii
PEEEKFAYVEEIISLLELENLADAIIGDPETGLSVEERKRVTIGVELAAKPQLLLFLDEPTSGLDSQSAFNIVRFLRKLAAAGQAILCTIHQPNSALFENFDRLLLLQRGGECVYFGDIGTDARVLRDYFHRNGADCPSNANPAEWMLDAIGAGQTPRIGSRDWGDAWKTSPEFEQVKQRIVEIKD

SEQ ID NO: 1567 - protein, 323 aa, Thermobifida fusca
MNPMTSSSQPARPEPSPDPSADSPPAISLRGVVKRFGDITAVNGLDLDVPQGVVLGLLGPNGAGKSTTMRILTAQSTVDEGHVSVLGHPIPQKSKWARSLMGVVPQHDNLDEELTVEENLRSFTYLYRVPRRERDAAVERALRIAHLEHRRHEFTEKLSGGMRRRLLIARGLVHRPRVLLLDEPTVGLDPQVRQELWGLISALRDEGVTVLMSTHYIEEAERLSDEVALMAKGRIVERGEPADLIAKYAGKTVEEYQIGAEGVEELEKVIHHAGFTTRRTGSTLSVLRAEELPDSLRDRLGTGMRRASNLEDVFVTLTGETVE

SEQ ID NO: 1568 - protein, 806 aa, Trichodesmium erythraeum IMS101
MPRNLKSNIIMSNKIGQTTLLSNNPYIELNNQGQIITFQLTQKRHILGRDRRRANLVVPSNWLPISNYHALIKKSDDRYHIYDGDGYRPSTNGLFLNQTRITPSEGHPLENGIEIKIGLEPQNQILLKYFEPNNSTALTSLPKTSSISLQNRSVLLGRDPDATLELNAPIISRHHATIEPNAQGEYVLQDYSSNGVFVNGVRVQSTIVVTEGAVIKIGPFTLIRRGDNLEVLDPGNEIRLDAYRLYRIVRDQRGKTQVLLNDISLAIEPGQFVALVGGSGTGKSTLMRTLLGIDPTTKGQVYINGEDLRNNFNIYRTQIGYVPQDDIIHPELTVLEALTYTAKLRLPPDTNVQEVVEKTIEQIEMAERKNILVSQLSGGQRKRVSIGLELLADPKLFFLDEPTSGLDPGLDKKMMQLLKKLANQGRTIILVTHATANIRICDRIVFLGRSGRLCYFGSPKEAMNFFSINTGDFADIYNELETSDENINEWVNNFRQSEYYRRYISNHLSVNNLKPPTNLPPKKQLPSFAKQLFILIQRYLKLIFRDPINLGLSLLTAPIGIGLILFAVRDKNPLIGDPEPTLAPLALRVLFVFTCACLWVGLSSSLQEIVKESAIYIRERLVNLGLFAYLASKVIVLGLLAIFQTLLIAGVIILGFESPQPEIISWSMGVSITTFLTLISCISMGLMISSIVKNASQANSALPLILLPQIIFSGVLFEMKGIASKFSWVMLSRWSVAAYGALVNVNKMVPEATKLPDGSRVSLPFSGSDIYNLNWGNLGLSWGVLCLHSLIYLGLTIWFKKQKDII

SEQ ID NO: 1569 - protein, 339 aa, Trichodesmium erythraeum IMS101
MTPAVLIENLQKSYGSSVAVKDVSFKIESGEIFGLLGPNGAGKTTTLRALCTLITPDAGRLEVSGISVVDQPRIARQRLGYVAQEVALDKVLTGRELLELQGAIYHIPSKLAKERIDKVISLLEIKDWADKKTGTYSGGIRKRLDLAAGLLHQPDVLVLDEPTVGLDIDSRVAVWDFLRQLRDSGTTVLITSHYLEEVDALADRVAIIDKGVVIATGTPSELKDRVGGDRITLRIREFSPAEEAERAKTLLAPLPIVQEVIINAAQGNSLNLVVTPQSDALIKIQRSLQEAGLPIFGIAQARPSLDDVYLAATGKTLMDAELAASNSRDLKAEKKQSMR

SEQ ID NO: 1570 - protein, 238 aa, Streptococcus agalactiae 2603V/R
MKKVIDLKKLQKAYASETVLNNINLEVFKGEIIGLIGPSGAGKSTLIKTMLGMEKADKGTALVLDTQMPDRNILNQIGYMAQSDALYESLTGLENLLFFGKMKGIQKTELKQQITHISKVVDLENQLDKFVSGYSGGMKRRLSLAIALLGNPTVLILDEPTVGIDPSLRRKIWQELINIKDEGHSIFITTHVMDEAELTSKVALLLRGNIIAFDTPLHLKKQFNVSTIEEVFLKAEGE

SEQ ID NO: 1571 - protein, 238 aa, Streptococcus agalactiae NEM316
MKKVIDLKKLQKAYASETVLNNINLEVFKGEIIGLIGPSGAGKSTLIKTMLGMEKADKGTALVLDTQMPDRNILNQIGYMAQSDALYESLTALENLLFFGKMKGIQKTELKQQITHISKVVDLENQLDKFVSGYSGGMKRRLSLAIALLGNPTVLILDEPTVGIDPSLRRKIWQELINIKDEGRSIFITTHVMDEAELTSKVALLLRGNIIAFDTPLHLKKQFNVSTIEEVFLKAEGE

SEQ ID NO: 1572 - protein, 235 aa, Methanocaldococcus jannaschii
MIKLKNVTKTYKMGEEIIYALKNVNLNIKEGEFVSIMGPSGSGKSTMLNIIGCLDKPTEGEVYIDNIKTNDLDDDELTKIRRDKIGFVFQQFNLIPLLTALENVELPLIFKYRGAMSGEERRKRALECLKMAELEERFANHKPNQLSGGQQQRVAIARALANNPPIILADEPTGALDSKTGEKIMQLLKKLNEEDGKTVVVVTHDINVARFGERIIYLKDGEVEREEKLRGFDDR

SEQ ID NO: 1573 - protein, 247 aa, Lactobacillus plantarum WCFS1
MATDYVIAKQVSKHFGHQQVLNQIDLTLPAGMIYGLIGPSGAGKTTLIKSILGMEAVDSGTVKVMDTVMPNRAVMAQVGYMAQSDALYETLTARENLTFFGQLMSVPKIKLAQMIDYAAGLVDLTSQLDKRVSGYSGGMKRRLSLAIALIQDPQLLILDEPTVGIDPELRQQIWTELNKLKDTGKSMLVTTHVMDEAERCDYLMLIRHGIALAEGTPAALKQQYAVDTIEQVFLKAGRMQDANDGNR

SEQ ID NO: 1574 - protein, 313 aa, Lactobacillus plantarum WCFS1
MDEEMMIQMTHVQKRFGTKVAVQDLSLQVQRGEIFGLLGPNGAGKTTVIRMMTTLLRQDAGKILVNGFDSLSQARRVCQQFGLTGQTASIDQDLSARENLQIFGRLNGLSRAAAKHRAMELLTDFDLKHSADHVLATFSGGMRRRLDLAVSLIGKPAILFLDEPTTGLDPRTRAQMWQAIRQLVADGSTVVLTTQYLEEADQLADHIALIDHGQLVASGTPTALKQTVGGQELELEVSATTAVTPAKDILQAMLGQDVRVAERTLTVPLDTASLTPVTEILMRLQAAQITVSNFAMHAPSLDDVFFKLTVGTN

SEQ ID NO: 1575 - protein, 345 aa, Methanosarcina barkeri
MTGVIRYGRGKGVDSLMTSNVIEVNNLEHSYGSVKAVDNISFTVKQGEIFSFLGPNGAGKSTVINILTTLRKLQKGNARVNGYDVTKEPNSVRRSIGIVFQMLCLDHEMTVSENLEYHGRIYSMKKKERNKRIEELLKLTDLENKKDTLGKDLSGGMKRRLELARGLMTKPAVLFLDEPTIGFDIQTRMRMWEYLREIKREGTTIFLTTHYMEEADQLSDRISIIDHGKIIVTGTSNELKNKLGKDLIYLETSDNKAAAEILRSLVSVKSVTEDTKSLRIMIGEDVTHVLPQIMEKIRREGIDIIIVNIKKPSMDDVFVHYTGHGLREGDEDEKQQVIEMVGISK

SEQ ID NO: 1576 - protein, 275 aa, Archaeoglobus fulgidus DSM 4304
MLEVRNLFKRYGSFEAVKGISFSVRRGEVLGLIGENGAGKSTTLKILAGLIRPDGGEVRYFGKDFDEEMKRIIGYLPEIDALYDNMTVSEYLNLFADIYDVRADIDGLLERLNLPDKYISDLSKGMRRKVSIARTLLHDPEVLVYDEPTGGLDPTTSLSIAELLRELAERGKIIVFSAHNMYYVERIADKVVVMKGGKALYFGSLEELIGQNTIYKVEYTIDGRKESVKLFEVEELLDFAEKVRKQGGKIIEIEREVPRLENVYFSLIGRKEIKA

SEQ ID NO: 1577 - protein, 285 aa, Archaeoglobus fulgidus DSM 4304
MNILEISNLSVRFGDFYAVKGLTLNVRRGEILGLLGPNGSGKTTTIRAIFGMVPYEGEIRNYATSVGWMPQNSPLYLNLSVEENLRFFASLYGIEDERRVEEMLKLVQLERYRKRLVKNLSGGMRQRAMLACAMLHDPELLVLDEPTAGVDPPLRVSFWEQFEKLREEGKTILVTTHYMDEAERCERLVLIRNGSKIAEGTPEEIKRRACGDRLLLEVDDALAASRILSDYRSWINGKVVVEVDDAASEAPKIIEMLSRAGVKVFRVEIRRCTLEEAFMRLMEHA

SEQ ID NO: 1578 - protein, 226 aa, Archaeoglobus fulgidus DSM 4304
MKVIELVDVYKIYRTAYYEVHALDGVSMEVEAGEFVAIMGPSGSGKSTLLNMIGCLDKPTKGEVIINGVKTSGLSDRELTKLRRDSIGFIFQQYNLIPTLTALENVELPMIFRGVARAERERRAKELLKVVGIEELADRRPREMSGGQQQRVAIARALANNPKILLCDEPTGNLDTKSGRQVMGILKNLNEENGVTVVLVTHDPSLSEYADRVIRIRDGKVVEDVY

SEQ ID NO: 1579 - protein, 843 aa, Streptomyces avermitilis MA-4680
MPELVLELNGRTWTLDASRPYTLGRDPQGDITLDDARVSWRHATISWNGRSWVIEDHGSTNGTFVQGQRIHQMEIGPGSAVHLGNATDGPRLNLSGAAAAVAAPQQAQPQQQPYVAKGASPGWAQQAPPQQQAPQQQAPQQGWQQPQQSAAVPQQQGPGGGAGAPPVYGDRSPTTFHQFSLGRVMRIGRALENELVVSDLQVSRNHAEFHATPDGRFEIRDLGSHNGTYVNGMPIAKGGSALLGPNDIVGVGHSTFRLIGDRLEEFVDTGEVSFSARHLTVTVDGGKQILKDVSFGVPEKSLIAVIGPSGSGKSTLLKALTGYRPANQGDVLYDNRNLYKQFAELRQRIGLVPQDDILHKELTVKKALKYAAKLRFPADTTGQEREARIDEVLRELKLDIHKEKKVTSLSGGQRKRVSVALELLTKPSLIFLDEPTSGLDPGMDRDVMQLLRGLADDGRTVLVVTHSVAELAICDKLLVMAPGGSVAYFGPPEEALNFFGYDTWADVFSAFENYRDYDWAGRWKGSQHYQMYAADIDAVAPQSVHMPPPQQMRPPKPQGWGSQLMTLIRRYVSVIVSDKGFLALTVILPAVLGAVSLLIDSDKGLLVNPANPKTGVHIPNGTATTVLLILAVGACFAGAANSVRELIKERVIYERERATGLSRSAYLMSKVIVLGTITVLQGAMVGAIGFSSREIPDKGLVLGNAVLLELSIPIMALGFTSMMFGLIISSLVKTAEKTMPLLVMFAIIQVVFTGCLFTLHGAVGVNEFSYLMPSRWAVAAAGTTLDFNNIAPNTDDPTSTDPLWDHAAGAWTMDMAALIVLGVICGFFVARFLRRHEPEVMRK

SEQ ID NO: 1580 - protein, 780 aa, Streptomyces avermitilis MA-4680
MGERPVAPTAPELVLETETGSTVMSPSRDYHVGRDPSSDIVLDDVRVSWHHAVLSVEADHWTLEDEHSTNGTYADGRRIHEWGVGPGSEIRFGNPSDGPRAVLVDCARLATEHPSAVFMPSATGTFRQPTTVRPLPTRTVRIGRGGGNDLDIDDLMVSHRHAELQALPDGTYEIVDLGSHNGTYLNGQPVTRAPVTPGDIVGIGHSVFCLVGDQLQEYVDTGEVSLDVRDLTVELDHDHKILLDQVSFPVGEKCLLAVIGPSGSGKSTLLNALTGQRPADRGTVLYDGRDLYRDYAELRRRIGLVPQDDILHAQLTVHRALGYAAELRFPQDTEKAERRARVDEVIRELGLEQRADQPIHSLSGGQRKRVSVALELLTKPSLLFLDEPTSGLDPGMDRSVMHMLRGLADDGRTVIVVTHSVLSLDVCDRLLVLAPGGTVAYYGPPDETLPFFGFVQWPEAFEAFEHDRDRDWAGEYRDSLQHEQYIEGVGTPPYLPSAAPAAAVGPPPKAQSWGAQLGTLVRRYAATLSADRTFLAIMIALPFVMGAMARALAGGKLTQETAMNALLILCVGGVLTGAANAVRELVKERAIHQRERAVGLSRSAYLMSKVVVLGTITVLQAIVLTLVALLGVDLDAPGGEGVLMPPLVELTLAVALLSFTAMMLGLLVSALVRREEVTMPLLVLLAIVQVVFCGALLKLNGVAVIQQLSWLVPSRWALGAMAGTIGLARIVPGDLTGDPLFRRSAGVWLLDMGMLVVLSLVFGYAVDRLLRRHEPLVMRK

SEQ ID NO: 1581 - protein, 275 aa, Streptomyces avermitilis MA-4680
MNIRRPRPPDPGNPATPALAVRAEGLTVVRGTRKVLKGLDFAVPPGRITGLLGPSGCGKSTLMRSIVGTQAKVTGTLDVLGLPAGDPALRSRIGYVTQAPSVYDDLTVRQNLDYFAAILDPGRAAAERRRAHVTSAIADVDLVSHADALAGNLSGGQRSRVSLAVALLGTPELLVLDEPTVGLDPVLRRDLWTLFHAIAADRGATLLVSSHVMDEAERCHRLLLMREGEILADGTPDALRTRTASETVEAAFLRLVDEASAASPAATAQGKEPVR

SEQ ID NO: 1582 - protein, 297 aa, Sulfolobus solfataricus
MIVVSSIVKKYGNKIALDNISLEVKKGEFVSLIGPNGAGKTTLIRILLTLMKPDKGEVQILGENPFRNKRIFKAIGYVQEIPNYPPFLTGRQVLELSAKIRGVDKSEVKRVLEFVEMENYANSPIIKYSKGMVQRIAIAESLLGNPSILIMDEPNMGIDPIFSLKTRELLNKLKRKDNVSILMTSHELEDVKKLSDRIFMIYKGKIVFSGTVEDMIKEFLGIQVIVETDEIENAEEALKGIEYVKGVFNDGNRLIVKLNEDRREDLLRDLVTSGVKVKGFYIDLNLEEAYMRALRNV

SEQ ID NO: 1583 - protein, 275 aa, Sulfolobus solfataricus
MYVIEVNNVWKAYGKIIANEDITMRVKEGEIVALLGPNGAGKTTLVKQIYGELTPTKGEIRVLGKKPTDRHVKKFLGVIPQECEPYGDLTVWDNIYYMGRLKGASKDEIKKRGEELLERLDLRSKRNTLARDLSGGLKRRTLIAMALINNPKLLILDEPTTGLDPEARREVWEILLNMRKEGQSMLLTTHYLDEAERLADKIYFLSRKIIVEGTPTQIKEKFADWYEVIDYTNGKVYKVKGEEELKKIIMTINGKFEVRMPSLEEIYLQVMKDVE

SEQ ID NO: 1584 - protein, 1236 aa, Saccharomyces castellii
MSFSTDSTSTRDELPLVENNSLDHPYMGFDKTAQDQIRDLARTLTQLSVAHPSESAIDQGSDVQSIYSTGLPGINPVYTNPDTPGYDEKLDPASDNFSSTAWVKNMANIAKSDPDFYKPYSLGCVWKNLSASGDSADVSYQATILNMPWKIITYVYRKVTPTREIDTFQILKSMDGILNPGELLVVLGRPGSGCTTLLKSISSNTHGFDISKDSIISYNGLTPKDIRRHYRGEVVYNAESDIHLPHLTVYQTLLTVARLKTPSNRIKDVTREDYANHLTQVTMATYGLLHTRDTKVGDDLVKGVSGGERKRVSIAEVSICGSKVQCWDNATRGLDSATALEFIRALKTQATILNTTATVAIYQCSQDTYDLFDKVCVLDDGYQLYYGPSDRAKKYFQDMGYVCPPRQTTADFLTSVTSPTERILNQDMLKNGKKIPQTPREMGEYWLESPDYQQLMQQIDAELSSNQDEQRDVIREAHIAKQSKRARPSSPYVVSYMMQVKYLLIRNYWRIKQRASVTIFQVVGNSVIAFILGSMFYKVQKKADSSTFYFRGAAMFFAILFNAFSSLLEIFTLFEARPITEKHRTYSLYHPSADAFASVLSEVPAKLVTSVCFNIIYYFLVNFKRDAGIFFFYFLISIVSTFALSHLFRCNGSLSKTLPGAMVPASMLLLAISMYTGFAIPETKMLGWSKWIWYINPLAYLFESLMINEFHDRRFPCAQFIPAGPPYQNATGTERVCAAVGSVPGQDFVNGDIFLLESYGYQHKHKWRGFGVGMAFVVFFFFGYLILCEYNEGAKQRGEMLIFPQNIVRKMKKQGKLKGKHPNKDDIEAAASSMECNTTEKSILNSSSINYDDMESEVGLSKSEAIFHWRNLCYEIPIKKEIRHILNNIDGWVKPGTLTALMGASGAGKTTLLDCLAQRVTVGTITGDVFVNGCLRDESFPRSIGYCQQQDLHLKTSTVRESLRFSAYLRQPFDVPVEEKNKYVEEIIKTLEMETYADAVVGVPGEGLNVEQRKRLTIGVELAAKPKLLVFLDEPTSGLDSQTAWATCQLMKKLAQNGQAILCTIHQPSAILMQNFDRLLFLQKGGETVYFGDLGSGCQTMIDYFEKEGAEKCPPEANPAEWMLQIIGAAPGSHAIKDFHKAWRNSEEYKAVQKELDWMEQELPRRASETTPEEHKRFATSVWYQFKLVSVRLFQQYWRSPEYLWSKYLLTVFNETFIGFTFFKADRTMQGLQNQM

SEQ ID NO: 1585 - protein, 1035 aa, Saccharomyces castellii
VAKQSKRARPSSPYTVSYGLQVKYLLERNFWRIRNNASISLFMIFGNSSMAFILGSMFYKVMRKGDTSTFYFRGAAMFFAILFNAFSCLLEIFSLYEARPITEKHRTYSLYHPSADAFASIISEIPTKFCIAVCFNIIFYFLVNFRMNGGVFFFYLLMNVVGVFCMSHMFRCVGSLTKSLSEAMVPASMLLLALSMYTGFAIPKKKMLRWSRWIWYINPLSYLFESLMINEFHDVKYPCAQYIPFGPAYANISGTERVCSAVGAVPGQAYILGDDYIKESYGYKHSEKWRSLGIGLAYAIFFLGVYLFLCEYNEGAKQAGEILVFPRSVIKRLKKEGKLREKNTAEDIEMAADTSVTDKQLLSSDEMAEESGANIGLSKSEAIFHWRNLCYDVQIKDETRRILNNVDGWVKPGTLTALMGASGAGKTTLLDCLAERVTMGVITGDVLVNGRPRDQSFPRSIGYCQQQDLHLKTSTVRESLRFSAYLRQPADVSIEEKNQYVEDVIKILEMEAYADAVVGVAGEGLNVEQRKRLTIGVELTAKPKLLVFLDEPTSGLDSQTAWSICQLMKKLADHGQAILCTIHQPSAILMQEFDRLLFMQRGGRTVYFGDLGKGCQTMIDYFERNGSHPCPADANPAEWMLEVVGAAPGSHANQDYHEVWRNSAEYKAVQEELDWMAQELPKKQVEESAADQREFATSVPYQAKIVSIRLFEQYWRSPEYLWSKFILTIFNQLFIGFTFFKADTSLQGLQNQMLSIFMFVCIFNPILQQYLPSFVQQRDLYEARERPSRTFSWKAFIFSQIVVEVPWNLLAGTLAFFIYYYPIGFYANASAAGQLHERGALFWLFSCAFYVYVGSMGLAAISFNQLAENAANLASLLFTMSLSFCGVMTTPGAMPRFWIFMYRVSPLTYFIDATLAVGVANVDVHCSDYELLRFTPASRMTCGEYMTPYMEMMGTGYLKDSSATDQCEFCTVSHTNEYLSQVNSSYSRRWRNYGIFICYIAINYIFAVLFYYMARVQRIRVRVPVRAFYPSSRNN

SEQ ID NO: 1586 - protein, 478 aa, Saccharomyces castellii
MSEKKTLDVSSINSIDPSNDNSANSTNSENLHEYHGFDQTAEEEIRELARTLTIQSVNNASVHESINELENQSIFTPEMEGINPVFTNPANPGYNPKLDPVSEDFSSKAWVQNMANISLADPDFYKPYSLGCVWKNLSASGESSDVAYQSTFLNMPYKILSTGYRKLKSSKTEDRFEILKPMDGCLNPGELLVVLGRPGSGCTTLLKSISSNTHGFKISDESTISYSGLTPKEVKRHYRGEVVYNAEADIHLPHLTVFQTLYTVARLKTPTNRIKGVDRDTFARHMTEVAMATYGLSHTRNTKVGNDLVRGVSGGERKRVSIAEVSICGSKFQCWDNATRGLDSATALEFIRALKTQATISNSAATVAIYQCSQDAYDLFDKVCVLDGGYQLYYGPGNKAKKYFQDMGYLCPERQTTADFLTSVTSPAERVINPEFIKKGIKVPQTPKDMGDYWLNSQNYKELITEIDRKLSENVEST

SEQ ID NO: 1587 - protein, 215 aa, Saccharomyces castellii
QLHERGALYWLLCTAFFVYIGSMAVAVISFIEIADTAGQLASLLFTMALSFCGVMVTPSALPRFWIFMYRISPLTYLIDAFLSVGIANVDVECASFEFVQFSPPPGMDCGTYMAPYIQMTGTGYLSDSSATDTCHFCQFSHTNDFLKSVGSDYSKRWRNWGIFICYIAINYIAAVSFYYLARVPKSTGEIKEQNQKTREGENLTGSSEDQQKVSA

SEQ ID NO: 1588 - protein, 679 aa, Bactrocera cucurbitae
MGQEDQEVLIRGGKATSTSAESLDNNNGQSYEQSSINQGFSKNYGTLSPPSPTLTTDNLTYSWYNLDVFGAVHQPGSGWKQLLNRVKGVFCNERHIPAPRKHLLKNVSGVAYPGELLAVMGSSGAGKTTLLNAIAFRSSKGVQISPSTVRMLNGNPIDAKEMQARCAYVQQDDLFIGSLTAREHLIFQAMVRMPRHTTQKQKVQRVDQVIQDLSLGKCQNTLIGVPGRVKGLSGGERKRLAFASEALTDPPLLICDEPTSGLDSFMAHSVVQVLKKLSQKGKTVILTIHQPSSELFELFDKILLMAEGRVAFLGTPGEAVDFFSYIGAQCPNNYNPADFYVQVLAVVPGREAESRERIAKICDNFAVGKVSREMEQNFQRLEKSNGLPKEDENGFTYKASWFMQFRAVLWRSWLSVLKEPLLVKVRLFQTTMVAVLIGLIFLGQQLTQVGVMNINGAIFLFLTNMTFQNAFATITVFTSELPVFMRETRSRLYRCDTYFLGKTIAELPLFLIVPLIFTAIAYPMIGLRPGVDHFLTALALVTLVANVSTSFGYLISCACSSTSMALSVGPPVIIPFLLFGGFFLNSGSVPVYFKWLSYLSWFRYANEGLLINQWADVKAGEITCTSSNTTCPSSGEVILETLNFSASDLPFDFVGLALLIVGFRISAYIALTVRARRKE

SEQ ID NO: 1589 - protein, 1525 aa, Kluyveromyces lactis
MDADSTSSLVEYQGFDHQVQEQIRDLARTLSRNSLKEQASQQESTGNVLASDDDGAKSIFSTRYEGVNPVFTDSDASGYDVRLDPNSDEFSSAAWIKNMVALANNDPEYYKHYTIGCCWKDLRAFGDSTDVAYQSTVLNLPGKIFSSVKRHFVKSKPEDVFDILKPMDGLLKPGDLLVVLGRPGSGCTTLLKTISSNIDGYNVDENSVISYNGLDPRTIKKHFRGEVVYNAESDVHFPHLSVYETLYNIALLVTPSNRIKGATREEFANHVTQVAMATYGLSHTRDTKVGNELVRGVSGGERKRVSIAEVTICGSRFQCWDNATRGLDSATALEFIRALKTSTDISGSTGVIAIYQCSQDAYDLFDKVCVLHEGYQIFYGNAKAAKAYFERMGYVSPSRQTTADFLTAVTNPAERIVNQEFVKEGRFIPSTAKQMEEYWRNSPEYKQLRGEIEEELNKDSTQTRQELIEAHIARQSKRQRKESPYIVNYGMQVKYLTMRNFLRIKKSYGITVGTIVGNTAMSLVLGSIFYKSMKDTTTNTFFYRGAAMFIAVLFNSFSSMLEIFSLYEARPIIEKHKRYSLYHPSADALASMLSELPAKIITAICFNLILYFMVNFRREAGPFFFYFLMNFLATLVMSAIFRCVGSATKTLSEAMVPASCLLLAISLYVGFSIPKKNLLGWSRWIWYINPLSYIFESLMINEFNGRDFPCAAYIPSGSGYENIGLYERVCNTVASQPGLSYVSGRAFIEEAYGYNPSHRWRALGIALAYFIFFTAFYLLFCEFNESAVQKGEILLFPKSVLKRAKKQKLIKAKHDVEAVQDSEGALTDQKLLQDSLVESNISSSSDKSVNVGLSKSEAIFHWRNVCYDVQIKKETRRILSNVDGWVKPGTLTALMGSSGAGKTTLLDCLASRVTMGVITGDMFVNGHLRDNSFPRSIGYCQQQDLHLSTSTVRESLRFSAYLRQPSSVSIEEKNNYVEDVINILEMQQYADAVVGVAGEGLNVEQRKRLTIGVELAAKPKLLLFLDEPTSGLDSQTAWSVCQLMRKLADHGQAILCTIHQPSALLMQEFDILLFLQKGGKTVYFGNLGEGCQEMINYFEKHGASKCPEGANPAEWMLDVIGAAPGSHATQDYHEVWRNSDEYQAVQKELDWMESELRKKPLDTSSEQSEFGTSLFYQYKVVTLRLFEQYYRTPSYIWSKLFLTIFSQLFIGFTFFKANLSIQGLQNQLFAIFTFTVIFNPACQQYLPLFVSQRDLYEARERPSRTFSWLAFIFSQITVEIPLNICFGTIAFFVFYYPIGFYNNASYAGQLNERGVLFWLFSVSFYVFISSMGQLCIAGLQYAEAAGNMASLMFTMSLNFCGVFGGSGVLPGFWIFMYRISPLTYFIDGVLSTGLANNPVTCANYEYVSFNPRSGETCGEYMADYIDKNGGYLLDSNATEDCNFCKISETNAFLTSFQSSYHRRWRNFGIFIVFIVFNWCGCVFLYWLARVPKKKNRVADERDPDHGKKIENVQKEKVEPQSNEQV

SEQ ID NO: 1590 - protein, 1441 aa, Spirodela polyrhiza
MEIAGYRGGSLRGSLQGSLRRSVSAWRSPSTSDVFGRSSREEDDEEALKWAALEKLPTYDRLRKGIMTGDGGEIQEVDIQGLGFQERKNLLEKLVRNAEEDNERFLLKLRNRMERVGIDNPTIEVRFEHLNINAEAFVGNRGVPTLVNFFVNKAIWILSALHLMPSGKRPISILHDVSGIIKPCRMTLLLGPPGAGKTTLLLALAGKLDNTLKVTGNVTYNGHGMHEFVPQRTSAYISQHDVHIGEMTVRETLAFSSRCQGVGTRYEMLTELSRREKEANIKPDPDVDVYMKAVAVEGQESVVTDYILKILGLDICADTMVGDGMIRGISGGQKKRVTTGEMLVGPSKALFMDEISTGLDSSTTFQIVNSLRQSVHILGGTALIALLQPAPETYDLFDDILLLSDGQIVYQGPRENVLEFFESMGFKCPERKGVADFLQEVTSRKDQQQYWVRENEPYRFVPVNEFSEAFKSFHVGAKLHEELSTPFDRSRNHPAALTTSKYGISKMELLKACIDREWLLMKRNSFVYIFKVVQLIVLALIAMTVFFRTKLPRNGLEDATIFFGAMFLGLVTHLFNGFAELAMSIAKLPVFYKQRDLLFYPPWAYALPTWILKIPISFVECGVWIAMTYYVIGFDPNVVRMFRHYLLLVLISQVASGLFRLLAAVGRDMVVADTFGAFAQLVLLVLGGFIIAREKIKKFWIWGYWSSPLMYAQNAIAVNEFLGHSWNKLVDATGQTLGERFLRNRGIFVDKNWYWIGVGALIGYMVLFNFLFILFLEWLDPLGKGQTTVSEEALQEKEANRTGANVELATRGSAATSDGGSVEIRKDGNRKKGMVLPFTPLSITFDNVKYSVDMPQEMKDRGVTEDKLLLLKGVSGAFRPGVLTALMGVSGRGKTTLMDVLAGRKTGGYIEGDIRISGYPKNQETFARISGYCEQNDIHSPHVTVYESLLYSAWLRLPAEVDEKQRKMFVDEVMDLVELNSLRGSLVGLPGVTGLSTEQRKRLTIAVELVANPSIIFMDEPTSGLDARAAAIVMRAVRNTVDTGRTVVCTIHQPSIDIFEAFDELFLMKRGGEEIYVGPLGRQSSHLIKYFESIDGVKKIKERYNPATWMLEVTTISQEEILGLNFAEVYRNSDLYKRNKDLIKELSTPPPGSKDLFFATQFSQSFVMQCLACLWKQHKSYWRNPSYTATRLFFTVVIALIFGTIFWDLGKKRSTSLDLINAMGSMYAAVLFIGIQNAQTVQPIVDVERTVFYREKAAGMYSALPYAYAQVLIEVPHILVQTLLYGLLVYSMIGFDWTAAKFLWYMFFMFFTFLYFTYYGMMAVAMTPNSDIAAIVAAAFYAIWNIFAGFIIPRPRIPIWWRWYYWACPVAWTLYGLVVSQFGEYTDTMSDVDETVKDFLRRFLGFRHDFLPVVGVMVVVFTVLFASIFAFSIKTLNFQRR

SEQ ID NO: 1591 - protein, 341 aa, Pseudomonas stutzeri
MKDVALQLKNVGKSYGNKVVLESIDFEVRHGSMVALLGTSGAGKSTLFRCLTGLEPIDSGSIVALGESIHELSPARLRAVRGQIGFVFQQLHLVKRFSALENVLGARLAEMPIWRVTLKSFSRADKVLAFECLDRVGMLDYANTPTQLLSGGQQQRIAIARALAQKPKIIIADEPVSSLDPLTARSVLQTLKAAATDLNVAVLCSLHQVDLAREFGDRIVGMRDGRVVFDGTPAEFTDERVHALYQVPAGKMHQRPRATRSTRWPVWLWHEGRSDDHIHTPHTRAAPGHRTALAPERALQRQTSAGADRRHGAVVRDRTTHRNGPHGGHDGTGRGQDRGPG

SEQ ID NO: 1592 - protein, 696 aa, synthetic construct
MGQEDQELLIRGGSKHPSAEHLNKVTADASQSCINQGFGQAKNYGTLLPPSPPEDSGSGSGQLAENLTYAWHNMDIFGAVNQPGSGWRQLVNRTRGLFCNERHIPAPRKHLLKNVCGVAYPGELLAVMGSSGAGKTTLLNALAFRSPQGIQVSPSGMRLLNGQPVDAKEMQARCAYVQQDDLFIGSLTAREHLIFQAMVRMPRHLTYRQRVARVDQVIQELSLSKCQHTIIGVPGRVKGLSGGERKRLAFASEALTDPPLLICDEPTSGLDSFTAHSVVQVLKKLSQKGKTVILTIHQPSSELFELFDKILLMAEGRVAFLGTPSEAVDFFSYITLHLNSYPAWVPSVLPTTIRRTFTYRCWPLCPDGRSSPVIGSPRYGDNFAISKVARDMEQLLATKNLEKPLEQPENGYTYKATWFMQFRAVLWRSWLSVLKEPLLVKVRLIQTTMVAILIGLIFLGQQLTQVGVMNINGAIFLFLTNMTFQNVFATINVFTSELPVFMREARSRLYRCDTYFLGKTIAELPLFLTVPLVFTAIAYPMIGLRAGVLHFFNCLALVTLVANVSTSFGYLISCASSSTSMALSVGPPVIIPFLLFGGFFLNSGSVPVYLKWLSYLSWFRYANEGLLINQWADVEPGEISCTSSNTTCPSSGKVILETLNFSAADLPLDYVGLAILIVSFRVLAYLALRLRARRKE

SEQ ID NO: 1593 - protein, 1483 aa, Penicillium digitatum
MEARRHDPTASVNTEDTANEKSEVGDEKYTDAEVTRLAQQLTRQSTRFSVSPQNAENPFIETHEDSTLNPHSGNFKAKNWMKNLLAIQSRDPERYPKRQAGLAFKNLSVHGFGSPTDYQKDVANSVLEIGAFFRTMAGTGKQKIQILRDFDGLVKNGEMLIVLGRPGSGCSTFLKTIAGEMNGIFKDANSHMNYQGISDKEMRNQFRGEAIYTAETDVHFPQLSVGNTLKFAALARAPRNRLPGVSRDQYAEHMRDVVMAMLGLSHTINTRVGNDFIRGVSGGERKRVSIAEATLCGSPLQCWDNSTRGLDSANALEFCKTLNLMSKYSGTTCAVAIYQASQSAYDVFDKVTVLYEGRQIYFGRTTEAREFFTNMGFHCPDRQTTADFLTSLTSPAERVVKPGFEKMVPRTPDEFAKGWKNSAAYKELQKEIDDYNTQYPIGGESFQQFVESRKAMQSKGQRAKSPYTLSVAEQVQICVTRGFQRLKSDYSLTISALIGNTIMALIVGSVFYQLPDDVTSFYSRGALLFFAVLLNSFSSALEILTLYAQRPIVEKQARYAMYHPFAEAISSMLCDMPYKILNAITFNVTLYFMTGLRQNAGAFFTFMLFSFVTTLTMSMIFRTIASYSRTLSQALVPAAILILGLVIYTGFTIPTRNMLGWSRWMNYIDPIAYGFETLIVNEFHGRNFPCNPESFIPAGDSYADVGRFNKICSAKGAVAGQNFVSGEAYYTASFQYSNSHRWRNMGIMIGFMVFFMVTYLVGTEYISEAKSKGEVLLFRRGYAPKNSGNSDGDVEQTHGVSSAEKKDGAGSGGEQESAAIQRQTSIFQWQDVCYDVHIKNEERRILDHVDGWVKPGTCTALMGVSGAGKTTLLDVLATRVTMGVVSGEMLVDGRPRDQSFQRKTGYVQQQDLHLHTTTVREALRFSAILRQPRHVSHQEKLDYVEEVIKLLGMEHYADAVVGVPGEGLNVEQRKRLTIGVELAAKPQLLLFLDEPTSGLDSQTSWSILDLIDTLTKHGQAILCTIHQPSAMLFQRFDRLLFLAKGGRTVYFGEIGEHSSTLSNYFERNGAPKLSPEANPAEWMLEVIGAAPGTHSDIDWPAVWRESPERKAVQNHLAELRNNLSLKPVATTDNDPAGFNEFAAPFAVQLWQCLIRVFSQYWRTPIYIYSKTALCSLTALYVGFSFFHAQNSMQGLQNQMFSIFMLMTIFGNLVQQIMPHFVTQRSLYEVRERPSKTYSWQAFMSANILVELPWNALMSVLIFLCWYYPVGLQRNASADDLHERGALMWLLILTFMLFTSTFSHMMIAGIELAETGGNLANLLFSLCLIFCGVLATPDKMPHFWIFMYRVSPFTYLVSAMLSTGTSGAKVECESVELLHFEPTAGKTCFEYMNTYMNGLVVNGTQVAAPAGGYLVDNNATSNCAFCTIADTDTYLASVLSYYKDAWRNFGIMWAFIIFNIFGAVCIYWLARVPKGTRSKKTKTA

SEQ ID NO: 1594 - protein, 1469 aa, Arabidopsis thaliana
MDYNPNLPPLGGGGVSMRRSISRSVSRASRNIEDIFSSGSRRTQSVNDDEEALKWAAIEKLPTYSRLRTTLMNAVVEDDVYGNQLMSKEVDVTKLDGEDRQKFIDMVFKVAEQDNERILTKLRNRIDRVGIKLPTVEVRYEHLTIKADCYTGNRSLPTLLNVVRNMGESALGMIGIQFAKKAQLTILKDISGVIKPGRMTLLLGPPSSGKTTLLLALAGKLDKSLQVSGDITYNGYQLDEFVPRKTSAYISQNDLHVGIMTVKETLDFSARCQGVGTRYDLLNELARREKDAGIFPEADVDLFMKASAAQGVKNSLVTDYTLKILGLDICKDTIVGDDMMRGISGGQKKRVTTGEMIVGPTKTLFMDEISTGLDSSTTFQIVKCLQQIVHLNEATVLMSLLQPAPETFDLFDDIILVSEGQIVYQGPRDNILEFFESFGFKCPERKGTADFLQEVTSKKDQEQYWVNPNRPYHYIPVSEFASRYKSFHVGTKMSNELAVPFDKSRGHKAALVFDKYSVSKRELLKSCWDKEWLLMQRNAFFYVFKTVQIVIIAAITSTLFLRTEMNTRNEGDANLYIGALLFGMIINMFNGFAEMAMMVSRLPVFYKQRDLLFYPSWTFSLPTFLLGIPSSILESTAWMVVTYYSIGFAPDASRFFKQFLLVFLIQQMAASLFRLIASVCRTMMIANTGGALTLLLVFLLGGFLLPKGKIPDWWGWAYWVSPLTYAFNGLVVNEMFAPRWMNKMASSNSTIKLGTMVLNTWDVYHQKNWYWISVGALLCFTALFNILFTLALTYLNPLGKKAGLLPEEENEDADQGKDPMRRSLSTADGNRRGEVAMGRMSRDSAAEASGGAGNKKGMVLPFTPLAMSFDDVKYFVDMPGEMRDQGVTETRLQLLKGVTGAFRPGVLTALMGVSGAGKTTLMDVLAGRKTGGYIEGDVRISGFPKVQETFARISGYCEQTDIHSPQVTVRESLIFSAFLRLPKEVGKDEKMMFVDQVMELVELDSLRDSIVGLPGVTGLSTEQRKRLTIAVELVANPSIIFMDEPTSGLDARAAAIVMRAVRNTVDTGRTVVCTIHQPSIDIFEAFDELMLMKRGGQVIYAGPLGQNSHKVVEYFESFPGVSKIPEKYNPATWMLEASSLAAELKLSVDFAELYNQSALHQRNKALVKELSVPPAGASDLYFATQFSQNTWGQFKSCLWKQWWTYWRSPDYNLVRFIFTLATSLLIGTVFWQIGGNRSNAGDLTMVIGALYAAIIFVGINNCSTVQPMVAVERTVFYRERAAGMYSAMPYAISQVTCELPYVLIQTVYYSLIVYAMVGFEWKAEKFFWFVFVSYFSFLYWTYYGMMTVSLTPNQQVASIFASAFYGIFNLFSGFFIPRPKIPKWWIWYYWICPVAWTVYGLIVSQYGDVETRIQVLGGAPDLTVKQYIEDHYGFQSDFMGPVAAVLIAFTVFFAFIFAFCIRTLNFQTR

SEQ ID NO: 1595 - protein, 1416 aa, Arabidopsis thaliana
METLSRSLSKSLGELLASNSNNHFSRRSGSTIDDHDEEALKWAALEKLPTFARLRTTIIHPHEDLVDVTKLGVDDRQKFIDSIFKVTEEDNEKFLKKFRNRIDRVRIKLPTVEVRFEKVTIEANCHIGKRALPTLPNAALNIAERGLRLLGFNFTKTTKVTILRDVSGIIKPSRMTLLLGPPSSGKTTLLLALAGKLDQSLKVTGRVTYNGHGLEEFVPQKTSAYISQNDVHVGVMTVQETLDFSARCQGVGTRYDLLSELVRREKDAGILPEPEVDLFMKSIAAGNVKSSLITDYTLRILGLDICKDTVVGDEMIRGISGGQKKRVTTGEMIVGPTKTLFMDEISTGLDSSTTYQIVKCLQEIVRFTDATVLMSLLQPAPETFELFDDIILLSEGQIVYQGPRDHVLTFFETCGFKCPDRKGTADFLQEVTSRKDQEQYWADSKKPYSYISVSEFSKRFRTFHVGANLEKDLSVPYDRFKSHPASLVFKKHSVPKSQLFKVCWDRELLLMKRNAFFYITKTVQIIIMALIASTVYLRTEMGTKNESDGAVYIGALMFSMIVNMFNGFAELALMIQRLPVFYKQRDLLFHPPWTFSLPTFLLGIPISIFESVVWVTITYYMIGFAPELSRFLKHLLVIFLTQQMAGGIFRFIAATCRSMILANTGGALVILLLFLLGGFIVPRGEIPKWWKWAYWVSPMAYTYDALTVNEMLAPRWINQPSSDNSTSLGLAVLEIFDIFTDPNWYWIGVGGILGFTVLFNILVTLALTFLNPLEKQQAVVSKENTEENRAENGSKSKSIDVKRGMVLPFTPLTMSFDNVNYYVDMPKEMKEQGVSKDKLQLLKEVTGVFRPGVLTALMGVSGAGKTTLMDVLAGRKTGGYIEGDIRISGFPKRQETFARISGYCEQNDIHSPQVTVKESLIYSAFLRLPKEVTKYEKMRFVDEVMELVELESLKDAVVGLPGITGLSTEQRKRLTIAVELVANPSIIFMDEPTSGLDARAAAIVMRTVRNTVDTGRTVVCTIHQPSIDIFEAFDELLLLKRGGQVIYAGPLGQNSHKIIEYFQAIHGVPKIKEKYNPATWMLEVSSMAAEAKLEIDFAEHYKTSSLYQQNKNLVKELSTPPQGASDLYFSTRFSQSLLGQFKSCLWKQWITYWRTPDYNLARFFFTLAAAVMLGSIFWKVGTKRENANDLTKVIGAMYAAVLFVGVNNSSSVQPLIAVERSVFYRERAAEMYSALPYALAQVVCEIPYVLIQTTYYTLIIYAMMCFEWTLAKFFWFYFVSFMSFLYFTYYGMMTVALTPNQQVAAVFAGAFYGLFNLFSGFVIPRPRIPKWWIWYYWICPVAWTVYGLIVSQYGDVEDTIKVPGMANDPTIKWYIENHYGYDADFMIPIATVLVGFTLFFAFMFAFGIRTLNFQQR

SEQ ID NO: 1596 - protein, 1397 aa, Arabidopsis thaliana
MAQTGEDVDKAKSFQVEFACGNGVDDEEKLRSQWATVERLPTFKRVTTALLHTGDDSSDIIDVTKLEDAERRLLIEKLVKQIEADNLRLLRKIRKRIDEVGIELPTVEVRFNDLSVEAECQVVHGKPIPTLWNTIKGSLSKFVCSKKETKIGILKGVSGIVRPGRMTLLLGPPGCGKTTLLQALSGRLSHSVKVGGKVSYNGCLLSEFIPEKTSSYISQNDLHIPELSVRETLDFSACCQGIGSRMEIMKEISRREKLKEIVPDPDIDAYMKAISVEGLKNSMQTDYILKILGLDICADTRAGDATRPGISGGQKRRLTTGEIVVGPATTLLMDEISNGLDSSTTFQIVSCLQQLAHIAGATILISLLQPAPETFELFDDVILLGEGKIIYHAPRADICKFFEGCGFKCPERKGVADFLQEVMSRKDQEQYWCHRSKPYSYISVDSFIKKFNESNLGFLLKEELSKPFDKSQTRKDSLCFRKYSLSKWEMLKACSRREILLMKRNSFIYLFKSGLLVFNALVTMTVFLQAGATRDARHGNYLMGSMFTALFRLLADGLPELTLTISRLGVFCKQKDLYFYPAWAYAIPSIILRIPLSVLDSFIWTVLTYYVIGYSPEVGRFFRHFIILLTFHLSCISMFRAIASICRTFVACSITGAISVLLLALFGGFVIPKSSMPTWLGWGFWLSPLSYAEIGLTANEFFSPRWRKLTSGNITAGEQVLDVRGLNFGRHSYWTAFGALVGFVLFFNALYTLALTYRNNPQRSRAIVSHGKNSQCSEEDFKPCPEITSRAKTGKVILPFKPLTVTFQNVQYYIETPQGKTRQLLFDITGALKPGVLTSLMGVSGAGKTTLLDVLSGRKTRGIIKGEIRVGGYPKVQETFARVSGYCEQFDIHSPNITVEESLKYSAWLRLPYNIDAKTKNELVKEVLETVELEDIKDSMVGLPGISGLSTEQRKRLTIAVELVSNPSIIFLDEPTTGLDARAAAIVMRAVKNVAETGRTVVCTIHQPSIDIFETFDELILMKDGGQLVYYGPLGKHSSKVIKYFESIPGVPKVQKNCNPATWMLDITCKSAEHRLGMDFAQAYKDSTLYKENKMVVEQLSSASLGSEALSFPSRYSQTGWGQLKACLWKQHCSYWRNPSHNLTRIVFILLNSLLCSLLFWQKAKDINNQQDLFSIFGSMYTIVIFSGINNCATVMNFIATERNVFYRERFARMYSSWAYSFSQVLVEVPYSLLQSLLCTIIVYPMIGYHMSVYKMFWSLYSIFCSLLIFNYCGMLMVALTPNIHMALTLRSTFFSMVNLFAGFVMPKQKIPKWWIWMYYLSPTSWVLEGLLSSQYGDVEKEITVFGEKKSVSAFLEDYFGYKHDSLAVVAFVLIAFPIIVASLFAFFMSKLNFQKK

SEQ ID NO: 1597 - protein, 1400 aa, Arabidopsis thaliana
MIQTGEEDEEKATSLEVEFASGNGVDDEEELRLQWATVERLPTFKRVTTALLARDEVSGKGRVIDVTRLEGAERRLLIEMLVKQIEDDNLRLLRKIRKRIDKVGIELPTVEVRFNNLSVEAECQVIHGKPIPTLWNTIKGLLSEFICSKKETKIGILKGVSGIVRPGRMTLLLGPPGCGKTTLLQALSGKFSDSVKVGGEVCYNGCSLSEFIPEKTSSYISQNDLHIPELSVRETLDFSACCQGIGSRMEIMKEISRMEKLQEIIPDPAVDAYMKATSVEGLKNNLQTDYILKILGLDICADTRVGDATRPGISGGEKRRLTTGELVVGPATTLFMDEISNGLDSSTTFQIVSCLQQLAHIAEATILISLLQPAPETFELFDDVILMGEGKIIYHAPRADICRFFEEFGFKCPERKGVADFLQEIMSKKDQEQYWCHRDKPYSYISVDSFINKFKESNLGLLLKEELSKPFNKSQTRKDGLCYKKYSLGKWEMLKACSRREFLLMKRNSFIYLFKSALLVFNALVTMTVFLQVGATTDSLHGNYLMGSLFTALFRLLADGLPELTLTISRLGVFCKQKDLYFYPAWAYAIPSIILKIPLSVLDSFIWTLLTYYVIGYSPEVKRFFLQFLILSTFNLSCVSMFRAIAAIFRTIIASTITGAISILVLSLFGGFVIPKSSMPAWLGWGFWLSPLSYAEIGLTANEFFSPRWSKVISSKTTAGEQMLDIRGLNFGRHSYWTAFGALVGFVLFFNALYVLALTYQNNPQRSRAIISHEKYSRPIEEDFKPCPKITSRAKTGKIILPFKPLTVTFQNVQYYIETPQGKTRQLLSDITGALKPGVLTSLMGVSGAGKTTLLDVLSGRKTRGIIKGEIKVGGYPKVQETFARVSGYCEQFDIHSPNITVEESLKYSAWLRLPYNIDSKTKNELVKEVLETVELDDIKDSVVGLPGISGLSIEQRKRLTIAVELVANPSIIFMDEPTTGLDARAAAIVMRAVKNVAETGRTVVCTIHQPSIDIFETFDELILMKNGGQLVYYGPPGQNSSKVIEYFESFSGLPKIQKNCNPATWILDITSKSAEEKLGIDFSQSYKDSTLYKQNKMVVEQLSSASLGSEALRFPSQFSQTAWVQLKACLWKQHYSYWRNPSHNITRIVFILLDSTLCGLLFWQKAEDINNQQDLISIFGSMYTLVVFPGMNNCAAVINFIAAERNVFYRERFARMYSSWAYSFSQVLIEVPYSLLQSLLCTIIVYPTIGYHMSVYKMFWSLYSIFCSLLIFNYSGMLMVALTPNIHMAVTLRSSFFSMLNLFAGFVIPKQKIPKWWIWMYYLSPTSWVLEGLLSSQYGDVDKEILVFGEKKRVSAFLEDYFGYKHESLAVVAFVLIAYPIIVATLFAFFMSKLSFQKK

SEQ ID NO: 1598 - protein, 1413 aa, Arabidopsis thaliana
MGSSFRSSSSRNEHEDGGDEAEHALQWAEIQRLPTFKRLRSSLVDKYGEGTEKGKKVVDVTKLGAMERHLMIEKLIKHIENDNLKLLKKIRRRMERVGVEFPSIEVRYEHLGVEAACEVVEGKALPTLWNSLKHVFLDLLKLSGVRTNEANIKILTDVSGIISPGRLTLLLGPPGCGKTTLLKALSGNLENNLKCYGEISYNGHGLNEVVPQKTSAYISQHDLHIAEMTTRETIDFSARCQGVGSRTDIMMEVSKREKDGGIIPDPEIDAYMKAISVKGLKRSLQTDYILKILGLDICAETLVGNAMKRGISGGQKKRLTTAEMIVGPTKALFMDEITNGLDSSTAFQIIKSLQQVAHITNATVFVSLLQPAPESYDLFDDIVLMAEGKIVYHGPRDDVLKFFEECGFQCPERKGVADFLQEVISKKDQGQYWLHQNLPHSFVSVDTLSKRFKDLEIGRKIEEALSKPYDISKTHKDALSFNVYSLPKWELFRACISREFLLMKRNYFVYLFKTFQLVLAAIITMTVFIRTRMDIDIIHGNSYMSCLFFATVVLLVDGIPELSMTVQRLSVFYKQKQLCFYPAWAYAIPATVLKIPLSFFESLVWTCLTYYVIGYTPEPYRFFRQFMILFAVHFTSISMFRCIAAIFQTGVAAMTAGSFVMLITFVFAGFAIPYTDMPGWLKWGFWVNPISYAEIGLSVNEFLAPRWQKMQPTNVTLGRTILESRGLNYDDYMYWVSLSALLGLTIIFNTIFTLALSFLKSPTSSRPMISQDKLSELQGTKDSSVKKNKPLDSSIKTNEDPGKMILPFKPLTITFQDLNYYVDVPVEMKGQGYNEKKLQLLSEITGAFRPGVLTALMGISGAGKTTLLDVLAGRKTSGYIEGEIRISGFLKVQETFARVSGYCEQTDIHSPSITVEESLIYSAWLRLVPEINPQTKIRFVKQVLETIELEEIKDALVGVAGVSGLSTEQRKRLTVAVELVANPSIIFMDEPTTGLDARAAAIVMRAVKNVAETGRTIVCTIHQPSIHIFEAFDELVLLKRGGRMIYSGPLGQHSSCVIEYFQNIPGVAKIRDKYNPATWMLEVTSESVETELDMDFAKIYNESDLYKNNSELVKELSKPDHGSSDLHFKRTFAQNWWEQFKSCLWKMSLSYWRSPSYNLMRIGHTFISSFIFGLLFWNQGKKIDTQQNLFTVLGAIYGLVLFVGINNCTSALQYFETERNVMYRERFAGMYSAFAYALAQVVTEIPYIFIQSAEFVIVIYPMIGFYASFSKVFWSLYAMFCNLLCFNYLAMFLISITPNFMVAAILQSLFFTTFNIFAGFLIPKPQIPKWWVWFYYITPTSWTLNLFFSSQYGDIHQKINAFGETKTVASFLEDYFGFHHDRLMITAIILIAFPIALATMYAFFVAKLNFQKR

SEQ ID NO: 1599 - protein, 1390 aa, Arabidopsis thaliana
MAQTGEDVDKAKSFQVEFACGNGVDDEEKLRSQWATVERLPTFKRVTTALLHTGDDSSDIIDVTKLEDAERRLLIEKLVKQIEADNLRLLRKIRKRIDEVGIELPTVEVRFNDLSVEAECQVVHGKPIPTLWNTIKGSLSKFVCSKKETKIGILKGVSGIVRPGRMTLLLGPPGCGKTTLLQALSGRLSHSVKVGGKVSYNGCLLSEFIPEKTSSYISQNDLHIPELSVRETLDFSACCQGIGSRMEIMKEISRREKLKEIVPDPDIDAYMKAISVEGLKNSMQTDYILKILGLDICADTRAGDATRPGISGGQKRRLTTATTLLMDEISNGLDSSTTFQIVSCLQQLAHIAGATILISLLQPAPETFELFDDVILLGEGKIIYHAPRADICKFFEGCGFKCPERKGVADFLQEVMSRKDQEQYWCHRSKPYSYISVDSFIKKFNESNLGFLLKEELSKPFDKSQTRKDSLCFRKYSLSKWEMLKACSRREILLMKRNSFIYLFKSGLLVFNALVTMTVFLQAGATRDARHGNYLMGSMFTALFRLLADGLPELTLTISRLGVFCKQKDLYFYPAWAYAIPSIILRIPLSVLDSFIWTVLTYYVIGYSPEVGRFFRHFIILLTFHLSCISMFRAIASICRTFVACSITGAISVLLLALFGGFVIPKSSMPTWLGWGFWLSPLSYAEIGLTANEFFSPRWRKLTSGNITAGEQVLDVRGLNFGRHSYWTAFGALVGFVLFFNALYTLALTYRNNPQRSRAIVSHGKNSQCSEEDFKPCPEITSRAKTGKVILPFKPLTVTFQNVQYYIETPQGKTRQLLFDITGALKPGVLTSLMGVSGAGKTTLLDVLSGRKTRGIIKGEIRVGGYPKVQETFARVSGYCEQFDIHSPNITVEESLKYSAWLRLPYNIDAKTKNELVKEVLETVELEDIKDSMVGLPGISGLSTEQRKRLTIAVELVSNPSIIFLDEPTTGLDARAAAIVMRAVKNVAETGRTVVCTIHQPSIDIFETFDELILMKDGGQLVYYGPLGKHSSKVIKYFESIPGVPKVQKNCNPATWMLDITCKSAEHRLGMDFAQAYKDSTLYKENKMVVEQLSSASLGSEALSFPSRYSQTGWGQLKACLWKQHCSYWRNPSHNLTRIVFILLNSLLCSLLFWQKAKDINNQQDLFSIFGSMYTIVIFSGINNCATVMNFIATERNVFYRERFARMYSSWAYSFSQVLVEVPYSLLQSLLCTIIVYPMIGYHMSVYKMFWSLYSIFCSLLIFNYCGMLMVALTPNIHMALTLRSTFFSMVNLFAGFVMPKQKIPKWWIWMYYLSPTSWVLEGLLSSQYGDVEKEITVFGEKKSVSAFLEDYFGYKHDSLAVVAFVLIAFPIIVASLFAFFMSKLNFQKK

SEQ ID NO: 1600 - protein, 1443 aa, Arabidopsis thaliana
MAAASNGSEYFEFDVETGRESFARPSNAETVEQDEEDLRWAAIGRLPSQRQGTHNAILRRSQTQTQTSGYADGNVVQTIDVKKLDRADREMLVRQALATSDQDNFKLLSAIKERLDRFVTTLRILSVSNFREKKVGMEVPKIEVRFENLNIEADVQAGTRALPTLVNVSRDFFERCLSSLRIIKPRKHKLNILKDISGIIKPGRMTLLLGPPGSGKSTLLLALAGKLDKSLKKTGNITYNGENLNKFHVKRTSAYISQTDNHIAELTVRETLDFAARCQGASEGFAGYMKDLTRLEKERGIRPSSEIDAFMKAASVKGEKHSVSTDYVLKVLGLDVCSDTMVGNDMMRGVSGGQRKRVTTGEMTVGPRKTLFMDEISTGLDSSTTFQIVKCIRNFVHLMDATVLMALLQPAPETFDLFDDLILLSEGYMVYQGPREDVIAFFESLGFRLPPRKGVADFLQEVTSKKDQAQYWADPSKPYQFIPVSDIAAAFRNSKYGHAADSKLAAPFDKKSADPSALCRTKFAISGWENLKVCFVRELLLIKRHKFLYTFRTCQVGFVGLVTATVFLKTRLHPTSEQFGNEYLSCLFFGLVHMMFNGFSELPLMISRLPVFYKQRDNSFHPAWSWSIASWLLRVPYSVLEAVVWSGVVYFTVGLAPSAGRFFRYMLLLFSVHQMALGLFRMMASLARDMVIANTFGSAAILIVFLLGGFVIPKADIKPWWVWGFWVSPLSYGQRAIAVNEFTATRWMTPSAISDTTIGLNLLKLRSFPTNDYWYWIGIAVLIGYAILFNNVVTLALAYLNPLRKARAVVLDDPNEETALVADANQVISEKKGMILPFKPLTMTFHNVNYYVDMPKEMRSQGVPETRLQLLSNVSGVFSPGVLTALVGSSGAGKTTLMDVLAGRKTGGYTEGDIRISGHPKEQQTFARISGYVEQNDIHSPQVTVEESLWFSASLRLPKEITKEQKKEFVEQVMRLVELDTLRYALVGLPGTTGLSTEQRKRLTIAVELVANPSIIFMDEPTSGLDARAAAIVMRTVRNTVDTGRTVVCTIHQPSIDIFEAFDELLLMKRGGQVIYGGKLGTHSQVLVDYFQGINGVPPISSGYNPATWMLEVTTPALEEKYNMEFADLYKKSDQFREVEANIKQLSVPPEGSEPISFTSRYSQNQLSQFLLCLWKQNLVYWRSPEYNLVRLVFTTIAAFILGTVFWDIGSKRTSSQDLITVMGALYSACLFLGVSNASSVQPIVSIERTVFYREKAAGMYAPIPYAAAQGLVEIPYILTQTILYGVITYFTIGFERTFSKFVLYLVFMFLTFTYFTFYGMMAVGLTPNQHLAAVISSAFYSLWNLLSGFLVQKPLIPVWWIWFYYICPVAWTLQGVILSQLGDVESMINEPLFHGTVKEFIEYYFGYKPNMIGVSAAVLVGFCALFFSAFALSVKYLNFQRR

SEQ ID NO: 1601 - protein, 1426 aa, Arabidopsis thaliana
MAAASNGSEYFEFDVETGRESFARPSNAETVEQDEEDLRWAAIGRLPSQRQGTHNAILRRSQTQTQTSGYADGNVVQTIDVKKLDRADREMLVRQALATSDQDNFKLLSAIKERLDRVGMEVPKIEVRFENLNIEADVQAGTRALPTLVNVSRDFFERCLSSLRIIKPRKHKLNILKDISGIIKPGRMTLLLGPPGSGKSTLLLALAGKLDKSLKKTGNITYNGENLNKFHVKRTSAYISQTDNHIAELTVRETLDFAARCQGASEGFAGYMKDLTRLEKERGIRPSSEIDAFMKAASVKGEKHSVSTDYVLKVLGLDVCSDTMVGNDMMRGVSGGQRKRVTTGEMTVGPRKTLFMDEISTGLDSSTTFQIVKCIRNFVHLMDATVLMALLQPAPETFDLFDDLILLSEGYMVYQGPREDVIAFFESLGFRLPPRKGVADFLQEVTSKKDQAQYWADPSKPYQFIPVSDIAAAFRNSKYGHAADSKLAAPFDKKSADPSALCRTKFAISGWENLKVCFVRELLLIKRHKFLYTFRTCQVGFVGLVTATVFLKTRLHPTSEQFGNEYLSCLFFGLVHMMFNGFSELPLMISRLPVFYKQRDNSFHPAWSWSIASWLLRVPYSVLEAVVWSGVVYFTVGLAPSAGRFFRYMLLLFSVHQMALGLFRMMASLARDMVIANTFGSAAILIVFLLGGFVIPKADIKPWWVWGFWVSPLSYGQRAIAVNEFTATRWMTPSAISDTTIGLNLLKLRSFPTNDYWYWIGIAVLIGYAILFNNVVTLALAYLNPLRKARAVVLDDPNEETALVADANQVISEKKGMILPFKPLTMTFHNVNYYVDMPKEMRSQGVPETRLQLLSNVSGVFSPGVLTALVGSSGAGKTTLMDVLAGRKTGGYTEGDIRISGHPKEQQTFARISGYVEQNDIHSPQVTVEESLWFSASLRLPKEITKEQKKEFVEQVMRLVELDTLRYALVGLPGTTGLSTEQRKRLTIAVELVANPSIIFMDEPTSGLDARAAAIVMRTVRNTVDTGRTVVCTIHQPSIDIFEAFDELLLMKRGGQVIYGGKLGTHSQVLVDYFQGINGVPPISSGYNPATWMLEVTTPALEEKYNMEFADLYKKSDQFREVEANIKQLSVPPEGSEPISFTSRYSQNQLSQFLLCLWKQNLVYWRSPEYNLVRLVFTTIAAFILGTVFWDIGSKRTSSQDLITVMGALYSACLFLGVSNASSVQPIVSIERTVFYREKAAGMYAPIPYAAAQGLVEIPYILTQTILYGVITYFTIGFERTFSKFVLYLVFMFLTFTYFTFYGMMAVGLTPNQHLAAVISSAFYSLWNLLSGFLVQKPLIPVWWIWFYYICPVAWTLQGVILSQLGDVESMINEPLFHGTVKEFIEYYFGYKPNMIGVSAAVLVGFCALFFSAFALSVKYLNFQRR

SEQ ID NO: 1602 - protein, 1451 aa, Arabidopsis thaliana
MDYDPAHAMSRGGSMRQTISRSVSKASRNMEDIFNTSSRRTKSVNEDEEALKWASIEKLPTYNRLRTSLMPELGEDDVYGNQILNKAVDVTKLDGEERQKFIDMVFKVAEQDNERILTKLRNRIDRVGIQLPTVEVRYDHLTVKADCYTGDRSLPSLLNAVRNMGEAALGMIGIRLAKKAQLTILKDVSGIVKPSRMTLLLGPPSSGKTTLLLALAGKLDKSLDVSGEVTYNGYRLNEFVPIKTSAYISQNDLHVGIMTVKETLDFSARCQGVGTRYDLLNELARREKDAGIFPEADVDLFMKASAAQGVKSSLITDYTLKILGLDICKDTIVGDDMMRGISGGQKKRVTTGEMIVGPTKTLFMDEISTGLDSSTTFQIVKCLQQIVHLTEATVLISLLQPAPETFDLFDDIILLSEGQIVYQGPRDHILEFFESFGFKCPERKGTADFLQEVTSKKDQEQYWVDPNRPYRYIPVSEFASSFKKFHVGSKLSNELSVPYDKSKSHKAALMFDKYSIKKTELLKSCWDKEWMLMKRNSFFYVFKTVQIIIIAAITSTLYLRTEMHTRNEIDANIYVGSLLFAMIVNMFNGLAEMAMTIQRLPVFYKQRDLLFHPPWTYTLPTFLLGIPISIFESTAWMVVTYYSIGYAPDAERFFKQFLIIFLIQQMAAGIFRFIASTCRTMTIANTGGVLVLLVVFLTGGFLLPRSEIPVWWRWAYWISPLSYAFNAITVNELFAPRWMNKMSGNSTTRLGTSVLNIWDVFDDKNWYWIGVGGLLGFTVIFNGFFTLALTYLDLTYMCIMTTALGKAQAILPKEEDEEAKGKAGSNKETEMESVSAKKGMVLPFTPLAMSFDDVKYFVDMPAEMREQGVQETRLQLLKGVTSAFRPGVLTALMGVSGAGKTTLMDVLAGRKTGGYIEGDVRVSGFPKKQETFARISGYCEQTDIHSPQVTVRESLIFSAFLRLAKEVSKEDKLMFVDQVMELVELVDLRDAIVGLPGVTGLSTEQRKRLTIAVELVANPSIIFMDEPTSGLDARAAAIVMRAVRNTVDTGRTVVCTIHQPSIDIFEAFDELLLMKRGGHVIYSGPLGRNSHKVVEYFESFPGVPKIPEKYNPATWMLEASSLAAELKLGVDFAELYKASALCQRNKALVQELSVPPQGATDLYFATQFSQNTWGQFKSCLWKQWWTYWRSPDYNLVRFIFTLATSLMIGSVFWQIGGKRSNVQDLTMVIGAIYAAVVFVGINNCSTVQPMVAVERTVFYREKAAGMYSAIPYAISQVTCELPYVLIQTTYYSLIIYSMVGFEWKASKFLWFIFINYFSFLYWTYYGMMTVSLTPNQQVASIFASAFYGIFNLFSGFFIPRPKIPKWWVWYYWICPVAWTIYGLITSQYGDVETPIALLGGAPGLTVKQYIKDQYGFESDYMGPVAGVLVGFTVFFAFIFAFCIKTLNFQSR

SEQ ID NO: 1603 - protein, 1442 aa, Arabidopsis thaliana
MDYDPAHAMSRGGSMRQTISRSVSKASRNMEDIFNTSSRRTKSVNEDEEALKWASIEKLPTYNRLRTSLMPELGEDDVYGNQILNKAVDVTKLDGEERQKFIDMVFKVAEQDNERILTKLRNRIDRVGIQLPTVEVRYDHLTVKADCYTGDRSLPSLLNAVRNMGEAALGMIGIRLAKKAQLTILKDVSGIVKPSRMTLLLGPPSSGKTTLLLALAGKLDKSLDVSGEVTYNGYRLNEFVPIKTSAYISQNDLHVGIMTVKETLDFSARCQGVGTRYDLLNELARREKDAGIFPEADVDLFMKASAAQGVKSSLITDYTLKILGLDICKDTIVGDDMMRGISGGQKKRVTTGEMIVGPTKTLFMDEISTGLDSSTTFQIVKCLQQIVHLTEATVLISLLQPAPETFDLFDDIILLSEGQIVYQGPRDHILEFFESFGFKCPERKGTADFLQEVTSKKDQEQYWVDPNRPYRYIPVSEFASSFKKFHVGSKLSNELSVPYDKSKSHKAALMFDKYSIKKTELLKSCWDKEWMLMKRNSFFYVFKTVQIIIIAAITSTLYLRTEMHTRNEIDANIYVGSLLFAMIVNMFNGLAEMAMTIQRLPVFYKQRDLLFHPPWTYTLPTFLLGIPISIFESTAWMVVTYYSIGYAPDAERFFKQFLIIFLIQQMAAGIFRFIASTCRTMTIANTGGVLVLLVVFLTGGFLLPRSEIPVWWRWAYWISPLSYAFNAITVNELFAPRWMNKMSGNSTTRLGTSVLNIWDVFDDKNWYWIGVGGLLGFTVIFNGFFTLALTYLDPLGKAQAILPKEEDEEAKGKAGSNKETEMESVSAKKGMVLPFTPLAMSFDDVKYFVDMPAEMREQGVQETRLQLLKGVTSAFRPGVLTALMGVSGAGKTTLMDVLAGRKTGGYIEGDVRVSGFPKKQETFARISGYCEQTDIHSPQVTVRESLIFSAFLRLAKEVSKEDKLMFVDQVMELVELVDLRDAIVGLPGVTGLSTEQRKRLTIAVELVANPSIIFMDEPTSGLDARAAAIVMRAVRNTVDTGRTVVCTIHQPSIDIFEAFDELLLMKRGGHVIYSGPLGRNSHKVVEYFESFPGVPKIPEKYNPATWMLEASSLAAELKLGVDFAELYKASALCQRNKALVQELSVPPQGATDLYFATQFSQNTWGQFKSCLWKQWWTYWRSPDYNLVRFIFTLATSLMIGSVFWQIGGKRSNVQDLTMVIGAIYAAVVFVGINNCSTVQPMVAVERTVFYREKAAGMYSAIPYAISQVTCELPYVLIQTTYYSLIIYSMVGFEWKASKFLWFIFINYFSFLYWTYYGMMTVSLTPNQQVASIFASAFYGIFNLFSGFFIPRPKIPKWWVWYYWICPVAWTIYGLITSQYGDVETPIALLGGAPGLTVKQYIKDQYGFESDYMGPVAGVLVGFTVFFAFIFAFCIKTLNFQSR

SEQ ID NO: 1604 - protein, 1423 aa, Arabidopsis thaliana
MEGTSFHQASNSMRRNSSVWKKDSGREIFSRSSREEDDEEALRWAALEKLPTFDRLRKGILTASHAGGPINEIDIQKLGFQDTKKLLERLIKVGDDEHEKLLWKLKKRIDRVGIDLPTIEVRFDHLKVEAEVHVGGRALPTFVNFISNFADKFLNTLHLVPNRKKKFTILNDVSGIVKPGRMALLLGPPSSGKTTLLLALAGKLDQELKQTGRVTYNGHGMNEFVPQRTAAYIGQNDVHIGEMTVRETFAYAARFQGVGSRYDMLTELARREKEANIKPDPDIDIFMKAMSTAGEKTNVMTDYILKILGLEVCADTMVGDDMLRGISGGQKKRVTTGEMLVGPSRALFMDEISTGLDSSTTYQIVNSLRNYVHIFNGTALISLLQPAPETFNLFDDIILIAEGEIIYEGPRDHVVEFFETMGFKCPPRKGVADFLQEVTSKKDQMQYWARRDEPYRFIRVREFAEAFQSFHVGRRIGDELALPFDKTKSHPAALTTKKYGVGIKELVKTSFSREYLLMKRNSFVYYFKFGQLLVMAFLTMTLFFRTEMQKKTEVDGSLYTGALFFILMMLMFNGMSELSMTIAKLPVFYKQRDLLFYPAWVYSLPPWLLKIPISFMEAALTTFITYYVIGFDPNVGRLFKQYILLVLMNQMASALFKMVAALGRNMIVANTFGAFAMLVFFALGGVVLSRDDIKKWWIWGYWISPIMYGQNAILANEFFGHSWSRAVENSSETLGVTFLKSRGFLPHAYWYWIGTGALLGFVVLFNFGFTLALTFLNSLGKPQAVIAEEPASDETELQSARSEGVVEAGANKKRGMVLPFEPHSITFDNVVYSVDMPQEMIEQGTQEDRLVLLKGVNGAFRPGVLTALMGVSGAGKTTLMDVLAGRKTGGYIDGNITISGYPKNQQTFARISGYCEQTDIHSPHVTVYESLVYSAWLRLPKEVDKNKRKIFIEEVMELVELTPLRQALVGLPGESGLSTEQRKRLTIAVELVANPSIIFMDEPTSGLDARAAAIVMRTVRNTVDTGRTVVCTIHQPSIDIFEAFDELFLLKRGGEEIYVGPLGHESTHLINYFESIQGINKITEGYNPATWMLEVSTTSQEAALGVDFAQVYKNSELYKRNKELIKELSQPAPGSKDLYFPTQYSQSFLTQCMASLWKQHWSYWRNPPYTAVRFLFTIGIALMFGTMFWDLGGKTKTRQDLSNAMGSMYTAVLFLGLQNAASVQPVVNVERTVFYREQAAGMYSAMPYAFAQVFIEIPYVLVQAIVYGLIVYAMIGFEWTAVKFFWYLFFMYGSFLTFTFYGMMAVAMTPNHHIASVVSSAFYGIWNLFSGFLIPRPSMPVWWEWYYWLCPVAWTLYGLIASQFGDITEPMADSNMSVKQFIREFYGYREGFLGVVAAMNVIFPLLFAVIFAIGIKSFNFQKR

SEQ ID NO: 1605 - protein, 1450 aa, Arabidopsis thaliana
MAHMVGADDIESLRVELAEIGRSIRSSFRRHTSSFRSSSSIYEVENDGDVNDHDAEYALQWAEIERLPTVKRMRSTLLDDGDESMTEKGRRVVDVTKLGAVERHLMIEKLIKHIENDNLKLLKKIRRRIDRVGMELPTIEVRYESLKVVAECEVVEGKALPTLWNTAKRVLSELVKLTGAKTHEAKINIINDVNGIIKPGRLTLLLGPPSCGKTTLLKALSGNLENNLKCSGEISYNGHRLDEFVPQKTSAYISQYDLHIAEMTVRETVDFSARCQGVGSRTDIMMEVSKREKEKGIIPDTEVDAYMKAISVEGLQRSLQTDYILKILGLDICAEILIGDVMRRGISGGQKKRLTTAEMIVGPTKALFMDEITNGLDSSTAFQIVKSLQQFAHISSATVLVSLLQPAPESYDLFDDIMLMAKGRIVYHGPRGEVLNFFEDCGFRCPERKGVADFLQEVISKKDQAQYWWHEDLPYSFVSVEMLSKKFKDLSIGKKIEDTLSKPYDRSKSHKDALSFSVYSLPNWELFIACISREYLLMKRNYFVYIFKTAQLVMAAFITMTVFIRTRMGIDIIHGNSYMSALFFALIILLVDGFPELSMTAQRLAVFYKQKQLCFYPAWAYAIPATVLKVPLSFFESLVWTCLSYYVIGYTPEASRFFKQFILLFAVHFTSISMFRCLAAIFQTVVASITAGSFGILFTFVFAGFVIPPPSMPAWLKWGFWANPLSYGEIGLSVNEFLAPRWNQMQPNNFTLGRTILQTRGMDYNGYMYWVSLCALLGFTVLFNIIFTLALTFLKSPTSSRAMISQDKLSELQGTEKSTEDSSVRKKTTDSPVKTEEEDKMVLPFKPLTVTFQDLNYFVDMPVEMRDQGYDQKKLQLLSDITGAFRPGILTALMGVSGAGKTTLLDVLAGRKTSGYIEGDIRISGFPKVQETFARVSGYCEQTDIHSPNITVEESVIYSAWLRLAPEIDATTKTKFVKQVLETIELDEIKDSLVGVTGVSGLSTEQRKRLTIAVELVANPSIIFMDEPTTGLDARAAAIVMRAVKNVADTGRTIVCTIHQPSIDIFEAFDELVLLKRGGRMIYTGPLGQHSRHIIEYFESVPEIPKIKDNHNPATWMLDVSSQSVEIELGVDFAKIYHDSALYKRNSELVKQLSQPDSGSSDIQFKRTFAQSWWGQFKSILWKMNLSYWRSPSYNLMRMMHTLVSSLIFGALFWKQGQNLDTQQSMFTVFGAIYGLVLFLGINNCASALQYFETERNVMYRERFAGMYSATAYALGQVVTEIPYIFIQAAEFVIVTYPMIGFYPSAYKVFWSLYSMFCSLLTFNYLAMFLVSITPNFMVAAILQSLFYVGFNLFSGFLIPQTQVPGWWIWLYYLTPTSWTLNGFISSQYGDIHEEINVFGQSTTVARFLKDYFGFHHDLLAVTAVVQIAFPIALASMFAFFVGKLNFQRR

SEQ ID NO: 1606 - protein, 1420 aa, Arabidopsis thaliana
MWNSAENAFSRSTSFKDEIEDEEELRWAALQRLPTYSRIRRGIFRDMVGEPKEIQIGNLEASEQRLLLDRLVNSVENDPEQFFARVRKRFDAVDLKFPKIEVRFQNLMVESFVHVGSRALPTIPNFIINMAEGLLRNIHVIGGKRNKLTILDGISGVIRPSRLTLLLGPPSSGKTTLLLALAGRLGTNLQTSGKITYNGYDLKEIIAPRTSAYVSQQDWHVAEMTVRQTLEFAGRCQGVGFKYDMLLELARREKLAGIVPDEDLDIFMKSLALGGMETSLVVEYVMKILGLDTCADTLVGDEMIKGISGGQKKRLTTGELLVGPARVLFMDEISNGLDSSTTHQIIMYMRHSTHALEGTTVISLLQPSPETYELFDDVILMSEGQIIYQGPRDEVLDFFSSLGFTCPDRKNVADFLQEVTSKKDQQQYWSVPFRPYRYVPPGKFAEAFRSYPTGKKLAKKLEVPFDKRFNHSAALSTSQYGVKKSELLKINFAWQKQLMKQNAFIYVFKFVQLLLVALITMTVFCRTTMHHNTIDDGNIYLGSLYFSMVIILFNGFTEVPMLVAKLPVLYKHRDLHFYPSWAYTLPSWLLSIPTSIIESATWVAVTYYTIGYDPLFSRFLQQFLLYFSLHQMSLGLFRVMGSLGRHMIVANTFGSFAMLVVMTLGGFIISRDSIPSWWIWGYWISPLMYAQNAASVNEFLGHNWQKTAGNHTSDSLGLALLKERSLFSGNYWYWIGVAALLGYTVLFNILFTLFLAHLNPWGKFQAVVSREELDEREKKRKGDEFVVELREYLQHSGSIHGKYFKNRGMVLPFQPLSLSFSNINYYVDVPLGLKEQGILEDRLQLLVNITGAFRPGVLTALVGVSGAGKTTLMDVLAGRKTGGTIEGDVYISGFPKRQETFARISGYCEQNDVHSPCLTVVESLLFSACLRLPADIDSETQRAFVHEVMELVELTSLSGALVGLPGVDGLSTEQRKRLTIAVELVANPSIVFMDEPTSGLDARAAAIVMRTVRNIVNTGRTIVCTIHQPSIDIFESFDELLFMKRGGELIYAGPLGQKSCELIKYFESIEGVQKIKPGHNPAAWMLDVTASTEEHRLGVDFAEIYRNSNLCQRNKELIEVLSKPSNIAKEIEFPTRYSQSLYSQFVACLWKQNLSYWRNPQYTAVRFFYTVVISLMLGTICWKFGSKRDTQQQLFNAMGSMYAAVLFIGITNATAAQPVVSIERFVSYRERAAGMYSALPFAFAQVFIEFPYVLAQSTIYSTIFYAMAAFEWSAVKFLWYLFFMYFSIMYFTFYGMMTTAITPNHNVASIIAAPFYMLWNLFSGFMIPYKRIPLWWRWYYWANPVAWTLYGLLVSQYGDDERSVKLSDGIHQVMVKQLLEDVMGYKHDFLGVSAIMVVAFCVFFSLVFAFAIKAFNFQRR

SEQ ID NO: 1607 - protein, 1388 aa, Arabidopsis thaliana
MPQTDGVEFASRNNLENGDGDQVRSQWVAIERSPTCKRITTALFCKRDEQGKRSQRRVMDVSKLEDLDRRLFIDELIRHVEDDNRVLLQKIRTRTDEVGIDLPKIEVRFSDLFVEAECEVVHGKPIPTLWNAIASKLSRFTFSKQEDKISILKGVSGIIRPKRMTLLLGPPGCGKTTLLLALSGRLDPSLKTRGEVSYNGHLFSEFVPEKTSSYVSQNDLHIPELSVRETLDFSGCFQGAGSRLEMMKEISRREKLKGIVPDPDIDAYMKAASIEGSKTNLQTDYILKILGLTICADTRVGDASRPGISGGQKRRLTTGEMIVGPIKTLFMDEISNGLDSSTTFQILSCLQQFARLSEGTILVSLLQPAPETFELFDDLILMGEGKIIYHGPRDFICSFFEDCGFKCPQRKSVAEFLQEVISRKDQEQYWCHRDKPYCYVSIDSFIEKFKKSDLGLQLQDELSKTYDKSQTQKDGLCIRKYSLSNWDMFKACSRREFLLMKRNSFVYVFKSGLLIFIGSIAMTVYLRTGSTRDSLHANYLMGSLFFSLIKLLADGLPELTLTVSRIAVFCKQKELYFYPAWAYAIPSAILKIPISFLESFLWTMLTYYVIGYSPEAGRFIRQVLILFALHLSCISMFRAIGAVFRDFDVATTIGSISIVLLSVFGGFIVRKPSMPSWLEWGFWLSPLSYAEIGLTSNEFFAPMWRKMTSENRTLGEQVLDARGLNFGNQSYWNAFGALIGFTLFFNTVFALALTFLKTSQRSRVIVSHDKNTQSSEKDSKIASHSKNALPFEPLTFTFQDVQYFIETPQGKKLQLLSDVTGAFKPGVLTALMGVSGAGKTTLLDVLSGRKTRGDIKGQIEVGGYVKVQDTFSRVSGYCEQFDIHSPNLTVQESLKYSAWLRLPCNISSETKSAIVNEVLETIELEEIKDSLVGVPGISGVTAEQRKRLTIAVELVSNPSIIFMDEPTTGLDARAAAIVMRAVKNIAETGRTVVCTIHQPSIDIFEAFDELILMKNGGKIIYYGPLGQHSSKVIEYFMSIPGVPKLKENSNPATWILDITSKSSEDKLGVDLAHIYEESTLFKENKMVIEQTRCTSLGSERLILSSRYAQTSWEQFKACLWKQHLSYWRNPSYNLTRIIFMCFTCMLCGILFLQKAKEINNQQDLFNVFGSMFTVVLFSGINNCSTVIFCVATERNVFYRERFSRMYNPWAYSLAQVLVEIPYSLFQSIIYVIIVYPMVGYHWSVYKVFWSFYSIFCSLLIFNYFGMLLVVVTPNVHIAFTLRSSFYAIVNLFAGYVMPKPNIPRWWIWMYYLSPTSWVLNGLLTSQYGDMEKEILAFGEKKKVSAFLEDYFGYRYDSLALVAVVLIAFPILLASLFAFFIGKLNFQKK

SEQ ID NO: 1608 - protein, 1392 aa, Arabidopsis thaliana
MTMSQTDGVEFASRNTNENGHDDDDQLRSQWVAIERSPTFERITTALFCKRDEKGKKSQRRVMDVSKLDDLDRRLFIDDLIRHVENDNHVLLQKIRKRIDEVGIDLPKIEARFSDLFVEAECEVVYGKPIPTLWNAISSKLSRFMCSNQAKKISILKGVSGIIRPKRMTLLLGPPSCGKTTLLLALSGRLDPSLKTRGDISYNGHLFSEFVPEKTSSYVSQNDLHIPELSVRETLDFSGCFQGTGSRLEMTKEISRREKLKGIVPDPDIDAYMKAASIEGSKTNLQTDYILKILGLTICADTRVGDASRPGISGGQKRRLTTGEMIVGPIKTLFMDEISNGLDSSTTFQILSCLQQFARLSEGTILVSLLQPAPETFELFDDLILMGEGKIIYHGPRDFVCSFFEDCGFKCPNRKSVAEFLQEVISRKDQEQYWCHIEKTYCYVSIESFIEKFKKSDLGLELQDRLSKTYDKSQTQKDGLCFRKYSLSNWDMLKACSRREFLLMKRNSFVYVFKSGLLIFIGFIAMTVYLRTGSTRDSLHANYLMGSLFFSLFKLLADGLPELTLTISRIAVFCKQKELYFYPAWAYAIPSAILKIPISFLESFLWTMLTYYVIGYSPEMGRFIRQFLILFALHLSCISMFRAIAAVFRDFVVATTVGSISIVLLSVFGGFIVRKPSMPSWLEWGFWLSPLSYAEIGLTANEFFAPRWGKITSENRTLGEQVLDARGLNFGNQSYWNAFGALIGFTLFFNTVFALALTFLKTSQRSRVIVSHEKNTQSSENDSKIASRFKNALPFEPLTFTFQDVQYIIETPQGKKLQLLSGVTGAFKPGVLTALMGVSGAGKTTLLDVLSGRKTFGDIKGQIEVGGYVKVQDTFSRVSGYCEQFDIHSPNLTVQESLKYSAWLRLTSNISSETKCAIVNEVLETIELEEIKDSIVGIPGISGLTTEQRKRLTIAVELVSNPSIIFMDEPTTGLDARAAAIVMRAVKNIAETGRTVVCTIHQPSIDIFEAFDELILMKNGGKIIYYGPLGQHSSKVIEYFMRIHGVPKLKENSNPATWILDITSKSSEDKLGVDLAQMYEESTLFKENKMVIEQTRCTSLGSERLILSSRYAQTSWEQFKACLWKQHLSYWRNPSYNLTRIIFMSFTCMLCGILFWQKAKEINNQQDLFNVFGSMFTVVLFSGINNCSTVLFSVATERNVFYRERFSRMYNSWAYSLAQVLVEIPYSLFQSIVYVIIVYPMVGYHWSVFKVFWSFYSIFCTLLIFNYFGMLLVVVTPNVHIAFTLRSSFYAIVNLFAGYVMPKPNIPRWWIWMYYLSPTSWVLNGLLTSQYGDMEKEILAFGEKKKVSDFLEDYFGYRYDSLALVAVVLIAFPILLASLFAFFIGKLNFQKK

SEQ ID NO: 1609 - protein, 1390 aa, Arabidopsis thaliana
MTMPQTDGVEFASRNNLENGDGDQVRSQWVAIERSPTCKRITTALFCKRDEQGKRSQRRVMDVSKLEDLDRRLFIDELIRHVEDDNRVLLQKIRTRTDEVGIDLPKIEVRFSDLFVEAECEVVHGKPIPTLWNAIASKLSRFTFSKQEDKISILKGVSGIIRPKRMTLLLGPPGCGKTTLLLALSGRLDPSLKTRGEVSYNGHLFSEFVPEKTSSYVSQNDLHIPELSVRETLDFSGCFQGAGSRLEMMKEISRREKLKGIVPDPDIDAYMKAASIEGSKTNLQTDYILKILGLTICADTRVGDASRPGISGGQKRRLTTGEMIVGPIKTLFMDEISNGLDSSTTFQILSCLQQFARLSEGTILVSLLQPAPETFELFDDLILMGEGKIIYHGPRDFICSFFEDCGFKCPQRKSVAEFLQEVISRKDQEQYWCHRDKPYCYVSIDSFIEKFKKSDLGLQLQDELSKTYDKSQTQKDGLCIRKYSLSNWDMFKACSRREFLLMKRNSFVYVFKSGLLIFIGSIAMTVYLRTGSTRDSLHANYLMGSLFFSLIKLLADGLPELTLTVSRIAVFCKQKELYFYPAWAYAIPSAILKIPISFLESFLWTMLTYYVIGYSPEAGRFIRQVLILFALHLSCISMFRAIGAVFRDFDVATTIGSISIVLLSVFGGFIVRKPSMPSWLEWGFWLSPLSYAEIGLTSNEFFAPMWRKMTSENRTLGEQVLDARGLNFGNQSYWNAFGALIGFTLFFNTVFALALTFLKTSQRSRVIVSHDKNTQSSEKDSKIASHSKNALPFEPLTFTFQDVQYFIETPQGKKLQLLSDVTGAFKPGVLTALMGVSGAGKTTLLDVLSGRKTRGDIKGQIEVGGYVKVQDTFSRVSGYCEQFDIHSPNLTVQESLKYSAWLRLPCNISSETKSAIVNEVLETIELEEIKDSLVGVPGISGVTAEQRKRLTIAVELVSNPSIIFMDEPTTGLDARAAAIVMRAVKNIAETGRTVVCTIHQPSIDIFEAFDELILMKNGGKIIYYGPLGQHSSKVIEYFMSIPGVPKLKENSNPATWILDITSKSSEDKLGVDLAHIYEESTLFKENKMVIEQTRCTSLGSERLILSSRYAQTSWEQFKACLWKQHLSYWRNPSYNLTRIIFMCFTCMLCGILFLQKAKEINNQQDLFNVFGSMFTVVLFSGINNCSTVIFCVATERNVFYRERFSRMYNPWAYSLAQVLVEIPYSLFQSIIYVIIVYPMVGYHWSVYKVFWSFYSIFCSLLIFNYFGMLLVVVTPNVHIAFTLRSSFYAIVNLFAGYVMPKPNIPRWWIWMYYLSPTSWVLNGLLTSQYGDMEKEILAFGEKKKVSAFLEDYFGYRYDSLALVAVVLIAFPILLASLFAFFIGKLNFQKK

SEQ ID NO: 1610 - protein, 1453 aa, Arabidopsis thaliana
MLGRDEDLVRTMSGRGSLGSTSHRSLAGAASKSFRDVFAPPTDDVFGRSDRREEDDVELRWAALERLPTYDRLRKGMLPQTMVNGKIGLEDVDVTNLAPKEKKHLMEMILKFVEEDNEKFLRRLRERTDRVGIEVPKIEVRYENLSVEGDVRSASRALPTLFNVTLNTIESILGLFHLLPSKKRKIEILKDISGIIKPSRMTLLLGPPSSGKTTLLQALAGKLDDTLQMSGRITYCGHEFREFVPQKTCAYISQHDLHFGEMTVRESLDFSGRCLGVGTRYQLLTELSRREREAGIKPDPEIDAFMKSIAISGQETSLVTDYVLKLLGLDICADTLVGDVMRRGISGGQRKRLTTGEMLVGPATALFMDEISTGLDSSTTFQICKFMRQLVHIADVTMVISLLQPAPETFELFDDIILLSEGQIVYQGSRDNVLEFFEYMGFKCPERKGIADFLQEVTSKKDQEQYWNRREHPYSYVSVHDFSSGFNSFHAGQQLASEFRVPYDKAKTHPAALVTQKYGISNKDLFKACFDREWLLMKRNSFVYVFKTVQITIMSLIAMTVYFRTEMHVGTVQDGQKFYGALFFSLINLMFNGMAELAFTVMRLPVFFKQRDFLFYPPWAFALPGFLLKIPLSLIESVIWIALTYYTIGFAPSAARFFRQLLAYFCVNQMALSLFRFLGALGRTEVIANSGGTLALLVVFVLGGFIISKDDIPSWLTWCYYTSPMMYGQTALVINEFLDERWGSPNNDTRINAKTVGEVLLKSRGFFTEPYWFWICIGALLGFTVLFNFCYIIALMYLNPLGNSKATTVVEEGKDKHKGSHSGTGGSVVELTSTSSHGPKKGMVLPFQPLSLAFNNVNYYVDMPAEMKAQGVEGDRLQLLRDVGGAFRPGVLTALVGVSGAGKTTLMDVLAGRKTGGYVEGSINISGYPKNQATFARVSGYCEQNDIHSPHVTVYESLIYSAWLRLSADIDTKTREMFVEEVMELVELKPLRNSIVGLPGVDGLSTEQRKRLTIAVELVANPSIIFMDEPTSGLDARAAAIVMRTVRNTVDTGRTVVCTIHQPSIDIFESFDELLLMKRGGQVIYAGTLGHHSQKLVEYFEAIEGVPKIKDGYNPATWMLDVTTPSMESQMSVDFAQIFVNSSVNRRNQELIKELSTPPPGSNDLYFRTKYAQPFSTQTKACFWKMYWSNWRYPQYNAIRFLMTVVIGVLFGLLFWQTGTKIEKEQDLNNFFGAMYAAVLFLGATNAATVQPAVAIERTVFYREKAAGMYSAIPYAISQVAVEIMYNTIQTGVYTLILYSMIGYDWTVVKFFWFYYYMLTCFVYFTLYGMMLVALTPNYQIAGICLSFFLSFWNLFSGFLIPRPQIPIWWRWYYWASPVAWTLYGIITSQVGDRDSIVHITGVGDMSLKTLLKNGFGFDYDFLPVVAVVHIAWILIFLFAFAYGIKFLNFQRR

SEQ ID NO: 1611 - protein, 1450 aa, Arabidopsis thaliana
MLGRDEDLVRTMSGRGSLGSTSHRSLAGAASKSFRDVFAPPTDDVFGRSDRREEDDVELRWAALERLPTYDRLRKGMLPQTMVNGKIGLEDVDVTNLAPKEKKHLMEMILKFVEEDNEKFLRRLRERTDRVGIEVPKIEVRYENLSVEGDVRSASRALPTLFNVTLNTIESILGLFHLLPSKKRKIEILKDISGIIKPSRMTLLLGPPSSGKTTLLQALAGKLDDTLQMSGRITYCGHEFREFVPQKTCAYISQHDLHFGEMTVRESLDFSGRCLGVGTRYQLLTELSRREREAGIKPDPEIDAFMKSIAISGQETSLVTDYVLKLLGLDICADTLVGDVMRRGISGGQRKRLTTGEMLVGPATALFMDEISTGLDSSTTFQICKFMRQLVHIADVTMVISLLQPAPETFELFDDIILLSEGQIVYQGSRDNVLEFFEYMGFKCPERKGIADFLQEVTSKKDQEQYWNRREHPYSYVSVHDFSSGFNSFHAGQQLASEFRVPYDKAKTHPAALVTQKYGISNKDLFKACFDREWLLMKRNSFVYVFKTVQITIMSLIAMTVYFRTEMHVGTVQDGQKFYGALFFSLINLMFNGMAELAFTVMRLPVFFKQRDFLFYPPWAFALPGFLLKIPLSLIESVIWIALTYYTIGFAPSAARFFRQLLAYFCVNQMALSLFRFLGALGRTEVIANSGGTLALLVVFVLGGFIISKDDIPSWLTWCYYTSPMMYGQTALVINEFLDERWGSPNNDTRINAKTVGEVLLKSRGFFTEPYWFWICIGALLGFTVLFNFCYIIALMYLNPLGNSKATTVVEEGKDKHKGSHSGTGVELTSTSSHGPKKGMVLPFQPLSLAFNNVNYYVDMPAEMKAQGVEGDRLQLLRDVGGAFRPGVLTALVGVSGAGKTTLMDVLAGRKTGGYVEGSINISGYPKNQATFARVSGYCEQNDIHSPHVTVYESLIYSAWLRLSADIDTKTREMFVEEVMELVELKPLRNSIVGLPGVDGLSTEQRKRLTIAVELVANPSIIFMDEPTSGLDARAAAIVMRTVRNTVDTGRTVVCTIHQPSIDIFESFDELLLMKRGGQVIYAGTLGHHSQKLVEYFEAIEGVPKIKDGYNPATWMLDVTTPSMESQMSVDFAQIFVNSSVNRRNQELIKELSTPPPGSNDLYFRTKYAQPFSTQTKACFWKMYWSNWRYPQYNAIRFLMTVVIGVLFGLLFWQTGTKIEKEQDLNNFFGAMYAAVLFLGATNAATVQPAVAIERTVFYREKAAGMYSAIPYAISQVAVEIMYNTIQTGVYTLILYSMIGYDWTVVKFFWFYYYMLTCFVYFTLYGMMLVALTPNYQIAGICLSFFLSFWNLFSGFLIPRPQIPIWWRWYYWASPVAWTLYGIITSQVGDRDSIVHITGVGDMSLKTLLKNGFGFDYDFLPVVAVVHIAWILIFLFAFAYGIKFLNFQRR

SEQ ID NO: 1612 - protein, 1454 aa, Arabidopsis thaliana
MAAMLGRDEDPVGALSGRVSLASTSHRSLVGASKSFRDVFMPQTDEVFGRSERREEDDMELRWAAIERLPTFDRLRKGMLPQTSANGKIELEDIDLTRLEPKDKKHLMEMILSFVEEDNEKFLRDLRERTDRVGIEVPKIEVRYENISVEGDVRSASRALPTLFNVTLNTLESILGFFHLLPSKRKKIQILKDISGIVKPSRMTLLLGPPSSGKTTLLQALAGKLDDTLQMSGRITYCGHEFREFVPQKTCAYISQHDLHFGEMTVREILDFSGRCLGVGSRYQLMSELSRREKEEGIKPDPKIDAFMKSIAISGQETSLVTDYVLKILGLDICADILAGDVMRRGISGGQKKRLTTGEMLVGPARALFMDEISTGLDSSTTFQICKFMRQLVHISDVTMIISLLQPAPETFELFDDIILLSEGQIVYQGPRDNVLEFFEYFGFQCPERKGVADFLQEVTSKKDQEQYWNKREQPYNYVSVSDFSSGFSTFHTGQKLTSEFRVPYDKAKTHSAALVTQKYGISNWELFKACFDREWLLMKRNSFVYVFKTVQITIMSLITMTVYLRTEMHVGTVRDGQKFYGAMFFSLINVMFNGLAELAFTVMRLPVFYKQRDFLFYPPWAFALPAWLLKIPLSLIESGIWIGLTYYTIGFAPSAARFFRQLLAYFCVNQMALSLFRFLGAIGRTEVISNSIGTFTLLIVFTLGGFIIAKDDIRPWMTWAYYMSPMMYGQTAIVMNEFLDERWSSPNYDTRINAKTVGEVLLKSRGFFTEPYWFWICIVALLGFSLLFNLFYILALMYLNPLGNSKATVVEEGKDKQKGENRGTEGSVVELNSSSNKGPKRGMVLPFQPLSLAFNNVNYYVDMPSEMKAQGVEGDRLQLLRDVGGAFRPGILTALVGVSGAGKTTLMDVLAGRKTGGYIEGSISISGYPKNQTTFARVSGYCEQNDIHSPHVTVYESLIYSAWLRLSTDIDIKTRELFVEEVMELVELKPLRNSIVGLPGVDGLSTEQRKRLTIAVELVANPSIIFMDEPTSGLDARAAAIVMRTVRNTVDTGRTVVCTIHQPSIDIFESFDELLLMKRGGQVIYAGSLGHHSQKLVEYFEAVEGVPKINDGYNPATWMLDVTTPSMESQMSLDFAQIFSNSSLYRRNQELIKDLSTPPPGSKDVYFKTKYAQSFSTQTKACFWKQYWSYWRHPQYNAIRFLMTVVIGVLFGLIFWQIGTKTENEQDLNNFFGAMYAAVLFLGALNAATVQPAIAIERTVFYREKAAGMYSAIPYAISQVAVEIMYNTIQTGVYTLILYSMIGCNWTMAKFLWFYYYMLTSFIYFTLYGMMLMALTPNYQIAGICMSFFLSLWNLFSGFLIPRPQIPIWWRWYYWATPVAWTLYGLITSQVGDKDSMVHISGIGDIDLKTLLKEGFGFEHDFLPVVAVVHIAWILLFLFVFAYGIKFLNFQRR

SEQ ID NO: 1613 - protein, 1435 aa, Arabidopsis thaliana
MAAMLGRDEDPVGALSGRVSLASTSHRSLVGASKSFRDVFMPQTDEVFGRSERREEDDMELRWAAIERLPTFDRLRKGMLPQTSANGKIELEDIDLTRLEPKDKKHLMEMILSFVEEDNEKFLRDLRERTDRVGIEVPKIEVRYENISVEGDVRSASRALPTLFNVTLNTLESILGFFHLLPSKRKKIQILKDISGIVKPSRMTLLLGPPSSGKTTLLQALAGKLDDTLQTCAYISQHDLHFGEMTVREILDFSGRCLGVGSRYQLMSELSRREKEEGIKPDPKIDAFMKSIAISGQETSLVTDYVLKILGLDICADILAGDVMRRGISGGQKKRLTTGEMLVGPARALFMDEISTGLDSSTTFQICKFMRQLVHISDVTMIISLLQPAPETFELFDDIILLSEGQIVYQGPRDNVLEFFEYFGFQCPERKGVADFLQEVTSKKDQEQYWNKREQPYNYVSVSDFSSGFSTFHTGQKLTSEFRVPYDKAKTHSAALVTQKYGISNWELFKACFDREWLLMKRNSFVYVFKTVQITIMSLITMTVYLRTEMHVGTVRDGQKFYGAMFFSLINVMFNGLAELAFTVMRLPVFYKQRDFLFYPPWAFALPAWLLKIPLSLIESGIWIGLTYYTIGFAPSAARFFRQLLAYFCVNQMALSLFRFLGAIGRTEVISNSIGTFTLLIVFTLGGFIIAKDDIRPWMTWAYYMSPMMYGQTAIVMNEFLDERWSSPNYDTRINAKTVGEVLLKSRGFFTEPYWFWICIVALLGFSLLFNLFYILALMYLNPLGNSKATVVEEGKDKQKGENRGTEGSVVELNSSSNKGPKRGMVLPFQPLSLAFNNVNYYVDMPSEMKAQGVEGDRLQLLRDVGGAFRPGILTALVGVSGAGKTTLMDVLAGRKTGGYIEGSISISGYPKNQTTFARVSGYCEQNDIHSPHVTVYESLIYSAWLRLSTDIDIKTRELFVEEVMELVELKPLRNSIVGLPGVDGLSTEQRKRLTIAVELVANPSIIFMDEPTSGLDARAAAIVMRTVRNTVDTGRTVVCTIHQPSIDIFESFDELLLMKRGGQVIYAGSLGHHSQKLVEYFEAVEGVPKINDGYNPATWMLDVTTPSMESQMSLDFAQIFSNSSLYRRNQELIKDLSTPPPGSKDVYFKTKYAQSFSTQTKACFWKQYWSYWRHPQYNAIRFLMTVVIGVLFGLIFWQIGTKTENEQDLNNFFGAMYAAVLFLGALNAATVQPAIAIERTVFYREKAAGMYSAIPYAISQVAVEIMYNTIQTGVYTLILYSMIGCNWTMAKFLWFYYYMLTSFIYFTLYGMMLMALTPNYQIAGICMSFFLSLWNLFSGFLIPRPQIPIWWRWYYWATPVAWTLYGLITSQVGDKDSMVHISGIGDIDLKTLLKEGFGFEHDFLPVVAVVHIAWILLFLFVFAYGIKFLNFQRR

SEQ ID NO: 1614 - protein, 1434 aa, Arabidopsis thaliana
MAAMLGRDEDPVGALSGRVSLASTSHRSLVGASKSFRDVFMPQTDEVFGRSERREEDDMELRWAAIERLPTFDRLRKGMLPQTSANGKIELEDIDLTRLEPKDKKHLMEMILSFVEEDNEKFLRDLRERTDRVGIEVPKIEVRYENISVEGDVRSASRALPTLFNVTLNTLESILGFFHLLPSKRKKIQILKDISGIVKPSRMTLLLGPPSSGKTTLLQALAGKLDDTLQMSGRITYCGHEFREFVPQKTCAYISQHDLHFGEMTVREILDFSGRCLGVGSRYQLMSELSRREKEEGIKPDPKIDAFMKSIAISGQETSLVTDYVLKILGLDICADILAGDVMRRGISGGQKKRLTTGEMLVGPARALFMDEISTGLDSSTTFQICKFMRQLVHISDVTMIISLLQPAPETFELFDDIILLSEGQIVYQGPRDNVLEFFEYFGFQCPERKGVADFLQEVTSKKDQEQYWNKREQPYNYVSVSDFSSGFSTFHTGQKLTSEFRVPYDKAKTHSAALVTQKYGISNWELFKACFDREWLLMKRNSFVYVFKTVQITIMSLITMTVYLRTEMHVGTVRDGQKFYGAMFFSLINVMFNGLAELAFTVMRLPVFYKQRDFLFYPPWAFALPAWLLKIPLSLIESGIWIGLTYYTIGFAPSAARFLGAIGRTEVISNSIGTFTLLIVFTLGGFIIAKDDIRPWMTWAYYMSPMMYGQTAIVMNEFLDERWSSPNYDTRINAKTVGEVLLKSRGFFTEPYWFWICIVALLGFSLLFNLFYILALMYLNPLGNSKATVVEEGKDKQKGENRGTEGSVVELNSSSNKGPKRGMVLPFQPLSLAFNNVNYYVDMPSEMKAQGVEGDRLQLLRDVGGAFRPGILTALVGVSGAGKTTLMDVLAGRKTGGYIEGSISISGYPKNQTTFARVSGYCEQNDIHSPHVTVYESLIYSAWLRLSTDIDIKTRELFVEEVMELVELKPLRNSIVGLPGVDGLSTEQRKRLTIAVELVANPSIIFMDEPTSGLDARAAAIVMRTVRNTVDTGRTVVCTIHQPSIDIFESFDELLLMKRGGQVIYAGSLGHHSQKLVEYFEAVEGVPKINDGYNPATWMLDVTTPSMESQMSLDFAQIFSNSSLYRRNQELIKDLSTPPPGSKDVYFKTKYAQSFSTQTKACFWKQYWSYWRHPQYNAIRFLMTVVIGVLFGLIFWQIGTKTENEQDLNNFFGAMYAAVLFLGALNAATVQPAIAIERTVFYREKAAGMYSAIPYAISQVAVEIMYNTIQTGVYTLILYSMIGCNWTMAKFLWFYYYMLTSFIYFTLYGMMLMALTPNYQIAGICMSFFLSLWNLFSGFLIPRPQIPIWWRWYYWATPVAWTLYGLITSQVGDKDSMVHISGIGDIDLKTLLKEGFGFEHDFLPVVAVVHIAWILLFLFVFAYGIKFLNFQRR

SEQ ID NO: 1615 - protein, 1405 aa, Arabidopsis thaliana
MAHYRVSSEVENIMNRDRSHRKNEEEDEEEALKLAAMEKLQRLPTYDRARKAVLKGITGGFKEIDMKDLGLAERRELFDRVMTMDDEDWHGEYLRRLKSRFDRVSLHLPTIEVRFEDLNVTAEAYAGSKTVPTVLNSYVNLLKGIGTKIRVLPDRKKRISILNDVSGIIKPGRLTLLLGPPGSGKSTLLKALSGKTETGLRSTGKVTYNGHELHEFVPERTAGYIDQYDVHLPDLTVRETLKFSAKCQGVGTGYDMLAELLRREKDLNIKPDPYLDALMKASVIKGHKEYVVTDYVLKVLGLEICADTIVGNHMKRGISGGQKKRVTTGEMLVGPVGAFFMDNISDGLDSSTTFQIVKSIKQMIHVFDKTALISLLQPPPETFELFDDVIILGEGHIVYQGPREDVLEFFEFMGFKCPERKGIADYLQEILSKKDQEQYWANPELPYRYVTAKKFEEGFKIHHFGRAMRSQLATPFDRLKNHRAALTRTTYGASKLELLKACLERESILMKRNLRTFVLKSLQLIINAILIGVVFWQQKNYPSTVEDGIIYMGAIYLEVQMIVFSGFFELPMTIDKLPVFYKQRHFSFYPSWAFSLPTSIITFPLSFVEVFIVVLITYFTIGYDLTVPSFLKHYLVLALCGQMSYGLFRCIAAVTRNHVVSNTMGCLAVMWLMTFSGYVLSRNQVHKWLTWAYWTSPMMYIQTAVSVNEFRSESWKDVISKKPQGLGVAVLKSRGFFVETYWYWIGLLALILSTILSNIITSLCLAFLKQYGISKTAVLPDEREEADSNNTTGRDYTGTTMERFFDRVVTTRTCNDKKLRIPFKPLYMTFENITYSVDTPKEMKEKGIRENKLVLLNGLSGAFRPGVLTALMGVSGAGKTTLMDVLAGRKNTGYIQGEIYVSGFPKKQDSFARVSGYCEQSDIHSPLLTVYESLLYSAWLRLPPDIDTHTRELFIEEVMELIELKALREMLVGYVGISGLSTEQRKRMTIAVELVANPSILFMDEPTSGLDARAAAIVMRTVRNTVDTGRTVVCTIHQPSIDIFESFDELFLLTRGGEEIYVGPIGHHSSQLIEYFEGIRGVGKIKEGYNPATWALEVTTRAQEDVLGVTFAQVYKKSNLYRRNKDLIKELNNIPPHAQDIHFSTKYSQSYLSQFQACLWKQHKSYWRNVPYNAVRFSFGAAVGIMYGIIFWSLGKRKGTRQDIFNSVGAMSTVVGFLSSQSAATVRPVVIAERTVFYREAGAGMYSALPYAFSQVIIEIPYTMAQACIYGVIVYGMIGYEWTASKFFLNIFFTFISILYSIYTGIMVISVSPNQEIASILNGVISTSWNVFSGFTIPRPRMHVWLRWFTYVCPGWWGLYGLTIAQYGDVETRLDTDSEFPKEVRKFRGGHFGLTLGSVRFGSVY

SEQ ID NO: 1616 - protein, 760 aa, Arabidopsis thaliana
MFRAIAAIFRTIIASTITGAISILVLSLFGGFVIPKSSMPAWLGWGFWLSPLSYAEIGLTANEFFSPRWSKVISSKTTAGEQMLDIRGLNFGRHSYWTAFGALVGFVLFFNALYVLALTYQNNPQRSRAIISHEKYSRPIEEDFKPCPKITSRAKTGKIILPFKPLTVTFQNVQYYIETPQGKTRQLLSDITGALKPGVLTSLMGVSGAGKTTLLDVLSGRKTRGIIKGEIKVGGYPKVQETFARVSGYCEQFDIHSPNITVEESLKYSAWLRLPYNIDSKTKNELVKEVLETVELDDIKDSVVGLPGISGLSIEQRKRLTIAVELVANPSIIFMDEPTTGLDARAAAIVMRAVKNVAETGRTVVCTIHQPSIDIFETFDELILMKNGGQLVYYGPPGQNSSKVIEYFESFSGLPKIQKNCNPATWILDITSKSAEEKLGIDFSQSYKDSTLYKQNKMVVEQLSSASLGSEALRFPSQFSQTAWVQLKACLWKQHYSYWRNPSHNITRIVFILLDSTLCGLLFWQKAEDINNQQDLISIFGSMYTLVVFPGMNNCAAVINFIAAERNVFYRERFARMYSSWAYSFSQVLIEVPYSLLQSLLCTIIVYPTIGYHMSVYKMFWSLYSIFCSLLIFNYSGMLMVALTPNIHMAVTLRSSFFSMLNLFAGFVIPKQKIPKWWIWMYYLSPTSWVLEGLLSSQYGDVDKEILVFGEKKRVSAFLEDYFGYKHESLAVVAFVLIAYPIIVATLFAFFMSKLSFQKK

SEQ ID NO: 1617 - protein, 1326 aa, Arabidopsis thaliana
MIQTGEEDEEKATSLEVEFASGNGVDDEEELRLQWATVERLPTFKRVTTALLARDEVSGKGRVIDVTRLEGAERRLLIEMLVKQIEDDNLRLLRKIRKRIDKVGIELPTVEVRFNNLSVEAECQVIHGKPIPTLWNTIKGLLSEFICSKKETKIGILKGVSGIVRPGRMTLLLGPPGCGKTTLLQALSGKFSDSVKVGGEVCYNGCSLSEFIPEKTSSYISQNDLHIPELSVRETLDFSACCQGIGSRMEIMKEISRMEKLQEIIPDPAVDAYMKATSVEGLKNNLQTDYILKILGLDICADTRVGDATRPGISGGEKRRLTTGELVVGPATTLFMDEISNGLDSSTTFQIVSCLQQLAHIAEATILISLLQPAPETFELFDDVILMGEGKIIYHAPRADICRFFEEFGFKCPERKGVADFLQEEELSKPFNKSQTRKDGLCYKKYSLGKWEMLKACSRREFLLMKRNSFIYLFKSALLVFNALVTMTVFLQVGATTDSLHGNYLMGSLFTALFRLLADGLPELTLTISRLGVFCKQKDLYFYPAWAYAIPSIILKIPLSVLDSFIWTLLTYYVIGYSPEVKRFFLQFLILSTFNLSCVSMFRAIAAIFRTIIASTITGAISILVLSLFGGFVIPKSSMPAWLGWGFWLSPLSYAEIGLTANEFFSPRWSKVISSKTTAGEQMLDIRGLNFGRHSYWTAFGALVGFVLFFNALYVLALTYQNRKIILPFKPLTVTFQNVQYYIETPQGKTRQLLSDITGALKPGVLTSLMGVSGAGKTTLLDVLSGRKTRGIIKGEIKVGGYPKVQETFARVSGYCEQFDIHSPNITVEESLKYSAWLRLPYNIDSKTKNELVKEVLETVELDDIKDSVVGLPGISGLSIEQRKRLTIAVELVANPSIIFMDEPTTGLDARAAAIVMRAVKNVAETGRTVVCTIHQPSIDIFETFDELILMKNGGQLVYYGPPGQNSSKVIEYFESFSGLPKIQKNCNPATWILDITSKSAEEKLGIDFSQSYKDSTLYKQNKMVVEQLSSASLGSEALRFPSQFSQTAWVQLKACLWKQHYSYWRNPSHNITRIVFILLDSTLCGLLFWQKAEDINNQQDLISIFGSMYTLVVFPGMNNCAAVINFIAAERNVFYRERFARMYSSWAYSFSQVLIEVPYSLLQSLLCTIIVYPTIGYHMSVYKMFWSLYSIFCSLLIFNYSGMLMVALTPNIHMAVTLRSSFFSMLNLFAGFVIPKQKIPKWWIWMYYLSPTSWVLEGLLSSQYGDVDKEILVFGEKKRVSAFLEDYFGYKHESLAVVAFVLIAYPIIVATLFAFFMSKLSFQKK

SEQ ID NO: 1618 - protein, 626 aa, Arabidopsis thaliana
SAAEASGGAGNKKGMVLPFTPLAMSFDDVKYFVDMPGEMRDQGVTETRLQLLKGVTGAFRPGVLTALMGVSGAGKTTLMDVLAGRKTGGYIEGDVRISGFPKVQETFARISGYCEQTDIHSPQVTVRESLIFSAFLRLPKEVGKDEKMMFVDQVMELVELDSLRDSIVGLPGVTGLSTEQRKRLTIAVELVANPSIIFMDEPTSGLDARAAAIVMRAVRNTVDTGRTVVCTIHQPSIDIFEAFDELMLMKRGGQVIYAGPLGQNSHKVVEYFESFPGVSKIPEKYNPATWMLEASSLAAELKLSVDFAELYNQSALHQRNKALVKELSVPPAGASDLYFATQFSQNTWGQFKSCLWKQWWTYWRSPDYNLVRFIFTLATSLLIGTVFWQIGGNRSNAGDLTMVIGALYAAIIFVGINNCSTVQPMVAVERTVFYRERAAGMYSAMPYAISQVTCELPYVLIQTVYYSLIVYAMVGFEWKAEKFFWFVFVSYFSFLYWTYYGMMTVSLTPNQQVASIFASAFYGIFNLFSGFFIPRPKIPKWWIWYYWICPVAWTVYGLIVSQYGDVETRIQVLGGAPDLTVKQYIEDHYGFQSDFMGPVAAVLIAFTVFFAFIFAFCIRTLNFQTR

SEQ ID NO: 1619 - protein, 979 aa, Arabidopsis thaliana
MKEISRMEKLQEIIPDPAVDAYMKILGLDICADTRVGDATRPGISGGEKRRLTTGELVVGPATTLFMDEISNGLDSSTTFQIVSCLQQLAHIAEATILISLLQPAPETFELFDDVILMGEGKIIYHAPRADICRFFEEFGFKCPERKGVADFLQEIMSKKDQEQYWCHRDKPYSYISVDSFINKFKESNLGLLLKEELSKPFNKSQTRKDGLCYKKYSLGKWEMLKACSRREFLLMKRNSFIYLFKSALLVFNALVTMTVFLQVGATTDSLHGNYLMGSLFTALFRLLADGLPELTLTISRLGVFCKQKDLYFYPAWAYAIPSIILKIPLSPRGQKVLPAVPYLIYIQPFLCINVSRYCGNLSHNYCFHNHWSYFHIGSLIIWWLRYSKIGLRNDKISFHIFRLFFIGKIILPFKPLTVTFQNVQYYIETPQGKTRQLLSDITGALKPGVLTSLMGVSGAGKTTLLDVLSGRKTRGIIKGEIKVGGYPKVQETFARVSGYCEQFDIHSPNITVEESLKYSAWLRLPYNIDSKTKNVRNYTLKTNRLKEIELVKEVLETVELDDIKDSVVGLPGISGLSIEQRKRLTIAVELVANPSIIFMDEPTTGLDARAAAIVMRAVKNVAETGRTVVCTIHQPSIDIFETFDELILMKNGGQLVYYGPPGQNSSKVIEYFENKMVVEQLSSASLGSEALRFPSQFSQTAWVQLKACLWKQHYSYWRNPSHNITRIVFILLDSTLCGLLFWQKAEDINNQQDLISIFGSMYTLVVFPGMNNCAAVINFIAAERNVFYRERFARMYSSWAYSFSQVLIEVPYSLLQSLLCTIIVYPTIGYHMSVYKMFWSLYSIFCSLLIFNYSGMLMVALTPNIHMAVTLRSSFFSMLNLFAGFVIPKQKIPKWWIWMYYLSPTSWVLEGLLSSQYGDVDKEILVFGEKKRVSAFLEDYFGYKHESLAVVAFVLIAYPIIVATLFAFFMSKLSFQKK

SEQ ID NO: 1620 - protein, 1418 aa, Arabidopsis thaliana
MAHYRVSSEVENIMNRDRSHRKNEEEDEEEALKLAAMEKLQRLPTYDRARKAVLKGITGGFKEIDMKDLGLAERRELFDRVMTMDDEDWHGEYLRRLKSRFDRVSLHLPTIEVRFEDLNVTAEAYAGSKTVPTVLNSYVNLLKGIGTKIRVLPDRKKRISILNDVSGIIKPGRLTLLLGPPGSGKSTLLKALSGKTETGLRSTGKVTYNGHELHEFVPERTAGYIDQYDVHLPDLTVRETLKFSAKCQGVGTGYDMLAELLRREKDLNIKPDPYLDALMKASVIKGHKEYVVTDYVLKVLGLEICADTIVGNHMKRGISGGQKKRVTTGEMLVGPVGAFFMDNISDGLDSSTTFQIVKSIKQMIHVFDKTALISLLQPPPETFELFDDVIILGEGHIVYQGPREDVLEFFEFMGFKCPERKGIADYLQEILSKKDQEQYWANPELPYRYVTAKKFEEGFKIHHFGRAMRSQLATPFDRLKNHRAALTRTTYGASKLELLKACLERESILMKRNLRTFVLKSLQLIINAILIGVVFWQQKNYPSTVEDGIIYMGAIYLEVQMIVFSGFFELPMTIDKLPVFYKQRHFSFYPSWAFSLPTSIITFPLSFVEVFIVVLITYFTIGYDLTVPSFLKHYLVLALCGQMSYGLFRCIAAVTRNHVVSNTMGCLAVMWLMTFSGYVLSRNQVHKWLTWAYWTSPMMYIQTAVSVNEFRSESWKDGLGVAVLKSRGFFVETYWYWIGLLALILSTILSNIITSLCLAFLKQYGISKTAVLPDEREEADSNNTTGRDYTGTTMERFFDRVVTTRTCNDKKLRIPFKPLYMTFENITYSVDTPKEMKEKGIRENKLVLLNGLSGAFRPGVLTALMGVSGAGKTTLMDVLAGRKNTGYIQGEIYVSGFPKKQDSFARVSGYCEQSDIHSPLLTVYESLLYSAWLRLPPDIDTHTRELFIEEVMELIELKALREMLVGYVGISGLSTEQRKRMTIAVELVANPSILFMDEPTSGLDARAAAIVMRTVRNTVDTGRTVVCTIHQPSIDIFESFDELFLLTRGGEEIYVGPIGHHSSQLIEYFEGIRGVGKIKEGYNPATWALEVTTRAQEDVLGVTFAQVYKKSNLYRRNKDLIKELNNIPPHAQDIHFSTKYSQSYLSQFQACLWKQHKSYWRNVPYNAVRFSFGAAVGIMYGIIFWSLGKRKGTRQDIFNSVGAMSTVVGFLSSQSAATVRPVVIAERTVFYREAGAGMYSALPYAFSQVIIEIPYTMAQACIYGVIVYGMIGYEWTASKFFLNIFFTFISILYSIYTGIMVISVSPNQEIASILNGVISTSWNVFSGFTIPRPRMHVWLRWFTYVCPGWWGLYGLTIAQYGDVETRLDTGETVVEFMKNYYGYEYNFLWVVSLTLIAFSMFFVFIYAFSVKILNFQKR

SEQ ID NO: 1621 - protein, 1177 aa, Arabidopsis thaliana
MKEISRMEKLQEIIPDPAVDAYMKILGLDICADTRVGDATRPGISGGEKRRLTTGELVVGPATTLFMDEISNGLDSSTTFQIVSCLQQLAHIAEATILISLLQPAPETFELFDDVILMGEGKIIYHAPRADICRFFEEFGFKCPERKGVADFLQEIMSKKDQEQYWCHRDKPYSYISVDSFINKFKESNLGLLLKEELSKPFNKSQTRKDGLCYKKYSLGKWEMLKACSRREFLLMKRNSFIYLFKSALLVFNALVTMTVFLQVGATTDSLHGNYLMGSLFTALFRLLADGLPELTLTISRLGVFCKQKDLYFYPAWAYAIPSIILKIPLSPRGQKVLPAVPYLIYIQPFLCINVSRYCGNLSHNYCFHNHWSYFHIGSLIIWWLRYSKIGLRNDKISFHIFRLFFIGKIILPFKPLTVTFQNVQYYIETPQGKTRQLLSDITGALKPGVLTSLMGVSGAGKTTLLDVLSGRKTRGIIKGEIKVGGYPKVQETFARVSGYCEQFDIHSPNITVEESLKYSAWLRLPYNIDSKTKNVRNYTLKTNRLKEIELVKEVLETVELDDIKDSVVGLPGISGLSIEQRKRLTIAVELVANPSIIFMDEPTTGLDARAAAIVMRAVKNVAETGRTVVCTIHQPSIDIFETFDELILMKNGGQLVYYGPPGQNSSKVIEYFENKMVVEQLSSASLGSEALRFPSQFSQTAWVQLKACLWKQHYSYWRNPSHNITRIVFILLDSTLCGLLFWQKAEDINNQQDLISIFGSMYTLVVFPGMNNCAAVINFIAAERNVFYRERFARMYSSWAYSFSQVLIEVPYSLLQSLLCTIIVYPTIGYHMSVYKMFWSLYSIFCSLLIFNYSGMLMVALTPNIHMAVTLRSSFFSMLNLFAGFVIPKQDRIFIIFMEMITWSMGANNVYRVSFVKVIIFTNILTSISFSLFNLDFHYCYIQDNSSEAARICFVLLFLQIWNTNENGHDDDDQLRSQWVAIERSPTFERITTALFCKRDEKGKKSQRRVMDVSKLDDLDRRLFIDDLIRHVENDNHVLLQKIRKRIDEVGIDLPKIEARFSDLFVEAECEVVYGKPIPTLWNAISSKLSWFSCRMTLLLGPPSCGKTTLLLALSGRLDPSLKTRGDISYNGHLFSEFVPEKTSSYVSQNDLHIPELSVRETLDFSGCFQGTGSRL

SEQ ID NO: 1622 - protein, 1406 aa, Arabidopsis thaliana
MAHYRVSSEVENIMNRDRSHRKNEEEDEEEALKLAAMEKLQRLPTYDRARKAVLKGITGGFKEIDMKDLGLAERRELFDRVMTMDDEDWHGEYLRRLKSRFDRVSLHLPTIEVRFEDLNVTAEAYAGSKTVPTVLNSYVNLLKGIGTKIRVLPDRKKRISILNDVSGIIKPGRLTLLLGPPGSGKSTLLKALSGKTETGLRSTGKVTYNGHELHEFVPERTAGYIDQYDVHLPDLTVRETLKFSAKCQGVGTGYDMLAELLRREKDLNIKPDPYLDALMKASVIKGHKEYVVTDYVLKVLGLEICADTIVGNHMKRGISGGQKKRVTTGEMLVGPVGAFFMDNISDGLDSSTTFQIVKSIKQMIHVFDKTALISLLQPPPETFELFDDVIILGEGHIVYQGPREDVLEFFEFMGFKCPERKGIADYLQEILSKKDQEQYWANPELPYRYVTAKKFEEGFKIHHFGRAMRSQLATPFDRLKNHRAALTRTTYGASKLELLKACLERESILMKRNLRTFVLKSLQLIINAILIGVVFWQQKNYPSTVEDGIIYMGAIYLEVQMIVFSGFFELPMTIDKLPVFYKQRHFSFYPSWAFSLPTSIITFPLSFVEVFIVVLITYFTIGYDLTVPSFLKHYLVLALCGQMSYGLFRCIAAVTRNHVVSNTMGCLAVMWLMTFSGYVLSRNQVHKWLTWAYWTSPMMYIQTAVSVNEFRSESWKDVISKKPFFKFSTSHFKDIKLNRVVYDFQGLGVAVLKSREYGISKTAVLPDEREEADSNNTTGRDYTGTTMERFFDRVVTTRTCNDKKLRIPFKPLYMTFENITYSVDTPKEMKEKGIRENKLVLLNGLSGAFRPGVLTALMGVSGAGKTTLMDVLAGRKNTGYIQGEIYVSGFPKKQDSFARVSGYCEQSDIHSPLLTVYESLLYSAWLRLPPDIDTHTREVMELIELKALREMLVGYVGISGLSTEQRKRMTIAVELVANPSILFMDEPTSGLDARAAAIVMRTVRNTVDTGRTVVCTIHQPSIDIFESFDELFLLTRGGEEIYVGPIGHHSSQLIEYFEGIRGVGKIKEGYNPATWALEVTTRAQEDVLGVTFAQVYKKSNLYRRNKDLIKELNNIPPHAQDIHFSTKYSQSYLSQFQACLWKQHKSYWRNVPYNAVRFSFGAAVGIMYGIIFWSLGKRKGTRQDIFNSVGAMSTVVGFLSSQSAATVRPVVIAERTVFYREAGAGMYSALPYAFSQVIIEIPYTMAQACIYGVIVYGMIGYEWTASKFFLNIFFTFISILYSIYTGIMVISVSPNQEIASILNGVISTSWNVFSGFTIPRPRMHVWLRWFTYVCPGWWGLYGLTIAQYGDVETRLDTGETVVEFMKNYYGYEYNFLWVVSLTLIAFSMFFVFIYAFSVKILNFQKR

SEQ ID NO: 1623 - protein, 1168 aa, Arabidopsis thaliana
MSQTDGVEFASRNTNENGHDDDDQLRSQWVAIERSPTFERITTALFCKRDEKGKKSQRRVMDVSKLDDLDRRLFIDDLIRHVENDNHVLLQKIRKRIDEVGIDLPKIEARFSDLFVEAECEVVYGKPIPTLWNAISSKLSRFMCSNQAKKISILKGVSGIIRPKRMTLLLGPPSCGKTTLLLALSGRLDPSLKTRGDISYNGHLFSEFVPEKTSSYVSQNDLHIPELSVRETLDFSGCFQGTGSRLEMTKEISRREKLKGIVPDPDIDAYMKILGLTICADTRVGDASRPGISGGQKRRLTTGEMIVGPIKTLFMDEISNGLDSSTTFQILSCLQQFARLSEGTILVSLLQPAPETFELFDDLILMGEGKIIYHGPRDFVCSFFEDCGFKCPNRKSVAEFLQEVISRKDQEQYWCHIEKTYCYVSIESFIEKFKKSDLGLELQDRLSKTYDKSQTQKDGLCFRKYSLSNWDMLKACSRREFLLMKRNSFVYVFKSGLLIFIGFIAMTVYLRTGSTRDSLHANYLMGSLFFSLFKLLADGLPELTLTISRIAVFCKQKELYFYPAWAYAIPSAILKIPISFLESFLWTMLTYYVIGYSPEMGRFIRQFLILFALHLSCISMFRAIAAVFRDFVVATTVGSISIVLLSVFGGFIVRKPSMPSWLEWGFWLSPLSYAEIGLTANEFFAPRWGKITSENRTLGEQVLDARGLNFGNQSYWNAFGALIGFTLFFNTVFALALTFLKSAFKPGVLTALMGVSGAGKTTLLDVLSGRKTFGDIKGQIEVGGYVKVQDTFSRVSGYCEQFDIHSPNLTVQESLKYSAWLRLTSNISSETKCAIVNEVLETIELEEIKDSIVGIPGISGLTTEQRKRLTIAVELVSNPSIIFMDEPTTGLDARAAAIVMRAVKNIAETGRTVVCTIHQPSIDIFEAFDELILMKNGGKIIYYGPLGQHSSKVIEYFMRIHGVPKLKENSNPATWILDITSKSSEDKLGVDLAQMYEESTLFKNNQQDLFNVFGSMFTVVLFSGINNCSTVLFSVATERNVFYRERFSLVVTPNVHIAFTLRSSFYAIVNLFAGYVMPKPNIPRWWIWMYYLSPTSWVLNGLLTSQYGDMEKEILAFGEKKKVSDFLEDYFGYRYDSLALVAVVLIAFPILLASLFAFFIGKLNFQKK

SEQ ID NO: 1624 - protein, 472 aa, Arabidopsis thaliana
MELVELESLKDAVVGLPGITGLSTEQRKRLTIAVELVANPSIIFMDEPTSGLDARAAAIVMRTVRNTVDTGRTVVCTIHQPSIDIFEAFDELLLLKRGGQVIYAGPLGQNSHKIIEYFQAIHGVPKIKEKYNPATWMLEVSSMAAEAKLEIDFAEHYKTSSLYQQNKNLVKELSTPPQGASDLYFSTRFSQSLLGQFKSCLWKQWITYWRTPDYNLARFFFTLAAAVMLGSIFWKVGTKRENANDLTKVIGAMYAAVLFVGVNNSSSVQPLIAVERSVFYRERAAEMYSALPYALAQVVCEIPYVLIQTTYYTLIIYAMMCFEWTLAKFFWFYFVSFMSFLYFTYYGMMTVALTPNQQVAAVFAGAFYGLFNLFSGFVIPRPRIPKWWIWYYWICPVAWTVYGLIVSQYGDVEDTIKVPGMANDPTIKWYIENHYGYDADFMIPIATVLVGFTLFFAFMFAFGIRTLNFQQR

SEQ ID NO: 1625 - protein, 1459 aa, Monilinia fructicola
MAANEAEGFTSIVRRERPVSAISRPVSGLSRVLSTSSAFSERRASRLYDDFDEDNKDEPISMAEDWGLMPEIQAMREQGEKDQVKRRDLGVTWRNLTVKGIGADAAINENVGSQFNIPKIIKEGRASPPLRTLVDSSHGCVKPGEMLLVLGRPGAGCTTLLKMLANNRAGYAEVTGDVHFGSLNHTEAHQYRGQIVMNTEDELFFPTLTVGQTIDFATRMKGPHNLPSNQSTPLEYQQRSRDFLLKSMGISHTHETKVGNEYVRGVSGGERKRVSIIETLATRGSVMCWDNSTRGLDASTALEYTKAVRALTDIFGLASIVTLYQAGNGIYNLFDKVLVLDEGKQIYYGPMKQARPFMEDLGFICDDSANVADFLTGVTVPTERKIRDGFHDRFPRTADEILAAYNNHPIKSEMEKDYDYPNTAVAKQRTSDFRESVQHEKYPRLSKKSPLTTSFTTQVKACIIRQYQIIWGDKATFIIKQLSTLAQALIAGSLFYNAPNNSAGLFVKSGALFLSLLFNALLAMSEVTDSFSGRPVLAKHKAFALYHPAAFCIAQIAADIPVLFVQISHFSLVMYFMVGLRQDAGAFFTYWVIIFATTMCMTALFRAVGAGFSTFDAASKVSGFLISALIMYTGYMIQKPDMHPWFVWIYWIDPLAYGFSAVLANEFKGQIIPCVGTNLVPNGPGYADLTYQACAGVGGALPGAVSVTGEQYLNSLSYSTDNIWRNFGILWAWWVLFVGLTIYCTSNWSSSAGKSGFLLIPREKAHHNASVLKAANAGDEESGAAQEKRQQDVHSASEDTKVGDENDDQLMRNTSVFTWKNLTYTVKTPSGDRVLLDNVQGWVKPGMLGALMGSSGAGKTTLLDVLAQRKTDGTIKGSILVDGRPLSVSFQRSAGYCEQLDVHEPFATVREALEFSALLRQSRTIPEAEKLKYVDTIIDLLEMHDIENTLIGTTGAGLSIEQRKRLTIGVELVSKPSILIFLDEPTSGLDGQAAFNTVRFLRKLADVGQAILVTIHQPSAQLFAQFDSLLLLAKGGKTVYFGDIGENSQTIKEYFARYDAPCPESSNPAEHMIDVVSGSLSKGKDWNEVWLNSPEYQYTVTELDRIINTAAAAPPGTSDDGFEFAMPMWQQIKLVTNRMNVSIYRNTEYINNKFALHIGSALFNGFSFWMIKDSVGGLQLRLFTIFNFIFVAPGVMAQLQPLFLERRDIYEVREKKSKMYSWWAFATGNVVSELPYLCICAVLYFVCWYYTGGFPSDSNKAGAVLFVMICYEFIYTGIGQFVAAYAPNVVFASLVNPLVIGTLVSFCGVLVPYAQITAFWRYWMYYLNPFNYLMGSLLVFTTWDTPVRCRESEFAIFNPASGTCGEYLSSYLQGMGAAANLTNPDATSGCRVCEYRSGKDYLQSLNLQTYSYGWRDAGICALFVFSGYALVFLLMKLRTKKNKGAEVGWPRGGVSTIVY

SEQ ID NO: 1626 - protein, 1038 aa, Glycine max
  unsure (1)..(1038): unsure at all Xaa locations
XVVFRCPERKGTADFLQEVTLWKDQEQYWADKNMPYRYVTVTEFANKFKRFHVGIRLESELSVAFDKSSAHKAALVYSKNSVPTMDLFKACWDKEWLLIKRNSFVYIFKTAQIIFIAFIAATLWLXRTEMHRNNEDDAALYIGAILFTMIMNMFNGFAELALTIGRLPVFYKHRDHLFHPAWTYTLPNFLLRIPISVFESLVWVGVTYYIIGFAPDASRFFKQLLLVFLIQQMAAGMFRVISGVCRTMIIANTGGALMLLLVFLLGGFILPKREIPDWWVWAYWVSPLTYGFNALSVNEMLAPRWMHPQTSSDKNTTLGLSVLRNFDVYAKKDWYWIGAAALLGFTVLYNVLFTLALMYLNPLGKKQAIISEEDASEMESGGESMLRSLSTADGNNSREVAMQRMGSQATNDSATGVAPKKGMILPFQPLAMSFDTVNYYVDMPAEMRDQGXVTEDRLQXLLRGVTSSFRPGVLTALMGVSGAGKTTLMDVLAGRKTGGYIEGDIRISGFPKNQETFARVSGYCEQTDIHSPQVTIRESLLYSAYLRLPKDVFMFENQQPVGXHGVYLLEXDNLKDAITALPRVTGLSTHHQKRPSIAVELVANPSIIYMDEPTYGLDARAAAIVMMTDTNTVDTLRDSFCTIHQPXSIDIFEAFDELLLMKRGGQVIYSGPLGRNSHKITEYFEAIPGVPKIKEMYNPATWMLEVSSVAAEVRLGMDFAEYYKTSSLFQRNKALVKELSTPPPGATDLYFPTKYSQSTLGQFKSCFWKQWLTYWRSPDYNLVRYFFTLACALMIGTVFWRIGKHRESSADLTMIIGAMYAAVIFVGINNCQTVQPIVAVERTVFYRERAAGMYAPLPYALAQVFCEIPYVFFQTVYYSLIVYAMVSFEWKVEKFFWFFFVSFFSFLYFTYYGMMTVSITPNHQVASIFAAAFYGLFNLFSGFFIPRPKIPKWWVWYYWICPVAWTVYGLIVSQYRDIEDPLFVPGSTTQITVKGYIEDHYGFKSDFMGPVAAVLVAFTVFFAFVFSFCIKALNFQTR

SEQ ID NO: 1627 - protein, 797 aa, Glycine max
  unsure (1)..(797): unsure at all Xaa locations
LTYYVIGFDPSRXGIPKQHLILLFIGQMASALFRAIAALGRNMIVSNTFGAFAVLTFLTLGGYVMSKNDIKNWWIWGYWISPLMYGQNALMVNEFLSNSWHNTSRNLGVEYLESRGFPSSSYWYWLGLGAMAGFVLLFNVMFSAALEILGPFDRPQATITEEESPNEGTVASGRGDSVVESSHGKKKGMVLPFEPHSITFDEVIYSVDMPQEMKEQGVQEDRLVLLKGVSGAFRPGVLTALMGVSGAGKTTLMDVLAGRKTGGYIDGSIKISGYPKKQETFARISGYCEQNDIHSPHVTVYESLLYSAWLRLPSGVDSKTRKMFIEEVMELVELNPLRNSLVGLPGVSGLSTEQRKRLTIAVELVANPSIIFMDEPTSGLDARAAAIVMRTVRNTVDTGRTVVCTIHQPSIDIFEAFDELFLMKRGGQEIYVGPLGRHSTHLIKYFESIGGVSKIKDGYNPATWMLEVTTSAQELSLGVDFTDLYKNSDLYRRNKQLIQELGQPAPGSKDLYFPTQYSQSFLVQCQACLWKQRWSYWRNPPYTAVRFFFTTFIALMFGTMFWDLGSRRTTRGDLLNALGSMYSAVLFLGIQNASSVQPVVAVERTVFYREKAAGMYSALPYAFAQVLVEIPYIFAQAVTYGLIVYAMIGFDWTAEKFFWYLFFSFFSLLYFTFYGMMAVGVTPNHHVAAIVAAAFYAIWNLFSGFIVVRPKMPVWWRWYYWACPVAWTLYGLIASQFGDITERMPGEDNKMVKEFIEDYFGFKHDFVGICAVVVAGIAVAFALIFGAAIKTFNFQKR

SEQ ID NO: 1628 - protein, 658 aa, Glycine max
  unsure (1)..(658): unsure at all Xaa locations
XQPKMSRALVSKKRLSQLRERETSNSVELKSVTVDIGHTPRENQSTGKMVLPFEPLSIAFKDVQYFVDIPPEMKKHGSDEKRLQLLCDITGAFRPGILTALMGVSGAGKTTLMDVLSGRKTGGIIEGDIRIGSYPKVQKTFERVSGYCEQNDIHSPYITVEESVTYSAWLRLPTEIDSVTKGKFVEEVLETIELDGIKDCLVGIPRQSGLSTEQRKRLTIAVELVSNPSIIFMDEPTSGLDARAAAVVMRAVKNVVATGRTTVCTIHQPSIDIFETFDELILMKSGGRIIYSGMLGHHSSRLIEYFQNIPGVPKIKDNYNPATWMLEATSASVEAELKIDFAQIYKESHLCRDTLELVRELSEPLPGSKDLHFSTRFPQNSLGQFMACLWKQHLSYWRSPEYNLTRFIFMIVCAIIFGAVFWXKGKKINNQQDLFNVLGSMYIAVIFLGLNYCSTILPYVATERAVLYREKFAGMYSSTAYSFAQVVIEIPYILVQSILYVAITYPMIGFHWSVQKVFWYFYTTFCTFLYFVYLGMMVMSMSSNLDIASVLSTAVYTIFNLFSGFLMPGPKIPKWWVWCYWICPTAWSLNGLLTSQYGDIEKEVLVFGERKSVGSFLRDYYGFRHDRLSLVAVVLIVYPIVYASLFAYFIXKMNYQKR

SEQ ID NO: 1629 - protein, 613 aa, Glycine max
  unsure (1)..(613): unsure at all Xaa locations
LPFQPXAIFFSNINYYVDVPLELKQQGIVEDKLQLLVNVTGAFRPGVLTALVGVSGAGKTTLMDVLAGRKTGGVIEGSVYISGYPKRQDSFARISGYCEQTDVHSPCLTVWESLLFSAWLRLSSDVDLETQKAFVEEVMELVELTPLSGALVGPTMISXDGLSTERRKRLTIAVELVAXNPSIVFMDEPTSGLDARAAAIVMRTVRNIVNTGRTIVCTIHQPSIYIFGFAQEFFXRKRGGELIYAGPLGPKSSELISYFEAIEGVPKIRSGYNPATWMLEATSSVEENRLGVDFAEIYRKSSLYQYNQELVERLSKPSGNSKELHFPTKYCRSSFEQFLTCLWKQNLCYWRNPQYTAVRFFYTVIISLMLGSICWRFGAKRETQQDLFNAMGSMYSAILFIGITNGTAVQPVVSVERFVSYRERAAGMYSALSFAFAQVVIEFPYVFAQAIIYSSIFYSMASFVWTFDRFIWYLFFMYFTMLYFTFYGMMTTAVTPNHNVAAIIAAPFYMLWNLFSGFMIPHKRIPIWWRWYYWANPVAWSLYGLLTSQYGGDTHLVKLSNGXXSMTIREVLKHVFGYRHDFLCVTAVMVAGFCIFFAIIFAFAIKSFNFQRR

SEQ ID NO: 1630 - protein, 556 aa, Glycine max
  unsure (1)..(556): unsure at all Xaa locations
GWLGLGAMAGFVLLFNVMFSAALEILGPFDKPQATITEEESPNEGTVAEVELPRIESSGRGDSVVESSHGKKKGMVLPFEPHSITFDEVIYSVDMPQEMKEQGVQEDRLVLLKGVSGAFRPGVLTALMGVSGAGKTTLMDVLAGRKTGGYIDGSIKISGYPKKQETFARISGYCEQNDIHSPHVTVYESLLYSAWLRLPSGVDSKTRKMFIEEVMELVELNPLRNSLVGLPGVSGLSTEQRKRLTIAVELVANPSIIFMDEPTSGLDARAAAIVMRTVRNTVDTGRTVVCTIHQPSIDIFEAFDELFLMKRGGQEIYVGPLGRHSTHLIKYFESIGGVSKIKDGYNPATWMLEVTTSAQELSLGVDFTDLYKNSDLYRRNKQLIQELGQPAPGSKDLYFPTQYSQSFLVQCQACLWKXRWSYWXXSLLYXTFYGMMAVGVTPNHHVAAIVAAAFYAIWNLFSGFIVVRPKMPVWWRWYYWACPVAWTLYGLIASQFGDITERMPGEDNKMVKEFIEDYFGFKHDFVGICAVVVAGIAVAFALIFGAAIKTFNFQKR

SEQ ID NO: 1631 - protein, 272 aa, Glycine max
  unsure (1)..(272): unsure at all Xaa locations
YMKCYFIQLLLQELNHQGIVEDKLQLLVNVTGAFRPGVLTALVGVSGAGKPTLMDVLAGRXTGGVIEGSVYISGYPKRQDSFARISGYCEQTDVHSPCLTVWESLLFSAWLRLSSDVDLETQKAFVEEVMELVELTPLNGALVGLPGIDGLSTEQRKRLTIAVELVANPSIVFMDEPTSGLDARAAAIVMRTVRNIVNTGRTIVCTIHQPSIDIFESFDELLFMKRGGELIYAGPLGPKSCELISYFEXSVDARLAFTEQVVYGRMVIKQSX

SEQ ID NO: 1632 - protein, 420 aa, Glycine max
  unsure (1)..(420): unsure at all Xaa locations
XARDLFYPGWAWSLATWILGVPYSLVEAVIWSCVVYYTVGFAPAPGRFFRYMLLLFMLHQMALGLFRFMAALARDMAIANTFGTAALMIIFLLGGFIIPKGMIKPWWIWGYWLSPLTYGQRAISVNEFTATRWMQHSAFGSNTVGLNILKGFDIPAEDYWYWVGLGVLTLYALIFNCLVTLGLSYLNPLQKARAILLGDEDERVLIKMDLNLVVMXGKAKGMSLPFEPMTMTFHGVNYYVDMPKEIANQGIAETRLKLLSNVSGVFAPGVLTALMGSSGAGKTTLMDVLAGXXXGGIIEGDIRIGGYPKVQKTFERVSGYCEQNDIHSPYITVEESVTYSAWLRLPTEIDSVTKGKFVEEVLETIELDGIKDCLVGIPGQSGLSTEQRKRLTIAVELVSNPSIIFMDEPTSGLDARAAAX

SEQ ID NO: 1633 - protein, 724 aa, Glycine max
  unsure (1)..(724): unsure at all Xaa locations
MRNSEAPTHGGMMEIEATTRPSAGNGSTITLPGLSPLSETLWREKANTAEIIGDVSARLTWKDLTVMVTLSNGETQNVLEGLTGYAEPGTFTALMGPSGSXKSTLLDALSSRLAAKALLSGTILLNGRKAKLSFGTAAYVTHDDNXIGTLTVRETISYSARLRLPDNMPWADKRALVESTIVAMGLQDCADTVIGNWHLRGISGGEKRRVSIALEILMRPRLLFLDEPTSGLDSASAFFVTQTLRALARDGRTVIASIHQPSSEVFELFDQLYLLSSGKTVYFGQASEAYEFFAQAGFPCPALRNPSDHFLRCINSDFDKVKATLKGSMKLRFEGSDDPLDRITTAEAIRTLIDFYRTSQHSYAARQKVDEISKVKGTVLEAGGSEASFLMQSYTLTKRSFINMSRDFGYYWLRLVIYIVVTVCIGTIYLNVGTGYNSILARGSCASFVFGFVTFMSIGGFPSFVEDMKVFQRERLNGHYGVTSFVISNTLSAMPFLILITFLSGTICYFMVRLHPGFWHYLFFVLCLYASVTVVESLMMAIASIVPNFLMGIIIGAGIQGIFMLVSGYFRLPHDIPKPVWRYPMSYISFHFWALQGQYQNDLRGLIFDNQTPDLPKIPGEYILEKVFQIDVNRSKWINLSVIFSMIVIYRIIFFIMIKVNEDVTPWIRGYLARRRMQQKSGAQNTTIAPDVLTQSPSLRTYVSTQTKXRHQKFDSNNEAFIIK

SEQ ID NO: 1634 - protein, 625 aa, Glycine max
  unsure (1)..(625): unsure at all Xaa locations
XDNFIYKXASADAVLDPRIXVSSKWENRMTLXLTWENLEATVTNGKNRXXLILHGLTGYAQPGRLLAIIGPSGSGKSTLLDALAGRLTSNIKQTGKILINGHKQELAYGTSGYVTQDDAMLSCLTAGETLYYSAMLQFPNTMSVEEKKERADMTLREMGLQDAINTRVGGWNCKGLSGGQRRRLSICIEILTHPKLLFLDEPTSGLDSAASYYVMSGIANLIQRDGIQRTIVASVHQPSSEVFQLFHDLFLLSSGETVYFGPASDANQFFASNGFPCPPLYNPSDHYLRIINKDFNQDADEGITTEEATKILVNSYKSSEFSNHVQSEIAKSETDFGACGKKKKIHAAFITQCLILIRRASLQIYRDTNNYWARLVVFIFISLSVGSYXFFHSGGPDLRSIMDRGSLLCFFVSVVTFPPLRPLPPFVREMKVFKRERLNGHYGITAFLISNIFSAVPYNFLMSIIPGAVVTYLSGLHKGVDNFVFLISVLFATVTWVESLMMVVGSVFPNYVMGVIVCGGIEGVMILTSGFYRLPNDLPKPVWKFPFYYISFLTYAFQGLLKNEFEDLPFSSEVLADTWHVQMGHSKWVDLAIMFAMIVLYRVLFLAISKVNQNKNKIVIXNLQK

SEQ ID NO: 1635 - protein, 1509 aa, Oryza sativa (japonica cultivar-group)
MADPQHVQEEAAGAEAVHAHAARHDGAVVMEILSRSLQSMPASPDVSAYFSGASSRRPSAADEVDDEEALRWAALERLPSFDRLRTGLMRADADSSGVGVGAVGRGRRWYAHREVDVRTLELAQRQAFVERVFHVAEEDNERFLKKLRARIDRAGIQMPTVEVRFRNVNVQAECHVGTRALPTLANVSRDVGESLLGLVGLNFAKRKALHILKDVSGIVRPSRMTLLLGPPSSGKTTLLLALAGKLDPTLETSGEVTYNGYGLDEFVPQKTAAYISQHDVHAGEMTVKETLDFSAKCQGVGQRYELLKELAKKERQLGIYPDPEVDLFMKATSVEGSTLQTDYILRILGLDMCADVIVGDELRRGISGGQKKRLTTAEMLVGPTKVLFMDEISTGLDSSTTFQIIRCIQQIVHMGEATVLVSLLQPAPEIFELFDDVMLLSEGQIVYQGPREHVLEFFERCGFRCPERKGVADFLQEVTSKKDQEQYWIQSEKPYRYVSVPEFVAKFKKFHMGKSLKKQLSVPFNKGKIHKSALVFSKQSVSTLELLKTSCSKEWLLMKRNSFVYIFKTVQGILVALIASTVFLRTQLNTRDEDDGQIYIGALIFVMITNMFSGFADLSLTLARLPVFYKHRDFLFYRPWTFALPNVLVRIPSSLFESIIWVAITYYTMGFAPEASRFFKHLLVVFMLQQMAAGLFRVTAGLCRTVVVTNTAGSLAVLIMFVLGGFILPKDAIPKWWVWAYWCSPLTYAYIAFSSNEMHSPRWMDKFVPDGKRLGVAVLENSGVFTNKEWYWIATGALLGFTILFNVLFSLSLMYLNPVGKPQSILPEETDSQENIQEGKNKAHIKQIITVETPEPVSPNSIITLDKVIQQLRGYSANTSDRSHSYINAAGRTAPGRGMVLPFEPLYMSFNEINYYVDMPLEMKSQGVTADKLQLLSGISGAFRPGVLTALMGVSGAGKTTLMDVLSGRKTGGYIEGEIYISGYPKNQATFARISGYCEQNDIHSPQITVRESLLFSAFLRLPKEVNDQEKKIFVDEVMELVELTGLKDAIVGLPGVNGLSTEQRKRLTIAVELVANPSIIFMDEPTSGLDARAAAIVMRTVRNTVNTGRTVVCTIHQPSIDIFEAFDELLLLKRGGQVIYSGPLGTNSHKVVEYFEAIPGVPKIEENRNPATWMLDVSSAASEVRLEIDFAEYYRSSTMHQRTKALVKELSNPPPGSDDLYFPSQYSQSTFNQFKLCLWKQWWTYWRSPDYNLVRIFFALFTALMLGTIFWRVGHKMESSKDLLVIIGSMYAAVLFVGFENSVTVQPVVAVERTVFYRERAAGMYSAIPYALAQVVVEIPYVFVETVIYTLIVYPMMSFQWTPAKFFWFFYVSFFTFLYFTYYGMMNVSVSPNLQVASILGAAFYTLFNLFSGFFIPRPKIPKWWVWYYWLCPVAWTVYGLIVSQYGDVEDFITVPGQSDQQVRPFIKDYFGYDPDFMGVVAAVLAGFTVFFAFTYAYSIRTLNFQQR

SEQ ID NO: 1636 - protein, 1457 aa, Oryza sativa (japonica cultivar-group)
MDAAGEIQKVASMRLGGSMRGDSGSMWRRGDDVFSRSSREEDDEEALRWAALEKLPTYDRVRRAILPLGGDDGAGDGGGKGVVDVHGLGPRERRALLERLVRVADEDNEKFLLKLKDRVDRVGIDMPTIEVRFEHLEAEAEVRVGNSGLPTVLNSITNTLEEAGNALGILPNRKQTMPVLHDVSGIIKPRRMTLLLGPPGSGKTTLLLALAGRLGKDLKASGKVTYNGHGMEEFVPERTAAYISQHDLHIGEMTVRETLAFSARCQGVGSRFDMLTELSRREKAANIKPDADIDAFMKAAAMGGQEANVNTDYILKILGLEICADTMVGDEMLRGISGGQRKRVTTGEMLVGPARALFMDEISTGLDSSTTFQIVNSLRQTVHILGGTAVISLLQPAPETYNLFDDIILLSDGQIVYQGPREDVLEFFESMGFKCPDRKGVADFLQEVTSKKDQRQYWARHDKPYRFVTVKEFVSAFQSFHTGRAIANELAVPFDKSKSHPAALATTRYGAPGKELLKANIDREILLMKRNSFVYMFRTFQLMVVSLIAMTLFFRTKMKRDSVTSGGIYMGALFFGVLMIMFNGFSELALTVFKLPVFFKQRDLLFYPAWSYTIPSWILKIPITFIEVGGYVFLTYYVIGFDSNVGSFFKQYLLMLAINQMAGSLFRFIGGAARNMIVANVFASFMLLIFMVLGGFILAREQVKKWWIWGYWISPMMYAQNAISVNELMGHSWNKIVNSSASNETLGVQVLKSRGVFPEARWYWIGFGAMIGFTILFNALFTLALTYLRPYGNSRQSVSEEELKEKRANLNGEIVGDVHLSSGSTRRPMGNGTENDSTIVDDDTEVTQRGMVLPFTPLSLSFDNVRYSVDMPQEMKAQGVADDRLELLKGVSGSFRPGVLTALMGVSGAGKTTLMDVLAGRKTGGYIEGSINISGYPKKQETFARVSGYCEQNDIHSPQVTVYESLLFSAWLRLPEDVDSNTRKMFIEEVMELVELKSLRDALVGLPGVNGLSTEQRKRLTIAVELVANPSIIFMDEPTSGLDARAAAIVMRTVRNTVNTGRTVVCTIHQPSIDIFEAFDELFLMKRGGEEIYAGPLGHHSSELIKYFESIPGVSKIKDGYNPATWMLEVTTIGQEQALGVDFSDIYKKSELYQRNKALIKDLSQPAPDSSDLYFPTQYSQSSLTQCMACLWKQNLSYWRNPPYNAVRFFFTTVIALLFGTIFWDLGGKVTKSQDLFNAMGSMYAAVLFIGVMNCTSVQPVVAVERTVFYRERAAGMYSAFPYAFGQVVIEIPYTLVQATVYGIIVYAMIGFEWTAAKFFWYLFFMVFTLLYFTFYGMMAVGLTPNYHIASIVSSAFYAIWNLFSGFVIPRPRVPIWWRWYCWACPVAWTLYGLVVSQFGDIETPMEDGTPVKVFVENYFGFKHSWLGWVATVVAAFAFLFASLFGFAIMKFNFQKR

SEQ ID NO: 1637 - protein, 1432 aa, Oryza sativa (japonica cultivar-group)
MDAAGEIQKVASMRLGGSMRGDSGSMWRRGDDVFSRSSREEDDEEALRWAALEKLPTYDRVRRAILPLGGDDGAGDGGGKGVVDVHGLGPRERRALLERLVRVADEDNEKFLLKLKDRVDRVGIDMPTIEVRFEHLEAEAEVRVGNSGLPTVLNSITNTLEEAGNALGILPNRKQTMPVLHDVSGIIKPRRMTLLLGPPGSGKTTLLLALAGRLGKDLKASGKVTYNGHGMEEFVPERTAAYISQHDLHIGEMTVRETLAFSARCQGVGSRFDMLTELSRREKAANIKPDADIDAFMKAAAMGGQEANVNTDYILKILGLEICADTMVGDEMLRGISGGQRKRVTTGEMLVGPARALFMDEISTGLDSSTTFQIVNSLRQTVHILGGTAVISLLQPAPETYNLFDDIILLSDGQIVYQGPREDVLEFFESMGFKCPDRKGVADFLQEVTSKKDQRQYWARHDKPYRFVTVKEFVSAFQSFHTGRAIANELAVPFDKSKSHPAALATTRYGAPGKELLKANIDREILLMKRNSFVYMFRTFQLMVVSLIAMTLFFRTKMKRDSVTSGGIYMGALFFGVLMIMFNGFSELALTVFKLPVFFKQRDLLFYPAWSYTIPSWILKIPITFIEVGGYVFLTYYVIGFDSNVGSFFKQYLLMLAINQMAGSLFRFIGGAARNMIVANVFASFMLLIFMVLGGFILAREQVKKWWIWGYWISPMMYAQNAISVNELMGHSWNKIVNSSASNETLGVQVLKSRGVFPEARWYWIGFGAMIGFTILFNALFTLALTYLRPYGNSRQSVSEEELKEKRANLNGEIVGDVHLSSGRGMVLPFTPLSLSFDNVRYSVDMPQEMKAQGVADDRLELLKGVSGSFRPGVLTALMGVSGAGKTTLMDVLAGRKTGGYIEGSINISGYPKKQETFARVSGYCEQNDIHSPQVTVYESLLFSAWLRLPEDVDSNTRKMFIEEVMELVELKSLRDALVGLPGVNGLSTEQRKRLTIAVELVANPSIIFMDEPTSGLDARAAAIVMRTVRNTVNTGRTVVCTIHQPSIDIFEAFDELFLMKRGGEEIYAGPLGHHSSELIKYFESIPGVSKIKDGYNPATWMLEVTTIGQEQALGVDFSDIYKKSELYQRNKALIKDLSQPAPDSSDLYFPTQYSQSSLTQCMACLWKQNLSYWRNPPYNAVRFFFTTVIALLFGTIFWDLGGKVTKSQDLFNAMGSMYAAVLFIGVMNCTSVQPVVAVERTVFYRERAAGMYSAFPYAFGQVVIEIPYTLVQATVYGIIVYAMIGFEWTAAKFFWYLFFMVFTLLYFTFYGMMAVGLTPNYHIASIVSSAFYAIWNLFSGFVIPRPRVPIWWRWYCWACPVAWTLYGLVVSQFGDIETPMEDGTPVKVFVENYFGFKHSWLGWVATVVAAFAFLFASLFGFAIMKFNFQKR

SEQ ID NO: 1638 - protein, 1500 aa, Oryza sativa (japonica cultivar-group)
  unsure (1)..(1500): unsure at all Xaa locations
MEKVWESGRRMSRSIGRGMGMEAWGVDEAFMPQNSGGGGGSRGRRRSGRGGTADDDEEALRWAAIERLPTYSRMRTXILSFAEEEAAAAAAGAGKQQYKEVDVRRLGVGERQEFIERVFRVAEEDNQRFLQKLRNRIDRVGIELPTVEVRFEELMVQARCHVGSRALPTLLNTARNIAEAALGLVGVRPGRQATLTILRGVSGAVRPSRMTLLLGPPSSGKTTLLLALAGKLDPSLRRGGEVTYNGFELEEFVAQKTAAYISQTDVHVGEMTVKETLDFSARCQGVGTKYDLLTELARREKEAGIRPEPEVDLFMKATSMEGVESSLQTDYTLRILGLDICADTIVGDQMQRGISGGQKKRVTTGEMIVGPTKVLFMDEISTGLDSSTTFQIVKCLQQIVHLGEATILMSLLQPAPETFELFDDIILLSEGQIVYQGPREYVLEFFESCGFRCPERKGTADFLQEVTSKKDQEQYWADKHRPYRYISVSEFAQRFKRFHVGLQLENHLSVPFDKTRSHQAALVFSKQSVSTTELLKASFAKEWLLIKRNSFVYIFKTIQLIIVALVASTVFLRTQMHTRNLDDGFVYIGALLFSLIVNMFNGFAELSLTITRLPVFFKHRDLLFYPAWIFTLPNVILRIPFSIIESIVWVIVTYYTIGFAPEADRFFKQLLLVFLIQQMAGGLFRATAGLCRSMIIAQTGGALALLIFFVLGGFLLPKAFIPKWWIWGYWVSPLMYGYNALAVNEFYSPRWMNKFVLDNNGVPKRLGIALMEGANIFTDKNWFWIGAAGLLGFTMFFNVLFTLSLVYLNPLGKPQAVISEETAKEAEGNGDARHTVRNGSTKSNGGNHKEMREMRLSARLSNSSSNGVSRLMSIGSNEAGPRRGMVLPFTPLSMSFDDVNYYVDMPAEMKQQGVVDDRLQLLRDVTGSFRPAVLTALMGVSGAGKTTLMDVLAGRKTGGYIEGDMRISGYPKNQETFARISGYCEQNDIHSPQVTVRESLIYSAFLRLPEKIGDQEITDDIKIQFVDEVMELVELDNLKDALVGLPGITGLSTEQRKRLTIAVELVANPSIIFMDEPTSGLDARAAAIVMRTVRNTVDTGRTVVCTIHQPSIDIFEAFDELLLLKRGGQVIYSGQLGRNSQKMIEYFEAIPGVPKIKDKYNPATWMLEVSSVAAEVRLNMDFAEYYKTSDLYKQNKVLVNQLSQPEPGTSDLHFPTKYSQSTIGQFRACLWKQWLTYWRSPDYNLVRFSFTLFTALLLGTIFWKIGTKMGNANSLRMVIGAMYTAVMFIGINNCATVQPIVSIERTVFYRERAAGMYSAMPYAIAQVVMEIPYVFVQTAYYTLIVYAMMSFQWTAAKFFWFFFVSYFSFLYFTYYGMMTVAISPNHEVAAIFAAAFYSLFNLFSGFFIPRPRIPKWWIWYYWLCPLAWTVYGLIVTQYGDLEQIISVPGQSNQTISYYVTHHFGYHRKFMPVVAPVLVLFAVFFAFMYAICIKKLNFQHR

SEQ ID NO: 1639 - protein, 1470 aa, Oryza sativa (japonica cultivar-group)
MAAAPSASGRRSMSWGSSISQSFRQAEADDPFGRAASQQGHDDDEENLRWAALEKLPTYDRMRRGVIRTALLHHDGGGDGGGAAAAAKDGRMELVDIQKLAAGNLGRALLDRVFQDDSERFLRRLRDRIDMVGIELPTIEVRYEQLSIQAEVFVGSRALPTLTNAATNVLQGLIGRFGSSNKRTINILQDVSGIIKPSRMTLLLGPPSSGKSTLMRALTGKLDKNLKVSGDITYCGHTFSEFYPERTSAYVSQYDLHNAEMTVRETLDFSGRCLGIGARYDMLAELARRERNAGIKPDPEIDAFMKATAVQGHKTNITTDVTLKALGLDICADIIIGDEMIRGISGGQKKRVTTGEMLTGPARALFMDEISTGLDSSSTFEIVKYIGHLVHVMNETVMISLLQPPPETYNLFDDIILLSEGYIVYHGPRENILEFFENAGFRCPERKGIADFLQEVTSKKDQQQYWYHDQERYRYVSVPEFAQRFKSFHVGQKMQKEMQIPYDKSSTHPAALTTTKYGLSSWESLRAVMSREWLLMKRNSFIYIFKVTQLIILAFMSMTVFLRTKMPSGTISDGTKFLGALTFSLITILFNGFAELQLTIKKLPVFYKHRDFLFFPAWTFGVANILLKVPVSLVEAAVWVVLTYYVMGFAPSAGRFFRQFIAFFVTHQMAMAMFRFLGAILKTMVVANTFGMFVLLIVFIFGGFLISRNDIKPWWIWGYWASPMMYSQQAISINEFLASRWAIPNTDATIDEPTVGKAILKSKGLITSDGGFWISIGALIGFLVVFNILYILALTYLSPGGSSNTIVSDEDSEDKTDMKTRNEQQMSQIVHNNGASNTSATSSIPMSGSRSTNQQSRSQIVLPFQPLSLCFNHVNYYVDMPTEMKEQGFTESRLQLLSDISGVFRPGVLTALVGVSGAGKTTLMDVLAGRKTSGVIEGDITLSGYPKKQETFARISGYCEQTDIHSPNVTVYESILYSAWLRLSSDVDTNTRKMFVDEVMSLVELDVLRNALVGLPGVSGLSTEQRKRLTIAVELVANPSVIFMDEPTSGLDARAAAIVMRTVRNTVNTGRTVVCTIHQPSIDIFESFDELLLLKRGGQVIYAGELGRHSHKLVEYFEAVPGVPKITEGYNPATWMLEVTSPIAEARLNVNFAEIYANSELYRKNQELIKELSTPPPGYQDLSFPTKYSQNFYSQCIANFWKQYRSYWKNPPYNAMRYLMTLLNGLVFGTVFWQKGTKISSQQDLFNLLGATYAATFFLGAANCITVQPVVSIERTVFYRERAAGMYSSLSYAFAQACVEVIYNILQGILYTIIIYAMIGYDWKADKFFYFMFFIVASFNYFTLFGMMLVACTPSAMLANILISFVLPLWNLFAGFLVVRPLIPIWWRWYYWANPVSWTIYGVVASQFGKNGDVLSVPGGSPTVVKQFLEDNLGMRHSFLGYVVLTHFGYIIVFFFIFGYAIKYFNFQKR

SEQ ID NO: 1640 - protein, 1468 aa, Oryza sativa (japonica cultivar-group)
MSSAGVVEMQKAASFRREGGGSMASMWLSADGNGAFSRSSSSSSRRMRGEEDDEEALRWAALQKLPTYDRVRAAILPMVEGEGGEAGGGGGGRRVVVDVHSLGPHERRALLERLVRVADDDNERFLLKLKERISRVGIDMPTIEVRFEHLEVEAEVRVGNSGIPTVLNSITNKIEEAANALGILPTRKQTLRILHDISGIIKPKRMTLLLGPPGSGKTTFLLALAGRLKDLKFSGQVTYNGHQMEDFVPQRTAAYISQHDLHIGEMTVRETLSFSARCQGVGSRFDMLTELTRREKAANIKPDADVDAFMKASAMEGQESNLITDYILKILGLEICADTMVGDDMVRGISGGQRKRVTTGEMLVGPANAFFMDEISTGLDSSTTFQIVKSLRQTIHILGGTAVISLLQPAPETYDLFDDIILLSDGHIVYQGPRENVLEFFELMGFKCPERKGVADFLQEVTSRKDQKQYWAQHDKPYRYVPIKEFASAFQSFHTGRSIANELATPFDKSKSHPAALTTSRYGVSAMELLKANIDRELLLIKRNSFVYIFRTIQLMTVSAMAMTVFFRTKMHRDSVADGVIFMGALFFAVMMIMLNGLSELPLTIFKLPVFFKQRDLLFFPAWTYTIPSWILKSPMSFIEVGGFCFMSYYVIGFDPNVGRFFKQYLLMLAVSQMAAALFRFVGGAARNLIVANVFGSFMLLIFMVLGGFILARDKVNKWWIWGYWISPMMYAQNAVSVNEFLGHSWDKVLNNSLSNETLGVQALMSRGIFPEAKWYWIGFGALLGFIMLFNILFTLALTYLKPDGKSQPSISEEELKEKQANINGNVLDVDTMASSNNLAIVGSTGTGSEIADNSQPTQRGMVLPFTPLSLTFEDIKYSVDMPQEMKAHGIVEDRLELLKGVSGCFRPGVLTALMGVSGAGKTTLMDVLAGRKTGGYIEGNISISGYPKKQETFARVSGYCEQNDIHSPQVTVSESLLFSAWLRLPKDVDSNTRKMFIEEVMELVELKPLRDALVGLPGVNGLSIEQRKRLTIAVELVANPSIIFMDEPTSGLDARAAAIVMRTVRNTVNTGRTVVCTIHQPSIDIFEAFDELFLMKRGGEEIYVGPLGHHSSELIKYFEGIQGVSKITDGYNPATWMLEVTTVSQEQALDVDFCDIYRKSELFQRNKALIQELSTPPPGSSELYFPTQYSQSFLIQCLACLWKQHLSYWRNPPYNAIRLFFTTVIALIFGTIFWDLGGKMGQSQDLFNAMGSMYAAVLFIGVLNGQSVQPVVSVERTVFYRERAAGMYSALPYAFGQVAIEFPYTLVQSVIYSIIVYSMIGFQWTVAKFFWYLFFMFFTLLYFTFYGMMAVGLTPSYHVASIVSSAFYAIWNLFTGFVISRPATPVWWRWYCWICPVAWTLYGLIVSQYGDIVTPMDDGIPVNVFVENYFDFKHSWLGFVAVVIVAFTMLFAFLFGFAIMKLNFQKR

SEQ ID NO: 1641 - protein, 1450 aa, Oryza sativa (japonica cultivar-group)
MQKAASFRREGGGSMASMWLSADGNGAFSRSSSSSSRRMRGEEDDEEALRWAALQKLPTYDRVRAAILPMVEGEGGEAGGGGGGRRVVVDVHSLGPHERRALLERLVRVADDDNERFLLKLKERISRVGIDMPTIEVRFEHLEVEAEVRVGNSGIPTVLNSITNKIEEAANALGILPTRKQTLRILHDISGIIKPKRMTLLLGPPGSGKTTFLLALAGRLKDLKFSGQVTYNGHQMEDFVPQRTAAYISQHDLHIGEMTVRETLSFSARCQGVGSRFDMLTELTRREKAANIKPDADVDAFMKASAMEGQESNLITDYILKILGLEICADTMVGDDMVRGISGGQRKRVTTGEMLVGPANAFFMDEISTGLDSSTTFQIVKSLRQTIHILGGTAVISLLQPAPETYDLFDDIILLSDGHIVYQGPRENVLEFFELMGFKCPERKGVADFLQEVTSRKDQKQYWAQHDKPYRYVPIKEFASAFQSFHTGRSIANELATPFDKSKSHPAALTTSRYGVSAMELLKANIDRELLLIKRNSFVYIFRTIQLMTVSAMAMTVFFRTKMHRDSVADGVIFMGALFFAVMMIMLNGLSELPLTIFKLPVFFKQRDLLFFPAWTYTIPSWILKSPMSFIEVGGFCFMSYYVIGFDPNVGRFFKQYLLMLAVSQMAAALFRFVGGAARNLIVANVFGSFMLLIFMVLGGFILARDKVNKWWIWGYWISPMMYAQNAVSVNEFLGHSWDKVLNNSLSNETLGVQALMSRGIFPEAKWYWIGFGALLGFIMLFNILFTLALTYLKQEELKEKQANINGNVLDVDTMASSNNLAIVGSTGTGSEIADNSQPTQRGMVLPFTPLSLTFEDIKYSVDMPQEMKAHGIVEDRLELLKGVSGCFRPGVLTALMGVSGAGKTTLMDVLAGRKTGGYIEGNISISGYPKKQETFARVSGYCEQNDIHSPQVTVSESLLFSAWLRLPKDVDSNTRKMFIEEVMELVELKPLRDALVGLPGVNGLSIEQRKRLTIAVELVANPSIIFMDEPTSGLDARAAAIVMRTVRNTVNTGRTVVCTIHQPSIDIFEAFDELFLMKRGGEEIYVGPLGHHSSELIKYFEGIQGVSKITDGYNPATWMLEVTTVSQEQALDVDFCDIYRKSELFQRNKALIQELSTPPPGSSELYFPTQYSQSFLIQCLACLWKQHLSYWRNPPYNAIRLFFTTVIALIFGTIFWDLGGKMGQSQDLFNAMGSMYAAVLFIGVLNGQSVQPVVSVERTVFYRERAAGMYSALPYAFGQVAIEFPYTLVQSVIYSIIVYSMIGFQWTVAKFFWYLFFMFFTLLYFTFYGMMAVGLTPSYHVASIVSSAFYAIWNLFTGFVISRPATPVWWRWYCWICPVAWTLYGLIVSQYGDIVTPMDDGIPVNVFVENYFDFKHSWLGFVAVVIVAFTMLFAFLFGFAIMKLNFQKR

SEQ ID NO: 1642 - protein, 1450 aa, Oryza sativa (japonica cultivar-group)
MDREVHRMASLRREGSMWRSGGDVFSRSSSRFQDEDDDEEALRWAALERLPTYDRVRRGILAVSSEDGGAGGEKVEVDVGRLGARESRALIERLVRAADDDHERFLLKLRERMDRVGIDYPTIEVRFENLEVEADVHVGNRGLPTLLNSVTNTVEAIGNALHILPNKKQPMTVLHDVSGIIKPRRMTLLLGPPGSGKTTLLLALAGKLDKDLKVSGKVTYNGHGMHEFVPERTAAYISQHDLHIGEMTVRETLAFSARCQGVGTRYEMLTELARREKAANIKPDHDIDIYMKASAMGGQESSVVTDYILKILGLDICADTVVGNEMLRGISGGQRKRVTTGEMLVGPARALFMDEISTGLDSSTTYQIVNSLRQTIHILGGTAVISLLQPAPETYNLFDDIILLSDGQVVYQGPREHVLEFFEFMGFRCPARKGVADFLQEVTSRKDQGQYWCRRDRPYRFVPVKQFADAFRSFHVGRSIQNELSEPFDRTRSHPAALATSKYGVSRKELLKATIDRELLLMKRNAFMYIFKAVNLTLMALIVMTTFFRTSMRHDRDYGMIYLGALYFALDTVMFNGFAELAMTVMKLPVFFKQRDLLFFPAWAYTIPSWILQIPITFLEVGVYVFITYYVIGFDPSVSRFFKQYLLLLALNQMSSALFRFIAGIGRDMVVSHTFGPLSLLAFAALGGFILARPDVKKWWIWGYWISPLSYAQNAISTNEFLGHSWSQILPGENVTLGVSVLKSRGIFTEAKWYWIGLGALLGYTLLFNLLYTVALSVLSPFTDSHASMSEDALKEKHANLTGEVVEGQKDTKSRKQELELSHIADQNSGINSADSSASRKGMVLPFAPLSISFNDVRYSVDMPEAMKAQGITEDRLLLLKGVSGSFRPGVLTALMGVSGAGKTTLMDVLAGRKTGGYIEGDIRISGYPKKQETFARISGYCEQNDIHSPHVTVYESLVFSAWLRLPSEVDSEARKMFIEEVMDLVELTSLRGALVGLPGVSGLSTEQRKRLTIAVELVANPSIIFMDEPTSGLDARAAAIVMRTVRNTVNTGRTVVCTIHQPSIDIFEAFDELFLMKRGGEEIYVGPVGQNSSKLIEYFEGIDGVSRIKDGYNPATWMLEVTSSAQEEMLGVDFSEIYRQSELYQRNKELIEELSTPPPGSTDLNFPTQYSRSFITQCLACLWKQNWSYWRNPSYTAVRLLFTIVIALMFGTMFWNLGTRTKKQQDLFNAMGSMYAAVLYIGVQNSGSVQPVVVVERTVFYRERAAGMYSAFPYAFGQVAIELPYIMVQTLIYGVLVYSMIGFEWTVAKFLWYLFFMYFTLLYFTFYGMMAVGLTPNESIAAIISSAFYNVWNLFSGYLIPRPKIPVWWRWYCWICPVAWTLYGLVASQFGDIQHVLEGDTRTVAQFVTDYFGFHHNFLWVVAVVHVVFAVTFAFLFSFAIMKFNFQRR

SEQ ID NO: 1643 - protein, 1417 aa, Oryza sativa (japonica cultivar-group)
MASLRREGSMWRSGGDVFSRSSSRFQDEDDDEEALRWAALERLPTYDRVRRGILAVSSEDGGAGGEKVEVDVGRLGARESRALIERLVRAADDDHERFLLKLRERMDRVGIDYPTIEVRFENLEVEADVHVGNRGLPTLLNSVTNTVEAIGNALHILPNKKQPMTVLHDVSGIIKPRRMTLLLGPPGSGKTTLLLALAGKLDKDLKVSGKVTYNGHGMHEFVPERTAAYISQHDLHIGEMTVRETLAFSARCQGVGTRYEMLTELARREKAANIKPDHDIDIYMKASAMGGQESSVVTDYILKILGLDICADTVVGNEMLRGISGGQRKRVTTGEMLVGPARALFMDEISTGLDSSTTYQIVNSLRQTIHILGGTAVISLLQPAPETYNLFDDIILLSDGQVVYQGPREHVLEFFEFMGFRCPARKGVADFLQEVTSRKDQGQYWCRRDRPYRFVPVKQFADAFRSFHVGRSIQNELSEPFDRTRSHPAALATSKYGVSRKELLKATIDRELLLMKRNAFMYIFKAVNLTLMALIVMTTFFRTSMRHDRDYGMIYLGALYFALDTVMFNGFAELAMTVMKLPVFFKQRDLLFFPAWAYTIPSWILQIPITFLEVGVYVFITYYVIGFDPSVSRFFKQYLLLLALNQMSSALFRFIAGIGRDMVVSHTFGPLSLLAFAALGGFILARPDVKKWWIWGYWISPLSYAQNAISTNEFLGHSWSQILPGENVTLGVSVLKSRGIFTEAKWYWIGLGALLGYTLLFNLLYTVALSVLSQGQKDTKSRKQELELSHIADQNSGINSADSSASRKGMVLPFAPLSISFNDVRYSVDMPEAMKAQGITEDRLLLLKGVSGSFRPGVLTALMGVSGAGKTTLMDVLAGRKTGGYIEGDIRISGYPKKQETFARISGYCEQNDIHSPHVTVYESLVFSAWLRLPSEVDSEARKMFIEEVMDLVELTSLRGALVGLPGVSGLSTEQRKRLTIAVELVANPSIIFMDEPTSGLDARAAAIVMRTVRNTVNTGRTVVCTIHQPSIDIFEAFDELFLMKRGGEEIYVGPVGQNSSKLIEYFEGIDGVSRIKDGYNPATWMLEVTSSAQEEMLGVDFSEIYRQSELYQRNKELIEELSTPPPGSTDLNFPTQYSRSFITQCLACLWKQNWSYWRNPSYTAVRLLFTIVIALMFGTMFWNLGTRTKKQQDLFNAMGSMYAAVLYIGVQNSGSVQPVVVVERTVFYRERAAGMYSAFPYAFGQVAIELPYIMVQTLIYGVLVYSMIGFEWTVAKFLWYLFFMYFTLLYFTFYGMMAVGLTPNESIAAIISSAFYNVWNLFSGYLIPRPKIPVWWRWYCWICPVAWTLYGLVASQFGDIQHVLEGDTRTVAQFVTDYFGFHHNFLWVVAVVHVVFAVTFAFLFSFAIMKFNFQRR

SEQ ID NO: 1644 - protein, 1464 aa, Oryza sativa (japonica cultivar-group)
MDAAAEMQKVVSLRRGGGGSSSRGAASMWWSADNGVFSRSRASSSGEDGEDDEEALRWAALEKLPTYDRVRRAVLPVVEEGGGGGEAGKKVVDVLSLGPQERRALLERLVRVAEDDNERFLLKLKERIDRVGIDIPTIEVRFEHLEAEAEVRVGNSGLPTVLNSMTNKLEGAANALGILPNKKQTMPILHDVSGIVKPRRMTLLLGPPGSGKTTLLLALAGRLGKDIKFSGQVTYNGHQMEDFVPQRTAAYISQHDLHIGEMTVRETLSFSARCQGVGSRFDMLTELSRREKAANIKPDADIDAFMKASAMEGQETNLITDYILKILGLDICADTMVGDDMVRGISGGQRKRVTTGEMLVGPANALFMDEISTGLDSSTTFQIVKSLRQAIHILGGTAVISLLQPAPETYDLFDDIILLSDGQIVYQGPREGVLEFFELMGFKCPERKGVADFLQEVTSRKDQKQYWMQHDKPYRYVPVKDFASAFQSFHTGKSIANELATPFDKSKNHPAALTTSRYGVSAMELLKANIDREFLLMKRNSFVYIFRACQLMVVSAIAMTVFFRTKMHRDSVTDGVIFMGALFFSVMMIMFNGLSELPLTIFKLPVFFKQRDLLFFPAWTYTIPSWILKIPMSFIEVGGFVFMSYYVIGFDPSAGRFFKQYLLMLAINQMAAALFRFVGGAARNMIVANVFGSFMLLIFMVLGGFILVREKVKKWWIWGYWISPMMYAQNAISVNEFLGHSWDKVLNNSLSNETLGVQALRSRGVFPEAKWYWIGFGALLGFIMLFNGLFTLALTYLKPYGKSQPSVSEEELKEKQANINGNVLDVDTMASSTNLAIVDNTETSSEIADNSQPTQRGMVLPFAPLSLTFDNIKYSVDMPQEMKAHGIVEDRLELLKGVSGSFRPGVLTALMGVSGAGKTTLMDVLAGRKTGGYIEGNITISGYPKKQETFARVSGYCEQNDIHSPQVTVSESLLFSAWLRLPKDVDSNTRKMFIEEVMELVELKPLRDALVGLPGVNGLSTEQRKRLTIAVELVANPSIIFMDEPTSGLDARAAAIVMRTVRNTVDTGRTVVCTIHQPSIDIFEAFDELFLMKRGGEEIYVGPLGHQSSELIKYFEGIKGVSRIKDGYNPATWMLEVSTISQEQALGVDFCDIYRKSELFQRNKALIQELSTPPPGSSELYFPTKYSLSFLNQCLACLWKMHLSYWRNPPYNAIRLFFTTVIALLFGTIFWDLGGKTGKSQDLFNAMGSMYSAVLFIGVLNSQSVQPVVSVERTVFYRERAAGMYSAFPYAFGQVAIEFPYTLVQSIIYGIIVYSMIGFKWTAAKFFWYLFFMFFTFLYFTFYGMMAVGLTPSYHVASIVSSAFYGIWNLFSGFIIPRPKVPIWWRWYCWICPVAWTLYGLVASQFGDIMTPMDDGTPVKIFVENYFDFKHSWLGVVAVVIVAFTMLFAFLFGFAIMKLNFQKR

SEQ ID NO: 1645 - protein, 1447 aa, Oryza sativa (japonica cultivar-group)
MQKVVSLRRGGGGSSSRGAASMWWSADNGVFSRSRASSSGEDGEDDEEALRWAALEKLPTYDRVRRAVLPVVEEGGGGGEAGKKVVDVLSLGPQERRALLERLVRVAEDDNERFLLKLKERIDRVGIDIPTIEVRFEHLEAEAEVRVGNSGLPTVLNSMTNKLEGAANALGILPNKKQTMPILHDVSGIVKPRRMTLLLGPPGSGKTTLLLALAGRLGKDIKFSGQVTYNGHQMEDFVPQRTAAYISQHDLHIGEMTVRETLSFSARCQGVGSRFDMLTELSRREKAANIKPDADIDAFMKASAMEGQETNLITDYILKILGLDICADTMVGDDMVRGISGGQRKRVTTGEMLVGPANALFMDEISTGLDSSTTFQIVKSLRQAIHILGGTAVISLLQPAPETYDLFDDIILLSDGQIVYQGPREGVLEFFELMGFKCPERKGVADFLQEVTSRKDQKQYWMQHDKPYRYVPVKDFASAFQSFHTGKSIANELATPFDKSKNHPAALTTSRYGVSAMELLKANIDREFLLMKRNSFVYIFRACQLMVVSAIAMTVFFRTKMHRDSVTDGVIFMGALFFSVMMIMFNGLSELPLTIFKLPVFFKQRDLLFFPAWTYTIPSWILKIPMSFIEVGGFVFMSYYVIGFDPSAGRFFKQYLLMLAINQMAAALFRFVGGAARNMIVANVFGSFMLLIFMVLGGFILVREKVKKWWIWGYWISPMMYAQNAISVNEFLGHSWDKVLNNSLSNETLGVQALRSRGVFPEAKWYWIGFGALLGFIMLFNGLFTLALTYLKQELKEKQANINGNVLDVDTMASSTNLAIVDNTETSSEIADNSQPTQRGMVLPFAPLSLTFDNIKYSVDMPQEMKAHGIVEDRLELLKGVSGSFRPGVLTALMGVSGAGKTTLMDVLAGRKTGGYIEGNITISGYPKKQETFARVSGYCEQNDIHSPQVTVSESLLFSAWLRLPKDVDSNTRKMFIEEVMELVELKPLRDALVGLPGVNGLSTEQRKRLTIAVELVANPSIIFMDEPTSGLDARAAAIVMRTVRNTVDTGRTVVCTIHQPSIDIFEAFDELFLMKRGGEEIYVGPLGHQSSELIKYFEGIKGVSRIKDGYNPATWMLEVSTISQEQALGVDFCDIYRKSELFQRNKALIQELSTPPPGSSELYFPTKYSLSFLNQCLACLWKMHLSYWRNPPYNAIRLFFTTVIALLFGTIFWDLGGKTGKSQDLFNAMGSMYSAVLFIGVLNSQSVQPVVSVERTVFYRERAAGMYSAFPYAFGQVAIEFPYTLVQSIIYGIIVYSMIGFKWTAAKFFWYLFFMFFTFLYFTFYGMMAVGLTPSYHVASIVSSAFYGIWNLFSGFIIPRPKVPIWWRWYCWICPVAWTLYGLVASQFGDIMTPMDDGTPVKIFVENYFDFKHSWLGVVAVVIVAFTMLFAFLFGFAIMKLNFQKR

SEQ ID NO: 1646 - protein, 1479 aa, Oryza sativa (japonica cultivar-group)
MSSAGVVEMQKAASFRREGGGSMASMWLSADGNGAFSRSSSSSSRRMRGEEDDEEALRWAALQKLPTYDRVRAAILPMVEGEGGEAGGGGGGRRVVVDVHSLGPHERRALLERLVRVADDDNERFLLKLKERISRVGIDMPTIEVRFEHLEVEAEVRVGNSGIPTVLNSITNKIEEAANALGILPTRKQTLRILHDISGIIKPKRMTLLLGPPGSGKTTFLLALAGRLKDLKFSGQVTYNGHQMEDFVPQRTAAYISQHDLHIGEMTVRETLSFSARCQGVGSRFDMLTELTRREKAANIKPDADVDAFMKASAMEGQESNLITDYILKILGLEICADTMVGDDMVRGISGGQRKRVTTGEMLVGPANAFFMDEISTGLDSSTTFQIVKSLRQTIHILGGTAVISLLQPAPETYDLFDDIILLSDGHIVYQGPRENVLEFFELMGFKCPERKGVADFLQEVTSRKDQKQYWAQHDKPYRYVPIKEFASAFQSFHTGRSIANELATPFDKSKSHPAALTTSRYGVSAMELLKANIDRELLLIKRNSFVYIFRTIQLMTVSAMAMTVFFRTKMHRDSVADGVIFMGALFFAVMMIMLNGLSELPLTIFKLPVFFKQRDLLFFPAWTYTIPSWILKSPMSFIEVGGFCFMSYYVIGFDPNVGRFFKQYLLMLAVSQMAAALFRFVGGAARNLIVANVFGSFMLLIFMVLGGFILARDKVNKWWIWGYWISPMMYAQNAVSVNEFLGHSWDKVLNNSLSNETLGVQALMSRGIFPEAKWYWIGFGALLGFIMLFNILFTLALTYLKPDGKSQPSISEEELKEKQANINGNVLDVDTMASSNNLAIVGSTGTGSEIADNSQPTQRGMVLPFTPLSLTFEDIKYSVDMPQEMKAHGIVEDRLELLKGVSGCFRPGVLTALMGVSGAGKTTLMDVLAGRKTGGYIEGNISISGYPKKQETFARVSGYCEQNDIHSPQVTVSESLLFSAWLRLPKDVDSNTRKMFIEEVMELVELKPLRDALVGLPGVNGLSIEQRKRLTIAVELVANPSIIFMDEPTSGLDARAAAIVMRTVRNTVNTGRTVVCTIHQPSIDIFEAFDELFLMKRGGEEIYVGPLGHHSSELIKYFEGIQGVSKITDGYNPATWMLEVTTVSQEQALDVDFCDIYRKSELFQRNKALIQELSTPPPGSSELYFPTQYSQSFLIQCLACLWKQHLSYWRNPPYNAIRLFFTTVIALIFGTIFWDLGGKMGQSQDLFNAMGSMYAAVLFIGVLNGQSVQPVVSVERTVFYRERAAGMYSALPYAFGQVAIEFPYTLVQSVIYSIIVYSMIGFQWTVAKFFWYLFFMFFTLLYFTFYGMMAVGLTPSYHVASIVSSAFYAIWNLFTGFVISRPLNSIFPGPCAQATPVWWRWYCWICPVAWTLYGLIVSQYGDIVTPMDDGIPVNVFVENYFDFKHSWLGFVAVVIVAFTMLFAFLFGFAIMKLNFQKR

SEQ ID NO: 1647 - protein, 1444 aa, Oryza sativa (japonica cultivar-group)
MDIVRMGSVASGGGSVRRTASSWRGTSGRSDAFGRSVREEDDEEALKWAAIEKLPTYDRMRKGILTAGGVEEVDIGGLGLQERRNLIERLVRTAEEDNERFLLKLRDRMERVGIDNPTIEVRFENLSIDAEAYVGNRGIPTFTNFFSNKIMDVLSAMRIVSSGKRPISILHDISGIIRPGRMSLLLGPPGSGKTSLLLALAGKLDSTLKVSGRVTYNGHDMDEFVPQRTSAYIGQHDLHIGEMTVRETLAFSARCQGVGTRYDMLTELSRREKEASIKPDPDIDVYMKAISVEGQESVVTDYILKILGLEICADTMVGDAMIRGISGGQKKRVTTGEMLVGPAKALFMDEISTGLDSSTTYQIVNSLRQSVHILGGTALIALLQPAPETYDLFDDIVLLSEGQIVYQGPRENILEFFEAMGFKCPERKGVADFLQEVTSRKDQHQYWCRRDEPYRYISVNDFSEAFKEFHVGRNLGSELRVPFDRTRNHPAALTTSRYGISKMELTKACFSREWLLMKRNSFVYIFKILQLIILGSIGMTVFLRTKMHRRSVEDGAIFLGAMFLGLVTHLFNGFAELAMSIAKLPIFYKQRDLLFYPSWAYALPTWVLKIPISFLECAVWICMTYYVMGFDPNIERFFRHYVLLVLISQMASGLFRLLAALGREMVVADTFGSFAQLILLVLGGFLISRENIKKWWIWGYWSSPLMYAQNAIAVNEFLGHSWNKVVDPTQSNDTLGVQVLKVRGIFVDANWYWIGVGALLGYIMLFNILFILFLEWLDPLGKGQAVVSEEELREKHVNRTGENVELLTLGTDSQNSPSDANAGRGEITGADTRKRGMVLPFTPLSITFDNIRYSVDMPQEMKDKGVTEDRLLLLKGVSGAFRPGVLTALMGVSGAGKTTLMDVLAGRKTGGYIEGDISISGYPKKQETFARIAGYCEQNDIHSPHVTVYESLLYSAWLRLPSEVDSEARKMFVEEVMELVELTSLRGALVGLPGVNGLSTEQRKRLTIAVELVANPSIIFMDEPTSGLDARAAAIVMRTVRNTVDTGRTVVCTIHQPSIDIFEAFDELFLMKRGGEEIYVGPLGHNSCHLINYFEGIQGVRKIKDGYNPATWMLEVTTLAQEDILGINFAEVYRNSDLYQRNKTLISELSTPPPGSTDLHFPTQFSQPFFTQCMACLWKQHKSYWRNPSYTATRIFFTTVIALIFGTIFLNLGKKINKRLDLFNSLGSMYAAVLFIGIQNGQTVQPIVDVERTVFYREKAAGMYSALPYAFAQVLIEIPHIFLQTVVYGLIVYSLIGFDWTVEKFFWYMFFMFFTFMYFTFYGMMAVAMTPNSDIAAIVSTAFYCIWNIFAGFLIPRPRIPIWWRWYSWACPVAWTLYGLVASQYGDITNSTLEDGEVVQDYIRRYFGFRHDYLGYVATAVVGFAALFAFVFAFSIKVFNFQRR

SEQ ID NO: 1648 - protein, 1468 aa, Oryza sativa (japonica cultivar-group)
MEFREEAGSVRKRAPRAFHQVEAEDPFRRAQSMRGHDEEEEDLRWAALEKLPTYDRMRRGVVRSALLRDGDDDHKDDDDAGTGKAVELVDIGRLATGDAARALVERLLQDDSERFLRRLRDRIDMYARYERNGKGISGEWGKQNQGGEGIGEEEKNNSGEMETQENLRMEIEENLNINMGGERGAVHGRIRDELSWQGNRSADLRMTLLLGPPSSGKSTLMRALTGKLDKNLKVFGNITYCGHKFSEFYPERTSAYVSQYDLHNAEMTVRETLDFSRWCLGIGSRYDMLTEISRRERNAGIKPDPEIDAFMKATAMQGQETNIITDLILKVLGLDICADTIVGDEMIRGISGGQMKRVTTGEMLTGPARALLMDEISTGLDSSSTFHIVKFIRHLVHIMNETVMISLLQPPPETYNLFDDIVLLSEGYIVYHGPRENILEFFEASGFRCPQRKAVADFLQEVTSKKDQQQYWFLDKEPYCYVSVPEFAERFKSFYIGQQMMKEQHIPFEKSKIHPAALTTMKNALSNWESLKAVLCREKLLMKRNSFLYIFKVTQLIILAFLSMTVFLRTKMPHGQFSDGTKFLGALTFNLITVMFNGLSELNLTVKKLPVFYKHRDFLFFPPWTFGVANILIKVPVSLVEATVWVVITYYVMGFAPAAGRFFRQFLAFFVTHLMAMALFRFLGAILQTMVIAISFGMLVLLIVFVFGGFVIRKNDIRPWWIWCYWASPMMYSQNAISINEFLASRWAIPNNDTTIDAKTVGEAILKSKGLFTGEWGFWLSIGALVGFIILFNTLYILALTYLSPIRSANALVIDEHNETELYTETRNEEHRSRTSTTTSSIPTSANGEGNRPTQSQFVLPFQPLSLCFNHLNYYVDMPSEMKQQGLMESRLQLLSDISGAFRPGLLTALVGVSGAGKTTLMDVLAGRKTSGTIEGSITLSGYSKKQETFARISGYCEQADIHSPNVTVYESILYSAWLRLPSDVDSNTRKMFVEEVMALVELDVLCNAMVGLPGVSGLSTEQRKRLTIAVELVANPSIIFMDEPTSGLDARAAAIVMRTVRNTVNTGRTVVCTIHQPSIDIFESFDELLLLKRGGRVIYAGELGDHSHKLVEYFETILGVPSITEGYNPATWMLEVSSTLEEARMNVDFAEIYANSLLYRKNQELIEELSIPPPGYRDLLFATKYSQSFYIQCVANLWKQYKSYWKNPSYNSLRYLTTFLYGLFFGTVFWQKGTKLDSQQDLYNLLGATYAAIFFIGATNCMSVQPVVSIERAVYYRESAAGMYSPLSYAFAQASVEFIYNIIQGILYTVIIYAMIGYDWKASKFFYFLFFIVSSFNYFTFFGMMLVACTPSALLANILITFALPLWNLFAGFLIFRKAIPIWWRWYYWANPVSWTIYGVIASQFGGNGGSISVPGGSHVAMSQILEDNVGVRHDFLGYVILAHFGFMAAFVLIFGYSIKFLNFQKR

SEQ ID NO: 1649 - protein, 1441 aa, Oryza sativa (japonica cultivar-group)
MEDKKQQQQQQREEAEAEEEAPVVPSSLRAAATCRSLSSLSSSLRWDHRGDDDEEEAELRWAAIERLPTLDRMRTSVLSSEAVDVRRLGAAQRRVLVERLVADIQRDNLRLLRKQRRRMERVGVRQPTVEVRWRNVRVEADCQVVSGKPLPTLLNTVLATARGLSRRPHARIPILNDVTGILKPSRLTLLLGPPGCGKTTLLLALAGKLDKNLKVTGEVEYNGANLNTFVPEKTSAYISQYDLHVPEMTVRETLDFSARFQGVGTRAEIMKEVIRREKEAGITPDPDIDTYMKAISVEGLERSMQTDYIMKIMGLDICADIIVGDIMRRGISGGEKKRLTTGEMIVGPSRALFMDEISTGLDSSTTFQIVSCLQQVAHISESTILVSLLQPAPETYDLFDDIILMAEGKIVYHGSKSCIMNFFESCGFKCPERKGAADFLQEVLSKKDQQQYWSRTEETYNFVTIDHFCEKFKASQVGQNLVEELANPFDKSEVYNNALSLNIYSLTKWDLLKACFAREILLMRRNAFIYITKVVQLGLLAVITGTVFLRTHMGVDRAHADYYMGSLFYALILLLVNGFPELAIAVSRLPVFYKQRDYYFYPAWAYAIPSFILKIPLSLVESITWTSISYYLIGYTPEASRFFCQLLILFLVHTGALSLFRCVASYCQTMVASSVGGTMSFLVILLFGGFIIPRLSMPNWLKWGFWISPLSYAEIGLTGNEFLAPRWLKTTTSGVTLGRRVLMDRGLDFSSYFYWISASALIGFILLLNVGYAIGLTIKKPTGTSRAIISRDKFSTFDRRGKDMSKDMDNRMPKLQVGNALAPNKTGTMVLPFSPLTISFQDVNYYVDTPVEMREQGYKERKLQLLHNITGAFQPGVLSALMGVTGAGKTTLLDVLAGRKTGGVIEGDIRVGGYPKIQQTFARISGYCEQTDVHSPQITVEESVAYSAWLRLPTEVDSKTRREFVDEVIQTIELDDIRDALVGLPGVSGLSTEQRKRLTIAVELVSNPSVIFMDEPTSGLDARAAAIVMRAVKNVADTGRTVVCTIHQPSIEIFEAFDELMLMKRGGELIYAGPLGLHSCNVIHYFETIPGVPKIKDNYNPSTWMLEVTCASMEAQLGVDFAQIYRESTMCKDKDALVKSLSKPALGTSDLHFPTRFPQKFREQLKACIWKQCLSYWRSPSYNLVRILFITISCIVFGVLFWQQGDINHINDQQGLFTILGCMYGTTLFTGINNCQSVIPFISIERSVVYRERFAGMYSPWAYSLAQVAMEIPYVLVQILLIMFIAYPMIGYAWTAAKFFWFMYTIACTLLYFLYFGMMIVSLTPNIQVASILASMFYTLQNLMSGFIVPAPQIPRWWIWLYYTSPLSWTLNVFFTTQFGDEHQKEISVFGETKSVAAFIKDYFGFRHDLLPLAAIILAMFPILFAILFGLSISKLNFQRR

SEQ ID NO: 1650 - protein, 1451 aa, Oryza sativa (japonica cultivar-group)
MAREIHKIASLRRESSLWRRGDDGVYFSRSSTGASSSRFRDEEDDEEALRWAALERLPTRDRVRRGILLQAAEGNGEKVEVDVGRMGARESRALIARLIRAADDDHALFLLKLKDRMDRVGIDYPTIEVRFEKLEVEAEVHVGNRGLPTLLNSIINTVQAIGNALHISPTRKQPMTVLHDVSGIIKPRRMTLLLGPPGSGKTTLLLALAGKLEDNLKVSGKVTYNGHGMDEFVPQRTAAYISQHDLHIGEMTVRETLAFSARCQGVGSRYDMLTELSRREKAENIKPDQDIDVYMKASAIGGQESSVVTEYILKILGLDICADTVVGNDMLRGVSGGQRKRVTTGEMLVGPARALFMDEISTGLDSSTTYQIVNSIGQTIRILGGTAVISLLQPAPETYNLFDDIILLSDGQIVYQGAREHVLEFFELMGFRCPQRKGVADFLQEVTSKKDQEQYWYRNDIPYSFVPVKQFADAFRSFHVGQSIQNELSEPFDRSRSHPASLATSKFGVSWMALLKANIDRELLLMKRNSFVYIFKAANLTLTAFLVMTTFLRTKMRHDTTYGTIYMGALYFALDTIMFNGFAELGMTVMKLPVFFKQRDLLFFPAWTYTIPSWILQIPVTFFEVGVYVFTTYYVVGFDPNVSRFFKQYLLLVALNQMSSSLFRFIAGIGRDMVVSQTFGPLSLLAFTALGGFILARPDVKKWWIWGYWISPLSYAQNAISTNEFLGRSWNKSFPGQNDTVGISILKSRGIFTEAKWYWIGFGALIGYTLLFNLLYTVALSFLKPLGDSYPSVPEDALKEKRANQTGEILDSCEEKKSRKKEQSQSVNQKHWNNTAESSQIRQGILPFAQLSLSFNDIKYSVDMPEAMTAQGVTEERLLLLKGVSGSFRPGVLTALMGVSGAGKTTLMDVLAGRKTGGYIEGDITISGYPKKQETFARISGYCEQNDIHSPHVTVYESLVFSAWMRLPSEVDSETRKMFIEEVMELVELTSLRGALVGLPGVNGLSTEQRKRLTVAVELVANPSIIFMDEPTSGLDARAAAIVMRTVRKTVDTGRTVVCTIHQPSIDIFEAFDELFLMKRGGEEIYVGPLGQNSSKLIEYFEGIEGISKIKDGYNPATWMLEVTSTTQEEMLGIDFSEIYKRSELYQRNKELIQDLSTPTPGSTDLHFPTQYSRSFFTQCIACLWKHKLSYWRNPSYTAVRLLFTIIIALLFGTMFWDLGRKTKKEQDLFNAVGSMYAAVLYIGIQNSGCVQPVVVVERTVFYRERAAGMYSGFPYAFGQVAIELPYILVQTLVYGVLVYSMIGFEWTVAKFIWYLFFMYFTLLYFTFFGMMAVGLTPNESIAAIISPAIYNAWNLFSGYLIPRPKIPVWWRWYCWICPVAWTLYGLVASQFGNIQTKLDGKDQTVAQFITEYYGFHHDLLWLVAVVHVVFTVMFAFLFSFAIMKFNFQRR

SEQ ID NO: 1651 - protein, 1336 aa, Oryza sativa (japonica cultivar-group)
MWAAEAAFARSGSWREEEDEQEALRWAALQRLPTVARARRGLLRSPAPGEDRVQGDDALCEVDVAGLSPGDRTALVDRLLADSGDVEDFFRRIRSRFDAVQIEFPKIEVRYEDLTVDAYVHVGSRALPTIPNFICNMTEAFLRHLRIYRGGRVKLPILDNVSGIIRPSRMTLLLGPPSSGKTTLLLALAGRLGPGLKVSGNITYNGHHLNEFVPQRTSAYVSQQDWHASEMTVRETLEFAGRCQGVGIKYDMLVELLRREKNEGIKPDEDLDVFMKALALEGKQTSLVAEYIMKVYGLDICADTIVGDEMIKGISGGQKKRLTTGELLVGSARVLFMDEISTGLDSATTYQIIKYLRHSTHALDGTTIISLLQPAPETYELFDDVILISEGQIVYQGPREYAVDFFAGMGFRCPERKNVADFLQEVLSKKDQQQYWCHYDYPYQYVSVSKFAEAFKTFVIGKRLHDELAVPYNRHRNHPAALSTSNYGVRRLELLKSNFQWQHLLMKRNSFIYVFKFIQLLLVALITMTVFFRSTMHRDSVDDGIIYLGALYFAIVMILFNGFTEVSLLVTKLPILYKHRDLHFYPPWAYTLPSWLLSIPTSLIESGMWVLVTYYVVGYDPQFTRCLGQFLLLFFLHQTSLALFRVMASLGRNMIVANTFGSFALLVVMILGGFIITKESIPAWWIWGYWISPMMYAQNAISVNEFLGHSWSQQFANQNITLGEAILTGYGLFKEKYWFWIGVGALFGYAIVLNFLFTLFLTLLNPIGNIQAVVSKDDIQHRAPRRKNGKLALELRSYLHSASLNGHNLKDQKGMVLPFQPLSMCFKNINYYVDVPAELKSQGIVEDRLQLLIDVTGAFRPGILTALVGVSGAGKTTLMDVLAGRKTGGLIEGSITISGYPKNQETFTRISGYCEQNDVHSPCLTVIESLLYSACLRLPSHVDVNTRRVFVEEVMELVELNALSGALVGLPGVNGLSTEQRKRLTIAVELVANPSIVFMDEPTSGLDARSAAIVMRTVRNIVNTGRTIVCTIHQPSIDIFESFDELLFMKRGGQLIYAGPLGSKSRNLVEFFEAIPGVPKIRDGYNPAAWMLEVTSTQMEQILGVDFAEYYRQSKLFQQTQEMVDILSRPRRESKELTFATKYSQPFFAQYAACLWKQNLSYWRNPQYTAVRFFYTVIISLMFGTICWKFGSRRETQHDIFNAMGAMYAAVLFIGITNATSVQPVISIERFVSYRERAAGMYSALPFAFSLVTVEFPYILVQSLIYGTIFYSLGSFEWTAVKFLWYLFFMYFTLLYFTFYGMMTTAITPNHTVAPIIAAPFYTLWNLFCGFMIPRK

SEQ ID NO: 1652 - protein, 1441 aa, Oryza sativa (japonica cultivar-group)
MAFAAGGIDHHVAVDVEGEEESRRRAVAEEADLLWAAFERLPSAKRRSHAVVLPDPDGLGGGDGGGRGEGQLVDVRKLDRPGLQRVLRHALATSELDNANLLHGIKARFDAVGLEVPRVEVRFQNLTVSTDVHVGRRALPTLVNYVHDIAERILISSHLLRPDKHKLVILDDVSGVIKPGRMTLLLGPPASGKSTLLLALADKLDSQLKKSGEVAYNGMALDQFCVQRTSAYISQTDNHIGELTVRETLDFAAKCQGASENWQECLKELVNLEKERGIRPSPEIDAFMKTASFRREKHNLVSDYVLRVLGLDICADTPVGSDMERGVSGGQKKRVTTGEMIIGPRKTLLMDEISTGLDSSTTFQIVNCMRNFVHEMEATVLMSLLQPAPETFELFDDLILLSEGKIIYQGPIKHVVDYFKSLGFSLPPRKGIADFLQEVTSKKDQAQYWSDQSKQHIFVSASEMAAVFKESQYGTYLEANLSSSCGNKDSALVLPRSKFAVPKFSLVRACFARELILISRNRFLYTFRTCQVAFVGIITSTLFLRTRLHPVDEQNGNLYLACLFFGLVHMMFNGFTEMTMTISRLPVFYKQRDNFFHPAWAFSLPNWILRIPYSFIEAVVWSCVVYYTVGFAPTVDRFFRFMLLLFSIHQMALGLFRMMGAIARDMTIASTFGSAVLLAIFLLGGFVVPKGFIKPWWDWAYWISPLMYAQRAVSVNEFSASRWSKVSVSGNMTVGTNILISHSLPTDDHWFWIGVGVLLAYSIFFNIMFTLALAFLNPLRKPQSMVPSDAGDGRDVHINTDSNKNTIGEIFENNDGFEGQTECKSKKGMILPFQPLTMTFHNVNYYVNMPKEMQAKGVPEKRLQLLSEVSGIFRPRVLTALVGASGSGKTTLMDVLAGRKTGGYIEGDIRISGHKKEQRTFARIAGYVEQNDIHSPQVTVEESLWFSSTLRLPNDISRETRHAFVEEVMALVELDQIRYALVGKQGLTGLSTEQRKRLTIAVELVANPSIIFMDEPTSGLDARAAAIVMRTVRNTVDTGRTVVCTIHQPSIDIFEAFDELLLMKRGGRVIYGGSLGVNSVDMINYFQGIPRVVPITEGYNPATWMLEVTTQASEERLGIDFATVYKNSYQFRNVENLIVELSIPASGTEPLKFSSEFSQNRLTQFMVCLRKQSLVYWRSPEYNVVRLFFTSVAAIIFGSIFWNVGMKRESTEDILLLMGALYAACLFLGVNNASSVQPVVSVERTVYYRERAANMYSSFPYAAAQVYHGLVEIPYIAVQTLIFGLITYFMVNYERNIRKLVLYLIYMFLTFTYFTFYGMVAVGLTPTQHMASVVSSAFYSLWNLLSGFLIPQSRIPGWWIWFYYICPVAWTLRGVITSQLGDVDTRIVGPGFDGTVHEFLQQNLGFEQGMTGATVAVLVAFSVFFFSIYAISIKMINFQRS

SEQ ID NO: 1653 - protein, 1441 aa, Oryza sativa (japonica cultivar-group)
MAFAAGGIDHHVAVDVEGEEESRRRAVAEEADLLWAAFERLPSAKRRSHAVVLPDPDGLGGGDGGGRGEGQLVDVRKLDRPGLQRVLRHALATSELDNANLLHGIKARFDAVGLEVPRVEVRFQNLTVSTDVHVGRRALPTLVNYVHDIAERILISSHLLRPDKHKLVILDDVSGVIKPGRMTLLLGPPASGKSTLLLALADKLDSQLKKSGEVAYNGMALDQFCVQRTSAYISQTDNHIGELTVRETLDFAAKCQGASENWQECLKELVNLEKERGIRPSPEIDAFMKTASFRREKHNLVSDYVLRVLGLDICADTPVGSDMERGVSGGQKKRVTTGEMIIGPRKTLLMDEISTGLDSSTTFQIVNCMRNFVHEMEATVLMSLLQPAPETFELFDDLILLSEGKIIYQGPIKHVVDYFKSLGFSLPPRKGIADFLQEVTSKKDQAQYWSDQSKQHIFVSASEMAAVFKESQYGTYLEANLSSSCGNKDSALVLPRSKFAVPKFSLVRACFARELILISRNRFLYTFRTCQVAFVGIITSTLFLRTRLHPVDEQNGNLYLACLFFGLVHMMFNGFTEMTMTISRLPVFYKQRDNFFHPAWAFSLPNWILRIPYSFIEAVVWSCVVYYTVGFAPTVDRFFRFMLLLFSIHQMALGLFRMMGAIARDMTIASTFGSAVLLAIFLLGGFVVPKGFIKPWWDWAYWISPLMYAQRAVSVNEFSASRWSKVSVSGNMTVGTNILISHSLPTDDHWFWIGVGVLLAYSIFFNIMFTLALAFLNPLRKPQSMVPSDAGDGRDVHINTDSNKNTIGEIFENNDGFEGQTECKSKKGMILPFQPLTMTFHNVNYYVNMPKEMQAKGVPEKRLQLLSEVSGIFRPRVLTALVGASGSGKTTLMDVLAGRKTGGYIEGDIRISGHKKEQRTFARIAGYVEQNDIHSPQVTVEESLWFSSTLRLPNDISRETRHAFVEEVMALVELDQIRYALVGKQGLTGLSTEQRKRLTIAVELVANPSIIFMDEPTSGLDARAAAIVMRTVRNTVDTGRTVVCTIHQPSIDIFEAFDELLLMKRGGRVIYGGSLGVNSVDMINYFQGIPRVVPITEGYNPATWMLEVTTQASEERLGIDFATVYKNSYQFRNVENLIVELSIPASGTEPLKFSSEFSQNRLTQFMVCLRKQSLVYWRSPEYNVVRLFFTSVAAIIFGSIFWNVGMKRESTEDILLLMGALYAACLFLGVNNASSVQPVVSVERTVYYRERAANMYSSFPYAAAQVYHGLVEIPYIAVQTLIFGLITYFMVNYERNIRKLVLYLIYMFLTFTYFTFYGMVAVGLTPTQHMASVVSSAFYSLWNLLSGFLIPQSRIPGWWIWFYYICPVAWTLRGVITSQLGDVDTRIVGPGFDGTVHEFLQQNLGFEQGMTGATVAVLVAFSVFFFSIYAISIKMINFQRR

SEQ ID NO: 1654 - protein, 1426 aa, Oryza sativa (japonica cultivar-group)
MAGEITPSGSRRSWLSSGAASLARSLRDGDDPFRRSAAASRRDAGDDEENLRWAALEKLPTYDRMRRGILRKAVDGGGDGEGAGSLFKADEVDIANLDPREGRELMERVFKAVEDDNERFLRRFRDRLDQVGIELPKIEVRYQHLDIEADVHVGKRALPTLLNATINTLEGLVSLFISSNKRKLKILNDVNGIIKPSRMTLLLGPPSSGKSTLMRALTGKPDKNLKVSGEITYCGHTFKEFYPERTSAYVSQHDLHNPEMTVRETLDFSRRCLGSGARYDMLSELTRRERNAGIKPDPEIDALMKATVVEGKQNNIVTDLVLKALGLDICADTIVGGAMIRGISGGQKKRVTTGEMLTGPATALFMDEISTGLDSSSTFQIVKYIRQVTHVMNATVMMSLLQPPPETYALFDDIVLIAEGYIVYHGPRENILEFFESAGFRCPERKGVADFLQEVTSRKDQQQYWFLEQDHYRYVSVEEFAQNFKKFHVGQKLQKELQVPYDKSKTHPAALTTKKYGLSSLESLKAVMSREWLLMKRNSFLFIFKAFQLFVLGFITMTLFLRTKMPHEKFSDTSKYVGALTASLITIMFNGFGELQLTIDKLPIFYKQRDFLFFPAWTYGLANIILKVPLSLMESSLWIVLTYYVVGFAPAAGRFFKQFLAYFWTHQMALALFRLLGAILRSMVVANTFGMFVLLLIFLFGGFLVSRKDIKPWWIWGYWTSPMMYSNNALSVNEFLASRWAIPNNDSSISAPTIGKAFLQSKGYFTGEWGYWLSIGAMIGFMIVFNILYLCALTFLRPIGSASTVVSDDDTKSELEAESNQEQMSEVINGTNGTENRRSQRGMVLPFQPLSLSFNHMNYYVDMPAEMKAQGFTESRLQLLSDISGAFRPGVLTALVGVSGAGKTTLMDVLAGRKTSGTIEGDIKLSGYPKKQETFARISGYCEQTDIHSPNLTVYESIVYSAWLRLSSEVDKNTRKVFVEEVMSLVELDVLRDALVGLPGVSGLSTEQRKRLTIAVELVANPSIIFMDEPTSGLDARAAAIVMRTLLLLKRGGRVIYAGQLGLHSQILVEYFEAIPGVPKITEGYNPATWMLEVSSSLAEARLDIDFAEVYANSALYRSNQELIKQLSVPPPGFQDLSFPTKYSQNFLNQCVANTWKQFQSYWKDPPYNAMRYVMTLLYGLVFGTVFWRRGKNIESVNDLNNLLGATYAAVFFLGAANLLTLLPVVSVERTVFYREKAAGMYSPLSYAFAQGFVEFCYSAVQGVLYTILIYSMIGYEWKADKFFYFLFFMIAAFAYFTLFSMMLVACTASEMLAAVLVSFVLSSWNNFAGFIIPRPLIPVWWRWFYWANPVSWTIYGVIASQFADSDRVVTVPGQSTTMVVKDFLEKNMGFKHDFLGYVVLAHFGYVIIFFFLFGYGIKCLNFQKR

SEQ ID NO: 1655 - protein, 1333 aa, Oryza sativa (japonica cultivar-group)
MAAAVELTGDGGTTAETRWLSPPLTHDDNRGFLQMLREKKERLGVGAAKVEVRLEKLTVEADVRVGRRAVPTLLNCAINAAQELAACAHMCTTRKKPMKIINEATGTIRPSRMTLLLGAPGSGKTTLLKALAGKLDSSLKMKGKVTYNGEEVNSSTPQYLHAYVSQYDLHHAEMTVRETIDFSSKMLGTNNEFGKTTSSVWRATTFGEGSNLTTNYIIKILGLSECADTLVGDEMRRGISGGQKKRATIGEMLVGLARCFFMDDISTGLDSSTTFEIMKFLQQMAHLMDLTMVISLLQPPPETLELFDDIILLCEGQIVYHGPRENATDFFETMGFKCPSRKNVADFLQEVTSKMDQKQYWIGNANKYQYHSIEKFAESFRTSYLPRLVENDHFESTNAGKSKEVKTSTSRMISSWNIFKACFSREVLLLKRNSPVHIFKTIQITVLALVISTLFLRTNMRHDTVLDANKYMGALFMAVVIVNFNGMTEIAMTIKRLPIFYKQREILALPGWALLSSVFLLSLPISFVETGLWTGLTYYVIGYAPSFVRFIQHFVVLFAMHQMSMSLYRFLAAIGRTQVMANMLGTAALIAIYILGGFVISKDNLQPWLRWGYWTSPFTYAQNAVALNEFLDDRWATEFHFANANTVGETILKVRGLLTEWHWYWICVSILFGFSLVFNILSIFALQYMRSPHKHQVNINATKVKVDYNSQIVGNGTASTDQVILPFQPLSLVFDHINYFVDMPKEMTKYGVTDKKLQLLQDVSGAFRPGVLTALMGITGAGKTTLLDVLAGRKTGGYIEGTVKIAGYPKKQETFSRISGYCEQSDIHSPNLTVYESLQFSAWLRLPSNVKSHQRNMFIDEVMDLVELTGLKNAMVGLAGATGLSAEQRKRLTIAVELVASPSIIFMDEPTTGLDARAAAIVMRTVRKTVDTGRTVVCTIHQPSIEIFESFDELLLMKRGGQLIYSGSLGPLSSNMIKYFEAIPGVPRIKEGQNPAAWMLDISSRTAEYEIGVDYAEIYQRSSLYWENRQLIDDLGKPEPNTEDLHFPPKYWQDFRAQCMACLWKQNCAYWKNSEHNVVRFINTFAVSIMFGIVFWKIGSTIKDEQDVFNILGVVYGSALFLGFMNCSILQPVVGMERVVLYREKAAGMYSTMAYAIAQVAVELPYMFVQVFIFSAIVYPMIGFQMTATKFFWFALYMVLSFLYYTLYGMMTVALTPNIEIAAGLSFLIFIFWNVFSGFIIGRQMIPVWWRWVYWANPAAWTVYGLMFSQLGDRTELIQVPGQPEQTVKEFLEGYLGLQDRYFNLVTSLHVAIIALFTFLFFLSIKHLKFQRR

SEQ ID NO: 1656 - protein, 1501 aa, Botryotinia fuckeliana
MATSAPFGVLPQSEAVAEKVEEVVQEKTYQNIDHKRKDSDSESSTLDSTREREDATIRTLARQITQKSMEGAYDHNINPFLGSNDPRLDPSSEKFSSRAWTKHLVHLQSRDPERYPNRTAGIAYKNLNAHGFGEPTDYQKTFGNYPLEIIGMSKRVLGLSKPTKIQILRDFDGLIRSGEMLVVLGRPGSGCSTLLKTISGETSGFFVDSNTYINYQGIPMETMHNDFRGECIYQAEVDVHFPQLTVAQTLGFAAKAKAPRNRIPGVTRDQYAEHLRDVTMATFGLSHTFNTKVGNDFIRGVSGGERKRVSIAEAAVGGSPLQCWDNSTRGLDSATALEFVKTLRNSTELSGSTAVVAIYQASQSIYDLFDKVAVLYEGRQIYFGDINAAKTFFVNLGFDCPARQTTADFLTSITSPAERIVRPGFEGRTPYTPDEFAAVWQKSEDRAQLLREIDQFDAEFPIGGQALDDFKNSRKAVQAKGQRIKSPYTISLPMQIRLCVERGFQRLRGDMSLLLTGLIGQSVMALIIGSVFYNLADDTNSLYSRGALLFFSILMAAFQSALEILTLYAQRPIVEKHTKYAFYHPVAEACASMLCDIPNKVFSTIFFDLALYFMTNLRREPGYFFVFFLFTFLCTLTMSMYFRSIASLSRSLSEAMAPAAIFILAIVTYTGFAVPIRDMHPWFRWINYLDPVSYGFEALMINEFHGRKIPCSVFVPSGGNYGNVGADERICSTTGAAAGADYVDGDRYLEVNYGYNHSHLWRNLGVMIAFMFLGLFIYLSASEFISAKKSKGEVLLFRRGRIPYVSKASDEEAKIDDRMTAATVTRTKTVPDAPPSIQKQTAIFHWDDVHYDIKIKGEPRKLLDGVDGWVKPGTLTALMGVSGAGKTTLLDVLASRVTMGVVTGQMLVDGRQRDIGFQRKTGYVQQQDLHLATSTVREALAFSAILRQPKATPHAEKIAYVDEVIKVLEMEEYADAIVGVPGEGLNVEQRKRLTIGVELAAKPALLLFLDEPTSGLDSQTAWSICALLRKLADNGQAILCTIHQPSAILFQEFDRLLFLARGGRTVYFGEIGEHSKVLTNYFERNGAHPCGDLANPAEWMLEVIGASPGASNTIDWPETWKNSPERQQVKSHLAELKTTLSQKQVEHDPTSLNSFAAGFGTQMQVVLVRVFQQYWRTPPYLYSKTALCLCVGLFLGFSFYDTKTSLQGMQNQLFAIFMLFTIFGNLVQQILPHFVTQRSLYEVRERPSKTYSWKVFILSNIIVELPWNTLMAVIIFVTWYYPIGLYRNAEMTNAVNERSGLMFAFIWMFLMFTSTFADFIIAGIDTAENAGNIANLMFSLCLIFCGVLASPTALPGFWIFMYRVSPFTYLVSGMMSTGLANTEVVCDSIEYLHFNPPSAKTCGEYLGPYMSAAGGYLNNPEAMTDCEFCSIKDTNVFLAGVNSYYSDVWRNWGLMWVYLAFNIAGAIGMYWLVRVPKGASQGEDNEEGAKKGWFSKKKADA

SEQ ID NO: 1657 - protein, 1448 aa, Botryotinia fuckeliana
MERLEHMSWRNKTPCMGLSWGTQHWTPTPQILTYINGLKCKFWHVQVFIWTQTNCTCRMMRLVDENGVIQRRAGIVFKNLKVCGSGSAINVQKNVGSLLMAPLRFKEFIGKGPEKTILNDFNGVLKSGEMLIVLGRPGSGCSTFLKSLMGELYGLDMKAQSEIHYNGITQKQMLKQFRGEIVYNQEVDKHFPHLTVGETLEFAASVRTPQQRLVEGTTRSAWAKHMTKVVMAIYGLSHTYNTKVGNDFVRGVSGGERKRVSIAEMALAGSPIASWDNATRGLDAATALEFTKSLRMTANLSGSCHLVAIYQASQQIYDQFDKAIVLYEGRQIYYGPCDQAKQYFEDMGWECPSRQTTGDFLTSITNPSERKARPGYENKVPRTPEEFEKYFKDSKIFQRMMSEMKSHEEEFPMGRKTLEQFKASRKGMQADHLRPESPYTVSIVMQTKLCARRAVQRLWNDKTSTITTIVGQIAMALIIGSIFYNTPSNTASFFQKGGVLFFAVLLNALIAISEINTLYSQRPIVEKQASYAFYHPFTEALAGVVVDIPVKFAIATCFNIILYFLSGLKREAGAFFVFFLFNFVAILTMSQIYRSIAAATKTISQALAIAGVATLAIVIYTGFVIPRPLMHPWFKWISWINPVAYAFEALFVNELHGKEFVCSTLVPTGPGYVQAGNNFVCAVAGSVVGATTVSGDDYLQAQFQYSYSHIWRNLGFLFAFMIFFLAFYLLATEFNASTDSKAEVLVFRRGHVPTNLLAAEKAAKNDEEAHAGNGSAVKEGNSDKQGDEVQALAPQTDIFTWKDVCYDIKIKNEPRRLLDNVSGWVKPGTLTALMGVSGAGKTTLLDVLAQRVSMGVITGDMLVSGKPLDASFQRKTGYVQQQDLHLETTTVREALRFSAMLRQPKTVSKKEKYDFVEEVIKMLNMEEFSEAVVGVPGEGLNVEQRKLLTIGVELAAKPALLLFLDEPTSGLDSQSSWAIVSFLRKLADNGQAVLATIHQPSAILFQEFDRLLFLAKGGRTVYFGDIGHNSETLLNYFESHGAAKCGEDENPAEYMLTMVGAGAQGKSTQDWHEVWKASDEAKGIQTEISRIQQEMGHQPSQDDSNSHGEFAMPFTVQLLEVMKRVFQQYWRTPGYVYSKLVLGVASALFIGFSFFHADASQQGLQDVIFSIFMITTIFTTLVQQIMPRFILQRDLYEVRERPSKAYSWKAFIIANIAVEIPYQIILGIMVFASYFYPIYTKNGIPPSGRQGLILLLLIQFFVFASTFAHMLISALPDAETAGNIATLMFSLTLTFNGVFQPPQALPGFWIFMYRVSPLTYLVSAIASTGLSGRQVICSDNELAVMQPPAGDTCGSYLQSYATAAGGSIYNPEAMADCQYCSSSNADQFLSSVAISYTTRWRDYGIVFVYIFFNIFMAVLLYYLIRVRKSSGKSLKEKFGALGALFKKN

SEQ ID NO: 1658 - protein, 1436 aa, Nicotiana plumbaginifolia
MEPADLSNLRGRSLRASIRGSMRGSIRENSNSIWRNNGAEVFSRSARDEDDEEALKWAALEKLPTYDRLRKGILFGSQGAAAEVDVDDSGVLERKNLLERLVKVADEDNEKFLLKLKNRIDRVGIDFPSIEVRFEHLNIDADAYVGSRALPTFTNFISNFVEGLLDSIHILPSKKRQVTILKDVSGIVKPCRMTLLLGPPGSGKTTLLLALAGKLDSALKVTGKVTYNGHELHEFVPQRTAAYISQHDLHIGEMTVRETLEFSARCQGVGSRYEMLAELSRREKAANIKPDADIDMFMKAASTEGQEAKVVTDYILKILGLDICADTMVGDQMIRGISGGQKKRVTTGEMIVGPSKALFMDEISTGLDSSTTYSIVNSLKQSVRIMKGTALISLLQPAPETYNLFDDIILLSDGYIVYEGPREEVLEFFESMGFKCPERKGAADFLQEVTSKKDQQQYWIRRDEPYRFITSKEFAEAYQSFHVGRKVSDELKTTFDKSKSHPAALTTQKYGIGKRQLLKVCTERELLLMQRNSFVYLFKFFQLLIIALMTMTIFFRTKMPRDSAEDGGIYSGALFFVVIMIMFNGLSELPMTLYKLPVFYKQRDFLFYPSWAYAIPSWILKIPVTFAEVGMWVFLTYYVMGFDPNVGRFFKQFLLLLLVNQMASALFRFIAAVGRTMGVASTFGAFALLLQFALGGFILARNDVKDWWIWGYWTSPLMYSVNAILVNEFDGQKWKHIVAGGTEPLGAAVVRARGFFPDAYWYWIGVGALAGFIVMFNIAYSVALAYLNPFDKPQATISDESENNESESSPQITSTQEGDSASENKKKGMVLPFDPHSITFDEVVYSVDMPPEMRESGTSDNRLVLLKSVSGAFRPGVLTALMGVSGAGKTTLMDVLAGRKTGGYIDGSIKISGYPKKQDTFARISGYCEQNDIHSPYVTVFESLVYSAWLRLPQDVNEEKRMMFVEEVMDLVELTPLRSALVGLPGVNGLSTEQRKRLTIAVELVANPSIIFMDEPTSGLDARAAAIVMRAVRNTVDTGRTVVCTIHQPSIDIFEAFDELFLMKRGGQEIYVGPLGRQSCHLIKYFESIPGVSKIVEGYNPATWMLEVTASSQEMALGVDFTDLYKKSDLYRRNKALIDELSVPRPGTSDLHFDSEFSQPFWTQCMACLWKQHWSYWRNPAYTAVRLIFTTFIALIFGTMFWDIGTKVSRNQDLVNAMGSMYAAVLFLGVQNSSSVQPVVSVERTVFYREKAAGMYSAIPYAFAQVLIEIPYIFVQATVYGLIVYSMIGFEWTVAKFFWDFFFMFFTFLYFTFFGMMTVAVTPNQNVASIVAGFFYTVWNLFSGFIVPRPRIPIWWRWYYWGCPIAWTLYGLVASQFGDLQDPLTDQNQTVEQFLRSNFGFKHDFLGVVAAVIVAFAVVFAFTFALGIKAFNFQRR

SEQ ID NO: 1659 - protein, 1434 aa, Nicotiana tabacum
MEPANLSNLRGSSLRGSTRGSLRANSNSIWRNNGVEIFSRSSRDEDDEEALKWAALEKLPTFDRLRKGLLFGSQGAAAEVDINDLGFQERKNLLERLVKVADEDNEKFLLKLKNRIDRVGIDLPTIEVRYEHLNIDADAYVGSRSLPTFMNFMTNFVETLLNSLHILSSRKRQLTILKDISGIIKPCRMTLLLGPPSSGKTTLLLALAGKLDPALKVTGKVSYNGHELHEFVPQRTAAYISQHDLHIGEMTVRETLEFSARCQGVGSRFEMLAELSRREKAANIKPDADIDIYMKAAATEGQEANVVTDYVLKILGLDICADTMVGDDMIRGISGGQKKRVTTGEMLVGPSKALFMDEISTGLDSSTTYSIVNSLRQSVQILKGTAVISLLQPAPETYNLFDDIILLSDGYIVYQGPRDDVLEFFESMGFKCPQRKGVADFLQEVTSKKDQQQYWSKRNEPYRFITSKEFAEAYQSFHVGRKLGDELATPFDKTKCHPAALTNEKYGIGKKELLKVCTERELLLMKRNSFVYMFKFSQLTIMALITMTLFFRTEMPRDTTDDGGIYAGALFFVVIMIMFNGMSELAMTIFKLPVFYKQRDLLFFPSWAYAIPSWILKIPVTLVEVGLWVILTYYVIGFDPNITRFLKQFLLLIVVNQMASGMFRFIGAVGRTMGVASTFGSFALLLQFALGGFVLSRDDVKSWWIWGYWISPMMYSVNSILVNEFDGKKWNHIVPGGNETLGSTVVKSRGFFPEAYWYWIGVGALVGFTVVFNFCYSLALAYLNPFDKPQAVLPEDGENAENGEVSSQIPSTDGGDSISESQNNKKGMVLPFEPHSITFDDVVYSVDMPQEMKEQGAGEDRLVLLKGVSGAFRPGVLTALMGVSGAGKTTLMDVLAGRKTGGYIDGEIKISGYPKKQETFARISGYCEQNDIHSPYVTVYESLVYSAWLRLPQDVDEKTRKMFVDEVMELVELGPLRSALVGLPGVNGLSTEQRKRLTIAVELVANPSIIFMDEPTSGLDARAAAIVMRTVRNTVDTGRTVVCTIHQPSIDIFEAFDELFLMKRGGQEIYVGPLGRHSCHLIKYFESNPGVAKIKEGYNPATWMLEVTASAQEMMLGIDFTEVYKNSDLYRRNKALISELGVPRPGSKDLHFETQYSQSFWTQCVACLWKQHWSYWRNPAYTAVRFIFTTFIALIFGTMFWDLGTKVSKSQDLLNAMGSMYAAVLFLGVQNASSVQPVVAIERTVFYRERAAGMYSAIPYAFGQVSIEIPYIFVQSVFYGIIVYAMIGFEWDVGKFFWYLFIMFFTLLYFTFYGMMGVAVTPNQNVASIVAAFFYGVWNLFSGFIIPRPRMPVWWRWYYWANPVAWTLYGLVASQFGDIQTKLSDNETVEQFLRRYFGFKHDFLGVVAAVLTAYVFMFAFTFAFAIKAFNFQRR

SEQ ID NO: 1660 - protein, 155 aa, Solanum tuberosum
TTLMDVLAGRKTDGYIEGTISIPGYPKQQETFARIAGYCEQTDIHSPHVTVYESLLYSAWLRLPREVDTETQKSFIEEVMELVELTPLREALVGLPGVNGLSTEQRKRLTVAVELVANPSIIFMDEPTSGLDARAAAIVMRTVRNTVDTGRTVVC

SEQ ID NO: 1661 - protein, 155 aa, Solanum tuberosum
TTLMDVLAGRKTGGYIDGSIKISGYPKKQETFARISGYCEQNDIHSPYVTVYESLVYSAWLRLPQDVDEHKRMMFVEEVMDLVELTPLRSALVGLPGVNGLSTEQRKRLTIAVELVANPSIIFMDEPTSGLDARAAAIVMRAVRNTVDTGRTVVC

SEQ ID NO: 1662 - protein, 155 aa, Solanum tuberosum
  unsure (1)..(155): unsure at all Xaa locations
TTLMDVLAGRKTGGHITGNIYISGHPEKQETFARVSGYCEQNDVHSPCLTIHESLLFSAWLRLSSQVDVKTQKAFVEEVMELVELTSLRRALVGLPGVDGLSQSKGKRLTIAVELVANPSIVFMDEPTSGLDARSAAIVLITXKNIVYTGRTILC

SEQ ID NO: 1663 - protein, 155 aa, Solanum tuberosum
TTFLDVLAGRKTSVHVEGEIKVGGYLKVQETFARVSGYCEQTDIHSPQITVEESVIFSAWLRLHPQIDSKTKYEFVKEVLETIELDGIKDTMVGMPGVSGLSTEQRKRLTIAVELVANPSIIFMDEPTTGLDARSAAIVMRAVKNVADTGRTIVC

SEQ ID NO: 1664 - protein, 1501 aa, Candida dubliniensis
MSDSKMSSQDESKLERATSQDSSSENHSINEYHGFDAHTSENIQNLARTFTHDSFKDDSSAGLLKYLTHMSEVPGVNPYEQEEINNEQLDPDSENFNAKFWVKNLRKLFESDPEYYKPSKLGIGYKNLRAYGVANDSDYQPTVTNALWKLATEGLRHFQKDDESRYFDILKSVDAIMRPGELTVVLGRPGAGCSTLLKTIAVNTYGFHIGKESQITYDGLSPKDIEHHYRGDVIYSAETDVHFPHLSVGDTLEFAARLRTPQNRGEGIDRETYAKHMASVYMATYGLSHTRNTNVGNDFVRGVSGGERKRVSIAEASLSGANIQCWDNATRGLDSATALEFIRALKTSAVILDTTPLIAIYQCSQDAYDLFDKVVVLYEGYQIFFGKATKAKEYFEKMGWKCPQRQTTADFLTSLTNPAEREPLPGYEDKVPRTPQEFEAYWKNSPEYAELIQEIDEYFVECEKSNTRETYRESHVAKQSNNTRPASPYTVSFFMQVRYGVARNFLRMKGDPSIPIFSVFGQLVMGLILSSVFYNLNQTTGSFYYRGASMFFAVLFNAFSSLLEIMSLFEARPIVEKHKKYALYRPSADALASIISELPVKLAMSMSFNFVFYFMVNFRRNPGRFFFYWLMCVWCTFVMSHLFRSIGAVSTSIAGAMTPATVLLLAMVIYTGFVIPTPSMLGWSRWINYINPVGYVFEALMVNEFHGREFQCAQYVPSGPGFENVSRSNQVCTAVGSIPGNEMVSGTNYLAGAYQYYNSHKWRNLGITIGFAVFFLAIYIALTEFNKGAMQKGEIVLFLKGSLKKHKRKTAAAKKGDIEAGPVSGKLDYQDEAEAVSNEKFTEKGSTGSVDFPENREIFFWKDLTYQVKIKKEDRVILDHVDGWVKPGQITALMGASGAGKTTLLNCLSERVTTGVITDGERLVNGHALDSSFQRSIGYVQQQDVHLPTSTVREALQFSAYLRQSNKIPKKEKDDYVDYVIDLLEMTDYADALVGVAGEGLNVEQRKRLTIGVELVAKPKLLLFLDEPTSGLDSQTAWSICKLMRKLADHGQAILCTIHQPSALIMAEFDRLLFLQKGGRTAYFGELGENCQTMINYFEKYGADPCPKEANPAEWMLQVVGAAPGSHAKQDYFEVWRNSSEYQAVRDEISRMEVELSKLPRDNDPEALLKYAAPLWKQYLLVSWRTIVQDWRSPGYIYSKIFLVVSAALFNGFSFFKAKNNMQGLQNQMFSVFMFFIPFNTLVQQMLPYFVKQRDVYEVREAPSRTFSWFAFIAGQITSEIPYQVVVGTIAFFCWYYPLGLYSNATPTDSVNPRGVLMWMLVTSFYVYTSTMGQLCMSFSELADNAANLATLLFTMCLNFCGVLAGPSVLPGFWIFMYRCNPFTYLIQAMLSTGLANTFVRCADREYVSVQPPNGQTCSSYLDPYIKMAGGYFETNNDGSCSFCQMSSTNTFLKSINSLYSERWRNFGIFIAFIAINIILTVLFYWLARVPKGNREKKNKK

SEQ ID NO: 1665 - protein, 1500 aa, Candida dubliniensis
MSTTSNTSLSQQLDEKPWVDVSDDSSVQEYQGFDATASHNIQDLARKLTHDSTKGDHHAANNLARYLSHMSDIPGVSPFNGNINHEQLDPDSENFNAKYWVKNLKKLFDSDSEYYKPSKLGVAYRNLRAFGVANDSDYQPTVTNALWKFTTEAINKLKKPDDSKYSDILKSMDAIMRPGELTVVLGRPGAGCSTLSKTISANTYGFNIGKESHITYDGLTPKDIESNYRGDVIYSAETDYHFPHLSVGDTLEFAARLRTPQNRGEGIDRETYAKHMANVYMATYGLSHTRNTKVGNDFVRGVSGGERKRVSIAEASLSGANIQCWDNATRGLDSATALEFIRALKTSAVILDTTPLIAIYQCSQDAYDLFDNVVVLYEGHQIFFGRASKAKEYFEKMGWKCPQRQTTADFLTSLTNPAEREPLPGYEDKAPRTAQEFEVYWKNSPEYAALVGEIDNHLIECEKSNTKSYYHETHVAKQSNNTRPSSPYTVSFFMQVRYVMARNFLRMKGDPSIPLVSILTQLVMGLILASVFFNLRKSTDTFYFRGGALFFSVLFNAFSSLLEILSLYEARPIVEKHRKYALYRPSADALASIISELPVKLLMTMSFNIVYYFMVNLRRTPGNFFFYWLMCALCTLVMSHLFRSIGAVTTTIATAMSISTVFLLAMIIYAGFVLPIPYILGWSKWIRYINPVTYIFESLMVNEFHGREFKCGQYIPSGPGYESLSVENKVCTTVGSTPGSTVVQGTEYIKLAYQFYSSHKWRNFGITVAFAVFFLGVYVALTEFNKGAMQKGEIVLFLRGSLKKHKRKTAASNKGDIEAGPVSGKLDYQDEAEAVSNEKFTEKGSTGSVDFPENREIFFWKDLTYQVKIKKEDRVILDHVDGWVKPGQITALMGASGAGKTTLLNCLSERVTTGVITDGERLVNGHALDSSFQRSIGYVQQQDVHLETTTVREALQFSAYLRQSKKISKKEKDDYVDYVIDLLEMTDYADALVGVAGEGLNVEQRKRLTIGVELVAKPKLLLFLDEPTSGLDSQTAWSICKLMRKLADHGQAILCTIHQPSALIMAEFDRLLFLQKGGRTAYFGELGENCQTMINYFEKYGADPCPEEANPAEWMLQVVGAAPGSHSKQDYFEVWRNSSEYQAVKDEISRMEVELSKLPRDNDPEALLKYAAPLWKQYLLVSWRTIVQDWRSPGYIYSKIFLVVSSSLFIGFSFFKSKNNLQGLQSQMLAVFMFFIPFTTFIDQMLPYFVKHRAVYEVREAPSRTFSWFAFIAGQITSEIPFQIVVGTISYFCWYYPVGLYANAEPTDSVNSRGVLMWMLLTAFYVYTSTMGQLAISFNELIDNAASLATTLFTLCLMFCGVLAGPDVIPGFWIFMYRCNPFTYLIQAILSTGLANAKVTCAPRELVTLKPPMGETCSSFIGPYTKAAGGYFSTNSDGTCSVCRIDSTNQFLESINAMFSQRWRNFGIFVAFIAINIILTIFFYWLAKVPKGNREKKMKK

SEQ ID NO: 1666 - protein, 755 aa, Candida dubliniensis
MSDSKMSSQDESKLERATSQDSSSENHSINEYHGFDAHTSENIQNLARTFTHDSFKDDSSAGLLKYLTRMSEVPGVNPYEQEEINNEQLDPDSENFNAKFWVKNLRKLFESDPEYYKPSKLGIGYKNLRAYGVANDSDYQPTVTNALWKLATEGLRHFQKDDESRYFDILKSMDAIMRPGELTVVLGRPGAGCSTLLKTIAVNTYGFHIGKESQITYDGLSPKDIEHHYRGDVIYSAETDVHFPHLSVGDTLEFAARLRTPQNRGEGIDRETYAKHMASVYMATYGLSHTRNTNVGNDFVRGVSGGERKRVSIAEASLSGANIQCWDNATRGLDSATALEFIRALKTSAVILDTTPLIAIYQCSQDAYDLFDKVVVLYEGYQIFFGKATKAKEYFEKMGWKCPQRQTTADFLTSLTNPAEREPLPGYEDKVPRTPQEFEAYWKNSPEYAELIQEIDEYFVECEKSNTRETYRESHVAKQSNNTRPASPYTVSFFMQVRYGVARNFLRMKGDPSIPIFSVFGQLVMGLILSSVFYNLNQTTGSFYYRGASMFFAVLFNAFSSLLEIMSLFEARPIVEKHKKYALYRPSADALASIISELPVKLAMSMSFNFVFYFMVNFRRNPGRFFFYWLMCVWCTFVMSHLFRSIGAVSTSIAGAMTPATVLLLAMVIYTGFVIPTPSMLGWSRWINYINPVGYVFEALMVNEFHGREFQCAQYVPSGPGFENVSRSNQVCTAVGSIPGNEMVSGTNYLAGAYQ

SEQ ID NO: 1667 - protein, 1439 aa, Dictyostelium discoideum
MEENSNKFEQELKEIGQDRNQFPHISVEESLQEFDSFSNKIENESKQFGAQKDPESYMAGGETEEDFKLRKYFENSERMHLENGGNEKKMGVSIRNLTVVGLGADASVIADMSTPFFSILNFFKPSFWTKKTSTFDILHDVTTFCKDGEMVLVLGRPGAGCSTLLRVIANQTASYVSVKGDVRYGGIPSKEFERYRAESIYTPEEDSHHPTLTVRETLDFALKCKTPGNRLPDETKRSFREKVFNLLLSMFGIVHQADTIVGNEYVRGLSGGERKRLTITEAMVSSASITCWDCSTRGLDAASAFDYAKSIRIMSDTLHKTTIASFYQASDSIYNVFDKVCVLEKGRCIYFGPVGMAKQYFMSLGFDCEPRKSTPDFLTGVTNPQERIIKKGFEGRTPETSADFEAAWKNSDIYRDQLQEQKEYEELIERTQPKVAFVQEVKDENSKTNFKKSQYTTSFITQVVALTKRNFQLILNDKFGLFTKYLSVLIQAFVYSSVFYNMASDINGLFTRGGAILSAVIFNAFLSVGEMSMTFIGRRVLQKHKSYALYRPSALHIAQVVNDIPFTLLQVFLFSIIAYFMFGLEYDGGKFFIFSFTLVGASLACTALFRCFGYLCPSMYIAQNISNVFIIFMLTYSGYTVPIPKMHPWFSWFRHINIFTYAFKAIMANEFEGKEFNCLESAIPYGPAYQGSEFDAYRICPLGGIEQGSLYFKGEFYMDKTLRFKEGEMSQNVIIVYCWWIFFVICNMLAMEYIDHTSGGYTHKVYKKGKAPKMNDVEEEKQQNAIVANATNNMKDTLHMDGGIFTWQNIRYTVKVPGGERLLLNNIEGWIKPGQMTALMGSSGAGKTTLLDVLAKRKTLGVVEGDSHLNGRELEIDFERITGYVEQMDVHNPGLTVREALRFSAKLRQEPEVSLEEKFKYVEHVLEMMEMKHLGDALIGTLETGVGISVEERKRLTIGVELVAKPQILFLDEPTSGLDAQSSYNIIKFIRKLADAGMPLVCTIHQPSSVLFEHFDRILLLAKGGKTVYFGDIGEKSKTLTSYFERHGVRPCTESENPAEYILEATGAGVHGKSDVNWPETWKQSPELADISRELAALKEQGAQQYKIRSDGPAREFSQSTWYQTKEVYKRLNLIWWRDPYYTYGSFVQSALCGLIIGFTFWNLQGSSSDMNQRIFFIFEALMLGILLIFVVMPQLISQREYFKRDFASKFYSWFPFAISIVVVELPFIVISGTIFFFCSFWTAGLDKTSDSEQTFYFWFIFVIFLVFCVSFGQAVAAVCINMFFAMTLIPLLIVFLFLFSGVMTPPSSIPTFWRGWVYHLNPCRYFMEGIVTNILKTVDVKCSYEDMITFTFPKSYNTCQNYTSAFQSYGPSGYVESSILNGEPACSYCIYKNGEQYYKTLGWSDDNRWRNVGIIICFFVFNILMVILFVYLTRKGSR

SEQ ID NO: 1668 - protein, 1475 aa, Dictyostelium discoideum
MDSNENKKNGGDSLKLNIINNNNDNNNNNDNNNNSTEEHIESVEQSIKEFNNVANELETEFRDYLVETHKNDVNNIKNDIEAPPSGEFEPGGGAEDEDFKLRNYFKQSKVDAIQNGGKLKKMGVSFKNLTVIGKGADQSVVSDLATPFTFLISKLNVKNWFKKSKPSTFDILHDVSGFCKDGEMLLVLGRPGSGCSSLLRTISNQTGSYVDVLGSVTYGGIDQKKWDKYKAECIYVPEEDTHYPTLTVRETLEFALKCKTPSNRLPNEKKRTFRSKIFNLLLGMFGMVHQAETMVGNEFVRGLSGGERKRITIAESMVSASSINCYDCSTRGLDAASALDYAKSIRIMSDTLHKTTIASFYQASDSIYNLFDRVLILEKGRCVYFGPVGLAKQYFIDMGFECEPRKSTPDFLTGVTNPQERKVRPGFTVPESSAEFEEAWKQSEIYAQSCQEQREYEKLIEIEQPSIDFIQEITEQKSKSTSKSSPYTTGFFVQVIALTIRNFQIIWGDKFSLISRYSSVLVQAPIYGSVFFAMSNSIDGAFTRGGAIFSSILFNALLSEQELSITFTGRRILQKHKTYAMYRPAALHFAQIITEIPIIMIQVFLFSIVTYFMFGLDSSGSKFFINCFTLIGFTLATNNLYRLAGNLTPSVYIGQNIMNVLFLTMMTFTSYIIPYHQMPVWFGWYHYCNPFSFAFRALMGNEFNGLKFDCIEDAIPKGEFYQNETFTPYRSCATTAAEPGQLYFTGERYLEKSFGWEIKPSTQGFIAYNICIVYGFWILFIICNCIVLNIIDWTSGGFTCKVYLKGKAPKMNDVENEKQQNLLVQQATNNMKESLSMPGGLFTWQHMYYSVPIGGNTMKLLLDDIQGWIKPGQMTALMGSSGAGKTTLLDVLAKRKTTGQVQGTTLLNGKPLEIDFERITGYVEQMDVLNPALTVRETLRFSAKLRGEPTISLEEKFKYVEQVLEMMEMKHLGDALIGDLETGVGISVEERKRTTIGVELVAKPHILFLDEPTSGLDAQSSYNIIKFIRKLADAGMPLVCTIHQPSSVLFEHFDRILLLAKGGKTVYFGDIGEKSKTLTSYFQRHGVRECSDSENPAEYILEACGAGRHGKSVVDWPQAWKESPEYQSICQELKELQVTGSSYASIHVDNGKPREYATSLTYQTIEVYKRLNLIWWRSPGYSYGTFIQSALVGLINGWTFYNLQDSANDMNQRIFFIFNVTMLGILLMFLVLPQFITQQDYFKRDYASKFYHWLPFALSIIVVELPFVLVSGTIFFFCSFWTAGLNSDASTNFFFWLIFMLFLFYCVGFGQAIGAVCINITVALNLLPVLIIFLFLFCGVLVIPDQIPHFWKWVYHLNPCTHFLEAMVTNVLKHVNVVCTTDDLIKFVKPSSFSTCSDYAFEFLNGSNHSVSGSVQSLGGDNCGYCLYKNGEEYYSKLGWSYDNRWRGFGIIAGYFVLNIFLVVLFVFLTRKGKR

SEQ ID NO: 1669 - protein, 1449 aa, Dictyostelium discoideum
MEEYELREIALQEGGSNLDINTPPNYDNPVGDGSSPPDSPDIQKSENQFKNVERELEIDSKQYLAGHDAENNHDENDEDFKLRRYFENSQRMALGNGQKPKKMGVSIRNLTVVGRGADQSVIADMSTPFISFFNLFKPSTWKEKGSTFDILHDITLFNRDGGMLLVLGRPGSGCSTLLRLISNQRGSYVEVKGDIKYGGIPAKEWKRYQGESIYTPEEDTHHPTLTVRQTLDFALKCKTIHNRLPDEKKRTYRQKIFDLLLGMFGIVHQADTIVGNEFIRGLSGGERKRLTITEAMVSSASITCYDCSTRGLDAASALDYAKSIRIMSDTLDKTTIASFYQASDSIYNLFDNVAIIEKGRLIYFGPGNKAKQYFIDLGFDCEPRKSTPDFLTGVTNPQERIIRQGFEGRVPETSADFEAAWRNSSMYRDMLEEQKEYERKIEIEQPAVDFIQEVKAEKSRTTPKRSIYTTSYITQVKALIVRNSQIIWGDKFSLISRYLSVFTQSFVYGSIFFQMEKTIPGLFTRGGAIFSAILFNAFLSEAELPLTMYGRRILQKQRSYAMYRPSALHIAQIVTDIPLTMIQVFLFSIVVYFMFGLQYNAGKFFIFCFTLVGATLATTNLFRVFGNFSPSLYISQNVMNVILIFMITYCGYTIPKPKMHPWFAWFYWANPFSYAFKALMANEFGDLSFDCHDTAIPFDPKNPTRYDNDYRVCASPGAVEGILSVEGKDYLDQYLHFRSDDLTQNVFITYLWWVLFTAMNMFAMEYFDWTGGGYSHKVYKKGKAPKMNDAEEEKKQNQIVANATSKMKDTLKMRGGIFTWQNINYTVPVKGGKRLLLDNVEGWIKPGQMTALMGSSGAGKTTLLDVLAKRKTMGEVQGKCFLNGKPLEIDFERITGYVEQMDVHNPGLTVREALRFSAKLRQEPSVSLEEKFDYVEHVLEMMEMKHLGDALIGTLETGVGISVEERKRLTIGVELVAKPHILFLDEPTSGLDAQSSYNIVKFIRKLADAGMPLVCTIHQPSSVLFEHFDRILLLAKGGKTVYFGDIGERSKTLTSYFERYGVRPCTESENPAEYILEATGAGVHGKSDVNWPETWKQSPELQEIERELAALEAAGPSSTEDHGKPREFATSVWYQTIEVYKRLNLIWWRDPFYTYGSFIQSALAGLIIGFTFWSLQGSSSDMNQRVFFIFEALILGILLIFVVLPQFIMQKEYFKRDFASKFYSWFPFAISIVVVELPFITVSGTIFFFCSFWTAGLNTEYNDINFYFWFIFILFLYFCVSFGQAVAAICFNMFLAHTLIPLLIVFLFLFCGVMVIPSSIPTFWRGWVYHLNPCRYFMEGIVTNVLKHTDVKCTSEDFTHFTNPEAVNGVTCKQYFPISEPLTGYVEAINEGDESKCGYCLYNNGEEYYNTLGWSFDNRWRNLALIICFWIFNTLMVITFVYITRKPRR

SEQ ID NO: 1670 - protein, 1449 aa, Dictyostelium discoideum
MKEFELNEYSFQEVENLNINTPNNNNNFGVVGDDFQLNSPDIQNSENQFKYIANELETDSKQYLSNLDAENNHNENDEDFKLRKYFENSQRVALGNGQKPKKMGVSVRNLTVVGVGADQSVISDLSTPIFKILNLFKPSTWKEKGSTFDILHDITLFNRDGGMLLVLGRPGSGCSTLLRLISNQRGSYVEVKGDITYGGIPAKEWKRYQGESIYTPEEDTHHPTLTVRQTLDFALKCKTIHNRLPDEKKRTYRKRIFDLLLGMFGIVHQADTIVGNEFIRGLSGGERKRLTITEAMVSSASITCYDCSTRGLDAASALDYAKSIRIMSDTLDKTTIASFYQASDSIYNLFDNVAVIEKGRLIYFGPGNKAKQYFIDLGFDCEPRKSTPDFLTGVTNPQERIIRQGFEGRVPETFADFEAAWRNSSMYRDMLEEQKEYERKIEIEQPAVDFIQEVKAEKSKTTSKRSIYTTSFLTQVKALIVRNFQIIWGDKLSLGSRYLSVFTQSFVYGSIFYNLETNINGLFTRGGTLFSVILFNALLCECEMPLTFGQRGILQKQHSYAMYRPSALHIAQIVTDIPLTIIQVFLFSIVVYFMFGLQYDAGKFFIFCFTLVGATLATTNLFRMFGNFSPSLYISQNVMNIFIISMITYTGYTIPKPKMHPWFSWFYWCNPFSYAFKALMANEFGDLSFDCQDTAIPSDPNKIIVYDNSYRICASPGASMGNLTVSGSKYIEESFHFRSDDLTQNVFILYLWWILYIVLNMFAMEYFDWTGGGYSHKVYKKGKAPKMNDVEEEKKQNQIVANATSKMKDTLKMRGGIFTWQNINYTVPVKGGKRLLLDNVEGWIKPGQMTALMGSSGAGKTTLLDVLAKRKTMGEVQGKCFLNGKPLEIDFERITGYVEQMDVHNPGLTVREALRFSAKLRQEPSVLLEEKFDYVEHVLEMMEMKHLGDALIGTLETGVGISVEERKRLTIGVELVAKPHILFLDEPTSGLDAQSSYNIVKFIRKLADAGMPLVCTIHQPSSVLFEHFDRILLLAKGGKTVYFGDIGEGSKTLTSYFERYGVRPCTESENPAEYILEATGAGVHGKSDVNWSETWKQSPELQEIERELAALEAQGPSSTEDHGKPREFATPIWYQTIEVYKRLNIIWWRDPFYTYGSFIQASMAGLIMGFTFWSLKGSSSDMSQRVFFIFETLILGILLIFVVLPQFIMQQEYFKRDFASKFYSWFPFAISIVAVEIPIVIISGTFFFFCSFWTAGLYTKFNEINFYFWFILILYLLFCVSFGQAVSAISFNLFLAHTLIPLLIVFLFLFCGVMVIPSSIPTFWRGWVYHLNPCRYFMEGIVTNVLKHTDVKCTSEDFTHFTNPEAVNGVTCKQYFPISEPLTGYVEAINEGDESKCGYCLYNNGEEYYNTLGWSFDNRWRNLAILICFWIFNILMVITFVYITRKPRR

SEQ ID NO: 1671 - protein, 1476 aa, Dictyostelium discoideum
MGEDKTFQSIRISENNNNNNNNNNNNNNNNNNNLNNNNDNDYDYDSINNIEEKFENVSKELEGQSIKFREIDGGKNNNNHDIELGERKPENEEDFKLRQYFEDSQRQKMLINHKPKKMGVSIKNLTVVGQGADNSVIVDNSTPFKALGKLLNPFNYFKKDKNKINTFNILNDINAFIEDGKMLLVLGRPGAGCSTLLRVIANQRESYISVDGDVTYGNIAASDWSKYRGETLYTGEEDIHHPTLTVRETLDFTLKLKTPGNRLPEESKRNFRTKIYELLVSMYGLVNQGDTMVGNEFVRGLSGGERKRITITEAMVSGSSITCWDCSTRGLDAASAYDYAKSLRIMSDTLDKTTIASFYQASDSIYNLFDKVIVLDKGRCIYFGPIGLAKQYFLDLGFDCEPRKSTPDFLTGITNPQERIVKVGFEGRVPETSVDLEDAWKKSQLFQSMKHAQLEYEKQVEQQKPSVDFKEQVLNEKSRTTSKNSEYSSSFYAQTIALTQRQLSLTWGDKFTLTSRFLTILVLSFIFGGIYFQQPLTTDGLFTRGGAIFTSIIFNCILTQGELHGALSGRRILQKHKSYALYRPSAYFVSQILIDIPFILVQVFLHSFIVYFMYGFEYRADKFFIFCFTLVGVSLSSASLFRGFANFTPSLFTAQNLMNFVFIFEVNYFGYSQTPDKMHSWFKWTYYINPLAYAFKSLMINEFKGLDFSCLDSAIPFDHFNNSTYSDMSHRICAVPGSIEGSLSVKGENYLWDALQINSDHRALNVVVIFLFWLFYIGLNLFAVEYFDWTSGGYTHKVYKRGKAPKLNDVEEERNQNQIVKKATDNMKDTLKMRGGLFSWKSISYTVPVAGTNKLLLDDIMGWIKPGQMTALMGSSGAGKTTLLDVLAKRKTMGTVTGESLLNGKQLEIDFERITGYVEQMDVHNPGLTVREALRFSAKLRQEPWVPLKDKYQYVEHVLEMMEMKHLGDALIGTLETGVGISVEERKRLTIGVELVAKPQILFLDEPTSGLDAQSSYNIIKFIRKLADAGMPLVCTIHQPSSVLFEHFDRILLLARGGKTVYFGDIGDKSKTLTSYFERHGVRPCTESENPAEYILEATGAGIHGKTDVNWPEAWKQSSEYQNVVNELDLLRTKEELGKYILDSDLQVDGKQAPPREFANGFLTQFIEVYKRLNIIYYRDVFYTMGSFAQSAVSGLVIGFTFYDLKNSSSDQQQRIFMSWEAMILGVLLIYLVLPMFFIQKEYFKRDTASKYYSWHAFSLSMIAVEIPYVVLSSTLFFIATYWTSGIDSTASANFYYWLMHTMFSVYIVSFAQALGAACVNIAISIAALPIVLFYLFLLCGVQIPPPAMSSFYQDWLYHLNPAKYFLEGLITTVLKPIEVLCTDVDLIKFTAPSGTDCQTYSAPFLQQATGYVVPLSNTTNECGYCIYSSGSDYFETSLGWDYGHRWRNFGIIVAYWGSSILAVLFFVYLTQKPRR

SEQ ID NO: 1672 - protein, 1942 aa, Dictyostelium discoideum
MSTIKISSFFKSIFSTINGKDKSINLNNNDNIKNNNNNNSIKNNNNNNIKNNNPSDNDIKPTEGGIDDMTLITATSLTIPPTKGGDYIESDTLKSMLIIDDTNDDNSSTTTVGCGDNNEQQQQQQQQQEQQQEQQQEQHEEFKIPMIQIQTPQINDNNIEWPTWCKDYENRYDLRPISRNGLDDTSNRLNSGFKGENFVYQNTKFVSKLYWKGNSPIFGDIEVDPDNNNNFDITASPTSGGIKQLNIRTSYNGIVNEDDDRMLLGIVYWKNTSEGPPGCVHGGALASMFDDSMACCIRYFYNNNFDDLNLQKQKQKQKQQQQEQEQPQGNRNGIVIPPITNSKTYVVTANLSVNYKKFVVLESFSSVETRIQKRDGKKIFISSTIKDQNGVIRAESTAIWIVVKIDTPISTTSSPPSFLSPLPSPTSNKLNENKLNENENNNNNNNNNNNNNNNNNIQFDNNSCSKCHSYDTIDMLSISENNNNNNNNNNNNNNNNNNNLNNNNDNDYDYDSINNIEEKFENVSKELEGQSIKFREIDGGKNNNNHDIELGERKPENEEDFKLRQYFEDSQRQKMLINHKPKKMGVSIKNLTVVGQGADNSVIVDNSTPFKALGKLLNPFNYFKKDKNKINTFNILNDINAFIEDGKMLLVLGRPGAGCSTLLRVIANQRESYISVDGDVTYGNIAASDWSKYRGETLYTGEEDIHHPTLTVRETLDFTLKLKTPGNRLPEESKRNFRTKIYELLVSMYGLVNQGDTMVGNEFVRGLSGGERKRITITEAMVSGSSITCWDCSTRGLDAASAYDYAKSLRIMSDTLDKTTIASFYQASDSIYNLFDKVIVLDKGRCIYFGPIGLAKQYFLDLGFDCEPRKSTPDFLTGITNPQERIVKVGFEGRVPETSVDLEDAWKKSQLFQSMKHAQLEYEKQVEQQKPSVDFKEQVLNEKSRTTSKNSEYSSSFYAQTIALTQRQLSLTWGDKFTLTSRFLTILVLSFIFGGIYFQQPLTTDGLFTRGGAIFTSIIFNCILTQGELHGALSGRRILQKHKSYALYRPSAYFVSQILIDIPFILVQVFLHSFIVYFMYGFEYRADKFFIFCFTLVGVSLSSASLFRGFANFTPSLFTAQNLMNFVFIFEVNYFGYSQTPDKMHSWFKWTYYINPLAYAFKSLMINEFKGLDFSCLDSAIPFDHFNNSTYSDMSHRICAVPGSIEGSLSVKGENYLWDALQINSDHRALNVVVIFLFWLFYIGLNLFAVEYFDWTSGGYTHKVYKRGKAPKLNDVEEERNQNQIVKKATDNMKDTLKMRGGLFSWKSISYTVPVAGTNKLLLDDIMGWIKPGQMTALMGSSGAGKTTLLDVLAKRKTMGTVTGESLLNGKQLEIDFERITGYVEQMDVHNPGLTVREALRFSAKLRQEPWVPLKDKYQYVEHVLEMMEMKHLGDALIGTLETGVGISVEERKRLTIGVELVAKPQILFLDEPTSGLDAQSSYNIIKFIRKLADAGMPLVCTIHQPSSVLFEHFDRILLLARGGKTVYFGDIGDKSKTLTSYFERHGVRPCTESENPAEYILEATGAGIHGKTDVNWPEAWKQSSEYQNVVNELDLLRTKEELGKYILDSDLQVDGKQAPPREFANGFLTQFIEVYKRLNIIYYRDVFYTMGSFAQSAVSGLVIGFTFYDLKNSSSDQQQRIFMSWEAMILGVLLIYLVLPMFFIQKEYFKRDTASKYYSWHAFSLSMIAVEIPYVVLSSTLFFIATYWTSGIDSTASANFYYWLMHTMFSVYIVSFAQALGAACVNIAISIAALPIVLFYLFLLCGVQIPPPAMSSFYQDWLYHLNPAKYFLEGLITTVLKPIEVLCTDVDLIKFTAPSGTDCQTYSAPFLQQATGYVVPLSNTTNECGYCIYSSGSDYFETSLGWDYGHRWRNFGIIVAYWGSSILAVLFFVYLTQKPRR

SEQ ID NO: 1673 - protein, 1449 aa, Dictyostelium discoideum
MEEYELREIALQEGGSNLDINTPPNYDNPVGDGSSPPDSPDIQKSENQFKNVERELEIDSKQYLAGHDAENNHDENDEDFKLRRYFENSQRMALGNGQKPKKMGVSIRNLTVVGRGADQSVIADMSTPFIKFFNLFKPSTWKEKGSTFDILHDITLFNRDGGMLLVLGRPGSGCSTLLRLISNQRGSYVEVKGDITYGGIPAKEWKRYQGESIYTPEEDTHHPTLTVRQTLDFALKCKTIHNRLPDEKKRTYRKRIFDLLLGMFGIVHQADTIVGNEFIRGLSGGERKRLTITEAMVSSASITCYDCSTRGLDAASALDYAKSIRIMSDTLDKTTIASFYQASDSIYNLFDNVAVIEKGRLIYFGPGNKAKQYFIDLGFDCEPRKSTPDFLTGVTNPQERIIRQGFEGRVPETFADFEAAWRNSSMYRDMLEEQKEYERKIEIEQPAVDFIQEVKAEKSKTTSKRSIYTTSFLTQVKALIVRNFQIIWGDKLSLGSRYLSVFTQSFVYGSIFYNLETNINGLFTRGGTLFSVILFNALLCECEMPLTFGQRGILQKQHSYAMYRPSALHIAQIVTDIPLTIIQVFLFSIVVYFMFGLQYDAGKFFIFCFTLVGATLATTNLFRMFGNFSPSLYISQNVMNIFIISMITYTGYTIPKPKMHPWFSWFYWCNPFSYAFKALMANEFGDLSFDCQDTAIPSDPNKIIVYDNSYRICASPGASMGNLTVSGSKYIEESFHFRSDDLTQNVFILYLWWILYIVLNMFAMEYFDWTGGGYSHKVYKKGKAPKMNDVEEEKKQNQIVANATSKMKDTLKMRGGIFTWQNINYTVPVKGGKRLLLDNVEGWIKPGQMTALMGSSGAGKTTLLDVLAKRKTMGEVQGKCFLNGKPLEIDFERITGYVEQMDVHNPGLTVREALRFSAKLRQEPSVSLKEKFDYVEHVLEMMEMKHLGDALIGTLETGVGISVEERKRLTIGVELVAKPHILFLDEPTSGLDAQSSYNIVKFIRKLADAGMPLVCTIHQPSSVLFEHFDRILLLAKGGKTVYFGDIGERSKTLTSYFERYGVRPCTESENPAEYILEATGAGVHGKSDVNWPETWKQSPELQEIERELAALEAAGPSSTEDHGKPREFATSVWYQTIEVYKRLNLIWWRDPFYTYGSFIQSALAGLIIGFTFWSLQGSSSDMNQRVFFIFEALILGILLIFVVLPQFIMQKEYFKRDFASKFYSWFPFAISIVGGELPFITVSGTIFFFCSFWTAGLNTEYNDINFYFWFIFILFLYFCVSFGQAVAAICFNMFLAHTLIPLLIVFLFLFCGVMVIPSSIPTFWRGWVYHLNPCRYFMEGIVTNVLKHTDVKCTSEDFTHFTNPEAVNGVTCKQYFPISEPLTGYVEAINEGDESKCGYCLYNNGEEYYNTLGWSFDNRWRNLALIICFWIFNTLMVITFVYITRKPRR

SEQ ID NO: 1674 - protein, 1466 aa, Dictyostelium discoideum
MSDDYELKELQPPEGANCNYNINTPQYENNNNNNNNTSGNESPNILNSENQFNQVANELENDSKQFFSNQDPEMNVEHSNVAQNEQDFKLRSYFENSQRIALGNGQKPKKMGISIRNLTVVGKGADISVISDLSTPFVTIFNLFRPSTWRKSSGSTFDILHDVTLFNRDAEMLLVLGRPGAGCSTLLRVISNQRSSYVSVSGDVTYGGINFDEWKNFKGESIYTPEEDTHHPTLTVRETLNFALKCKTIHNRLPDEKKKTFRKKIYDLLVGMFGISKQSDTLVGNEFIRGLSGGERKRLTITEAMVSSASITCYDCSTRGLDAASALDYAKSIRIMSDTLHKTTIASFYQASDSIFNLFNNVAILEKGRLIYFGPVGLAKQYFLDLGFDCEPRKSTPDFLTGVTNPQERKVRPGFEGRAPETSSDFEKAWKSSDLYQVMLQQQLEYEKKIELEQPSTNFIEQIRNENSKTNPTKSIYTTSYFTQVRALIARNSQIIWGDRFALISKYISIIVQTFVYASLFYNMKSDVTGLFNRGGAIYAAILFNAFVSAGELGLTFYGRRILQKQHSYAMYRPSALHIAMVITDIPLTAIQVTIFSVIVYFMYGLQVDAGKFFIFLFTIFGSTLSMVAFFRALGNLSPSLYVSQNILNVFILFMFTYGGYSIPKNKMHPWFSWYFWINPFSFPYKALMANEFGDMNFTCNDQTAIPNGNYIASNGSTMSYQDQYRACPSAGAIEGQMVNGEFYVAGSNYIDAALDFKSDDRTLNVIITFLWWIFFVIINMIALELFDWTSGGMPHKVYKRGKAPKINDDEEERQQNAMVENATSKMKDTLKMRESCFTWNHIHYTVQLNGKDLLLLNDVEGWIKPGQMTALMGSSGAGKTTLLDVLAKRKTMGTVTGKCLLNGKELNIDFERITGYVEQMDVHNPGLTVREALRFSAKLRQEPTVSLQDKYEYVEQVLEMMEMKHLGDALIGSLETGIGISVEERKRLTIGIELVAKPHILFLDEPTSGLDSQSSYNIVKFIRKLADAGMPLVCTIHQPSSVLFEYFDRILLLAKGGKTVYYGDIGEKSKTLTSYFERNGVRSCTESENPAEYILEAIGAGTNPGVSTIDWPEVWKQSPELQDVQAELASLETAATVQISSDDQDHGPPREFATSIWYQTWEVYKRLNLIWWRDMSYVYGIFTQAAASGLIIGFTFWNLDLSSSDMNQRVFFIFEILFLGILYIFIAIPQFLIQKAYFKKDYASKFYSWCPFAISIVIVELPFVAVAGTICFFCSFWTAGIYYNGEYDFYFYITFILFLFICVSLGQVVSAFCFNVMLAQTILPLLLVMLFLFCGVLVPYEQIPNFWKFVYHSNPCRYFLEGVVTSVLKNVFVDCSNEDLTKFSNPTNLTCKEYFKPTYGNVRAVTKGDESECGYCVFKSGEEYYKTLGWSYENRLRNYGILWAFFIFNIIMVVSFVYLTKKPNR

SEQ ID NO: 1675 - protein, 1441 aa, Dictyostelium discoideum
MVHNNDGDNNDQEMQEIGINEKRSQFPHISVEESRQEFDSFSNNIEGESKQFGMNRDAESNMAVESEEDFKLRKYFENSNRMHLENGGNEKKMGVSIRNLTVVGLGADASVIADMSTPFYGLVKLFTPSFWTKKTSTFDILHDVTTFCKDGEMVLVLGRPGAGCSTLLRVIANQTASYVSVKGDITYGGIPSKEFEKYRGEPIYTPEEDSHHPTLTVRETLDFALKCKTPGNRLPDETKRSFRDKVFNLLLSMFGIVHQADTIVGNEFIRGLSGGERKRLTITEAMVSSASITCWDCSTRGLDAASAFDYAKSIRIMSDTLHKTTIASFYQASDSIYNVFDKVCVLEKGRCIYFGPVGMAKQYFMSLGFDCEPRKSTPDFLTGVTNPQERIIKKGFEGRTPETSADFEEAWKNSDIYRDQLQEQKEYEELIERTQPKVAFVQEVRDANSKTNFKKSQYTTSFVTQVIALIKRNFALVLNDKFGMYSKYLSVLIQGFVYASLFYNMDTDITGLFTRGGAILSAVIFNAFLSIGEMAMTFYGRRVLQKHKSYALYRPSALHIAQVVTDIPFTAIQVFLFSIIAYFMFGLQYDAGKFFIFCFTLLGASLACTALFRCFGYLCPSMYIAQNISNVFIIFMLTYSGYTIPIPKMHPWFSWFRHINIFTYAFKALMANEFEGLDFNCKESAIPYGPAYQGSEFDAYRICPLGGIEQGSLYFKGDFYMDKTLSFATGEMSQNVIIVYCWWVFFVVCNMFAMEYIDHTSGGYTHKVYKKGKAPKMNDVEEEKQQNAIVAKATSNMKDTLHMDGGIFTWQNIRYTVKVPGGERLLLDNIEGWIKPGQMTALMGSSGAGKTTLLDVLAKRKTLGVVEGDSHLNGRELEIDFERITGYVEQMDVHNPGLTVREALRFSAKLRQEPEVSLEEKFKYVEHVLEMMEMKHLGDALIGTLETGVGISVEERKRLTIGVELVAKPQILFLDEPTSGLDAQSSYNIIKFIRKLADAGMPLVCTIHQPSSVLFEHFDRILLLAKGGKTVYFGDIGEKSKTLTSYFERHGVRPCTESENPAEYILEATGAGVHGKSDVNWPEAWKQSPELADISRELAALKEQGAQQYKPRSDGPAREFSQSTWYQTKEVYKRLNLIWWRDPYYTYGSFVQAALCVKYWFYIWNLQGSSSDMNQRIFFIFEALMLGILLIFVVMPQLIIQREYFKRDFASKFYSWFPFAISIVVVELPFIVISGTIFFFCSFWTAGLHKTSDDEQTFYFWFIFIIFMFFCVSFGQAVAAVCINMFFAMTLIPLLIVFLFLFCGVMVPPSSIPTFWRGWVYHLNPCRYFMEGIITNILKTVRVECSEEDMAIFTFPKSYNTCQNYTSAFQSYKPSGYVESATLNGEPACGYCIYKNGEEYYETLGWSADNRWRNVGIIIGFFVFNILMVILFVYLTRKGSR

SEQ ID NO: 1676 - protein, 1448 aa, Dictyostelium discoideum
MDNNVEYELKEVSIQEGGSNLNINTPSGMSDGDFNSGANSPDIVKSENDFDKLAESLEKESKQYFAAQDNENNAGESEEDFKLRRYFENSQRMALSNGSKPKKMSICIRNLTVVGRGADLSVIADLLTPFNWFISLFKPSTWKIEKTSTFNILNNVTCFNRDGQMLLVLGRPGAGCSTLLRLISNQRGSYISVDGDIKYGGIPAKEWERYKGEAIYTPEEDSHHPTLTVRETLDFALKCKTIHNRLPDEKKVTFREKISSLLLSMFGIVHQADTIVGNEYIRGLSGGERKRLTITEAMVSSASITCWDCSTRGLDAASALDYAKSIRIMSDTLHKTSIASFYQASDSIYNLFDNVLVLEKGRCIYFGPVGQAKQYFLDLGFDCEPRKSVPDFLTGVTNPQERIIRKGFEGRVPETSADFEQAWKASELCREMERQQTEHEKKIEVEQPHLDFIEEVRANKSKTNTKTSVYTTSFPTQVRALIVRHSQIIWGDKFSLVSRYLSVIIQSFVYGSVFYNMQTNLSGLFTRGGAIFAAILFNAFLSEGELFATFYGRRILQKQQSYAMYRPSAFHIAQVVTDIPLTTVQVFLFSIVVYFMFGLQYEAGKFFIFCFTLIGATLATTNMFRAFGNLSPSLYVSQNVMTGILIFMISYCGYSIPKNKMHPWFGWFFWANPFTYAFKALMANEFMDLNFSCETEAIPYGTDPTTGAPYDNSVRVCASAGSRPNTLEVKGSDYLMDALTFKSDDRTLNIFITYLWWVLFIIINMVAVEYLEWTSGGFTTKTYKKGKAPKLNDAEEERKQNEIVAKATSEMKDTLKMRGGVFTWENIKYTVPVGKTQKLLLDDVEGWIKPGQMTALMGSSGAGKTTLLDVLAKRKTLGTVQGKTFLNGKALEIDFERITGYVEQMDVHNPGLTVREALRFSAKLRQEPSVSLEEKYDYVEHVLEMMEMKHLGDALVGTLETGVGISVEERKRLTIGVELVAKPHILFLDEPTSGLDAQSSYNIVKFIRKLADAGMPLVCTIHQPSSVLFEHFDRILLLAKGGKTVYFGDIGERSKTLTSYFERQGVRPCTEFENPAEYILEATGAGVHGKTEINWPEVWKQSPELQEVRRELSSLEASGSSSSSNENGVPREFATSIWYQTWEVYKRMNVIYFRDPFYAYGSILQAVMTGIIVGFTFWDLKDSSSDMNQRIFFIFQALLLGILLIFVVMVQFLVQKEYFKRDYASKFYSWFPFAISIVLVEIPYTIVCGSVFFFCSFWTAGLFMEGQNGANFYFWIIFIIYLFFCVSFGGAIAAVCNHMFLAMTLVPLLIVFLFLFCGVMVPPSQIPTFWKGWVYHLNPCRYFMEGIITNVLEHQKVNCSYEDLTKFNNPTTLTCEEYFVPATGYVTNTTSDNSECGYCIFNSGEQYYKTLEWDASNKGRSIAILIAFWMFNIFLVVSFVYLTRKPSR

SEQ ID NO: 1677 - protein, 1328 aa, Dictyostelium discoideum
MAPPEIGNDEIPLQEFGQKSFAADNTIGGMQSISYDNSGAPMGLYKEKKGMYVTARNLSMSIGTEKKGDKRNILSDLNFFLKPGSMVLILGSPGCGKTSVMKALANQLHSETVSGSLLFNGKAANKSTHHRDVAYVVQGDHHMAPFTVRETFKFSADLQMSEGTSEEEKNARVDYILKTLDLTRQQDTVVGNEFLRGVSGGQKKRVTIGVEMVKDAGLFLMDEPSTGLDSTTTLELMKHFRELSNVNQVSSLVALLQPGVEVTKLFDFLMIMNAGHMVYFGPMSDAISYFEGLGFKLPKHHNPAEFFQEIVDEPELYFEGEGEPPLRGAEEFANAYKNSAMFQSIVNDLDNTQPDLTFCKDSSHLPKYPTPLSYQIRLASIRAFKMLISSQVAVRMRIIKSIVMGLILGSLFYGLDLNQTDGNNRSGLIFFSLLFIVFSGMGAIAILFEQREVFYIQKDGKYYKTFAFFLSLIFSEIPIALLETVVFCVLVYWMCGLQANAEKFIYFLLMNFVGDLAFQSFFKMVSAFAPNATLASVIAPAALAPFILFSGFMAPKRSIGGWWIWIYWISPIKYAFEGLMSNEHHGLIYSCDDSETIPPRNTPNFELPYPRGSGNSSICQITRGDQFLDQLGMPQNNWFKWIDLLIVFAFGALFSFGMYFFLKNVHVDHRASDPKNDKRSKKASKRSKKIKDSKVDIKENRMVKAQKEIPIGCYMQWKDLVYEVDVKKDGKNQRLRLLNEINGYVKPGMLLALMGPSGAGKSTLLDVLANRKTGGHTKGQILINGQERTKYFTRLSAYVEQFDVLPPTQTVKEAILFSAKTRLPSDMPNEEKIKFVENIIETLNLLKIQNKQIGHGEEGLSLSQRKRVNIGVELASDPQLLFLDEPTSGLDSSAALKVMNLIKKIASSGRSIICTIHQPSTSIFKQFDHLLLLKRGGETVYFGPTGDKSADLLGYFENHGLICDPLKNPADFILDVTDDVIETTLDGKPHQFHPVQQYKESQLNSDLLAKIDAGVMPVGTPVPEFHGVYSSSYQTQFVELGKRSWLAQVRRVQNIRTRLMRSLFLGVVLGTLFVRMEETQENIYNRVSILFFSLMFGGMSGMSSIPIVNMERGVFYREQASGMYSIPIYLFTFIVTDLPWVFLSAIIYTVPMYFISGLRLDPNGAPFFYHSFISFTTYFNFSMLAMVFATVLPTDEIAHALGGVALSISSLFAGFMIPPASIAKGWHWFYQLDPTTYPLAIVMINEFQDLEFHCTSSESVTIPNVLTVNGTYIDVGPICPITNGNQILQRYEMKPEDKYKFLAVIFGYSVFFFICIFIALKFIRHQTK

SEQ ID NO: 1678 - protein, 1528 aa, Dictyostelium discoideum
MKLTNSISPTNLDGEINKNSQPSNDNQQQQQPKINKIINKFSESINSVSKTIGKGIGDLTSSNALDEHIKNHNSNFIDPFYNEEAVVVVDDENIRSLIGDNCSSIGNIGVNGIEAFYGEHNNKKSELIKQFLKINSTNNKSNQTIVVDHMDYSVMERQSSSSSSSSSRSTGVSKLIPFLKRKEKIEILKDLSFYLKPGMMVLLLSEAGSGVSTLFKCLTNRIPKRGSINGDILFDNEPIDGESHHSQYLFVQQSDHHISTLTVKETLEFSIECQSNLSREAKKQLSSNILSILGISHVADTYIGNQSIRGISGGQKKRMTVAVELVKGAKAIMIDQATNGLDSTSAFELLNSIQMISKVSNVPALVSLLQPSPEIFSIFSHILMMKDGEITFFGEKHQIFDHFSDYGLECKDKQNPAEFLSSIYHQAQLDPDCQLKSSSDFIVAYKQSQYYKDCLIKISQERLSNHKFSGDKSIKIIENEKEQQQQEIYQLSLIKQIQLNLKRAFLTTIRDRASILSRVIKSSLLGLLIGTLFFQLDSSQKSANLLPSLSFFLLTFVVFGSLAGVGQVFSERPVFYDQKIGKYYKSIAYFFAGLVSDLIWNFIDVIIFCSISYWLIGLNHSADRFFFFLLAIYLLDCLVNRVSKMVSIYSPNAAIASTIAPLYFSLFLLMAGYLIHRNSIPIYWRWMHYISPFKWVFEAILSNQLHGQTFTCKSDELLPPIGYPLLNVSFPDGYSGSQVCPIIDGIEILKSKDINSDYSYKYYSVWIILSMYLLFSILSIIGLSNITFDNIISNKEKNNGNGNNNYNGKESINEESIKLSIKQHQQKQFESNEKCYLTFKNLTYKVLIKKKNHQKVSRTLLHDINGYVKPGSMVALIGSSGAGKSTLLDILANRKDQGIISGEILLNGKARDKCFNRYVAYVEQEDTLPDFQTVREAITFSALLRLPNDTMTHQDKLDTVDYILDVLELNSIANTLIGKVDHGITQEQRKRVNIAIEMASLPDILFLDEPTTGLTSVAAELIMQLIKRVALDGRSVICTIHQPSETIFKKFDSILLLTQGGFVAYFGELGPNCRTVLNYCSDLGFNCPQGKNPADFLLDFSASFNSASRLASNDKMIPSIRSRIKNVGNYCFDGSSNLNNKNEIKQQQTTTQNVNLGNEDKQQQQQEEANDDNNIQEATSSNSNNNNNNDIIDNYQFSNLNRDTIEIIDSGLPIGFISKTFKEKNATSFLFQFFMLLFRFFVCAIRRRNLIMTRIIRSILLSVVTGTLYLQLKNDQDGVMDRISFIFFTSTFASISCLSNIPTVFEDRFLFYHELNSNTYRHLSYILAMILADLPFTIMYSLLFSAPIYWIVGLQNDVDKFLFFIFVYYLYLQVLVSFSQLLGMVSPTLATANEITGISFSVFSLFAGFIIKKDDIPSYYKWLNYVSITRYLVEPLTVNEMTGSVSFHCEPHQLIPVPIHYTPTNATASEPTKLVFKSFCPITQGNQVLYQFDINDTDKFEDTFVLIGLFIGFLLLILIFSKILKFKK

SEQ ID NO: 1679 - protein, 1476 aa, Dictyostelium discoideum
MENEEKREYLAKSRSNSRNFLNDSIESKNIFGVDKKSEPNLKQSIDGGLNFSTTSSYNPSNLPRTSVFVSARNLSSTVGHGKNEKKILTDLNFFLKPGSMVLLLGSPGCGKTSLMNTLALLTSNEKITGNLLFNGKTGDPNTHHRHVSYVVQDDFHMAPLTVRDTFKFSADCQSGDKSEKERIEIVDNVLDFLDLKHVQNTVVGDEFLRGISGGQKKRVTIGVELVKESNLLLMDEPTNGLDSSISLEMLTKIKNKVQQEKMSCLISLLQPGLEITKLFDYLMIMNQGQMSYFGPMNQAIGYFEGLGFKFPKHHNPAEFFQEIVDEPELYCGIDDGSSDGGSGDSGSSSGGSNYNYNFKNKASSTMMMMNNNNKIIPPLKGSDEFAMAYRKSIIYKHILEYIDSHIPDEEERSKFIDYSTTLKPYSTGFGRQLSLNVKRGFKLFLGNKASIRLRLLKNVIIGFILGTLYWKLDTTQADGSNRSGLLFFSLLTFVFGGFGSISVFFDQRQVFYSERAWKYYNTITYFLSMIVTDLPMSIVEVLIFSNFVYWMTGLNKTWDRFIYFFLTCLVCDVMSLSIIRSVCSFTKTKYAASAISPAVVSPFILMCGYMKHSNEIPGWWIWLYWISPIHYGFEGLLLNEHSGLDYHCSPDELMPPSFLPTFNTSYPVGFEGNQVCPITKGEQILDSIGFHTEFYYRWVDLAIISAFTLLFWLITLVCMKFLVFRVYRKDPVGIKKSKPNKTTTLIKMNRNSTDSTTTNNSMNYFNNKHNKKQNDDSDSGEEMESVDVDVKSSGKANLRKDIPIGCYMQWKDLVYEVDVKKDGKNQRLRLLNGINGYVKPGMLVALMGPSGAGKSTLLDVLANRKTGGHTKGQILINGQERTKYFTRTSAYVEQMDILTPVSTVREVILFSAKNRLPNSVPIQEKEEFVDNILETLNLLKIQHSLIGDVESGLSLSQRKRVNMGIELASDPQLLFLDEPTSGLDSSAALKVMNLIKKIASSGRSVICTIHQPSTTIFKKFDHLLLLKRGGETVYFGPTGTNSKIVLNYFAERGLICDPFKNPADFILDVTEDIIEIIQPPQTLPTSTSNENNNNNNNNNNNNNNNNNNNNNNNNNNNNGNTSDTLNNNNKKNLESSLSSSSISFDPVESFKESKENQKLLSIVENSIMPVGTPVAVYHGKYSSTIKTQFIELLKRSWKGGIRRVDTIRTRVGRSFVLGLVIGTLFLRLDKEQNDVFNRISFLFFSLMFGGMAGLSIIPTVSTERGVFYREQASGMYRVWIYYLTFVLSDLPFVIITSYAYVIPVYFLTGLSLSNHGWDFFYHSFISVMLYLNFGLTSIAFATSLPVEEMAFLLNGVLLSVTSLFAGFMIPPPSMPAAWKWAFYLDFISYPLKAFLITEFKDMEFVCTDNKGAIPIPIPSQNTTKFFCPITHGTQVLDRIDYKISFQYWDILIMASFTFALLVGGYLSLKFIRYQNK

SEQ ID NO: 1680 - protein, 1476 aa, Dictyostelium discoideum
MENEEKREYLAKSRSNSGNFLNDSIESKNIFGVDKKSEPNLKQSIDGGLNFSTTSSYNPSNLPRTSVFVSARNLSSTVGHGKNEKKILTDLNFFLKPGSMVLLLGSPGCGKTSLMNTLALLTSNEKITGNLLFNGKTGDPNTHHRHVSYVVQDDFHMAPLTVRDTFKFSADCQSGDKSEKERIEIVDNVLDFLDLKHVQNTVVGDEFLRGISGGQKKRVTIGVELVKESNLLLMDEPTNGLDSSISLEMLTKIKNKVQQEKMSCLISLLQPGLEITKLFDYLMIMNQGQMSYFGPMNQAIGYFEGLGFKFPKHHNPAEFFQEIVDEPELYCGIDDGSSDGGSGDSGSSSGGSNYNYNFKNKASSTMMMMNNNNKIIPPLKGSDEFAMAYRKSIIYKHILEYIDSHIPDEEERSKFIDYSTTLKPYSTGFGRQLSLNVKRGFKLFLGNKASIRLRLLKNVIIGFILGTLYWKLDTTQADGSNRSGLLFFSLLTFVFGGFGSISVFFDQRQVFYSERAWKYYNTITYFLSMIVTDLPMSIVEVLIFSNFVYWMTGLNKTWDRFIYFFLTCLVCDVMSLSIIRSVCSFTKTKYAASAISPAVVSPFILMCGYMKHSNEIPGWWIWLYWISPIHYGFEGLLLNEHSGLDYHCSPDELMPPSFLPTFNTSYPVGFEGNQVCPITKGEQILDSIGFHTEFYYRWVDLAIISAFTLLFWLITLVCMKFLVFRVYRKDPVGIKKSKPNKTTTLIKMNRNSTDSTTTNNSMNYFNNKHNKKQNDDSDSGEEMESVDVDVKSSGKANLRKDIPIGCYMQWKDLVYEVDVKKDGKNQRLRLLNGINGYVKPGMLVALMGPSGAGKSTLLDVLANRKTGGHTKGQILINGQERTKYFTRTSAYVEQMDILTPVSTVREVILFSAKNRLPNSVPIQEKEEFVDNILETLNLLKIQHSLIGDVESGLSLSQRKRVNMGIELASDPQLLFLDEPTSGLDSSAALKVMNLIKKIASSGRSVICTIHQPSTTIFKKFDHLLLLKRGGETVYFGPTGTNSKIVLNYFAERGLICDPFKNPADFILDVTEDIIEIIQPPQTLPTSTSNENNNNNNNNNNNNNNNNNNNNNNNNNNNNGNTRDTLNNNNKKNLESSLSSSSISFDPVESFKESKENQKLLSIVENSIMPVGTPVAVYHGKYSSTIKTQFIELLKRSWKGGIRRVDTIRTRVGRSFVLGLVIGTLFLRLDKEQNDVFNRISFLFFSLMFGGMAGLSIIPTVSTERGVFYREQASGMYRVWIYYLTFVLSDLPFVIITSYAYVIPVYFLTGLSLSNHGWDFFYHSFISVMLYLNFGLTSIAFATSLPVEEMGFLLNGVLLSVTSLFAGFMIPPPSMPAAWKWAFYLDFISYPLKAFLITEFKDMEFVCTDNKGAIPIPIPSQNTTKFFCPITHGTQVLDRIDYKISFQYWDILIMASFTFALLVGGYLSLKFIRYQNK

SEQ ID NO: 1681 - protein, 1393 aa, Dictyostelium discoideum
MEDKNNIELQEKAPDNYNNNNNNNNNNNNNNNNNNNNNNNNNNNNNNDINNNDDDNNKIIYQNPTPASSSHIDSIEIDINYDLSNHIKQRVTQNKTGMFVSANNISYYIPKSIKKGESEELSKLYLLNNISFTMKPGRMILLMGIPGAGKSLLLKVLGNRLGKGKIEGELKFNNHEVDETTHQRDTIFVSQDDRHIALLTVRETLEFSAKCNMGENVSQEEQSERVDLVLDQLGLSHTSNTIIGNQFFRGISGGQKRRVTIANEFTKRSPNLILMDEPSTGLDSATSYNVISKVKTIAKEAKASVMVSLLQPSVELTNLFDDILILGEGGNLIYFGELNNLLPYFSSIGLAPLPNQPLAEFMQEVSVEPSKYMITDKIELSSKDGGDDESKSLLLGGADSGNVEKMDLVKLFKESELNQKTIQSMQQLIPSDIKVSDHLIKKLETGDNGKSSVRYELKHLLARHIKVMKIMKMQYAVRFFQAIFMGCVIGSLFVKMGFTQADARNRFGLVYFAMVLHIWTTIGSVEEFFTLRGIFDDQKDSKYYRNFPYFLSLVITKIPISLIEAILFSSCCYWIAGFQARVDNFIVFILGMALTNLIAQGIFQVTSAFTSAQLLASLICPAIVVLFMIMSGYMISRLQIPGWWIWLNALSPLRYVIDMVSSNELYGLEFHCSPMEKIPPSNYPLLNVSYADGGYQGNQICQYSTGSDFLNQFGFSDNSYMRWVDIVIILGFVCTFFFIFFLGVKYIRFENKKPPRQIKLKKKKEKKDKKDKEVKHKWNGCYMTFQNLNYVVPSVKDNKETGKKEKVTLELLKDVNGFIVPGMCALMGPSGAGKSTLMDVLAKRKNVGTITGDIRINGQLVKDMNITRFTGYVEQQDILSANLTVREAIEFSANCRLPSSYLQKDRVKLIDEILSVLSLTKMQNTTIGPNPTLGISLANRKKVSIGIELASDPHLIFLDEPTSGLDSSAALKVMNCVKKIAESGRTVVCTIHQPSQEIFEKFDQLLLLDKGKVIYFGDTGDNSSTVIQHFTSAGYQYEHGRNPADFILEIAEHPPSTGQSASDYFKSSIHYSNSIQRLESKTIVPEGVDVPKYKGKYSAPATAQLHSLVKRGWLNHVRRPQTILLRFLRSFIPAIVIGTLFLRLDNDQTGARNRIALVFLGFLFGGMASIGKVPTIVEDRSVYYRESSAGTYPAHLYILASVITDLPMMVLTAFSYWIPMFFLTGLTLGDHGWKFFFSLSVYLLVIMCYDSLATLFALTLPTIPIAILVSGVGLNFLGLFGGFFIPVNNIPRGWIWMHYLVFSKYGLETLSITELKGEPFFCEEDQYSIIPIAGTNFTKKYCAIQSGDTMLLQYGMNDAYDRQFYNLIILGGYFCAYTFLGYLALRFINHMKR

SEQ ID NO: 1682 - protein, 1520 aa, Dictyostelium discoideum
NLSLPINNNNNENLDNDQELLNNNNNNNNNNNNNNNIINNNNNNNNNNNNLISSSRKHKDEESNYDSDDEKSVYQIAKEHEGEDDGDDEYFPIPLDELMPNHENDELTKKIKQTRPEDKTGLYVYCRNATYTVKHRENKKVKIKLIDDISFYLKPKEMTLILGTPGCGKSTIFQMLAGQLKDKHFKGELLFNGHPINHKNHHRDISYVTQDDIHVPTLTVKETFRFALDCLGRKELTNEEKKETVDNCMNLLGLKESENTVVGDNFVRGISGGQKKRVTIGVGVIKGSNLLLMDEPTSGLDSSTSFEILSDVKKFVTYGYSPALITLLQPSVQLTSLFDNLMILNKGRICYFGPMNKALGYFKKLGFACPSHNNPAEFFQEVVDAPERYSFIHPPKCKTSKDFVRAYRESEFYKDLMEKMDANKDGIVDDNKPKVLVDSTAKELGMYPHGIGYQTKICMKRGFTMIRRNYYNFLTRVAKGIFFGLLLGTLYWRIGHNQSGGMERFGLLFFIMVTIIFSSFAAVNSFFGERKVFYSQKALYYYKTGAYFISSIICDIPAGILEVAFFGPIVYWLANLRPVFIRFVYFMLLLIMTDNLSLSFAKMCAAISPTIEIANVIASVILSIWLLFSGFTAPKNDIGGWWIWLYYISPYTWIFQGLSINEFTYQEYGCKTSELIPPRTPQNLLPYPEGFGGNQVCQFTSGEQIMDAFGITNPNYFKWVVFGILSAYIVFFYVVCFFALKYFNFEDKKSKLAVKKLKKKKKVKTTKQDEESAAISSEALERIDDDNDDDADYETEIKKKKSHKKQKEDPVIDVKSPSSLTTGSPYYNINNNNNNLSGSGNNIKKRKVKTPSNLSPSVNSPITINSPMPTSPSNNNNNNNSNEKSKNGKDIGSETGSYLQFKKLCYAVDVKVDDPDNPKKKKSQRLQLLTDIDGYVKPGQMLALMGPSGAGKSTLLDVLAQRKTGGHITGEILINGKPPSEFTNRIRAYVEQMDVLPPTQTVREAIAFSARCRLPPEVTKEERESYVDKIVEVLSLSSIKDLKIGVLGDGLSVSQRKRVNIGVELASNPEILFLDEPTSGLDSGDAFKVIDVVNKIAKVMNRTVICTVHQPSAAIFEFFDQLLLLKQGGETIYFGPLGNQSSVILDYCDKLGMHIKPHINPADFVMTLADQGKMVEGPNGEQVPLDAKKAYFESDICKKEYEIMEGQLIPDDFVIKTYDSRFASSWMTQFRALCMRSWLSRLRRPAIFVSNCIRSILLAVLLGTLFVRMDYEQKDARSRVSLLFFSFLFAGMVAIGNIPTTVLERGVFYREVTAGFYHSTAYMTSYVLTSYPFTLSTGILYIIPTFWIAGLDSGRHSSKFWYCLFIFIITYVMYDAFGLCLAVCLPNEVMASTICGIGLSLSTLFGGFVIARPNYPSAYYWCHYLDWLRYPLEASCTNEFTGLTFVCTNNKGAVPIPIIENGVQIAIKYYCPITNGDDFMLTYGFHKFMRYIDIAAIFGYIFIFVGLSFWGFKKIRWFNR

SEQ ID NO: 1683 - protein, 1509 aa, Dictyostelium discoideum
MVKQDPRDKSSYSPNLSIPINNQEEPTLNNNNNNNNNNNNNNNNNNNNNNNNNNNNNNNKNNNNNNIKHKDEENDFEDSIYQIAKEHEGEEDDEYFPIPLDELMPNHENDELTKKIKQTRPEDKTGLYVYCRNATYPVKHRENKKVKIKLLDDVSFFLRPKQMTLILGTPGCGKSTIFQMLAGQLKDKHFEGELLFNGHPINHKNHHRDISYVTQDDIHVPTLTVKETFRFALDCLGKKELTREEKQVSVDNCMKLLGLKHAENTLVGDNFIRGISGGQKKRVTIGVGVIKGSNLLLMDEPTSGLDSSTSFEILSDVKKFVTYGYSPALITLLQPSVQLTSLFDNLMIMSKGKICYFGPMNRALGYFKKLGFACPSHNNPAEFFQEVVDAPERYSFIHPPKCKTSDDFVKAYRESDIYLELMEKMDANKDGIVDDNKPKVLVDSTAKELGMYPHGIGYQTKICLKRGFIMISRNYYNFATRVFKGIFFGLLLGTLYWRIGHNQSGGMERLGLLFFIMTTIIFSSFAAVNSFFGERKVFYSQKALHYYKTGAYFISSIICDIPAGLIEVAFFGPIVYWLANLRPVFIRFVYFMILLFITDNLSLSFAKMCAAISPTIEIANVTASVILSIWLLFSGFTAPKNDIGGWWIWLYYISPYTWIFQGLSINEFTYQAYGCKDSELIPPRTPQNLLPYPEGFGGNQVCQYTSGEQIMDAFGINNPDYFKWIVYAILGAYIVFFYSVCFFALKYLNFEDKKSKLAVKKLKKKKKVIVCKEDEEPNCKVTTEALERVSDDNDDNADISNYDDDTVIDMKSPLTSPNYNNNNNLSGSGNNIKRRKVKTPSTLSPMVNSPLTNLSPMVNTPSKNGNHSKQKPISTSQKDISSETGSYLQFKKLCYAVDVKADDPDNPKKKKSQRLQLLTDIDGYVKPGQMLALMGPSGAGKSTLLDVLAQRKTGGHITGEILINGKPPSEFTNRIRAYVEQMDVLPPTQTVREAIAFSARCRLPPEVTKEEREIFVDKIVEVLSLSSIKDLKIGVLGNGLSVSQRKRVNIGVELASNPEILFLDEPTSGLDSGDAFKVIDVVNKIAKVMNRTVICTVHQPSAAIFEFFDQLLLLKKGGETIYFGPLGNQSSVILDYCDKLGMHIKPHINPADFVMTLADQGKMVEGPNGEQVPLDAKKAYFESDICKKEYEIMEGQLIPDDFVIKTYDSRFASSWMTQFRALCMRSWLSRLRRPAIFVSNCLRSILLAVLLGTLFVRMDYEQKDARSRVSLLFFSFLFAGMVAIGNIPTTVLERGVFYREVTAGFYHSTAYMISYVLTSYPFILSTGILYIIPTFWIAGLDSGRHSSKFWYCLFIFIITYIMYDAFALCLAVCLPNEVMASTICGIGLSLATLFGGFVIARPNYPSAYYWCHYLDWLRYPLEASCTNEFTGLTFVCTNNKGAVPIPIIENGVQIAIKYYCPITNGDDFMLTYGFHKFMRYIDIAAIFGYIFIFVGLSFWGFKKIRWFNR

SEQ ID NO: 1684 - protein, 391 aa, Dictyostelium discoideum
VRPCTESENPAEYILEATGAGVHGKSDVNWPETWKQSPELADISRELAALKEQGAHQYKIRSDGPAREFSQSTWYQTKEVYKRLNLIWWRDPYYTYGSFVQSALCGLIIGFTFWNLQGSSSDMNQRIFFIFEALMLGILLIFVVMPQLISQREYFKRDFASKFYSWFPFAISIVVVELPFIVISGTIFFFCSFWTAGLDKTSDSEQTFYFWFIFVIFLVFCVSFGQAVAAVCINLFFAMTLIPLLIVFLFLFSGVMTPPSSIPTFWRGWVYHLNPCRYFMEGIVTNILKTVDVKCSYEDMITFTFPKSYNTCQNYTSAFQSYGPSGYVESSILNGEPACSYCIYKNGEQYYKTLGWSDDNRWRNVGIIICFFVFNILMVILFVYLTRKGSR

SEQ ID NO: 1685 - protein, 124 aa, Hordeum vulgare
GRTVVCTIHQPSIDIFEAFDELCLMKRGGEEIYAGPLGHHSADLFNYYEGVHGVRKIKDGYNPATWMLEVTRIGQEQMLGVDFSDIYKKSELYQINKALIKELSQPAPGSTDLYFPTQYSQSSI

SEQ ID NO: 1686 - protein, 1432 aa, Oryza sativa; identical to SEQ ID NO: 1637

SEQ ID NO: 1687 - protein, 1431 aa, Oryza sativa
  unsure (1)..(1431): unsure at all Xaa locations
XRMSRSIGRGMGMEAWGVDEAFMPQSGRGGTADDDEEALRWAAIERLPTYSRMRTXILFFAEEDAAGAGKQQYKEVDVRRLGVGERQEFIERVFRVAEEDNQRFLQKLRNRIDRVGIELPTVEVRFEELMVQARCHVGSRALPTLLNTARNIAEAALGLVGVRPGRQATLTILRGVSGAVRPSRMTLLLGPPSSGKTTLLLALAGKLDPSLRRGGEVTYNGFELEEFVAQKTAAYISQTDVHVGEMTVKETLDFSARCQGVGTKYDLLTELARREKEAGIRPEPEVDLFMKATSMEGVESSLQTDYTLRILGLDICADTIVGDQMQRGISGGQKKRVTTGEMIVGPTKVLFMDEISTGLDSSTTFQIVKCLQQIVHLGEATILMSLLQPAPETFELFDDIILLSEGQIVYQGPREYVLEFFESCGFRCPERKGTADFLQEVTSKKDQEQYWADKHRPYRYISVSEFAQRFKRFHVGLQLENHLSVPFDKTRSHQAALVFSKQSVSTTELLKASFAKEWLLIKRNSFVYIFKTIQLIIVALVASTVFLRTQMHTRNLDDGFVYIGALLFSLIVNMFNGFAELSLTITRLPVFFKHRDLLFYPAWIFTLPNVILRIPFSIIESIVWVIVTYYTIGFAPEADRFFKQLLLVFLIQQMAGGLFRATAGLCRSMIIAQTGGALALLIFFVLGGFLLPKAFIPKWWIWGYWVSPLMYGYNALAVNEFYSPRWMNKFDNNGVPKRLGIALMEGANIFTDKNWFWIGAAGLLGFTMFFNVLFTLSLVYLNPLGKPQAVISEETAKEAEGNGDARHTVRNGSTKSKRGMVLPFTPLSMSFDDVNYYVDMPAEMKQQGVVDDRLQLLRDVTGSFRPAVLTALMGVSGAGKTTLMDVLAGRKTGGYIEGDMRISGYPKNQETFARISGYCEQNDIHSPQVTVRESLIYSAFLRLPEKIGDQEITQFVDEVMELVELDNLKDALVGLPGITGLSTEQRKRLTIAVELVANPSIIFMDEPTSGLDARAAAIVMRTVRNTVDTGRTVVCTIHQPSIDIFEAFDELLLLKRGGQVIYSGQLGRNSQKMIEYFEAIPGVPKIKDKYNPATWMLEVSSVAAEVRLNMDFAEYYKTSDLYKQNKVLVNQLSQPEPGTSDLHFPTKYSQSTIGQFRACLWKQWLTYWRSPDYNLVRFSFTLFTALLLGTIFWKIGTNRGNANSLRMVIGAMYTAVMFIGINNCATVQPIVSIERTVFYRERAAGMYSAMPYAIAQVVMEIPYVFVQTAYYTLIVYAMMSFQWTAAKFFWFFFVSYFSFLYFTYYGMMTVAISPNHEVAAIFAAAFYSLFNLFSGFFIPRPRIPKWWIWYYWLCPLAWTVYGLIVTQYGDLEQIISVXXGQSNQTISYYVTHHFGYHRKFMPVVAPVLVLFAVFFAFMYAICIKKLNFQHR

SEQ ID NO: 1688 - protein, 1450 aa, Oryza sativa; identical to SEQ ID NO: 1641

SEQ ID NO: 1689 - protein, 1417 aa, Oryza sativa; identical to SEQ ID NO: 1643

SEQ ID NO: 1690 - protein, 1447 aa, Oryza sativa; identical to SEQ ID NO: 1645

SEQ ID NO: 1691 - protein, 1419 aa, Oryza sativa
VRMGSVASGGGSVRRTASSWRGTSGRSDAFGRSVREEDDEEALKWAAIEKLPTYDRMRKGILTAGGVEEVDIGGLGLQERRNLIERLVRTAEEDNERFLLKLRDRMERVGIDNPTIEVRFENLSIDAEAYVGNRGIPTFTNFFSNKIMDVLSAMRIVSSGKRPISILHDISGIIRPGRMSLLLGPPGSGKTSLLLALAGKLDSTLKVSGRVTYNGHDMDEFVPQRTSAYIGQHDLHIGEMTVRETLAFSARCQGVGTRYDMLTELSRREKEASIKPDPDIDVYMKAISVEGQESVVTDYILKILGLEICADTMVGDAMIRGISGGQKKRVTTGEMLVGPAKALFMDEISTGLDSSTTYQIVNSLRQSVHILGGTALIALLQPAPETYDLFDDIVLLSEGQIVYQGPRENILEFFEAMGFKCPERKGVADFLQEVTSRKDQHQYWCRRDEPYRYISVNDFSEAFKEFHVGRNLGSELRVPFDRTRNHPAALTTSRYGISKMELTKACFSREWLLMKRNSFVYIFKILQLIILGSIGMTVFLRTKMHRRSVEDGAIFLGAMFLGLVTHLFNGFAELAMSIAKLPIFYKQRDLLFYPSWAYALPTWVLKIPISFLECAVWICMTYYVMGFDPNIERFFRHYVLLVLISQMASGLFRLLAALGREMVVADTFGSFAQLILLVLGGFLISRENIKKWWIWGYWSSPLMYAQNAIAVNEFLGHSWNKVMQQSNDTLGVQVLKVRGIFVDANWYWIGVGALLGYIMLFNILFILFLEWLDPLGKGQAVVSEEELREKHVNRTGENRGEITGADTRKRGMVLPFTPLSITFDNIRYSVDMPQEMKDKGVTEDRLLLLKGVSGAFRPGVLTALMGVSGAGKTTLMDVLAGRKTGGYIEGDISISGYPKKQETFARIAGYCEQNDIHSPHVTVYESLLYSAWLRLPSEVDSEARKMFVEEVMELVELTSLRGALVGLPGVNGLSTEQRKRLTIAVELVANPSIIFMDEPTSGLDARAAAIVMRTVRNTVDTGRTVVCTIHQPSIDIFEAFDELFLMKRGGEEIYVGPLGHNSCHLINYFEGIQGVRKIKDGYNPATWMLEVTTLAQEDILGINFAEVYRNSDLYQRNKTLISELSTPPPGSTDLHFPTQFSQPFFTQCMACLWKQHKSYWRNPSYTATRIFFTTVIALIFGTIFLNLGKKINKRLDLFNSLGSMYAAVLFIGIQNGQTVQPIVDVERTVFYREKAAGMYSALPYAFAQVLIEIPHIFLQTVVYGLIVYSLIGFDWTVEKFFWYMFFMFFTFMYFTFYGMMAVAMTPNSDIAAIVSTAFYCIWNIFAGFLIPRPRIPIWWRWYSWACPVAWTLYGLVASQYGDITNSTLEDGEVVQDYIRRYFGFRHDYLGYVATAVVGFAALFAFVFAFSIKVFNFQRR

SEQ ID NO: 1692 - protein, 1435 aa, Oryza sativa
  unsure (1)..(1435): unsure at all Xaa locations
MGSVASGGGSVRRTASSWRGTSGRSDAFGRSVREEDDEEALKWAAIEKLPTYDRMRKGILTAGGVEEVDIGGLGLQERRNLIERLVRTAEEDNERFLLKLRDRMERVGIDNPTIEVRFENLSIDAEAYVGNRGIPTFTNFFSNKIMDVLSAMRIVSSGKRPISILHDISGIIRPGRMSLLLGPPGSGKTSLLLALAGKLDSTLKVSGRVTYNGHDMDEFVPQRTSAYIGQHDLHIGEMTVRETLAFSARCQGVGTRYDMLTELSRREKEASIKPDPDIDVYMKAISVEGQESVVTDYILKILGLEICADTMVGDAMIRGISGGQKKRVTTGEMLVGPAKALFMDEISTGLDSSTTYQIVNSLRQSVHILGGTALIALLQPAPETYDLFDDIVLLSEGQIVYQGPRENILEFFEAMGFKCPERKGVADFLQEVTSRKDQHQYWCRRDEPYRYISVNDFSEAFKEFHVGRNLGSELRVPFDRTRNHPAALTTSRYGISKMELTKACFSREWLLMKRNSFVYIFKILQLIILGSIGMTVFLRTKMHRRSVEDGAIFLGAMFLGLVTHLFNGFAELAMSIAKLPIFYKQRDLLFYPSWAYALPTWVLKIPISFLECAVWICMTYYVMGFDPNIERFFRHYVLLVLISQMASGLFRLLAALGREMVVADTFGSFAQLILLVLGGFLISRENIKKWWIWGYWSSPLMYAQNAIAVNEFLGHSWNKVVDPTQSNDTLGVQVLKVRGIFVDANWYWIGXVGALLGYIMLFNILFILFLEWLDPLGKGQAVVSEEELREKHVNRTGENVELLTLGTASDANAGRGEITGADTRKRGMVLPFTPLSITFDNIRYSVDMPQEMKDKGVTEDRLLLLKGVSGAFRPGVLTALMGVSGAGKTTLMDVLAGRKTGGYIEGDISISGYPKKQETFARIAGYCEQNDIHSPHVTVYESLLYSAWLRLPSEVDSEARKMFVEEVMELVELTSLRGALVGLPGVNGLSTEQRKRLTIAVELVANPSIIFMDEPTSGLDARAAAIVMRTVRNTVDTGRTVVCTIHQPSIDIFEAFDELFLMKRGGEEIYVGPLGHNSCHLINYFEGIQGVRKIKDGYNPATWMLEVTTLAQEDILGINFAEVYRNSDLYQRNKTLISELSTPPPGSTDLHFPTQFSQPFFTQCMACLWKQHKSYWRNPSYTATRIFFTTVIALIFGTIFLNLGKKINKRLDLFNSLGSMYAAVLFIGIQNGQTVQPIVDVERTVFYREKAAGMYSALPYAFAQVLIEIPHIFLQTVVYGLIVYSLIGFDWTVEKFFWYMFFMFFTFMYFTFYGMMAVAMTPNSDIAAIVSTAFYCIWNIFAGFLIPRPRIPIWWRWYSWACPVAWTLYGLVASQYGDITNSTLEDGEVVQDYIRRYFGFRHDYLGYVATAVVGFAALFAFVFAFSIKVFNFQRR

SEQ ID NO: 1693 - protein, 1391 aa, Oryza sativa
MASLRREGSMWRSGGDVFSRSSSRFQDEDDDEEALRWAALERLPTYDRVRRGILAVSSEDGGAGGEKVEVDVGRLGARESRALIERLVRAADDDHERFLLKLRERMDRVGIDYPTIEVRFENLEVEADVHVGNRGLPTLLNSVTNTVEAIGNALHILPNKKQPMTVLHDVSGIIKPRRMTLLLGPPGSGKTTLLLALAGKLDKDLKVSGKVTYNGHGMHEFVPERTAAYISQHDLHIGEMTVRETLAFSARCQGVGTRYEMLTELARREKAANIKPDHDIDIYMKASAMGGQESSVVTDYILKILGLDICADTVVGNEMLRGISGGQRKRVTTGEMLVGPARALFMDEISTGLDSSTTYQIVNSLRQTIHILGGTAVISLLQPAPETYNLFDDIILLSDGQVVYQGPREHVLEFFEFMGFRCPARKGVADFLQEVTSRKDQGQYWCRRDRPYRFVPVKQFADAFRSFHVGRSIQNELSEPFDRTRSHPAALATSKYGVSRKELLKATIDRELLLMKRNAFMYIFKAVNLTLMALIVMTTFFRTSMRHDRDYGMIYLGALYFALDTVMFNGFAELAMTVMKLPVFFKQRDLLFFPAWAYTIPSWILQIPITFLEVGVYVFITYYVIGFDPSVSRFFKQYLLLLALNQMSSALFRFIAGIGRDMVVSHTFGPLSLLAFAALGGFILARPDVKKWWIWGYWISPLSYAQNAISTNEFLGHSWSQILPGENVTLGVSVLKSRGIFTEAKWYWIGLGALLGYTLLFNLLYTVALSVLSQGQKDTKSRKQELELSHIADQNSGINSADSSASRKGMVLPFAPLSISFNDVRYSVDMPEAMKAQGITEDRLLLLKGVSGSFRPGVLTALMGVSGAGKTTLMDVLAGRKTGGYIEGDIRISGYPKKQETFARISGYCEQNDIHSPHVTVYESLVFSAWLRLPSEVDSEARKMFIEEVMDLVELTSLRGALVGLPGVSGLSTEQRKRLTIAVELVANPSIIFMDEPTSGLDARAAAIVMRTVRNTVNTGRTVVCTIHQPSIDIFEAFDELFLMKRGGEEIYVGPVGQNSSKLIEYFEGIDGVSRIKDGYNPATWMLEVTSSAQEEMLGVDFSEIYRQSELYQRNKELIEELSTPPPGSTDLNFPTQYSRSFITQCLACLWKQNWSYWRNPSYTAVRLLFTIVIALMFGTMFWNLGTRTKKQQDLFNAMGSMYAAVLYIGVQNSGSVQPVVVVERTVFYRERAAGMYSAFPYAFGQVAIELPYIMVQTLIYGVLVYSMIGFEWTVAKFLWYLFFMYFTLLYFTFYGMMAVGLTPNESIAAIISSAFYNVWNLFSGYLIPRPFGDIQHVLEGDTRTVAQFVTDYFGFHHNFLWVVAVVHVVFAVTFAFLFSFAIMKFNFQRR

SEQ ID NO: 1694 - protein, 1449 aa, Oryza sativa
  unsure (1)..(1449): unsure at all Xaa locations
MWAAEAAFARSGSWREEEDEQEALRWAALQRLPTVARARRGLLRSPAPGEDRVDVAGLSPGDRTALVDRLLADSGDVEDFFRRIRSRFDAVQIEFPKIEVRYEDLTVDAYVHVGSRALPTIPNFICNMTEAFLRHLRIYRGGRVKLPILDNVSGIIRPSRMTLLLGPPSSGKTTLLLALAGRLGPGLKVSGNITYNGHHLNEFVPQRTSAYVSQQDWHASEMTVRETLEFAGRCQGVGIKYDMLVELLRREKNEGIKPDEDLDVFMKALALEGKQTSLVAEYIMKILGLDICADTIVGDEMIKGISGGQKKRLTTGELLVGSARVLFMDEISTGLDSATTYQIIKYLRHSTHALDGTTIISLLQPAPETYELFDDVILISEGQIVYQGPREYAVDFFAGMGFRCPERKNVADFLQEVLSKKDQQQYWCHYDYPYQYVSVSKFAEAFKTFVIGKRLHDELAVPYNRHRNHPAALSTSNYGVRRLELLKSNFQWQHLLMKRNSFIYVFKFIQLLLVALITMTVFFRSTMHRDSVDDGIIYLGALYFAIVMILFNGFTEVSLLVTKLPILYKHRDLHFYPPWAYTLPSWLLSIPTSLIESGMWVLVTYYVVGYDPQFTRCLGQFLLLFFLHQTSLALFRVMASLGRNMIVANTFGSFALLVVMILGGFIITKESIPAWWIWGYWISPMMYAQNAISVNEFLGHSWSQVIPDLNNITLGEAILTGYGLFKEKYWFWIGVGALFGYAIVLNFLFTLFLTLLNPIGNIQAVVSKDDIQHRAPRRKNGKLALELRSYLHSASLNGNARDQKGMVLPFQPLSMCFKNINYYVDVPAELKSQGIVEDRLQLLIDVTGAFRPGILTALVGVSGAGNATVMDVVGGRKTGGLIEGSITISGYPKNQETFTRISGYCEQNDVHSPCLTVIESLLYSACLRLPSHVDVNTRRVFVEEVMELVELNALSGALVGLPGVNGLSTEQRKRLTIAVELVANPSIVFMDEPTSGLDARSAAIVMRTVRNIVNTGRTIVCTIHQPSIDIFESFDELLFMKRGGQLIYAGPWGSKSRNLVEFFEAIPGVPKIRDGYNPAAWMLEVTSTQMEQILGVDFAEYYRQSKLFQQTQEMVDILSRPRRESKELTFATKYSQPFFAQYAACLWKQNLSYWRNPQYTAVRFFYTVIISLMFGTICWKFGXSRRETQHDIFNAMGAMYAAVLFIGITNATSVQPVISIERFVSYRERAAGMYSALPFAFSLVTVEFPYILVQSLIYGTIFYSLGSFEWTAVKFLWYLFFMYFTLLYFTFYGMMTTAITPNHTVAPIIAAPFYTLWNLFCGFMIPRXRIPAWWRWYYWANPVSWTLYGLLTFLFGDLDQSLLLAYGITTTTADDLLRDHFGFRHDFLGVVAGMVAGFCVLFAVVFALAIKYLNFQRRAWIDPLVPAFYYYHLSFHDDRSIFLYIDDSL

SEQ ID NO: 1695 - protein, 1316 aa, Oryza sativa
  unsure (1)..(1316): unsure at all Xaa locations
XRVGIKLPTVEVRYENLNIEAESYVGRRGLPTILNTYTIIMEGLTNALCITKKITHKIPILHNVSGIIKPHRMTLLLGPPGSGKTSLLLALAGETLQLXKVSGTITYNGHSMEEFVPQRSAAYVSQHDVHMAELTVRETVNFAAKCQGVGHHYDLLMELLRREKEQNIKPDPEIDIYLKAATTGEQKAEVVTNHILKILGLDICADTIVGNNMLRGISGGQKKRLTTGNMIVTPGRALFMDEISTGLDSSTTFQIVNTIRQTIRILGGTAVIALLQPAPETYELFDDIILLSDGQVVYNGPRDHVLEFFKSVGFKCPERKCVADFLQEVTSRKDQKQYWIGSDDTYQYVPVTMIAEAFQSFHVGQAIRSELAIPFEKSKNHPAALATSKYGVSMKELLKANIYREILLMKRNSFLYIFKAIQLKLVAINAMTVFIRTNMYRDSIENGRSYMGALFYGMMMIVYSALAEMGPAIAKLPVLFKQRDLLYYPSWTYSLPSWIIKIPISFLNTTVWVFLTYYVIGFDPNVLRFFRQFLVLFVLCEVIYALFRFIVALTRHPVIASNMGPFCILIFMLSCGFILTRDDVKKWWIWLYWISPLMYALNALAVNEFLGQIWNKSILGXXKGPLGRLVLGSSSFLPETKWYWISIGALLGYVLLFNVLYTICLTFLNXHSKVNFHLCCVWXMLXEIINDEANSYHATRHSSAGNKGMVLPFVPLSITFEDIRYSVDTPEAFKAKGMTEGRLELLKDISGSFRQGVLTALMGVSGAGKTTLLDVLAGRKTSGYVQGSITISGYPKKQETFARISGYCEQNDIHSPNVTVYESLMFSAWLRLPVEIDSATRKMFVYEVMELVEILSLKDALVGLPGVSGLSSERRKRLTIAVELVANPSIIFMDEPTSGLDARAAAIVMRAIRNTVDTGRTVVCTIHQPSIEIFESFDELFLMKQGGEEIYVGPIGRQSCELIKYFEAIQGVSKIKDGYNPSTWMLEVTSTTQEQRTCVDFSQIYKNSELYRRNKNLIKELSAPPEGSSDLSFPTQYSQLFLTQWLACLWKQHLSYWRNPPYIVVRYLFTIVVALLFGTMFWGIGKKRQNQQTLFSIMGAMYSACMAMGVQNSSSVQPAIFVEXRTIFYRERASHMYSALSYALGQVAIEFPYIFLQTIIYCVLVYAMVGYEWTCAKFLWYLFFMFFTLSYFTFYGMMMAGLTPNNAMSAVVSTAFYNIWNLFSGFLIPRIRIPVWWRWYYWMCPVAWTLNGLLTSQFGDVNDKFNNGVSVSDFIESYFGYKQDLLWVAAVAVVSFAILFAFLFGLSLRLFNFQKR

SEQ ID NO: 1696 - protein, 1130 aa, Oryza sativa
  unsure (1)..(1130): unsure at all Xaa locations
XIYMNVGNARKSYNMKRRKYLLQILGLDICADTMVGDDMVRGISGGQRKRVTTGEMLVGPANALFMDEISTGLDSSTTFQIVKSLRQAIHILGGTAVISLLQPAPETYDLFDDIILLSDGQIVYQGPREGVLEFFELMGFKCPERKGVADFLQEVTSRKDQKQYWMQHDKPYRYVPVKDFASAFQSFHTGKSIANELATPFDKSKNHPAALTTSRYGVSAMELLKANIDREFLLMKRNSFVYIFRACQLMVVSAIAMTVFFRTKMHRDSVTDGVIFMGALFFSVMMIMFNGLSELPLTIFKLPVFFKQRDLLFFPAWTYTIPSWILKIPMSFIEVGGFVFMSYYVIGFDPSAGRFFKQYLLMLAINQMAAALFRFVGGAARNMIVANVFGSFMLLIFMVLGGFILVREKVKKWWIWGYWISPMMYAQNAISVNEFLGHSWDKVLNNSLSNETLGVQALRSRGVFPEAKWYWIGFGALLGFIMLFNGLFTLALTYLKQELKEKQANINGNSSEIADNSQPTQRGMVLPFAPLSLTFDNIKYSVDMPQEMKAHGIVEDRLELLKGVSGSFRPGVLTALMGVSGAGKTTLMDVLAGRKTGGYIEGNITISGYPKKQETFARVSGYCEQNDIHSPQVTVSESLLFSAWLRLPKDVDSNTRKMFIEEVMELVELKPLRDALVGLPGVNGLSTEQRKRLTIAVELVANPSIIFMDEPTSGLDARAAAIVMRTVRNTVDTGRTVVCTIHQPSIDIFEAFDELFLMKRGGEEIYVGPLGHQSSELIKYFEGIKGVSRIKDGYNPATWMLEVSTISQEQALGVDFCDIYRKSELFQRNKALIQELSTPPPGSSELYFPTKYSLSFLNQCLACLWKMHLSYWRNPPYNAIRLFFTTVIALLFGTIFWDLGGKTGKSQDLFNAMGSMYSAVLFIGVLNSQSVQPVVSVERTVFYRERAAGMYSAFPYAFGQVFIELPYIMVQTLIYGVLVYSMIGFEWTVAKFLWYLFFMYFTLLYFTFYGMMAVGLTPNESIAAIISSAFYNVWNLFSGYLIPRPKIPVWWRWYCWICPVAWTLYGLVASQFGDIQHVLDDTRTVAQFVTDYFGFHHNFLWVVAVVHVVFAVTFAFLFSFAIMKFNFQRR

SEQ ID NO: 1697 - protein, 1255 aa, Oryza sativa
  unsure (1)..(1255): unsure at all Xaa locations
XLKKKKEWFEVNHDLGMGRRKSRMTLLLGPPSSGKSTLMRALTGKLDKNLKVFGNITYCGHKFSEFYPERTSAYVSQYDLHNAEMTVRETLDFSRWCLGIGSRYDMLTEISRRERNAGIKPDPEIDAFMKATAMQGQETNIITDLILKVLGLDICADTIVGDEMIRGISGGQMKRVTTGEMLTGPARALLMDEISTGLDSSSTFHIVKFIRHLVHIMNETVMISLLQPPPETYNLFDHIVLLSEGYIVYHGPRENXIEFFEASGFRCPQRKAVSDFLQEVTSKKDQQQYWFLDKEPYCYVSVPEFAERFKSFYIGHQMMKEQHIPFEKSKIHSAAXKTMKNALSPWESLKGVLCREKLLMKRTSFFXIFRVTQLIILAFLSMPVFFRTKMPHGQFSEGIKFLGALTFILIPVMFNGLSELNLTVKKLPVFYKHRDFLFFPPWTFGVANILIKVPVSLVEATVWVVITYYVMGFAPAAGRFLGAILQTMVIAISFGMLVLLIVFVFGGFVIRKNDIRPWWIWCYWASPMMYSQNAISINEFLASRWAIPNNDTTIDAKTVGEAILKSKGLFTGEWGFWLSIGALVGFIILFNTLYILALTYLSHLSHNDVTCQVVDNKLPTIVNINVCFSXGANGEGNRPTQSQFVLPFQPLSLCFNHLNYYVDMPSEMKQQGLMESRLQLLSDISGAFRPGLLTALVGVSGAGKTTLMDVLAGRKTSGTIEGSITLSGYSKKQETFARISGYCEQADIHSPNVTVYESILYSAWLRLPSDVDSNTRKMFVEEVMALVELDVLCNAMVGLPGVSGLSTEQRKRLTIAVELVANPSIIFMDEPTSGLDARAAAIVMRTVRNTVNTGRTVVCTIHQPSIDIFESFDELWFLKRGGRXVIYAGELGDHSHKLVEYFETILGVPSITEGYNPATWMLEVSSTLEEARMNVDFAEIYANSLLYRKNQRLIEELSIPPPSYRDLLFATKYSQSFYIQCVANLWKQYKSYWKNPSYNSLRYLTTFLYGLFFGTVFWQKGTKLDSQQDLYNLLGATYAAIFFIGATNCMSVQPVVSIERAVYYRESAAGMYSPLSYAFAQASVEFIYNIIQGILYTVIIYAMIGYDWKASKFFYFLFFIVSSFNYFTFFGMMLVACTPSALLANILITFALPLWNLFAGFLIFRKAIPIWWRWYYWANPVSWTIYGVIASQFGGNGGSISVPGGSHVAMSQILEDNVGVRHDFLGYVILAHFGFMAAFVLIFGYSIKFLNFQKR

SEQ ID NO: 1698 - protein, 1172 aa, Oryza sativa
  unsure (1)..(1172): unsure at all Xaa locations
XIYMNVGNARKSYNMKRRXSTYFRLDXANSFYLLLYICNMLQILGLDICADTMVGDDMVRGISGGQRKRVTTGEMLVGPANALFMDEISTGLDSSTTFQIVKSLRQAIHILGGTAVISLLQPAPETYDLFDDIILLSDGQIVYQGPREGVLEFFELMGFKCPERKGVADFLQEVTSRKDQKQYWMQHDKPYRYVPVKDFASAFQSFHTGKSIANELATPFDKSKNHPAALTTSRYGVSAMELLKANIDREFLLMKRNSFVYIFRACQLMVVSAIAMTVFFRTKMHRDSVTDGVIFMGALFFSVMMIMFNGLSELPLTIFKLPVFFKQRDLLFFPAWTYTIPSWILKIPMSFIEVGGFVFMSYYVIGFDPSAGRFFKQYLLMLAINQMAAALFRFVGGAARNMIVANVFGSFMLLIFMVLGGFILVREKVKKWWIWGYWISPMMYAQNAISVNEFLGHSWDKVLNNSLSNETLGVQALRSRGVFPEAKWYWIGFGALLGFIMLFNGLFTLALTYLKQELKEKQANINGNVLDVDTMASSTNLAIVDNTETSSEIADNSQPTQRGMVLPFAPLSLTFDNIKYSVDMPQEMKAHGIVEDRLELLKGVSGSFRPGVLTALMGVSGAGKTTLMDVLAGRKTGGYIEGNITISGYPKKQETFARVSGYCEQNDIHSPQVTVSESLLFSAWLRLPKDVDSNTRKMFIEEVMELVELKPLRDALVGLPGVNGLSTEQRKRLTIAVELVANPSIIFMDEPTSGLDARAAAIVMRTVRNTVDTGRTVVCTIHQPSIDIFEAFDELFLMKRGGEEIYVGPLGHQSSELIKYFEGIKGVSRIKDGYNPATWMLEVSTISQEQALGVDFCDIYRKSELFQRNKALIQELSTPPPGSSELYFPTKYSLSFLNQCLACLWKMHLSYWRNPPYNAIRLFFTTVIALLFGTIFWDLGGKTGKSQDLFNAMGSMYSAVLFIGVLNSQSVQPVVSVERTVFYRERAAGMYSAFPYAFGQVAIELPYIMVQTLIYGVLVYSMIGFEWTVAKFLWYLFFXMNFTLLYFXTFYGMMAVGLTPNESIXSIISSAFYNVWNLFSGYLIPRPKIPVWWRWYCWICPVAWTLYGLVASQFGDIQHVLDDTRTVAQFVTDYFGFHHNFLWVVAVVHVVFAVTFAFLFSFAIMKFNFQRR

SEQ ID NO: 1699 - protein, 1325 aa, Oryza sativa
  unsure (1)..(1325): unsure at all Xaa locations
VLXEHYNFTFLLMFRLYRVGIKLPTIEVRYKNLNVEAESYVGSRGLPTILNTYANILKGLANTLHMTTRSKQKISVLHNASGIIKPHRMTLLLGSPGSGKTSLLLALAGTLPSTVKVSGMITYNGHTMDKFIPQRSAAYVSQHDLHMAELTVRETINFSAKCQGVGHHYDLFLELLRREEEENITPDPETDIYLKTCIRDNNSFTLFFYHLKILRLDICADTIVGDNMLRGISGGQKRXLTTAEMLVTLGRALFMDEISNGLDSSTTFQIVNTIQQTIHVLGGTAVIALLQPAPETYELFDDIILLSDGQVVYSGPRDHVLEFFKSLGFKCLERIGVADFLQEVTSRKDQKQYWIHGDDTYRYIPVTVIAEAFQCFHVGQAIRSELAIPFDNSKSHIAALKTSKHGVNLKKILKANIDREILLLKRKSFLYIFNALQLTLVAIIAMSVFIHTNMHHDSIENGRMYMGVQFFGTLAIMFKGLAEMGAALANLPVFFKQRDLLFYPAWTYSLPSWIIKTPISFLNTIIWVSITYYVIGFDPNIERCFRQFLVLFVMSEAICGLFRFIAALTRHPVVASTVSEFCILIVMVSSGFILSRDEVKKWLIWEYWTSPLMYALNALAVNEFLSPSWNEALPGFREPLGRLVLESRGVFPEAKWYWIGLGALLGYVLLFNILYTICLSILTLLKRNVREMSQEAELPMIKDQAMQIXXNSSPARKGSILPFVPVYMTFEDIRYSIDMPKALKVQGMAGSRLELLKDLSGSFRPGVLTALMGISGAGKTTLLDVLAGRKTSGHIHGNITVSGYPKKQETFSRVSGYCEQNDIHSPNLTVYESLMFSAWLRLPAEIDSMARKRFIDEFMELVELFPLKDALVGLLGLSGLSTEQRKRLTIAVELVANPSIIFMDEPTSGLDARAAAIVMRTVRNIVDMGRTVVCTIHQPSIDIFESFDELFLMKRGGEAIYVGPLGQHSCELIKYFESIEGVRKIKHGYNPSTWMLEVTCTLQEQITGVNFTQVYKNSELYRRNKNLIKELSTPHDGSSDLLFPTKYSQTFVIQCLACLWKQRLSYWRNPPYIAVNFFFTVVIALLFGTMFWGVGRKRQSQQALLSAMGSMYSTCFTLGVQNSSSVQPVVNIERTVFYRERASHMYSPLPYALGQVVVELPYIFLQTLIYGVIVYSMMGYEWTCTKFFWYMFFMYFTLSYFTFYGMMAAGLTPNYTMSSIVSTTFYAIWHLFSGFLIPKTRIPIWWRWYYWICPVAWTINGLVTSQFGDVDDKFDNGVRVSDFVESYFGYNLDLLWVAAMAVVSFAILFAILFGFSLKLFNFQKR

SEQ ID NO: 1700 - protein, 1125 aa, Oryza sativa
  unsure (1)..(1125): unsure at all Xaa locations
MDGGGGETYGCGGGRREGGWAWAAAAADSVFSRSSSSAXXEDDEEDLRWAALEKLPTYDRARTALLALPPDGELREVNVRRLAADEQRALLERVAGVADDHAGFLCMFKERLDRVGIKLPTIEVRYENLNVEAESYVGSRGFPTIFNTYANIFEGLGNALHITRKKKQKISILHNVSGIVKPHRMTLLLGPPGSGKTSLLMALAGTLPSTVKVSGTITYNGHTMDEFVPQRSAAYVSQHDLHMAELTVRETVSFSAKCQGVGHHYDMLMELLRREKEENIKPDPEIDLYLKATTGEQKAEVVTNHILKILGLDICADTIVGNNMVRGISGGQKKRLTTAEMLVTPGRALFMDEILTGLDSSTTFQIVNSIRQTVHILGGTTIIALLQPAPETYELFDEIIILSDGQVVYNGPRDHVLEFFQSIGFKCPERKGVADFLQEVTSRKDQKQYWTHGDSTYRYISAAEIAEAFQSFHVGQAVRTELVVPFGKGKSHPAALRTSKYGVSMKELLQANIDREILLMKRNSFLYIFQAIRLTVMAINTMTVFMRTNMHRDSIENGRIYMGAQFYGMLMIMFNGLAEMGLAIAKLPVFFKQRDLFFYPAWTYSLPSWILKTPISFLNTIVWVFLTYYVIGFDPNIERFFRQFLALFVMSEATSGLFRFIASLTRDPVVASTMGSSCILISMLSSGFILSREEIKKWWIWGYWISPLMYALNTLAVNEFLGNSWNKTISGFSEPLGRLVLESRGFFPEAKWYWIGVGALLGYVILLNVLYTICLIFLKETFHKKQANITGQVLEAPSGEQATDNTRSNHMIGNSSSGIKGMVLPFVPLSITFEDIKYSIDMPEVPQILPTTESRLELLKDISGSFRPGVLTALMGVSGAGKTTLLDVLAGRKTSGYIEGNITISGYPKKQETFARVSGYCEQNDIHSPNVTIYESLMFSAWLRLPTKIDSATRKMIIEEVMELVELYPLKDALVGLPGVSGLSIEQRKRLTIAVELVANPSIIFLDEPTSGLDARAAAIVMRAIRNTVDTGRTVVCTIHQPSIDIFESFDELFLMKRGGEEIYVGPLGQHSCELIRYFEAIEGVSKIKHGYNPSTWMLEVTSPMQEQKTGVNFTQVYKNSELYX

SEQ ID NO: 1701 - protein, 1163 aa, Oryza sativa
  unsure (1)..(1163): unsure at all Xaa locations
GGGGETYGCGGGRREGGWAWAAAAADSVFSRSSSSAREDDEEDLRWAALEKLPTYDRARTALLALPPDGELREVNVRRLAADEQRALLERVAGVADDHAGFLCMFKERLDRVGIKLPTIEVRYENLNVEAESYVGSRGFPTIFNTYANIFEGLGNALHITRKKKQKISILHNVSGIVKPHRMTLLLGPPGSGKTSLLMALAGTLPSTVKVSGTITYNGHTMDEFVPQRSAAYVSQHDLHMAELTVRETVSFSAKCQGVGHHYDMLMELLRREKEENIKPDPEIDLYLKAATTGEQKAEVVTNHILKILGLDICADTIVGNNMVRGISGGQKKRLTTAEMLVTPGRALFMDEILTGLDSSTTFQIVNSIRQTVHILGGTTIIALLQPAPETYELFDEIIILSDGQVVYNGPRDHVLEFFQSIGFKCPERKGVADFLQEVTSRKDQKQYWTHGDSTYRYISAAEIAEAFQSFHVGQAVRTELVVPFGKGKSHPAALRTSKYGVSMKELLQANIDREILLMKRNSFLYIFQAIRLTVMAINTMTVFMRTNMHRDSIENGRIYMGAQFYGMLMIMFNGLAEMGLAIAKLPVFFKQRDLFFYPAWTYSLPSWILKTPISFLNTIVWVFLTYYVIGFDPNIERFFRQFLALFVMSEATSGLFRFIASLTRDPVVASTMGSSCILISMLSSGFILSREEIKKWWIWGYWISPLMYALNTLAVNEFLGNSWNKTISGFSEPLGRLVLESRGFFPEAKWYWIGVGALLGYVILLNVLYTICLIFLSQFIADVRVVCVPGTVDVNNDEATSNHMIDSSSGIKGMVLPFVPLSITFEDIKYSIDMPEEALKTQATESRLELLKDISGSFRPGVLTALMGVSGAGKTTLLDVLAGRKTSGYIEGNITISGYPKKQETFARVSGYCEQNDIHSPNVTIYESLMFSAWLRLPTKIDSATRKMIIEEVMELVELYPLKDALVGLPGVSGLSIEQRKRLTIAVELVANPSIIFLDEPTSGLDARAAAIVMRAIRNTVDTGRTVVCTIHQPSIDIFESFDELFLMKRGGEEIYVGPLGQHSCELIRYFEAIEGVSKIKHGYNPSTWMLEVTSPMQEQKTGVNFTQVYKNSELYSPNREITSSSTSSLPSSQPDEAPATTSREKFXWGLRGVSMDPGAVVG

SEQ ID NO: 1702 - protein, 1121 aa, Oryza sativa
  unsure (1)..(1121): unsure at all Xaa locations
XPRRGAGGAGCRRXAASLARSLRDGDDPFRRSAAASRRDAGDDEENLRWAALEKLPTYDRMRRGILRKAVDGGGDGEGAGSLFKADEVDIANLDPREGRELMERVFKAVEDDNERFLRRFRDRLDQVGIELPKIEVRYQHLDIEADVHVGKRALPTLLNATINTLEGLVSLFISSNKRKLKILNDVNGIIKPSRMTLLLGPPSSGKSTLMRALTGKPDKNLKVSGEITYCGHTFKEFYPERTSAYVSQHDLHNPEMTVRETLDFSRRCLGSGARYDMLSELTRRERNAGIKPDPEIDALMKATVVEGKQNNIVTDLVLKALGLDICADTIVGGAMIRGISGGQKKRVTTGEMLTGPATALFMDEISTGLDSSSTFQIVKYIRQVTHVMNATVMMSLLQPPPETYALFDDIVLIAEGYIVYHGPRENILEFFESAGFRCPERKGVADFLQEVTSRKDQQQYWFLEQDHYRYVSVEEFAQNFKKFHVGQKLQKELQVPYDKSKTHPAALTTKKYGLSSLESLKAVMSREWLLMKRNSFLFIFKAFQLFVLGFITMTLFLRTKMPHEKFSDTSKYVGALTASLITIMFNGFGELQLTIDKLPIFYKQRDFLFFPAWTYGLANIILKVPLSLMESSLWIVLTYYVVGFAPAAGRFFKQFLAYFWTHQMALALFRLLGAILRSMVVANTFGMFVLLLIFLFGGFLVSRKDIKPWWIWGYWTSPMMYSNNALSVNEFLASRWAIPNNDSSISAPTIGKAFLQSKGYFTGEWGYWLSIGAMIGFMIVFNILYLCALTFLRPESNQEQMSEVINGNTAVNVSHISSSVLSIRTNGTGSQRGMVLPFQPLSLSFNHMNYYVDMPAEMKAQGFTESRLQLLSDISGAFRPGVLTALVGVSGAGKTTLMDVLAGRKTSGTIEGDIKLSGYPKKQETFARISGYCEQTDIHSPNLTVYESIVYSAWLRLSSEVDKNTRKVFVEEVMSLVELDVLRDALVGLPGVSGLSTEQRKRLTIAVELVANPSIIFMDEPTSGLDARAAAIVMRTVRNTVNTGRTVVCTIHQPSIDIFESFDELLLLKRGGRVIYAGQLGXHSQILVEYFEAIPGVPKITEGYNPATWMLEVSSSLAEAX

SEQ ID NO: 1703 - protein, 1100 aa, Oryza sativa
  unsure (1)..(1100): unsure at all Xaa locations
LVYLVGESNQSVVYIRHTDAXLDYARQFRKGKREVEMSSSSSHHPEFASCTANDDEHHLDEFELELVVQDVQRQQNNGSANTDQHERENLLLLDDSSKSGALKRRLFFDNLLKNVQDDHIRFLHRQKERIDRVDVKLPAIEVRYNNLSVEAECRTANGDHLPSLWNSTKGAFSGLVKLLGLETERAKINVLEDVSGIIKPCRLTLLLGPPGCGKSTLLRALSGKLDKSLKVTGDISYNGYQLDEFVPEKTAAYISQYDLHIPEMTVRETLDFSSRCQGVGRRPKILKEVSARESAAGIIPDADIDIYMKAISVEASKRSLQTDYILKIMGLEICADTMVGDAMIRGLSGGQKKRLTTAEMIVGPARAYFMDEISNGLDSSTTFQIISCFQQLTNISEYTMVISLLQPTPEVFDLFDDLILMAEGKIIYHGPRNEALNFFEECGFICPERKEVADFLQEILSCKDQQQYWSGPNESYRYISPHELSSMFKENHRGRKLEEPIVSPKSELGKEALAFNKYSLQKLEMFKACGAREALLMKRSMFVYVFKTGQLAIIALVTMSVFLRTRMTTDFTHATYYMGALFFSILMIMLNGTPEISMQIRRLPSFYKQKSYYFYSSWAYAIPASVLKVPVSILDSLVWICITYYGIGYTASVSRFFCQFLMLCFVHQSVTSLYRFIASYFQTPTASFFYLFLALTFFLMFGGFTLPKPSMPGWLNWGFWISPMTYAEIGTVINEFQAPRWQKVKYQNITIGNRILINHGLYYSWHFYWISIGALFGSIILFYIAFGLALDYVKTXTSQYQVIVRNEGPTKKSNKPSXQSCVSKAKCMLLQCIDLFAAKMTIPVMELPITFHNLNYYIDTPPEMLKQGYPTKRLQLLNNITGALRPGVLSALMGVSGAGKTTLLDVLAGRKTGGYIEGDIRIGGYPKVQETFVRILGYCEQADIHSPQLTVEESVTYSAWLRLPSHVDKKTRSEFVAEVLETVELDQIKDVLVGTPQKNGLSMEQRKRLTIAVELVSNPSVILMDEPTTGLDTRSAAIVIRAVKNICKTGRTVVCTIHQPSTKIFEAFDELILMKNGGKIIYNGPIGERSSKVIEYFEAX

SEQ ID NO: 1704 - protein, 1333 aa, Oryza sativa
  unsure (1)..(1333): unsure at all Xaa locations
XGYSEDGERGERRXGSVRRTASSWRGTSGRSDAFGRSVREEDDEEALKWAAIEKLPTYDRMRKGILTAGGVEEVDIGGLGLQERRNLIERLVRTAEEDNERFLLKLRDRMERVGIDNPTIEVRFENLSIDAEAYVGNRGIPTFTNFFSNKIMDVLSAMRIVSSGKRPISILHDISGIIRPGRMSLLLGPPGSGKTSLLLALAGKLDSTLKVSGRVTYNGHDMDEFVPQRTSAYIGQHDLHIGEMTVRETLAFSARCQGVGTRYDMLTELSRREKEASIKPDPDIDVYMKAISVEGQESVVTDYILKILGLEICADTMVGDAMIRGISGGQKKRVTTGEMLVGPAKALFMDEISTGLDSSTTYQIVNSLRQSVHILGGTALIALLQPAPETYDLFDDIVLLSEGQIVYQGPRENILEFFEAMGFKCPERKGVADFLQEVTSRKDQHQYWCRRDEPYRYISVNDFSEAFKEFHVGRNLGSELRVPFDRTRNHPAALTTSRYGISKMELTKACFSREWLLMKRNSFVYIFKILQLIILGSIGMTVFLRTKMHRRSVEDGAIFLGAMFLGLVTHLFNGFAELAMSIAKLPIFYKQRDLLFYPSWAYALPTWVLKIPISFLECAVWICMTYYVMGFDPNIERFFRHYVLLVLISQMASGLFRLLAALGREMVVADTFGSFAQLILLVLGGFLISRENIKKWWIWGYWSSPLMYAQNAIAVNEFLGHSWNKVVDPTQSNDTLGVQVLKVRGIFVDANWYWIGVGALLGYIMLFNILFILFLEWLDPLGKGQAVVSEEELREKHVNRTGENVELLTLGTDSQNSPSDXXADTRKRGMVLPFTPLSITFDNIRYSVDMPQEMKDKGVTEDRLLLLKGVSGAFRPGVLTALMGVSGAGKTTLMDVLAGRKTGGYIEGDISISGYPKKQETFARIAGYCEQNDIHSPHVTVYESLLYSAWLRLPSEVDSEARKMFVEEVMELVELTSLRGALVGLPGVNGLSTEQRKRLTIAVELVANPSIIFMDEPTSGLDARAAAIVMRTVRNTVDTGRTVVCTIHQPSIDIFEAFDEGIQGVRKIKDGYNPATWMLEVTTLAQEDILGINFAEVYRNSDLYQNKRLDLFNSLGSMYAAVLFIGIQNGQTVQPIVDVERTVFYREKAAGMYSALPYAFAQVLIEIPHIFLQTVVYGLIVYSLIGFDWTVEKFFWYMFFMFFTFMYFTFYGMMAVAMTPNSDIAAIVSTAFYCIWNIFAGFLIPRPRIPIWWRWYSWACPVAWTLYGLVASQYGDITNSTLEDGEVVQDYIRRYFGFRHDYLGYVATAVVGFAALFAFVFAFSIKVFNFQRR

SEQ ID NO: 1705 - protein, 1335 aa, Oryza sativa
  unsure (1)..(1335): unsure at all Xaa locations
LQLLVISSPARRDAAAKLRERERDMESAMEKNSGGGGGSRGRRRSGRGGTADDDEEALRWAAIERLPTYSRMRTXILFFAEEEVDVRRLGVGERQEFIERVFRVAEEDNQRFLQKLRNRIDRVGIELPTVEVRFEELMVQARCHVGSRALPTLLNTARNIAEAALGLVGVRPGRQATLTILRGVSGAVRPSRMTLLLGPPSSGKTTLLLALAGKLDPSLRRGGEVTYNGFELEEFVAQKTAAYISQTDVHVGEMTVKETLDFSARCQGVGTKYDLLTELARREKEAGIRPEPEVDLFMKATSMEGVESSLQTDYTLRILGLDICADTIVGDQMQRGISGGQKKRVTTGEMIVGPTKVLFMDEISTGLDSSTTFQIVKCLQQIVHLGEATILMSLLQPAPETFELFDDIILLSEGQIVYQGPREYVLEFFESCGFRCPERKGTADFLQEVTSKKDQEQYWADKHRPYRYISVSEFAQRFKRFHVGLQLENHLSVPFDKTRSHQAALVFSKQSVSTTELLKASFAKEWLLIKRNSFVYIFKTIQLIIVALVASTVFLRTQMHTRNLDDGFVYIGALLFSLIVNMFNGFAELSLTITRLPVFFKHRDLLFYPAWIFTLPNVILRIPFSIIESIVWVIVTYYTIGFAPEADRFFKQLLLVFLIQQMAGGLFRATAGLCRSMIIAQTGGALALLIFFVLGGFLLPKAFIPKWWIWGYWVSPLMYGYNALAVNEFYSPRWMNKFVLDNNGGLGIALMEGANIFTDKNWFWIGAAGLLGFTMFFNVLFTLSLVYLNPLGKPQAVISEETAKEAEGNGDARSNEAGPRRGMVLPFTPLSMSFDDVNYYVDMPAEMKQQGVVDDRLQLLRDVTGSFRPAVLTALMGVSGAGKTTLMDVLAGRKTGGYIEGDMRISGYPKNQETFARISGYCEQNDIHSPQVTVRESLIYSAFLRLPEKIGDQEITDDIKIQFVDEVMELVELDNLKDALVGLPGITGLSTEQRKRLTIAVELVANPSIIFMDEPTSGLDARAAAIVMRTVRNTVDTGRTVVCTIHQPSIDIFEAFDEAIPGVPKIKDKYNPATWMLEVSSVAAEVRLNMDFAEYYKTSDLYKXXNANSLRMVIGAMYTAVMFIGINNCATVQPIVSIERTVFYRERAAGMYSAMPYAIAQVVMEIPYVFVQTAYYTLIVYAMMSFQWTAAKFFWFFFVSYFSFLYFTYYGMMTVAISPNHEVAAIFAAAFYSLFNLFSGFFIPRPRIPKWWIWYYWLCPLAWTVYGLIVTQYGDLEQIISVPGQSNQTISYYVTHHFGYHRKFMPVVAPVLVLFAVFFAFMYAICIKKLNFQHR

SEQ ID NO: 1706 - protein, 1302 aa, Oryza sativa
  unsure (1)..(1302): unsure at all Xaa locations
MEKVWESGRRMSRSIGRGMGMEAXGRRRGLHAAELXGGGGGSRGRRRSGRGGTADDDEEALRWAAIERLPTYSRMRTXILFFAEEEVDVRRLGVGERQEFIERVFRVAEEDNQRFLQKLRNRIDRVGIELPTVEVRFEELMVQARCHVGSRALPTLLNTARNIAEAALGLVGVRPGRQATLTILRGVSGAVRPSRMTLLLGPPSSGKTTLLLALAGKLDPSLRRGGEVTYNGFELEEFVAQKTAAYISQTDVHVGEMTVKETLDFSARCQGVGTKYDLLTELARREKEAGIRPEPEVDLFMKILGLDICADTIVGDQMQRGISGGQKKRVTTGEMIVGPTKVLFMDEISTGLDSSTTFQIVKCLQQIVHLGEATILMSLLQPAPETFELFDDIILLSEGQIVYQGPREYVLEFFESCGFRCPERKGTADFLQEVTSKKDQEQYWADKHRPYRYISVSEFAQRFKRFHVGLQLENHLSVPFDKTRSHQAALVFSKQSVSTTELLKASFAKEWLLIKRNSFVYIFKTIQLIIVALVASTVFLRTQMHTRNLDDGFVYIGALLFSLIVNMFNGFAELSLTITRLPVFFKHRDLLFYPAWIFTLPNVILRIPFSIIESIVWVIVTYYTIGFAPEXLTEQXAGLCRSMIIAQTGGALALLIFFVLGGFLLPKAFIPKWWIWGYWVSPLMYGGSLQSLRKYHKDNNGVPKRLGIALMEGANIFTDKNWFWIGAAGLLGFTMFFNEMKQQGVVDDRLQLLRDVTGSFRPAVLTALMGVSGAGKTTLMDVLAGRKTGGYIEGDMRISGYPKNQETFARISGYCEQNDIHSPQVTVRESLIYSAFLRLPEKIGDQEITDDIKIQFVDEVMELVELDNLKDALVGLPGITGLSTEQRKRLTIAVELVANPSIIFMDEPTSGLDARAAAIVMRTVRNTVDTGRTVVCTIHQPSIDIFEAFDELLLLKRGGQVIYSGQLGRNSQKMIEYFEAIPGVPKIKDKYNPATWMLEVSSVAAEVRLNMDFAEYYKTSDLYKQNKVLVNQLSQPEPGTSDLHFPTKYSQSTIGQFRACLWKQWLTYWRSPDYNLVRFSFTLFTALLLGTIFWKIGTKMGNANSLRMVIGAMYTAVMFIGINNCATVQPIVSIERTVFYRERAAGMYSAMPYAIAQVVMEIPYVFVQTAYYTLIVYAMMSFQWTAAKFFWFFFVSYFSFLYFTYYGMMTVAISPNHEVAAIFAAAFYSLFNLFSGFFIPRPRIPKWWIWYYWLCPLAWTVYGLIVTQXXFMPVVAPVLVLFAVFFAFMYAICIKKLNFQHR

SEQ ID NO: 1707 - protein, 844 aa, Oryza sativa
  unsure (1)..(844): unsure at all Xaa locations
MTDSMVLCHYRLMVVSLIAMTLFFRTKMKRDSVTSGGIYMGALFFGVLMIMFNGFSELALTVFKLPVFFKQRDLLFYPAWSYTIPSWILKIPITFIEVGGYVFLTYYVIGFDSNVGSFFKQYLLMLAINQMAGSLFRFIGGAARNMIVANVFASFMLLIFMVLGGFILAREQVKKWWIWGYWISPMMYAQNAISVNELMGHSWNKIVNSSASNETLGVQVLKSRGVFPEARWYWIGFGAMIGFTILFNALFTLALTYLRPYGNSRQSVSEEELKEKRANLNGEIVGDVHLSSGRGMVLPFTPLSLSFDNVRYSVDMPQEMKAQGVADDRLELLKGVSGSFRPGVLTALMGVSGAGKTTLMDVLAGRKTGGYIEGSINISGYPKKQETFARVSGYCEQNDIHSPQVTVYESLLFSAWLRLPEDVDSNTRKXKRLTIAVELXANPSIIFMDEPTSGLDARAAAIVMRTVRNTVNTGRTVVCTIHQPSIDIFEAFDELFLMKRGGEEIYAGPLGHHSSELIKYFESIPGVSKIKDGYNPATWMLEVTTIGQEQALGVDFSDIYKKSELYQRNKALIKDLSQPAPDSSDLYFPTQYSQSSLTQCMACLWKQNLSYWRNPPYNAVRFFFTTVIALLFGTIFWDLGGKVTKSQDLFNAMGSMYAAVLFIGVMNCTSVQPVVAVERTVFYRERAAGMYSAFPYAFGQVVIEIPYTLVQATVYGIIVYAMIGFEWTAAKFFWYLFFMVFTLLYFTFYGMMAVGLTPNYHIASIVSSAFYAIWNLFSGFVIPRPFGDIETPMEDGTPVKVFVENYFGFKHSWLGWVATVVAAFAFLFASLFGFAIMKFNFQKR

SEQ ID NO: 1708 - protein, 1209 aa, Oryza sativa
  unsure (1)..(1209): unsure at all Xaa locations
XGGGDNPVGEPAELAVVGALARSLRDGDDPFRRSAAASRRDAGDDEENLRWAALEKLPTYDRMRRGILRKAVDGGGDGEGAGSLFKADEVDIANLDPREGRELMERVFKAVEDDNERFLRRFRDRLDQVGIELPKIEVRYQHLDIEADVHVGKRALPTLLNATINTLETTTPIEYTMPSNKRKLKILNDVNGIIKPSRFEAXXPENSERXXNVSGEITYCGHTFKEFYPERTSAYVSQHDLHNPEMTVRETLDFSRRCLGSGARYDMLSELTRRERNAGIKPDPEIDALMKATVVEGKQNNIVTDLVLKALGLDICADTIVGGAMIRGISGGQKKRVTTGEMLTGPATALFMDEISTGLDSSSTFQIVKYIRQVTHVMNATVMMSLLQPPPETYALFDDIVLIAEGYIVYHGPRENILEFFESAGFRCPERKGVADFLQEVTSRKDQQQYWFLEQDHYRYVSVEEFAQNFKKFHVGQKLQKELQVPYDKSKTHPAALTTKKYGLSSLESLKAVMSREWLLMKRNSFLFIFKAFQLFVLGFITMTLFLRTKMPHEKFSDTSKYVGALTASLITIMFNGFGELQLTIDKLPIFYKQRDFLFFPAWTYGLANIILKVPLSLMESSLWIVLTYYVVGFAPAAGRFFKQFLAYFWTHQMALALFRLLGAILRSMVVANTFGMFVLLLIFLFGGFLVSRXYWQCXXALLFLXXDDTKSELEAESNQEQMSEVINGTNXXTENRRSQRGMVLPFQPLSLSFNHMNYYVDMPAEMKAQGFTESRLQLLSDISGAFRPGVLTALVGVSGAGKTTLMDVLAGRKTSGTIEGDIKLSGYPKKQETFARISGYCEQTDIHSPNLTVYESIVYSAWLRLSSEVDKNTRKVFVEEVMSLVELDVLRDALVGLPGVSGLSTEQRKRLTIAVELVANPSIIFMDEPTSGLDARAAAIVMRTVRNTVNTGRTVVCTIHQPSIDIFESFDELLLLKEGGRVIYAGQLGLHSQILVEYFEAIPGVPKITEGYNPATWMLEVSSSLAEARLDIDFAEVYANSALYRSNQELIKQLSVPPPGFQDLSFPTKYSQNFLNQCVANTWKQFQSYWKDPPYNAMRYVMTLLYGLVXFGTVFWRRGKNIESVNDLNNLLGATYAAVFFLGAANLLTLLPVVSVERTVFYREKAAGMYSPLSYAFAQGFVEFCYSAVQGVLYTILIYSMIGYEWKX

SEQ ID NO: 1709 - protein, 805 aa, Oryza sativa
  unsure (1)..(805): unsure at all Xaa locations
XLMVVSLIAMTLFFRTKMKRDSVTSGGIYMGALFFGVLMIMFNGFSELALTVFKLPVFFKQRDLLFYPAWSYTIPSWILKIPITFIEVGGFFKQYLLMLAINQMAGSLFRFIGGAARNMIVANVFASFMLLIFMVLGGFILAREQVKKWWIWGYWISPMMYAQNAISVNELMGHSWNKIVNSSASNETLGVQVLKSRGVFPEARWYWIGFGAMIGFTILFNALFTLALTYLRPYGNSRQSVSEEELKEKRANLNGEIVGDVHLSSGRGMVLPFTPLSLSFDNVRYSVDMPQEMKAQGVADDRLELLKGVSGSFRPGVLTALMGVSGAGKTTLMDVLAGRKTGGYIEGSINISGYPKKQETFARVSGYCEQNDIHSPQVTVYESLLFSAWLRLPEDVDSNTRKMFIEEVMELVELKSLRDALVGLPGVNGLDARAAAIVMRTVRNTVNTGRTVVCTIHQPSIDIFEAFDELFLMKRGGEEIYAGPLGHHSSELIKYFESIPGVSKIKDGYNPATWMLEVTTIGQEQALGVDFSDIYKKRNKALIKDLSQPAPDSSDLFFFTTVIALLFGTIFWDLGGKVTKSQDLFNAMGSMYAAVLFIGVMNCTSVQPVVAVERTVFYRERAAGMYSAFPYAFGQVVIEIPYTLVQATVYGIIVYAMIGFEWTAAKFFWYLFFMVFTLLYFTFYGMMAVGLTPNYHIASIVSSAFYAIWNLFSGFVIPRPRVPIWWRWYCWACPVAWTLYGLVVSQFGDIETPMEDGTPVKVFVENYFGFKHSWLGWVATVVAAFAFLFASLFGFAIMKFNFQKR

SEQ ID NO: 1710 - protein, 1054 aa, Oryza sativa
  unsure (1)..(1054): unsure at all Xaa locations
MASLRREGSMWRSGGDVFSRSSSRFQDEDDDEEALRWAALERLPTYDRVRRGILAVSSEDGGAGGEKVEVDVGRLGARESRALIERLVRAADDDHERFLLKLRERMDRVGIDYPTIEVRFENLEVEADVHVGNRGLPTLLNSVTNTVEAIGNALHILPNKKQPMTVLHDVSGIIKPRRMTLLLGPPGSGKTTLLLALAGKLDKDLKVSGKVTYNGHGMHEFVPERTAAYISQHDLHIGEMTVRETLAFSARCQGVGTRYEMLTELARREKAANIKPDHDIDIYMKASAMGGQESSVVTDYILKILGLDICADTVVGNEMLRGISGGQRKRVTTGEMLVGPARALFMDEISTGLDSSTTYQIVNSLRQTIHILGGTAVISLLQPAPETYNLFDDIILLSDGQVVYQGPREHVLEFFEFMGFRCPARKGVADFLQEVTSRKDQGQYWCRRDRPYRFVPVKQFADAFRSFHVGRSIQNELSEPFDRTRSHPAALATSKYGVSRKELLKATIDRELLLMKRNAFMYIFKAVNLTLMALIVMTTFFRTSMRHDRDYGMIYLGALYFALDTVMFNGFAELAMTVMKLPVFFKQRDLLFFPAWAYTIPSWILQIPITFLEVGVYVFITYYVIGFDPSVSRFFKQYLLLLALNQMSSALFRFIAGIGRDMVVSHTFGPLSLLAFAALGGFILARPFTDSHASMSEDALKEKHANLTGEVVXXGQKDTKSRKQELELSHIADQNSGINSADSSASRKGMVLPFAPLSISFNDVRYSVDMPEAMKAQGITEDRLLLLKGVSGSFRPGVLTALMGVSGAGKTTLMDVLAGRKTGGYIEGDIRISGYPKKQETFARISGYCEQNDIHSPHVTVYESLVFSAWLRLPSEVDSEARKMFIEEVMDLVELTSLRGALVGLPGVSGLSTEQRKRLTIAVELVANPSIIFMDEPTSGLDARAAAIVMRTVRNTVNTGRTVVCTIHQPSIDIFEAFDELFLMKRGGEEIYVGPVGQNSSKLIEYFEGIDGVSRIKDGYNPATWMLEVTSSAQEEMLGVDFSEIYRQSELYQX

SEQ ID NO: 1711 - protein, 846 aa, Oryza sativa
  unsure (1)..(846): unsure at all Xaa locations
XELIXHHTIQNLPLVLQIEHHLDEFELELVVQDVQRQQNNGSANTDQHERENLLLLDDSSKIDRHGLVKLLGLETERAKINVLEDVSGIIKPCRLTLLLGPPGCGKSTLLRALSGKLDKSLKVTGDISYNGYQLDEFVPEKTAAYISQYDLHIPEMTVRETLDFSSRCQGVGRRPKILKEVSARESAAGIIPDADIDIYMKIMGLEICADTMVGDAMIRGLSGGQKKRLTTAEMIVGPARAYFMDEISNGLDSSTTFQIISCFQQLTNISEYTMVISLLQPTPEVFDLFDDLILMAEGKIIYHGPRNEALNFFEECGFICPERKEVADFLQELAIIALVTMSVFLRTRMTTDFTHATYYMGALFFSILMIMLNGTPEISMQIRRLPSFYKQKSYYFYSSWAYAIPASVLKVPVSILDSLVWICITYYGIGYTASVSRFFCQFLMLCFVHQSVTSLYRFIASYFQTPTASFFYLFLALTFFLMFGGFTLPKPSMPGWLNWGFWISPMTYAEIGTVINEFQAPRWQKETIQNITIGNRILINHGLYYSWHFYWISIGALFGSIILFYIAFGLALDYITSIEEYHGSRPIKRLXXQEQEKDSNIRKESDGHSNISRAKMTIPVMELPITFHNLNYYIDTPPEMLKQGYPTKRLQLLNNITGALRPGVLSALMGVSGAGKTTLLDVLAGRKTGGYIEGDIRIGGYPKVQETFVRILGYCEQADIHSPQLTVEESVTYSAWLRLPSHVDKKTRSEFVAEVLETVELDQIKDVLVGTPQKNGLSMEQRKRLTIAVELVSNPSVILMDEPTTGLDTRSAAIVIRAVKNICKTGRTVVCTIHQPSTKIFEAFDE

SEQ ID NO: 1712 - protein, 654 aa, Oryza sativa
  unsure (1)..(654): unsure at all Xaa locations
XCQRLASRLDLLMELLRREKEQNIKPDPEIDIYLKILGLDICADTIVGNNMLRGISGGQKKRLTTAEMIVTPGRALFMDEISTGLDSSTTFQIVNTIRQTIRILGGTAVIALLQPAPETYELFDDIILLSDGQVVYNGPRDHVLEFFKSVGFKCPERKCVADFLQELKLVAINAMTVFIRTNMYRDSIENGRSYMGALFYGMMMIVYSALAEMGPAIAKLPVLFKQRDLLYYPSWTYSLPSWIIKIPISFLNTTVWVFLTYYVIGFDPNVLRHPVIASNMGPFCILIFMLSCGFILTRDAKEXSSMMKQIRTMQQDXSSAGNKGMVLPFVPLSITFEDIRYSVDTPEAFKAKGMTEGRLELLKDISGSFRQGVLTALMGVSGAGKTTLLDVLAGRKTSGYVQGSITISGYPKKQETFARISGYCEQNDIHSPNVTVYESLMFSAWLRLPVEIDSATRKMFVYEVMELVEILSLKDALVGLPGVSGLSSERRKRLTIAVELVANPSIIFMDEPTSGLDARAAAIVMRAIRNTVDTGRTVVCTIHQPSIEIFESFDELFLMKQGGEEIYVGPIGRQSCELIKYFEAIQGVSKIKDGYNPSTWMLEVTSTTQEQRTCVDFSQIYKNSELYRERASHIARTQTLPLXASSKTGPAKYX

SEQ ID NO: 1713 - protein, 746 aa, Oryza sativa
  unsure (1)..(746): unsure at all Xaa locations
MTLLLGPPSSGKRISGGQMKRVTTVMFNGLSELNLTVKKLPVFYKHRDFLFFPPWTFGVANILIKVPVSLVEATVWVVITYYVMGFAPAAGRFFRQFLAFFVTHLMAMALFRFLGAILQTMVIAISFGMLVLLIVFVFGGFVIRKNDIRPWWIWCYWASPMMYSQNAISINEFLASRWAIPNNDTTIDAKTVGEAILKSKGLFTGEWGFWLSIGALVGFIILFNTLYILALTYLSPIRSANALVINEEHRSRTSTTTSSIPTSANGEGNRPTQSQFVLPFQPLSLCFNHLNYYVDMPSEMKQQGLMESRLQLLSDISGAFRPGLLTALVGVSGAGKTTLMDVLAGRKTSGTIEGSITLSGYSKKQETFARISGYCEQADIHSPNVTVYESILYSAWLRLPSDVDSNTRKMFVEEVMALVELDVLCNAMVGLPGVSGLSTEQRKRLTIAVELVANPSIIFMDEPTSGLDARAAAIVMRTXXILGVPSITEGYNPATWMLEVSSTLEEARMNVDFAEIYANSLLYRKNQELIEELSIPPPGYRDLLFATKYSQSFYIQCVANLWKQYKSYWKNPSYNSLRYLTTFLYGLFFGTVFWQKGTKLDSQQDLYNLLGATYAAIFFIGATNCMSVQPVVSIERAVYYRESAAGMYSPLSYAFAQAIPIWWRWYYWANPVSWTIYGVIASQFGGNGGSISVPGGSHVAMSQILEDNVGVRHDFLGYVILAHFGFMAAFVLIFGYSIKFLNFQKR

SEQ ID NO: 1714 - protein, 317 aa, Oryza sativa
  unsure (1)..(317): unsure at all Xaa locations
SREMRLSARLGNFSSNGVSRLMSIGSNEAGPRRGMVLPFTPLSMSFDDANYYVDMPAEMKQQGAVDDRLQLLRDVTGSFRPAVRPALMGVSGAGKTTLMDVLAGRKTGGYIEGDMRISGYPKNQETFARISGYCEQNDIHSPQVTVRESLIYSAFLRLPEKIGDQEITDDIKIQFVDEVMELVELDNLKDALVGLPGITGLSTEQRKRLTIAVELVANPSIIFMDEPTSGLDARAAAIVMRTVRNTVDTGRTVVCTIHQPSIDIFEAFDELLLLKRGGQVIYSGQLGRNSQKMIEYFEAIPGVPXIKEXYNPATWMX

SEQ ID NO: 1715 - protein, 679 aa, Oryza sativa
  unsure (1)..(679): unsure at all Xaa locations
ILGLDICADTMVGDDMVRGISGEMLVGPANALFMDEISTGLDSSTTFQIVKSLRQAIHILGGTAVISLLQPAPETYDLFDDIILLSDGQIVYQGPREGVLEFFELMGFKCPERKGVADFLQEHDKPYRYVPVKDFASAFQSFHTGKSIANELATPFDKSKNHPAALTTSRYGVSAMELLKANIDREFLLMKRNSFVYIFRACQLMVVSAIAMTVFFRTKMHRDSVTDGVIFMGALFFSVMMIMFNAWTYTIPSWILKIPMSFIEVGGFVFMSYYVIGFDPSAGRFFKQYLLMLAINQMAAALFRFVGGAARNMIVANVFGSFMLLIFMVLGGFILVREKVKKWWIWGYWISPMMYAQNAISVNEFLGHSWDKVLNNSLSNETLGVQALRSRGVFPEAKWYWIGFGALLGFIMLFNGLFTLALTYLKQELKEKQANINGNVLDVDTMASSTNLAIVDNTETSSEIADNSQPTQRGMVLPFAPLSLTFDNIKYSVDMPQEMKAHGIVEDRLELLKGRKTGGYIEGNITISGYPKKQETFARVSGYCEQNDIHSPQMFIEEVMELVELKPLRDALVGLPGVNGLSTEQRKRLTIAVELVANPSIIFMDEPTSGLDARAAAIVMRTVRNTVDTGRTVGIKGVSRIKDGYNPATWMLEVSTISQEQALGVDFCDIYRKSELFQX

SEQ ID NO: 1716 - protein, 983 aa, Oryza sativa
  unsure (1)..(983): unsure at all Xaa locations
MDGGGGETYGCGGGRREGGWAWAAAAADSVFSRSSSSAXXEDDEEDLRWAALEKLPTYDRARTALLALPPDGELREVNVRRLAADEQRALLERVAGVADDHAGFLCMFKERLDRVGIKLPTIEVRYENLNVEAESYVGSRGFPTIFNTYANIFEGLGNALHITRKKKQKISILHNVSGIVKPHRMTLLLGPPGSGKTSLLMALAGTLPSTVKVSGTITYNGHTMDEFVPQRSAAYVSQHDLHMAELTVRETVSFSAKCQGVGHHYDMLMELLRREKEENIKPDPEIDLYLKILGLDICADTIVGNNMVRGISGGQKKRLTTAEMLVTPGRALFMDEILTGLDSSTTFQIVNSIRQTVHILGGTTIIALLQPAPETYELFDEIIILSDGQVVYNGPRDHVLEFFQSIGFKCPERKGVADFLQEVTSRKDQKQYWTHGDSTYRYISAAEIAEAFQSFHVGQALTVMAINTMTVFMRTNMHRDSIENGRIYMGAQFYGMLMIMFNGLAEMGLAIAKLPVFFKQRDLFFYPAWTYSLPSWILKTPISFLNTIVWVFLTYYVIGFDPNXXERDPVVASTMGSSCILISMLSSGFILSREEIKKWWIWGYWISPLMYALNTLAVNEFLGNSWNKTISGFSEPLGRLVLESRGFFPEAKWYWIGVGALLGYVILLNVLYTICLIFLXXCTVDVNNDEATSNHMIGNSSSGIKGMVLPFVPLSITFEDIKYSIDMPEALKTXXATESRLELLKDISGSFRPGVLTALMGVSGAGKTTLLDVLAGRKTSGYIEGNITISGYPKKQETFARVSGYCEQNDIHSPNVTIYESLMFSAWLRLPTKIDSATRKMIIEEVMELVELYPLKDALVGLPGVSGLSIEQRKRLTIAVELVANPSIIFLDEPTSGLDARAAAIVMRAIRNTVDTGRTVVCTIHQPSIDIFESFDEAIEGVSKIKHGYNPSTWMLEVTSPMQEQKTGVNFTQVYKNSELYRX

SEQ ID NO: 1717 - protein, 779 aa, Oryza sativa
  unsure (1)..(779): unsure at all Xaa locations
RQQHPEIKMSQLEVKRLTTAPETYDLFDDIILMAEGKIVYHGSKSCIMNFFESCGFKCPERKGAADFLQEVLSKKDQQQYWSRTEETYNFVTIDHFCEKFKASQVGQNLVEELANPFDKSEVYNNALSLNIYSLTKWDLLKACFAREILLMRRNAFIYITKVVQLLILFLVHTGAFVSMCRLILSNNGGYSVGGTMSFLVILLFGGXXIIPRLSMPNWLKWGFWISPLSYAEIGLTGNEFLAPRWLKVRVVASLAYLLDKTTTSGVTLGRRVLMDRGLDFSSYFYWISASALIGFILLLNVGYAIGEMLWHLTRXGTMVLPFSPLTISFQDVNYYVDTPEERKLQLLHNITGAFQPGVLSALMGVTGAGKTTLLDVLAGRKTGGVIEGDIRVGGYPKIQQTFARISGYCEQTDVHSPQITVEESVAYSAWLRLPTEVDSKTRREFVDEVIQTIELDDIRDALVGLPGVSGLSTEQRKRLTIAVELVSNPSVIFMDEPTSGLDARAAAIVMRAVKNVADTGRTVVCTIHQPSIEIFEAFDETIXPGYPRSRIIXXTHQHGCSKLLVHLWKLNWGXDFAQIYRESTMCKNDQQGLFTILGCMYGTTLFTGINNCQSVIPFISIERSVVYRERFAGMYSPWAYSLAQACTLLYFLYFGMMIVSLTPNIQVASILASMFYTLQNLMSGFIVPAPQIPRWWIWLYYTSPLSWTLNVFFTTQFGDEHQKEISVFGETKSVAAFIKDYFGFRHDLLPLAAIILAMFPILFAILFGLSISKLNFQRR

SEQ ID NO: 1718 - protein, 447 aa, Triticum aestivum
  unsure (1)..(447): unsure at all Xaa locations
FGTRQNDIHSPQVTIRESLIYSAFLRLPEKIGDQDITDEIKIQFVDEVMELVELDNLKDALVGLPGISGLSTEQRKRLGAWVELVANPSIIXFMDEPTSGLDARAAAIVMRTVRNTVDTGRTVVCTIHQPSIDIFEAFDELLLLKRGGQVIYSGKLGRNSQKMTEYFEAIPGVPKIKDKYNPATWMLEVSSVAAEVRLSMDFADYYRTSDLYKQNKVLVSQLSRPEPGTSDLYFPTEYSQSIIGQFKACLWKHWLTYWRSPDYNLVRFSFTLFTALLLGSIFWKIGTNMGDANTLRMVIGAMYTAVMFVGINNCATVQPIVSIERTVFYRERAAGXMYSALPYAIAQVVMEIPYVFVQTSYYTLIVYAMMSFQWTAVKFFWLFFVSYFSFLYFTYYGLMTVSILPNHEVASFFAAAFYFLFNLFFXGFFIPRPKIPKWGILYYWICP

SEQ ID NO: 1719 - protein, 188 aa, Triticum aestivum
  unsure (1)..(188): unsure at all Xaa locations
XLTALMGVSGAGKTTLMDVLVGRKTSGYIEDNITISGYPKKQETFARVSGYCEQNDIHSPNVTVYESLAFSAFLRLPANVESSTRKMFIDEVMELVELNPLKHALVGLPGVSGLSTEQRKRLTIAVELVANPSIIFMDEPTSGLDARAAAIVMRAIRNTVDTGRTVVCTIHQPSINIFESFDELFLMK

SEQ ID NO: 1720 - protein, 198 aa, Triticum aestivum
  unsure (1)..(198): unsure at all Xaa locations
XEXHSPNVTVYESLVYSAWLRLPSDVESETRKMFIEQVMELVELNSLRDALVGLPGVNGLSTEQRKRLTIAVELVANPSIIFMDEPTSGLDARAAAIVMRTVRNTVDTGRTVVCTIHQPSIDIFEAFDELFLMKRGGEEIYVGPLGHQSCDLIQYFEGIERVSKIKPGYNPATWMLEVTSQAQEDILGVSFAEVYKNX

SEQ ID NO: 1721 - protein, 226 aa, Triticum aestivum
  unsure (1)..(226): unsure at all Xaa locations
XMGCLPSRASNRMASTDAPPANTKALLDGVSGKAREGELFAVMGASGSGKSTLVDALAGRIARDSLRGHVTLNGEPLHGSRLRAISAYVMQDDLLYPMLTVRETLLFAAELRLSRALSPAAKRERVDRLIDQLGLSRAADTIIGDEGHRGVSGGERRRVSIGTDIIHDPILLFLDEPTSGLDSASAFMVVQVLRTIARSGSVVVMTIHQPSARILGILGRLLLLSX

SEQ ID NO: 1722 - protein, 431 aa, Triticum aestivum
  unsure (1)..(431): unsure at all Xaa locations
XFMDVPTYDLDARVAAIVMRVVRTSVMMARMLICTIHQHSNDIFESFEELLLMTRGGQXVIYAGELGLHSXKLVEYFEAIPRVREKITEGYNPATWMLEVSSPSAEARLNVNFADIYANSDLYRKNQELIKELSVPPPGYEDLSFPTKYSQNFYNQCVANFWKQYKSYWKNPPHNAMRFLMTMIYGLVFGTVFWQKGTKIDSQQDLSNLLGATYAAVFFLGSANCITVQPVVSIERTVFYREKAAGMYSPLSYALAQTCVEMIYNVVQGIQYTVIIYAMIGYEWKAAKFFYFLFFTISCFNYFTLFGMMLVALTSSSMLANIPIAFVLPLWNLFAGFLVARPLLPIWWRWYYWANPVSWTIYGVIGSQFGDNTSPLSVPDGSRPVVKQFLEDNLGIKHDFLGYVVLAHFAYVIAFFLVFGYSIKVLNFQKR

SEQ ID NO: 1723 - protein, 395 aa, Triticum aestivum
AVVCTIHQPSIDIFEAFDELFLMKRGGEEIYAGPLGHHSADLINYYEGIHGVSKIKDGYNPATWMLEVTTIGQEQMLAIDFSDIYKKSELYQRNKALIKELSQPAPGSTDLYFPTQYSQSSSTQCIACLWKQNLSYWRNPPYNAVRFLFTTVIALLFGTIFWDLGGKMSQSQDLFNAMGSMYAAVLFIGIMNCTSVQPVVAVERTVFYRERAAGMYSAFPYAFGQVVIELPYTLAQATVHGVIVYSMIGFEWTAPKFFWYLFFMYFTLLYFTFYGMMAVGLTPNYHIASIVSSAFYAIWNLFSGFIIPRPKVPIWWRWYCWVCPVAWTLYGLVVSQFGDVTTPMEDGTPVKDFIEGYFDFKHSWLGYVATVVVAFAVLFAFLFGFAIMKLNFQKR

SEQ ID NO: 1724 - protein, 221 aa, Triticum aestivum
  unsure (1)..(221): unsure at all Xaa locations
XRHEAEDELKEKHANLNGEVLDNDRMLSPSNDAIRMNTGNDSAIVEENSSPMQRGMVLPFLPLSLTFDNIRYSVDMPLEMKAQGVVEDRLELLKGVSGSFRPGVLTALMGVSGAGKTTLMDVLAGRKTGGYIQGNISISGYPKKQETFARVSGYCEQNDIHSPQVTVYESLLFSAWLRLPEDVDSNKRRMFIEEVMELVELKPLKDALVGLPGVNGLSTEQ

SEQ ID NO: 1725 - protein, 1147 aa, Zea mays
  unsure (1)..(1147): unsure at all Xaa locations
AVQGQETNIITDLTLKVLGLDICADVIIGDEMIRGISGGQKKRVTTGEMLTGPATALFMDEISTGLDSSSTFQIVKFMRHLVHIMNETVMISLLQPPPETYNLFDDIILLSEGYIVYHGPRENILEFFESVGFRCPDRKGVADFLQEVTSKKDQQQYWYLDQEQYHYVSVPDFAERFKSFHACQQMQKELQIPFEKSKTHPAALTTKKYGLSSWESLKAVMSREQLLMKRNSFIYIFKVTVLIILAFVSMTVFLRTKMPHGQIADGTKFFGALTFGLITIMFNGFAELQLTIKKLPVFYKHRDFLFFPAWTFGVANILLKVPISLVESVVWVVLTYYVMGFAPAAGRFFRQFIAFFATHQMAMALFRFLGAVLKTMVVANTFGMFVLLIIFIFGGFVIRRNDIKPWWIWGYWASPMMYSQNAISINEFLASRWAIPNNDTTIDAPTVGKAILKSKGLFTEEWGFWLSIGALIGFIILFNSLYLWALTYLSPSSGSNALVSEGEDDVMVLKGRSKDDQAQVVYSDPGTNGATNTGVTLPLXTLALCFNHVNYYVDLPKEMXNHSLIEVALLMLSDLTGTVGVRVLGKLTFFSGAGRRTTSGALAGRKTSGAIEGDITLSGYPKKQETFARISGYCEQTDIHSPNVTVFESITYSAWLRLSSDIDDGTKKMFXVEEVMTLVELDVLRDALVGLPGVSGLSTEQRKRLTIAXVELVANPSITRMDELGIRLDARAAAIVMRTVRNTVNTGRTVVCTIHQPSIDIFESFDELLLLKRGGQVIYAGELGRHSHKLVEYFEAIPGVPKITEGYNPATWVLEVSSPLSEARLNMNFAEIYASSVLYRKNQEVIKELSIPRSDNQDLSFPTKYSQNFYGQCAANFWKQYRSYWKNPPYNAMRYLMTCLFGLVFGTVFWQKGKNIDSQQDLYNLLGATYAATFFLGASNCITVQPVVSIERAVFYREKAAGMYSPLSYAFAQTCVEVIYTILQGILYTVIIYAMIGYDWKADKFFYFLFFITASFNYFTLFGMMLVACTPSALLANILITFALPLWNLFAGFLIVRPAIPIWWRWYYWANPVSWTIYGVVASQFGENEGELSVPGGTPVVVKQFLKDNLGIQHDLLGYVVLVHFAYVIVFFFVFGYSIKFFNFQKR

SEQ ID NO: 1726 - protein, 764 aa, Zea mays
  unsure (1)..(764): unsure at all Xaa locations
XPASAPRPIFLFAXILLPRQDIKHWWIWAYWSSPMTYSNNAISVNEFLATRWAMPNNEANIVAPTIGKAILKYKGYFGGQWGYWLSIGAMIGYTILFNILFLCALTFLSPGGSSNTVVSVSDDGDKEKSTDQEMFDVANGTNEAANRRTQTGMVLPFQPLSLSFNHMNYYVDMPAAMSRXGFTESRLQLLSDISGAFRPGVLTALVGVSGAGKTTLMDVLAGRKTSGTIEGDIKLSGYPKKQETFARVSGYCEQTDIHSPNVTVYESLVYSAWLRLSSEVDDNTRKMFVEEVMSLVELDVLRDALVGLPGVSGLSTEQRKRLTIAVELVANPSIIFMDEPTSGLDARAAAIVMRTVRNTVNTGRTVVCTIHQPSIDIFEAFDELLLLKRGGRVIYAGQLGVQSRVLVEYFEAIPGVPKITEGYNPATWMLEVSSPLAEARLDVDFAEIYANSALYRHNQELIKELSIPPPGYQDLSFPTKYAQNFLNQCMANTWKQFRSYWKNPPYNAMRYLMTILYGLVFGSVFWRMGKNVKSEQELQNLLGATYAAVFFLGSANLLSSVPVFSIERTVFYREKAAGMFSPLSYSFAVTVVELVYSIAQGILYTIPLYSMIGYEWKADKFFYFMFFLTCSFLYFSLFGAMLVTCTPSAMLASIVVSFSLTGWNIFAGFLVPRPALPIWWRWFYWCNPVSWTIYGVTASQFGDVGRNVTATGNAGTVVVKEFLEQNLGMKHDFLGYVVLAHFGYILLFVFLFAYGTKALNFQKR

SEQ ID NO: 1727 - protein, 607 aa, Zea mays
  unsure (1)..(607): unsure at all Xaa locations
XPLSMCFRNINYYVDVPVELKKQGVAEDRLQLLVDVTGAFRPGILTALVGVSGAGKTTLMDVLAGRKTGGLIEGSITISGYPKNQETFTRISGYCEQNDVHSPCLTVIESLLYSACLRLPSHVDADTQRAFVEEVMELVELNPLSGALVGLPGVNGLSTEQRKRLTIAVELVANPSIVFMDEPTSGLDARSAAIVMRTVRNIVNTGRTIVCTIHQPSIDIFESFDELLFMKRGGQLIYAGPLGAKSRNLVDFFEAIPGVPKIRDGYNPAAWMLEVTSTQMEQILGVDFAEYYRQSKLFQQTREIVEALSRPSSESKELTFATKYAQPFCAQYMACLWKHNLSYWRNPQYTAVRFFYTVIISLMFGTICWKFGSRRGTQHDIFNAMGAMYAAVLFIGITNATSVQPVISIERFVSYRERAAGMYSALPFAFSLVTVEFPYILVQSLIYGSIFYSLGSFEWTAAKFLWYLFFMYFTLLYFTFYGMMTTAITPNHTIAPIIAAPFYTLWNLFCGFMIPRKRIPVWWRWYYWANPVSWTLYGLLTSQFGDLDQPLLMADGVTSTTVVAFLEEHFGFRHDFLGAVAAMVAGFCVLFAVVFALAIKYLNFQRR

SEQ ID NO: 1728 - protein, 501 aa, Zea mays
RFFRQFIAFFATHQMAMALFRFLGAVLKTMVVANTFGMFVLLIIFIFGGFVIRRNDIKPWWIWGYWASPMMYSQNALSVNEFLASRWASPNNDTIIDAPTVGKAILISKGLFTGEWGFWLSIGALVGFIILFNMLYLWALTYLSLSASSGSNALVSEGEDDVMVLKGRSKDEMSQTNTVAQSSRVTLPFQPLALCFNHVNYYVDMPAEMKEQGFTESRLQLLSDISGTFRPGVLTALVGVSGAGKTTLMDVLAGRKTSGAIEGDITLSGYPKKQETFARISGYCEQTDIHSPNVTVFESITYSAWLRLSSDIDDGTKKMFVEEVMALVELDVLRDALVGLPGVSGLSTEQRKRLTIAVELVANPSIIFMDEPTSGLDARAAAIVMRTVRNTVNTGRTVVCTIHQPSIDIFESFDELLLLKRGGQVIYAGELGRHSHKLVEYFESISGVPKITEGYNPATWVLEVSSPLSEARLNMNFAEIYANSVLYRKNQELIKGVEYPP

SEQ ID NO: 1729 - protein, 302 aa, Zea mays
  unsure (1)..(302): unsure at all Xaa locations
XXRIPLHFMSFSVIISMTQEMKSQGVTADKLQLLSGISGAFRPGVLTALMGVSGSGKTTLMDVLSGRKTGGYIEGEIYISGYPKNQETFARISGYCEQNDIHSPQITIRESLLFSAFMRLPKEVTDQEKKIFVDEVMELVELNGLKDAIVGLPGVNGLSTEQRKRLTVAVELVANPSIIFMDEPTSGLDARAAAVVMRTVRNTVNTGRTVVCTIHQPSIDIFEAFDELLLLKRGGRVIYDGSLGVNSIDMIDYFQSIPGVNHISEGYNPATWMLEITTQACEEILGLDFAVVYKNSDQFRXX

SEQ ID NO: 1730 - protein, 358 aa, Zea mays
  unsure (1)..(358): unsure at all Xaa locations
XGMVLPXXPLSMCFRNINYYVDVPVELKKQGVAEDRLQLLVDVTGAFRPGILTALVGVSGAGKTTLMDVLAGRKTGGLIEGSITISGYPKNQETFTRISGYCEQNDVHSPCLTVIESLLYSACRRLPSHVDADTQRAFVEEVMELVELNPLSGALVGLPGVNGLSTEQRKRLTIAVELVANPSIVFMDEPTSGLDARSAAIVMRTVRIIVNTGRTIVCTIHQPSFDIFGSFDELLFMKRGGQLIYAGPLGAKSRNLVDFFEAIPGVPKIRDGYNPAAWMLEVTSTQMEQILGVDSAEYYRQSKLFQQTREIVEALSRPSSESKELTFATKYAQPFCAQYMACLWKHNLSYWRNPQYTX

SEQ ID NO: 1731 - protein, 150 aa, Phytophthora infestans
TLMDVIAGRKTGGKVRGEILLNGFPATDLAIRRCTGYCEQIDVHADSATILEALTLSAFLRQGSDVSSESKYDSVTECLELLELDSIADRCVRGCSVEQLQRLTIGVELAAQPSVLFLDEPTSGLDARAAKVIMDGVRKVANTGRTILCT

SEQ ID NO: 1732 - protein, 119 aa, Issatchenkia orientalis
LLDVLANRVTMGVVSGSMFVNGRLRDQSFQRSTGYVQQQDLHLQTSTVREALRFSAYLRQSRTISKKEKDEYVESIIDILEIRSYADAVVGVAGEGLNVEQRKRLTIGVDVAAKPKLLL

SEQ ID NO: 1733 - protein, 119 aa, Issatchenkia orientalis
LLNVLSRRTEVGVITGDMFVNGAPVDSSFERRTGYVQQQDLHVAELTVKESLLFSARLRRPRSVPDEEKIEYVDKVMKILNMEDYADSIAGVPGYGLNVEQRKKLSIATELVAKPSLLL

SEQ ID NO: 1734 - protein, 1053 aa, Saccharomyces bayanus
  unsure (1)..(1053): unsure at all Xaa locations
PTVFNAPYKLIKNATRIFQNSNEGSTFQILKPMEGCLNPGELLVVLGRPGSGCTTLLKSISSNTHGFDLGKDTEISYSGYSGDDIKKHYRGEVVYNAEADIHLPHLTVFQTLLTVARLKTPQNRIKGVDRESYANHLAEVAMATYGLSHTRNTKVGSDLVRGVSGGERKRVSIAEVSICGSKFQCWDNATRGLDSATALEFIRALKIQANISNTSATVAIYQCSQDAYDLFNKVCVLDDGYQIYYGPGDKAKKYFEDMGYVCPSRQTTADFLTSVTSVSERILNEDMLKKGISIPQTPKDMNDYWVKSQNYKELMEEIDQKINNNDEAAREAIKEAHIAKQSNRARPTSPYTVNYMMQVKYLLARNMWRIRNNIGFTLFMILGNSGMALILGSMFYKIMKNGDTSTFFFRGSAMFFAILFNAFSSLLEIFSLYEARSITEKHRTYSLYHPSADAFASVLSEVPTKLTIAVCFNIIFYFLVDFRRNGGVFFFYLLINIVAVFSMSHLFRCVGSLTKTLSEAMVPASMLLLSLSMYTGFAIPKKKILGWSKWIWYINPLAYLFESLLINEFHDRKFPCAQYIPRGTAYANSTGTETICSVVGAIPGQDYVXGDDFIKESYQYYHSHKWRGFGIGMAYVIFFFFVYLFLCEYNEGAKQKGEILVFPRSVVKKMKKQGALKEKNGNDPENVGERSDFSSDKKMLQESSEEESDTYGDVGLSKSEAIFHWRNLCYEVQIKTETRRILNNVDGWVKPGTLTALMGASGAGKTTLLDCLADRVTMGVITGDIFVNGIPRDESFPRSIGYCQQQDLHLKTATVRESLRFSAYLRQPAEVSIEEKNVYVEEVIKILEMEKYADAVVGIAGEGLNVEQRKRLTIGVELTAKPKLLVFLDEPTSGLDSQTAWSICQLMKKLANHGQAILCTIHQPSAILMQEFDRLLFMQRGGKTVYFGDLGDGCKTMIDYFENHSSHKCPPSANPAEWMLEVVGAAPGTHADQDYHEVWRNSDEYRAVQSELDWMEKELPKKGPITAEADQHEFAQSIVYQTKLVSIRLFQQY

SEQ ID NO: 1735 - protein, 459 aa, Saccharomyces bayanus
DTKDVEDRASRSSGQGSSSSSAAQSIAQHPYRGLDNEAAERVHELARTLTSQSMLHSTTSNNADQNSSSSTHNTQHNNADSRSIFSTDMMGVNPVFTNPDTPGYNPKLDPNSDEFSSTAWVQNMANISSSDPEFYKPYTLGCVWKNLSASGDSADVSYQSTFVNIVPKLLTKAFRILKPRKDEDTFQILKPMDGCLNPGELLVVLGRPGSGCTTLLKSISSNSHGFKVAKDSTVSYDGLSSSDIKKHYRGEVVYNAESDIHLPHLTVYQTLFTVARLKTPQNRIKGVDRESYANHVTEVAMATYGLSHTRDTKVGNDLVRGVSGGERKRVSIAEVAICGSRFQCWDNATRGLDSATALEFIRALKTQADIGKSAATVAIYQCSQDSYDLFDKVCVLDDGYQLYFGSSKKAKKYFQDMGYVCPPRQTTADFLTSITSPTERIINKEYIAKGIKVPQTARE

SEQ ID NO: 1736 - protein, 333 aa, Saccharomyces bayanus
HWRDLCYDVPVKGGERRILNNVDGWVKPGTLTALMGASGAGKTTLLDCLAERVTMGVITGNIFVDGRLRDESFPRSIGYCQQQDLHLKTATVRESLRFSAYLRQPSSVSLEEKDKYVEEVIKILEMEKYSDAVVGVAGEGLNVEQRKRLTIGVELAARPKLLVFLDEPTSGLDSQTAWDTCQLMRKLATHGQAILCTIHQPSAILMQQFDRLLFLQRGGQTVYFGDLGDGCKTMIDYFESHGAHKCPPEANPAECMLEIVGAAPGSHATQDYNEVWRNSDEYRAIQEELAWMEKKLPGKSKDPTADAHKPYAAPISYQFKMVTVRVCQQYWRS

SEQ ID NO: 1737 - protein, 1023 aa, Saccharomyces kluyveri
  unsure (1)..(1023): unsure at all Xaa locations
MSFEDNIGDDSITKEIPAIEGDVAPDHRPYFGLENDLKEQENIRRLARSLTRQSLHSVSNNSLADNENPNDTNSEFGLKRSLTSISHVPGQVPFSSKDIDPRLDXESDTFDPAFWAQNLRKLYLSDKDYYKPVELGVCLKNMRVSGVSVDSDYQSTVLNLPLKWGEKLYTNLFRSNDESRYFDILKPMDALFEPGRLCVVLGRPGAGCSTLLKTISARTYGFKIQPESVISYDGITQKEITKHYRGDVIYSAEMDYHFASLPVGYTLEFAARCRCPESRPEGITREQYYKHYAAVVMATNGLSHTYNTKVGNDFIRGVSGGERKRVSISEVTLAGAKVQCWDNSTRGLDSATALEFVRALKTNANVSRITPLIAIYQCSQDAYDLFDDVLLLYEGYEIYFGKAEDAKQYFLDMGWDCPPRQTTADFLTSVSSPAERRAKPEWENKVPRTAKEFYDIWLHSKEYAKLKVKIDKHLAKSEDGETKRQLAEHHRARQSKNLRPQSPFIISFGMQVKAVIHRNIQRIKGDPSVYLSAIISNSVMGLLVSSMFYNQKSNTGSFYYRTSALFTAILFNSFSSFLEILALFEARKIVEKHKTYAFYHPSADALASIITELPSKILVALGFNLSFYFMVNFRRTPGHFFFYFLVSVTSTFAMSHLFRTIGAASTSLQMAMTPASLLLLIISIYVGFVIPKGSLLGWSKWLYYLNPIARSMESMVANEFAHRTFECSHFIPSGPGYENVTLANKVCAVVGSVAGQSTVDGTSYMEKSFSYYDKHRWRNWGIVLCYAVFFLIVYMVLIEYNKGEMQKGEVILFTRSTLNKKRKKNEALKGDIESNDSITKDLTVSEESYSNEKENSLQKIGSEDIFHWRDVCYDVKIKSETRRILSNVDGWVKPGTLTALMGSSGAGKTTLLDVLANRVSTGVITGNMFVNGHLRDESFQRSTGYCQQQDLHGRTQTVREALRFSAHLRQPQDVSKAEKDEYVEEIIKLLEMEAYSDALVGVTGEGLNVEQRKRLPIGVELVA

SEQ ID NO: 1738 - protein, 1551 aa, Venturia inaequalis
MAYAGTKGDGIIRTASGHETYAPDGLGTPQREYEEEIAPSEDPSRATSERYAPITGHLYRRNSSDTEKGSDEDFTMATRSKSFTENMDTDDKDKLNRILTSLSQHQTRSSTLRRNDTISGLKEDDPVFDPSHKDFDLYKYLRLFMRDLQADGRETKKAGIVFRNLSVSGSGAALQLQSTVSDFVLAPFRLRELFSSSKSHKQIIDKFDGVLKSGELLIVLGRPGSGCSTFLKTLCGELTGLTVDKGSVIHYNGIPQKKMIKEFKGEVVYNQEVDKHFPHLTVGQTLEFAAAVRTPSNRLHGESRTEFSSQVAKVVMAVFGLSHTYNTKVGNDFVRGVSGGERKRVSIAEMAVAGAPLAAWDNSTRGLDSATALKFVEATRISADLTGSSHAIAIYQASQAIYDRFDKAVVLYSGRQIYFGPASKAKQFFEEQGWYCPKRQTTGDFLTSITNPSERRPREGMEKQVPRTPEDFEKYWRNSEMYQSLQKEIEDHETEFPIGGETLGKLQQQKRNAQASHTRPKSPYMISVPMQIKLCTKRAYQRIWNDMSSTLTMFISQIIMSLIIGSVFYGTPNATAGFFSKGAVLFFAVLLNALVAMTEINSLYDQRPIVEKHNSYAFYHPATEAIAGIVSDIPVKFLLAVGFNVIFYFLAGLRREPSQFFLYFLVSYVIMFVMAAVFRTMAAVTKTISQAMSLAGVLVLALVIYTGFVIPVSYMKPWFGWIHYINPIYYAFEILIANEFHGRDFTCSAIIPAYTPLQGDSWICSIVGAVPGRRTVSGDDFIMQMYQYSYSHVWRNFGILLGFLCGFMCIYFVGVEVNSSTSSAAEFLIFRRGYVPAYMQDDPKHAGNDEEKMADGTTDAKEDGGDVSAIPPQKDIFTWRDIVYDIQIKGEDRRLLDHVTGWVRPGTLTALMGVSGAGKTTLLDVLAQRTTMGVITGDMLVNGKPLDASFQRKTGYVQQQDLHLETATVRESLRFSAELRQPKTVTLQEKFDYVEDVIKMLNMEDFAEAIVGSPGEGLNVEQRKLLTIGVELAAKPKLLLFLDEPTSGLDSQSAWAICAFLRKLADAGQAVLCTIHQPSAILFQEFDRLLFLAKGGKTVYFGPVGKNSETLIDYYESNGARKCGEEENPAEYMLEIVNKGSSGQGQDWHEVWKGSKEREAVNEELKQIHKEKEGEAIAGANEEGAQDEFAMPFTAQVKAVTVRVFQQYWRMPSYVFAKWALGIASGLFIGFSFFQANTTQQGVQNVLFSAFMIATIFSSLVQQIMPLFVNQRSLYEVRERPSKAYSWKAFMIANIVVEIPYNIFLGVPVFACYLYAIAGIISSVRQVLILLLMIQFFVYAGTFAAMCIAALPDAETAAAVVTLLFATSLTFNGVMQSPQALPGFWIFMYRISPFTYWISSLVSTMLHGRRIECSSSETSRFSPPAGQTCQQYLADYLQTAPGTLQNPNDTTNCRYCSLSTADQLLAGSNVKYDTRWRDFGIVWSYVIFNIFVAVLTYYLFRVKKWNKGTGKSDGAKKAGFLGKILKKGANKGNDAKTEKGEQQANQHQRAI

SEQ ID NO: 1739 - protein, 1452 aa, Aspergillus fumigatus
MNESHEAGKNSSTNVEEREEEVLRLARQFTEQSSYSTAGQTPFAAEAGSALDPNGERFNARAWCKAMLQMHIGDKEAHPLRTLGVAFSNLNVHGFGSDTDYQKSVGNVWLKTLSLARIAFGQKQRKVDILQNLEGLVEAGEMLVVLGPPGSGCSTFLKTIAGETYGFHVDKNSNINFQGIAKQMAHEFRGEAIYTAEVDVHFPKLTVGDTLYFAARARTPRHIPGGVNATQYAGHMRDVIMAMFGISHTKNTIVGNDFIRGVSGGERKRVSIAEACLSNAPLQCWDNSTRGLDSANAIEFCKTLRMQADINGTTACVSLYQAPQAAYDYFDKVLVLYEGREIYFGPTSMAKHYFLQMGFVCPDRQTDADFLTSMTSHLERVVQPGYEDRVPRTPDEFAARWKASPQRAQLMQHIKSYNAKFALDGEYLDKFKQSRRAQQAKAQRVSSPYTLSYVQQVKLCLWRGYQRLKADPSVTISSLFGNTIISLVIASIFYNLKADTSTFFQRGALLFFAVLMNALGCGLEMLTLYAQRGIIEKHSRYALYHPSAEAFSSMIMDLPYKILNAITSNIVLYFMTNLRRAPGAFFFFVFTSFILTLTMSMFFRSMASLSRSLVQVLPFSAVLLLGLSMYTGFAIPTGYMLGWARWIAYINPISYGFESLMINEFHNRDFPCMDYVPSGPGYTDVGLNNRVCSTVRSVPGQAFVNGNAYIESAYSYTASHKWRNIGVIFAYMFLLGAVYLVATDFITEKKPKGEILVFPRGHKALKKGKSDEDLEGGGGRSATVEKIGSDGLAMIERQTAIFQWKDVCFDIKIGKENCRILDHVDGWVKPGILTALMGVSGAGKTTLLDVLATRTTMGIISGEMLVDGQPRDESFQRKTGYAQQQDLHLSTATVREALEFSALLRQSAHVPRQEKIDYVTEVIKLLDMTEYADAVIGVPGEGLNVEQRKRLTIGVELAARPQLLLFLDEPTSGLDSQTSWAILDLLDKLKKNGQAILCTIHQPSAMLFQRFDRLLFLQAGGRTVYFGEIGQNSQILIDYFVRNGAPPCPPDANPAEWMLDVIGAAPGSHTSINWFETWRRSPEYARVQEHLAELKHERRHQTNLFRTTSGQKREDKDSYREFAAPFWAQLYQVQVRVFQQIWRSPTYINSKTALCVLSALFVGFSLFHTPNTIQGLQNQMFGIFMLLTLFGQLIQQIMPHFVAQRALYEVRDRPAKTYSWKAFLIANIVVELPWNSLMSVLMFLCWYYPIGLYRNAEPTDAVHLRGTQMWLMIWTFLLFSSTFAHFMIAAFDAAENAGNLGNLLFLLCLLFCGVLATPDQLPRFWIFMYRVSPFTYLVSGMLSVGISNTNVTCADNEYLRFDPVNGTCGEYMGSYMSNLGGYLADEMATANCSFCPIKETNVFLGRVSSSYSDIWRNFGLMWVFIVFNIFAACSLYWWVRVPRDKKPVAKAE

SEQ ID NO: 1740 - protein, 1491 aa, Gibberella pulicaris
MATPDANMSSTRSEQSSHDTIVNNELSTNEKPLQSAPAPGDQTSSTDDEDDGPQTEEMVRRHSIVRDLARNYTNTSHHFNGSNADLFNAADPASPLNPSSENFNARAWAKAMSKSMNENGAGFRQSGLCFQDMNVFGYGAETDYQKDVGNVWLGLPSMAQQLFKPNAGKRRIDILRGFDGVVNAGEMLVVLGPPGSGCSTFLKSISGETNGIYVDDSTYFNYNGIAADEMHKHHKGETIYTAEVDVHFPMLSVGDTLTFAARARCPQNLPSGINHNQYSEHMRDVVMAMYGISHTVNTQVGDNYIRGVSGGERKRVTIAEATLSNAPFQCWDNSTRGLDSANAIEFCKTLRLQSELFGQTCAVSIYQAPQTAYDLFDKALVIYEGRQIFFGPADEAKAYFIGLGFECPDRQTTPDFLTSMTAPSERVVRPGFENKVPRTPDEFATCWKQSQQYQIVRAEVESYKSLYPINGSSADAFRENKQSAQAKGQRLKSPFTLSYMQQVQLCLWRGFKRLVGSPGVTIFQLIANTVVALIASSLFYNMEPTTGDFFKRGAVLFLAVLSNAFASALEILTQYAQRPIVEKHARYAFHHASAESFASILVDMPYKITNSILFNLTLYFMTNLNRDAGAFFFYLLVSFIMVLAMSGIFRSIASISRTLSQAMVPASLLILALVIFAGFVVPVDYMLGWCRWINYLDPVAYAFESLMVNEFSGRNFTCTGFVPNPLIPGYADVDDMNRACSTVGAVPGQSWVNGDDYLNLEYKYFHSNKWRNVGILIAMTIFNHIVYIVATEYISAKKSKGEVLVFRRSNMPANVKSDPEAASSGPIPVTEKNNNEVANIQGSTSVFHWNDVCYDIKIKGEPRRILDHVDGWVKPGTLTALMGVSGAGKTTLLDCLADRISMGVITGEMLVDGKLRDDSFQRKTGYVQQQDLHLETSTVREALTFSALLRQPASTPREEKIAYVDEVIKLLDMQEYADAVVGVLGEGLNVEQRKRLTIGVELAAKPPLLLFVDEPTSGLDSQTSWAILDLLEKLSKAGQSILCTIHQPSAMLFQRFDRLLFLAKGGRTIYFGDIGKNSETLTNYFVKNGSDPCPKGENPAEWMLEVIGAAPGSHTEIDWHQTWRESSEYQEVQGELQRLKAEGNANGGAEIHDAESYREFAAPFGEQLRIATTRVFQQYWRTPSYIYSKAALCIQVGLFIGLVFLNAPLSLRGLQNQMFAIFQVLTVFGQLVQMQMPHFVTQRSLYEVRERPSKTYSWKVFMLSQIMAEIPWNTLMSVFLFVCIYYPVGFQKNAEFAGQTAERGGLMWLLFWQFLIFTCTFAHAAIAITDTAEAGGNLANVVFMLSLFFCGVFGSPDNMPGFWIWMYRVSPFTYLVSAILSTGIGNAEVTCTAQELTTFNPPNGTTCGEYLESYIAQAGGYLTNNDATSDCKFCTIKDTNVYLEALSSSYDNRWRDFGIGMVYIVVNIVGALFLYWAFRMPKNKNKKQKKA

SEQ ID NO: 1741 - protein, 1547 aa, Neurospora crassa
MSFMVGTGSFGNYDHTARTSGAPLGRRQTHDLEEETVAANPSDPTHPEPGSSHSHNDQMTGTRATSMTDVDGSTARSEKEKDAQHANDSDSTCEEDEDRIEENRRASQVLALARKYTSQSHAAVPEGKTVFQVDDENSPLNPNGPNFNSRAWAKALVEQISGDGLQFRTTGVAFQNLNVFGFGSATDYQKDVLNVGLEIFSQVRNLIGMGRQRRIDILRDFDGVVRKGEMLVVLGPPGSGCTTFLKTIAGEHDGIFIDDQSYFNYQGMTAKEIHTHHRGEAIYSAEVDTHFPQLTVGETLTFAARARAPRHIPDGVTKTDFSNHLRDVVMAMFGISHTINTRVGNEYIRGVSGGERKRVSIAEAALSGAPLQCWDNSTRGLDSANAIEFVKTLRLQTELFGSTACVSIYQAPQSAYDLFDKAAVLYEGRQIFFGRADEAKQYFVNLGFECPARQTTPDFLTSMTSPTERIVRPGFEGKAPRTPDEFAAAWKNSAEYKSLQAEIEEYKKEHPINGPDAEAFRASKKAQQAKGQRAKSPFTLSYIQQVQLCLWRGWRRLVGDPSITMGSLIGNFIMALIISSVFYNLQPNTDSFYRRGALLFFAILMNAFSSALEILTLYAQRPIVEKHARYALYHPSAEAVASMLVDMPYKLANSIVFNVTLYFMTNLRREPGPFFFFLLVSFVTVLVMSMIFRTIASSSRTLSQAMVPAAIIILALVIFTGFAIPTTYMLGWCRWINYIDPIAYAFESLMLNEFVGRKFQCEAYVPSPSIPTYANVGNLNRVCSAVGSVAGQDYVLGDDYLRESFNYVNSHRWRNFGIIIAFICFFLFTYIVAAEAVSAKKSKGEVLVFRRGYKPASFKENKGDAESGGVQVAGKGHVSDGNTSDKEAGFLQAQTSVFHWNNVSYHVPIKKEIRQILNNVDGWVKPGTLTALMGVSGAGKTTLLDCLADRINVGVITGEMLVDGKPRDTSFQRKTGYVQQQDLHLETTTVREALNFSALLRQPAHVPRAEKLAYVDEVIKLLDMEEYADAIIGVPGEGLNVEQRKRLTIGVELAAKPPLLLFVDEPTSGLDSQTSWAILDLLEKLTKSGQAILCTIHQPSAMLFQRFDRLLFLAKGGRTVYFGDIGKNSKTMASYFERQSGVKCPPDANPAEWMLEVIGAAPGTHSEIDWHDAWRSSPEYQAVQEELQRLKNNSNHADALEMDGDAGGYREFAAPFFEQLREVTYRVFQQYWRTPSYIYSKTALCISVALFIGFVFYNAPNTIQGLQNQMFAIFNLLTIFGQLVQQTMPHFVVQRSLYEVRERPSKVYGWKVFMLSQIIVELPWNALMGAIMYFCWYYPVGLYRNAEPMGQVTERGGLMFLLLLAFMWFTSTFTDFMIAGFETAEAGGNIAQLLFSLCLIFCGVLASPEAMPGFWIFMYRVSPFTYLVSAMLSVGVANTDVHCSDVEFLKFNPLNGTCGEYMSDYIKAAGGYLLNPDATDECSFCPIDKTNMFLASVSSDYADRWRNFGILFAYIAFNILAALAVYWLVRVPKKNGIFGFLKKQKKE

SEQ ID NO: 1742 - protein, 1543 aa, Filobasidiella neoformans
MSATGVPAELNNLGAPITATTQNPSGLANSQVTSGPASSATQHDEHRSSAGNTLADEENDKAVESEKAEVIDAAADGKQKRLAADSSENIVTELEPHHVSIHRGKEEFAALERRYSTLSQQSQHELHRPTTRHSVRSSFSRKDRVVSRLTQDDAEKAKEGEGEFNLVDVLRSGRENQDEAGIKRKAVGVIWEDLEVIGAGGMRINIRNFSSAIIEQFMMPAFKILSIFGVNPFAPKPKAILHPSSGLLKPGEMCLVLGRPGAGCTTFLKTITNQRAGFMEIKGNVEYAGVGWKEMRKRYGGEVVYNQEDDDHLPTLTVAQTIRFAPATKTPKKKIPGVSAKQFQDDMLDLLLSMLNIKHTANTIVGNAYVRGVSGGERKRVSIAEMFCSGATVCSWDNSTRGLDASTALDYAKSLRLLTDIMGQTTFVSLYQAGEGIYDQFDKVLVLNEGHVAYFGPAKEARQYMIGLGYRDLPRQTTADYLSGCTDVNERRFADGRDETNVPATPEEMDKAYKESEVCARMTREREEYKQLMAEDATAREDFRQAVLEQKHKGVSKKSPYTVSFLQQVFIIFKRQLRLKFQDHFGISTGYATAIISALIVGSVYFRLPETASGAFTRGGLLFLGLLFNALTSFSELPSQMLGRSVLYRQNEYRFYRPAAFALAAVLADVPYNASVIFLFSIVLYFMGGLYSSGGAFFMFFLFVFLTFMVMSAFFRTLGVATSDYNVAARLASVLISFMVTYTGYMIPVQRMKRWLFWIFYLNPLSYGYEAIFANEFSRINLTCDSSYTIPRNIPEAGITGYPDTLGPNQMCSIFGSTPGDPNVSGSDYMATGYSYYKAHIWRNFGILLGFFAFFMFLQMLFIEVLEQGAKHFSINVYKKEDKDLKAKNERLAERLEAFRAGELEQDLSELKMRPEPFTWEVLNYTVPVPGGHRQLLNDIYGYVKPGSLTALMGASGAGKTTVLDVRASRKNIGVIEGDVLMNGRPIGTGFQRGCGYAEQQDTHEWTTTVREALRYSAYLRQPQHVPKQEKDDYVEDIIELLELQELADAMIGFPGYGLSVEARKRVTIGVELAAKPELLLFLDEPTSGLDGQSAYNIVRFLKKLCAAGQKILCTIHQPNALLFQSFDRLLLLQRGGECVYFGDIGPDSKVLIDYLERNGAKVPHDANPAEFMLEAIGAGSRKRIGSDWGEKWRNSPEFAEVKREIQELKAEALAKPVEEKSNRTEYATSFFFQLKTVLRRTNVALWRNADYQWTRLFAHLAIGLIVTLTFLQLDNSVQSLQYRVFAIFFATVLPALILAQIEPQYIMSRMTFNREASSKMYSSTVFALTQLLSEMPYSLGCAVSFFLLLYYGVGFPYASSRAGYFFLMILVTEVYAVTLGQAVAALSPTILIAALFNPFLLVLFSIFCGVTAPPPTLPYFWRKWMWPLDPFTRLISGLVSTVLQDQEVVCKDGEYQVFPAPSGQTCQQWAGAFAEAIGGYINNPDSTGDCQFCQYRTGQAFFTPLEISFSTRWRDFGIFICYVVFNILVLLIAARFLKWQRR

SEQ ID NO: 1743 - protein, 122 aa, Colletotrichum lagenarium
TLLDVLATRVSIGVVSGDTLINGVPTDATFQHQVGYVQQQDIHLSTMTVREALESSAVLRQSSEVPRKERLQYVNHVIEMLEMQDFAGAVIGVPGEGLNVEQRKRLTIGVELAARPQLLVFF

SEQ ID NO: 1744 - protein, 1499 aa, Mycosphaerella graminicola
MTARMASESKIDDFGDEKSNRHSPSNDTLMKEKNESPGDVSSPSSTSINERNKEVNCLARRFSEISGWNEIPSNPLEAAKGTELDPLSPNFKARTWVKSMLKFSKQDGRTPMRTGGVAFRNLSAHGFGLATDYQKDVGNIWLDSISIVKKLFGMEKSRRIDILQDFEGLLESGEMLVVLGPPGSGCSTFLKTLTGETHGFQVDKNSYMNFQGIPAGEMHSVFRSEAIYTAEVDIHFPQLTVGETLTFAARARTPRFIPGDVERNVYAEHMRDVVMAMYGISHTINTRVGNDYLRGVSGGERKRVTIAEASLSGAALQAWDNSTRGLDSANAVEFCKSVRLGCELGGSAAMVAIYQAPRAAYEQFDKVIVLYEGRQIYFGNIHAGKTYFEDLGFQCPDRQTTPDFLTSMTSAVERVVKPGWEDKVPRSPDEFAAAWKASPTRQKLIQDIEDYERRFPFKGEAYQQFVDSRKAQKAKSHRFKSPYTISYLQQCQVCLWRGYRRLCADPELLYTSLFMNSILALIVGTLFYNLKLTTASFYQRGAVIFFGTMMNAFGSSLEILTLYHQRPIVEKHERYALYHPSAEAVASMIMDLPYKISNCIIFNTVLYFMVNLRREPGAFFFFIFLAFITTLTMSMMFRTIASCSRTLSQAMTPSALILLWLLIFTGFAIPVDYMLGWCRWLNYIDPVAYAFESLMINEFSGRNYACKSDDLVPSYGTLAAQSQVCNAVGAVAGRDYVEGEAYINSAYSYYRSHKWRNIGIIFAFMVGFLTVYLVASENIRAKKSKGEVLLFQKGRIPAALKEKSQDEEMSEVNRVSSVMCRQMSNVEATDVILRQTAVFSWRNVCYDIKIKGEERRILDNVDGWVKPGTLTALMGVSGAGKTTLLDVLATRVTMGVISGEMLVDGRERDNSFQRKTGYVQQQDLHLATSTVREALNFSALLRQPASVSRQEKLDYVDEVIKLLDMQEYADAVVGVPGEGLNVEQRKRLTVGVELAAKPQLLLFLDEPTSGLDSQTSWAICDLMEKLKNSGQAILCTIHQPSAMLFQRFNRLLFLAKGGKTVYFGEVGPGAKILSTYFERNGGHPCPPDANPAEWMLEVIGAAPGSRTDIDWHQVWRASPEYAATQRELDHLKDNGALVRQPSMVESDNESFNAFAAGFWSQLREVLVRVALQYWRTPSYIYAKLSLCTLAGLFIGFIFYKAPLTHQGLTNQMLSIFMIFTLFSNVSQQIMPHFVLQRSLYEARERPSKTYSWQVFLISNILIELPWNAFAGLLFFLCYYYPIGLYANASPTDSVAERGGYFFLMILAFFLFTSTFTNLMIAGMDSAETSGNIATLLFSLCLIFNGILASPKTMPKFWLFLYRVSPFTYITGGLMSAGLMDQTTHCAANEFVTFQPDGGEGGGTTCGTYMDPYISGANGTVGKGGYILNPSADADCKYCSFNTTNHFLKLVSIDPADRWRDLGITWVYILVNVAGAVALYWLFRVPKGSKKKAEKKEKTG

SEQ ID NO: 1745 - protein, 1635 aa, Mycosphaerella graminicola
MATGGSASTPIVGDYNPERVEQLFDIPRPEQGNIYVEAENAARTPSGAQESQLSGSTPGINTADHADDSYLTANGREAAESINDDKKSSGFNSDDDQPINAEERNILRRLATNSRRSMNNTNEDPEALQRTGTLDGLGMDDPVFDPNSPRFDLYKWLKLTLKLVNDEDIKIKRSGLAFKDLHVSGSGSALNLQPTVSSMLSAPLRIGEMFSMAKKPHKQILRSFDGLMKSGELLIVLGRPGSGCSTLLKSLTGQMHGLTMDEKTTIHYNGIDQKQMIKEFQGEVIYNQEVDKHFPHLTVGQTLEHAAALRMSQQRPLGTSRQSAVEYLTQVVMAVYGLSHTYNTKVGNDFVRGVSGGERKRVSIAEMALAGSALAAWDNSTRGLDSATALTFIKALRLNADLVGSAHAVAIYQASQAIYDLFDKAIVLYEGREIFFGKASVAKKYFEDMGFYCPSRQTTGDFLTSVTNPAERQLREGYEDRAPRTGDDFEKYWHDSPEYQTLQKEIQGHTKEGSTPSATSSGTSKLSAASKNDNQAKHARPKSPYVVSVPMQIKLNTKRSWQRIWGDKAQTFTPMIFNVIIALIIGSIFFNSPPATSAFTARGAVLFFAILINALSAISEINSLYDQRPIVEKHKSYAFYHPATEAIAGIVMDVPLKFVVAVCFNLVLYFMSGLRREPAQFFLFFLIAFVSTFVMSAVFRTLAALTKTISQAMALSGVMVLALVIYTGFVVPTKYMKPWFGWIRWINPIFYAFEILVANEFHAREFECSQFIPTYTQFGGETFICSVVGAVAGELTVTGDAYIAEMYGYYYSHVWRNFGILLAFFFAFMVIYFVAVELNSSTFSTAEVLVFRRGHVPAYMQNIDKPGKEDGEAAAAEKGPEKGDEGGDVSAIPPQTDIFTWRDVDYDIEIKGEPRRLLDHVSGWVKPGTLTALMGTSGAGKTTLLDVLAQRTTMGVVTGNMFVNGAPLDDSFQRKTGYVQQQDLHLETSTVRESLRFSAMLRQPRTVSKQEKYEYVEEVIKMLNMEDFAEAVVGVPGEGLNVEQRKLLTIGVELAAKPKLLLFLDEPTSGLDSQSAWAICAFLRKLADAGQAVLCTIHQPSAILFQEFDRLLFLRKGGHTVYFGDIGKNSRTLLDYFESNGARDCGEEENPAEYMLEIVGDDSSDWVGTWNDSKEARRGTAGDRTHSQGTLLRGEELDRRQRRPLRPRRIRHAFRRPTQDGHSPRVPTILAYAELPVRENGSLHRRWSLHRFLLLLRDATLQGMQNVIYSLFMLTTIFSTLVQQIQPLFVTQRSLYEVRERPSKAYSWKAFLIANMVVEIPYQIIAGILVYATFYYPVVGIQSSERQVLVMLLCIVLFVYASTFAHMCIAAMPDAQTAGAIVTFLFFMALIFNGVMQPPSALPGFWIFMYRVSPFTYWVASMASAMLHDRQVTCSDTEISTFQPPQGQTCGQYMQPYLEGGAAGYLQNPDATADCGYCSIRVADTFLSGVGISWSNRWRDFGLVWVYVFFNLGMAVFLYWFFRVRSHSKKTSKKSKKSGDKKGAAAVAGTEKDDKKVKKTDTSSSSEGNTPAAASVDPEKDAEAQRSGSTTSAKAVKRQTSRTAGLTRTVSEMGQSVLTTNKGRSRANERNAHVY

SEQ ID NO: 1746 - protein, 1501 aa, Candida albicans
MSDSKMSSQDESKLEKAISQDSSSENHSINEYHGFDAHTSENIQNLARTFTHDSFKDDSSAGLLKYLTHMSEVPGVNPYEHEEINNDQLNPDSENFNAKFWVKNLRKLFESDPEYYKPSKLGIGYRNLRAYGVANDSDYQPTVTNALWKLATEGFRHFQKDDDSRYFDILKSMDAIMRPGELTVVLGRPGAGCSTLLKTIAVNTYGFHIGKESQITYDGLSPHDIERHYRGDVIYSAETDVHFPHLSVGDTLEFAARLRTPQNRGEGIDRETYAKHMASVYMATYGLSHTRNTNVGNDFVRGVSGGERKRVSIAEASLSGANIQCWDNATRGLDSATALEFIRALKTSAVILDTTPLIAIYQCSQDAYDLFDKVVVLYEGYQIFFGKATKAKEYFEKMGWKCPQRQTTADFLTSLTNPAEREPLPGYEDKVPRTAQEFETYWKNSPEYAELTKEIDEYFVECERSNTRETYRESHVAKQSNNTRPASPYTVSFFMQVRYGVARNFLRMKGDPSIPIFSVFGQLVMGLILSSVFYNLSQTTGSFYYRGAAMFFAVLFNAFSSLLEIMSLFEARPIVEKHKKYALYRPSADALASIISELPVKLAMSMSFNFVFYFMVNFRRNPGRFFFYWLMCIWCTFVMSHLFRSIGAVSTSISGAMTPATVLLLAMVIYTGFVIPTPSMLGWSRWINYINPVGYVFESLMVNEFHGREFQCAQYVPSGPGYENISRSNQVCTAVGSVPGNEMVSGTNYLAGAYQYYNSHKWRNLGITIGFAVFFLAIYIALTEFNKGAMQKGEIVLFLKGSLKKHKRKTAASNKGDIEAGPVAGKLDYQDEAEAVNNEKFTEKGSTGSVDFPENREIFFWRDLTYQVKIKKEDRVILDHVDGWVKPGQITALMGASGAGKTTLLNCLSERVTTGIITDGERLVNGHALDSSFQRSIGYVQQQDVHLPTSTVREALQFSAYLRQSNKISKKEKDDYVDYVIDLLEMTDYADALVGVAGEGLNVEQRKRLTIGVELVAKPKLLLFLDEPTSGLDSQTAWSICKLMRKLADHGQAILCTIHQPSALIMAEFDRLLFLQKGGRTAYFGELGENCQTMINYFEKYGADPCPKEANPAEWMLQVVGAAPGSHAKQDYFEVWRNSSEYQAVREEINRMEAELSKLPRDNDPEALLKYAAPLWKQYLLVSWRTIVQDWRSPGYIYSKIFLVVSAALFNGFSFFKAKNNMQGLQNQMFSVFMFFIPFNTLVQQMLPYFVKQRDVYEVREAPSRTFSWFAFIAGQITSEIPYQVAVGTIAFFCWYYPLGLYNNATPTDSVNPRGVLMWMLVTAFYVYTATMGQLCMSFSELADNAANLATLLFTMCLNFCGVLAGPDVLPGFWIFMYRCNPFTYLVQAMLSTGLANTFVKCAEREYVSVKPPNGESCSTYLDPYIKFAGGYFETRNDGSCAFCQMSSTNTFLKSVNSLYSERWRNFGIFIAFIAINIILTVIFYWLARVPKGNREKKNKK

SEQ ID NO: 1747 - protein, 1499 aa, Candida albicans
MSTANTSLSQQLDENPWVDASDNSSVQEYQGFDATASHNIQDLARKLTHGSTNGDHHSANDLARYLSHMSDIPGVSPFNGNISHEQLDPDSENFNAKYWVKNLKKLFESDSDYYKPSKLGVAYRNLRAYGIANDSDYQPTVTNALWKFTTEAINKLKKPDDSKYFDILKSMDAIMRPGELTVVLGRPGAGCSTLLKTIAVNTYGFHIGKESQITYDGLSPHDIERHYRGDVIYSAETDVHFPHLSVGDTLEFAARLRTPQNRGEGIDRETYAKHMASVYMATYGLSHTRNTNVGNDFVRGVSGGERKRVSIAEASLSGANIQCWDNATRGLDSATALEFIRALKTSATILDTTPLIAIYQCSQDAYELFDNVVVLYEGYQIFFGKASKAKEYFENMGWKCPQRQTTADFLTSLTNPAEREPLPGYEDKVPRTAQEFETFWKNSPEYAELTKEIDEYFVECERSNTGETYRESHVGKQSNNTRPSSPYTVSFFMQVRYVIARNFLRMKGDPSIPLISILSQLVMGLILASVFFNLRKSTDTFYFRGGALFFSVLFNAFSSLLEILSLYEARPIVEKHRKYALYRPSADALASIISELPVKLLMTMSFNIVYYFMVNLRRTAGNFFFYWLMCASCTLVMSHMFRSIGAVTTTIATAMSLSTVFLLAMIIYAGFVLPIPYILGWSRWIRYINPVTYIFESLMVNEFHGREFECGQYIPSGPGFENLPVENKVCTTVGSTPGSTVVQGTEYIKLAYQFYSSHKWRNFGITVAFAVFFLGVYVALTEFNKGASQKGEIVLFLKGSLKKHKRKTAASNKGDIEAGPVAGKLDYQDEAEAVNNEKFTEKGSTGSVDFPENREIFFWRDLTYQVKIKKEDRVILDHVDGWVKPGQITALMGASGAGKTTLLNCLSERVTTGIITDGERLVNGHALDSSFQRSIGYVQQQDVHLETTTVREALQFSAYLRQSNKISKKEKDDYVDYVIDLLEMTDYADALVGVAGEGLNVEQRKRLTIGVELVAKPKLLLFLDEPTSGLDSQTAWSICKLMRKLADHGQAILCTIHQPSALIMAEFDKLLFLQKGGRTAYFGELGENCQTMINYFEKYGADPCPKEANPAEWMLQVVGAAPGSHAKQDYFEVWRNSSEYQAVREEINRMEAELSKLPRDNDPEALLKYAAPLWKQYLLVSWRTIVQDWRSPGYIYSKLILVISSSLFIGFSFFKSKNNLQGLQSQMLAVFMFFVPFTTFIDQMLPYFVKHRAVYEVREAPSRTFSWFAFIAGQITSEIPFQIVVGTISYFCWYYPVGLYANAEPTDSVNSRGVLMWMLLTAFYVYTSTMGQLAISLNELIDNAANLATTLFTLCLMFCGVLAGPNVIPGFWIFMYRCNPFTYLIQAILSTGLANAKVTCAPRELVTLKPPMGETCSSFIGPYTEAAGGYFSTNSDGTCSVCRIDSTNQFLESINALFSQRWRNFGIFVAFIGINIILTIFFYWLARVPKGNREKKMKK

SEQ ID NO: 1748 - protein, 1490 aa, Candida albicans
MADADTSSNSSKTNEDRSQEGFGTYQGYTDRVASEVQELARIISHASIQQLKLKRQHSRQESQKSNEQESELSGKLGVIPVDENGNFVDQRLNPNSPEFNAAYWIQNAHKLVSSDIDYFKPVTIGVAYKNLRAYGSASDADYQSTLVNLIPKYLSLFFREYILRHTGPTFDILKPMDGLIKPGELTVVLGRPGAGCSTFLKTIASQTYGYHIDKDSVIRYNSLTPHEIKKHYRGEVVYCAETENHFPQLTVGDTLEFAAKMRTPQNRPLGVSRDAYARHLAAVVMAVYGLSHTRNTKVGNDFIRGVSGGERKRVSIAEITLNNAMVQCWDNSTRGLDSATALEFIRALKASADIVHTTPLVAIYQCSQDAYDLFDKVVLMYQGYQIYFGSAKKAKQYFIDMGYECPQRQTTADFLTSLTNPAERIVRQGFEGKVPQTPQEFYEYWKKSPEGQQIVADVDQYLTEHSSAAEKEAIKEAHQARQSDHLKPASPYTVSFFMQVRYIAHRNILRIKGNPSIHLFQIFGNIGMSFILSSIFYNLPTATSSFYHRTAALFFAVLFNAFSCLLEIFSLYEARSIVEKHKKYALYHPAADAFASIVTELPTKFIIAIGFNLVYYFMVNFRRTPGNFFFYLLINFSATLAMSHIFRTIGAATKTLQEAMTPAAILLLALTIFTGFVIPTPNMHGWCRWINYLDPLAYAFESLIANEFHNRDFECSQYVPSGGSYPTAGPNRICTPVGSVPGQDFVDGTRYMEMSFDYRNSHKWRNFGIVIGFIVFFFCTYILLCEINKGAMQKGEILLFQQRALKKRKKANNDIESGEIEKVTPEFDNEYENNQDKMLQSGGDTFFWRDLTYQVKIKSEDRVILDHVSGWVKPGQVTALMGASGAGKTTLLNALSDRLTTGVVTEGIRLVNGRPLDSSFQRSIGYVQQQDLHLETSTVREALEFAAYLRQPKSVSRKEKNEYVDYIIRLLEMEQYADAVVGVSGEGLNVEQRKRLSIGVELVAKPKLLVFLDEPTSGLDSQTAWSICKLIRKLADNGQAILCTIHQPSAILLAEFDRLLFLQRGGQTVYFGDLGKNFTTLINYFEKYGAPKCPPEANPAEWMLEVIGAAPGSKANQDYYDVWLKSSEFQEMNSELDLMSEELVKKPLDDDPDRLKPYAAPYWEQYLFVTKRVFEQNWRTPSYLYSKFLLVVTSSLFNGFSFYKADRSLQGLQNQMFSVFMFLVILHTLIQQYLPTFVSQRDLYEVRERPSKTFSWITFIAAQVTAEIPWNIICGTLGYFCWYYPVGLYQNATYTNTVHQRGAFMWFAIVLFFIYTSTLAQLCISFLEIDDNAANLSVLLFTMCLAFCGVLVTKEQLPGFWVFMYRCSPFTYLVSVMLSVGLVDAPVTCAAKEYLRFSPPQGYTCMQYMEPYMKVAGGYLLNENSTTECEFCTMKVTNVFLKMIGSDYSKRGRDIGIYIAFIGINIIGTFILYWFARVPKNFDIKLRRKR

SEQ ID NO: 1749 - protein, 1501 aa, Candida albicans
MAKTSQAEGQPYKGYYNNKSQGQPYHGYYSGFNKSASAQIHHLARSLTQGVQSHYDDTYTTATMHPNGINPISDKTDPTLDPESPSFSSKRWVQNMWKLYQSDSEYYKPGKLGVAYKNLRVYGDAIESDYQTTVSNGVLKYARNIFNKFRKDNDDYSFDILKPMEGLIKPGEVTVVLGRPGAGCSTFLKTIACRTEGFHVADGSVISYDGITQDEIRNHLRGEVVYCAETETHFPNLTVGETLEFAALMKTPQNRPMGVSREEYAKHVVDVVMATYGLSHTKNTKVGNDFIRGISGGERKRLSIAEVTLVQASIQCWDNSTRGLDAATALEFISSLKTSASILNDTPLIAIYQCSQNAYDLFDKVIVMYEGYQIFFGSSQRAAAYFKKMGFVCQDRQTTPDFLTSITSPAERIIKPGYERLVPRTPKEFYRYWRRSPERQALLEEIDEYLDNCENYDQKQKIFEANNAKKAKHTYNKSSYTVSLPMQVRYIMKRYWDRMRGDIIVPLSTVAGNIAMALILSSVFYNLQPNSSSFYYRTSVMYYALLFNAYSSVLEIYNMYEGRAIVQKHREYALYPPMADAIGSIISDFPLKVVCSVLFNLILYFMVNFKREPGAFFFYLLISFCSTLFMSHLFRTIGAFTNSLAEAMTPSSLLLFALSTFSGFAIPVTYMLGWCKWIRWVNPLAYAYEALISNEFHGRVFDCSNIVPSGFGYPKTGNSVVCASIGALPGEFKVDGDLYLKLAFDYSYSNVWRNFGVLMAFIIFLFGTTIFFVQTNKSSISKGETLVFRRKNIRKMRKMEEDEEAYMDGMAPLDFSGSTEISDYSYDYMDRKLLDTSNIFHWRNLTYTVKIKSEERVILNNIDGWVKPGEVTALMGASGAGKTTLLNALSERLTTGVITSGTRMVNGGELDSSFQRSIGYVQQQDLHLETSTVREALKFSARLRQPNSVSIAEKDSYVEKIIDLLEMRTYVDAIVGVPGEGLNVEQRKRLTIAVELVARPKLLVFLDEPTSGLDSQTAWSICKLIRKLANHGQAILCTIHQPSAILLEEFDRLLLLQKGETVYFGEFGANCHTLIEYFERNGASKCPQHANPAEWMLGVIGAAPGTQANQDYFETWRNSPEYRAVQNELHRLEEMPGLASGEKEPDTNQAYAASFWKQYIFVVHRLFQQYWRTPSYIYSKFAMAVLCSLFNGFTYYKSQNSMQGLKNQMLSIFSMFVVLTTLAQQYVPLFVTQRDLYEARERPSKTFSWLAFIAAQITAEIPYQVLAATISFFSWYYPVGLYRNAVYSGAVTHRGVLMWLIMTLMFIYSSTLAQFCISWNQLADYAANWISLLLTISMIFCGVIATKDSMPKFWVFLYRCTPLTYLTSAMMSIGLGDSFVKCAPTEILTFPPQTPGVQKCQDYMGAYISIAGGYLLNPEATDNCKFCIMDKTNQFLDFMNISIHNFGRDTGIFIVFIVFNMAATVFSYWLFRVPKGNREKGSFFDKLPFLNGGGDTNHENV

SEQ ID NO: 1750 - protein, 1499 aa, Candida glabrata
MSLASDKKDADVASTTTTAQDDDNLSTYHGFDHHVQDQVRQLARTLTQQSSLHQKKEHTLPEEGINPIFTNTEADDYNPRLDPTSDEFSSAEWVQNMSNISNSDPDYYKPYSLGCYWKDLVATGESADIEYQANFLNGPYKGLKTVYNTVVPSTASSKDKNFKILKSMEGAVNPGELLVVLGRPGSGCTTLLKSISSNTHGFNIAKDSTISYSGMTPNDIRKHFRGEVVYNAEADIHLPHLTVYQTLLTVARLKTPQNRLKGIDRETYARHLTEVAMATFGLSHTRNTKVGNDLVRGVSGGERKRVSIAEVSICGSKFQCWDNATRGLDSATALEFIRALKVQASISNAAATVAIYQCSQDAYDLFDKVCVLYDGYQIYLGPAGKAKRYFQKMGYVSPERQTTADFLTAVTSPSERIINQDYINRGIFVPQTPKEMWEYWRASEDHADLIKEIDSKLSDNYDANLAEIKDAHVARQSKRARPSSPYTVSYGMQIKYLLIRNFWRIKQSSGVTLFMVIGNSSMAFILGSMFYKVMKHNTTSTFYFRGAAMFFAVLFNAFSSLLEIFSLFEARPITEKHRTYSLYHPSADAFASILSEVPAKLITAVCFNIIYYFLVNFRRNGGVFFFYFLINIVAVFAMSHLFRCVGSVSKTLSAAMVPASMLLLGLSMYSGFAIPRTKILGWSKWIWYINPLAYLFESLMINEFHDRKFPCSQYIPSGSVYNNVPADSRICSSVGAIRGNDYVLGDDFLRESYSYLHKHKWRGFGIGLAYVIFFLVLYLILCEYNEGAKQKGEILVFPQNIVRRMKKERKLKNVSSDNDVEIGDVSDISDKKILADSSDESEESGANIGLSQSEAIFHWRNLCYDVQIKKETRRILNNVDGWVKPGTLTALMGASGAGKTTLLDCLAERVTMGVITGEVSVDGKQRDDSFARSIGYCQQQDLHLKTSTVRESLRFSAYLRQPADVSIEEKNQYVEDVIKILEMEQYADAVVGVPGEGLNVEQRKRLTIGVELAAKPKLLVFLDEPTSGLDSQTAWSICQLMKKLANHGQAILCTIHQPSAILMQEFDRLLFLQRGGKTVYFGDLGDGCKTMIDYFESHGSHKCPPDANPAEWMLEVVGAAPGSHANQDYHEVWRNSDEYQKVQEELEWMSNELPKKNTNNSETVHKEFATGVLYQCKLVSPRLFQQYWRSPDYLWSKFFLTIFNNIFIGFTFFKADRSLQGLQNQMLAVFMFTVIFNPLLQQYLPSFVQQRDLYEARERPSRTFSWKAFIVSQILVEIPWNILAGTVAFVIYYYAIGFYSNASVAHQLHERGALFWLFSCAFYVYIGSLALFCISFNQVAEAAANMASLMFTLSLSFCGVLVTPNGMPRFWIFMYRVSPLTYLIDGMLSTGVANVAIKCSNYELLRFSPAANLTCGEYLGPYLQTVKTGYIVDPSATDTCELCPYSHTNDFLSSVSSKYSRRWRNWGIFICYIAFNYIAGIFLYWLARVPKKSGKLAKK

SEQ ID NO: 1751 - protein, 1542 aa, Candida glabrata
MNTPDDSSVSSVDSHQPYMGFDDNVEKRIRELARSLTQQSLTSSNRSVNKEAPADGSAPLDRVSTRASSIFSADFKGVNPVFSDEEEDDYDARLDPNSDEFSSKAWVQNMAKITTGDPEFYKPYSIGCCWKDLSASGESADVSYQSTFLNLPVKLLNAVWRKARPARESDTFRILKPMDGLLKPGELLVVLGRPGSGCTTLLKSISSTTHGFQISKDSVISYNGLTPNEIKKHYRGEVVYNAEADIHLPHLTVYQTLVTVARLKTPQNRVKGVTREDFANHVTDVAMATYGLSHTRDTKVGNDLVRGVSGGERKRVSIAEVWICGSKFQCWDNATRGLDSATALEFVRALKTQAHIAKNVATVAIYQCSQDAYNLFNKVSVLYEGYQIYFGDAQHAKVYFQKMGYFCPKRQTIPDFLTSITSPAERRINKEYLDKGIQVPQTPLDMVEYWHNSEEYKQLREEIDETLAHQSEDDKEEIKEAHIAKQSKRARPSSPYVVSYMMQVKYILIRNFWRIKNSASVTLFQVFGNSAMAFILGSMFYKIQKGSSADTFYFRGAAMFFAILFNAFSSLLEIFSLYEARPITEKHRTYSLYHPSADAFASVISEIPPKIVTAILFNIIFYFLVNFRRDAGRFFFYFLINVIAVFAMSHLFRCVGSLTKTLQEAMVPASMLLLALSMYTGFAIPRTKMLGWSKWIWYINPLAYLFESLMVNEFHDRRFPCNTYIPRGGAYNDVTGTERVCASVGARPGNDYVLGDDFLKESYDYENKHKWRGFGVGMAYVIFFFFVYLILCEFNEGAKQKGEMLVFPHSVVKRMKKEGKIRDKTKMHTDKNDIENNSDSITSNATNEKNMLQDTYDENADSESITSGSRGGSPQVGLSKSEAIFHWQNLCYDVPIKTEVRRILNNVDGWVKPGTLTALMGASGAGKTTLLDCLAERTTMGVITGDVMVNGRPRDTSFSRSIGYCQQQDLHLKTATVRESLRFSAYLRQPSSVSIEEKNEYVEAVIKILEMETYADAVVGVPGEGLNVEQRKRLTIGVELAAKPKLLVFLDEPTSGLDSQTAWATCQLMKKLANHGQAILCTIHQPSAMLMQEFDRLLFLQKGGQTVYFGDLGKGCKTMIKYFEDHGAHKCPPDANPAEWMLEVVGAAPGSHANQDYHEVWRNSEQFKQVKQELEQMEKELSQKELDNDEDANKEFATSLWYQFQLVCVRLFQQYWRTPDYLWSKYILTIFNQLFIGFTFFKADHTLQGLQNQMLSIFMYTVIFNPLLQQYLPTFVQQRDLYEARERPSRTFSWKAFILAQIVVEVPWNIVAGTLAYCIYYYSVGFYANASQAHQLHERGALFWLFSIAFYVYVGSLGLFVISFNEVAETAAHIGSLMFTMALSFCGVMATPDAMPRFWIFMYRVSPLTYLIDALLSTGVANVDIRCSNTELVTFTPPQGLTCGQYMTPYLNVAGTGYLTDPSATDECHFCQFSYTNDFLATVSSKYYRRWRNYGIFICFIVFDYVAGIFLYWLARVPKTNGKIAKNGKTAKVNFIRRLIPF

SEQ ID NO: 1752 - protein, 704 aa, Candida glabrata
KFQCWDNARRGLDSATALEFVRALKTQAHIAKNVATGAIYQCSQDAYNLFNKVSVLYEGYQIYFGDAQHAKVYFQKMGYFCPKRQTIPDFLTSITSPAERRINKEYLDKGIKVPQTPLDMVEYWHNSEEYKQLREEIDETLAHQSEDDKEEIKEAHIAKQSKRARPSSPYVVSYMMQVKYILIRNFWRIKNSASVTLFQVFGNSAMAFILGSMFYKIQKGSSADTFYFRGAAMFFAILFNAFSSLLEIFSLYEARPITEKHRTYSLYHPSADAFASVIPEIPPKIVTAILFNIIFYFLVNFRRDAGRFFFYFLINVIAVFAMSHLFRCVGSLTKTLQEAMVPASMLLLALSMYTGFAIPRTKMLGWSKWIWYINPLAYLFESLMVNEFHDRRFPCNTYIPRGGAYNDVTGTERVCASVGARPGNDYVLGDDFLKESYDYENKHKWRGFGVGMAYVIFFFFVYLILCEFNEGAKQKGEMLVFPHSVVKRMKKEGKIRDKTKMHTDKNDIENNSDSITSNATNEKHMLQDTYDENADSESITSGSRGGSPQVGLSKSEAIFHWQNLCYDVPIKTEVRRILNNVDGWVKPGTLTALMGASGAGKTTLLDCLAERTTMGVITGDVMVNGRPRDTSFSRSIGYCQQQDLHLKTATVRESLRFSAYLRQPSSVSIEERNEYVEAVIKILEMETYADAVVGVAGEGLNVEQ

SEQ ID NO: 1753 - protein, 1408 aa, Trichophyton rubrum
LNRRDTLAGVKIGDPVLDPTKPEFDFYKWARMFTHVMEKEGIKRNRTGVMFRNLTVLGSGSAVQYQDTFLSPFAAPFRPGELCGKGRNPEKVILHDFNGAIREGELLMVLGRPGSGCSTFLKAICGELHGLQKKKESIIHYNGVSQHTFKKELRGEAVYSAEDEHHFPHLTVGQTLEFAAAARTPSKRVLGLSRKDFSTHLARVMMSVFGLSHTYNTKVGDDYVRGVSGGERKRVSIAEIALSGAPICCWDNSTRGLDSATALEFTKALKIGSQVGGITQCLAIYQASQAIYDIFDKVIVLYEGRQIFFGPTRIAKQYFEEMGWYCPPRQTTADFLTSVTNPKERIAKEGYENRVPRTAVEFERYWKQSQNNKLLLANMDRFEAEYPPEEGHLEKLRETHGQAQAKHTASKSPYRISVPMQVKLCTVRAYQRLWGDKSSTIATNISQIMMALIIGSLFFDTPQTTDGFFAKGSVIFFAILLNGLMSITEINGLDAQRPIVVKHVNFAFYHAYSEALAGIVADIPIKFLLALVFNIIIYFLGGLERSAAKFFIFFLFTFITILTMSAIFRTLAAATKTIPQALALAGVMILALVIYTGFTLQPSYMHPWFKWILYINPIAYAYEALLVNEVHGNRYRCATPIPPYGSGKNFACAVAGAVPGEMSVSGDAWVESSYDYSYAHIWRNLGILLGFLAFFYFVYLMVSELNLSSASSAEFLVFRRGHLPKNFQGSKDEEAAAGGVMHPNDPARLPPTNTNGAAGETAPGGSTVAVIPPQKDIFTWRNVTYDITIKGEPRRLLDNISGWVRPGTLTALMGVSGAGKTTLLDALAQRTTMGVITGDMLVNGRPLDSSFQRKTGYVQQQDLHLETTTVREALRFSADLRQPKSVSRKEKYEYVEDVIKMLSMEDFSEAVVGNPGEGLNVEQRKLLTIGVELAAKPQLLLFLDEPTSGLDSQSSWSIVTFLRKLADNGQAVLSTIHQPSGILFEQFDRLLFLAKGGRTVYFGDIGKNSETLLNYFETHGAEPCGPSENPAEYMLNIVGAGPSGKSNIDWPVVWKESEESRHVQQELDRIQSETSKRNEGHGQSAEKEPGEFAMPFTSQLYCVTTRVFQQYWRTPSYIWGKLLLGLASALFIGFSFFLQNSSMAGLQNSLFSIFMLTTIFSSLVQQIMPRFVTQRDLFEVRERPSRAYSWKVFLLANIIVEIPYQILLGIIAWASLFYPTFGAHLSSERQGILLLYCVQFFIFASTFAQMIIAGLPDAETAGGIATTMFGLMVTFNGVLQKPNALPGFWRFMWRVSPITYTVGGLAATSLHSREVKCAQNELAIFDPPSGATCAQYLQKLVEAGAPGKLYNPMSTSQCQYCPLSSGDQFLGGSEIHWSDRWRNFGIGWAYIVFNIFATVALYYLIRVR

SEQ ID NO: 1754 - protein, 154 aa, Alternaria alternata
TLLDVLATRVTMGVVSGEMLVDGNPTDQSFQRKTGYVQQQDLHLSTSTVREALEFSALLRQPASVSRKEKIDYADEVIKLLGMEAYADAVVGVPGEGLNVEQRKRLTIGVELAAKPQLLLFLDEPTSGLDSQTSWSILDLIDTLTKHGQAILCT

SEQ ID NO: 1755 - protein, 141 aa, Leishmania donovani
VGSSGCGKTTFLNAICDRLASGGGLRLSGRRQLGDCEFERHFRKAMGFVTQDDIISPLSTPYDALWFSLRTRRGTNCAETEERVQEALDVLRLRHCRDTKVGVPGLEAGLSGGERKRCSIGIELVCDPKILLLDEATSALD

SEQ ID NO: 1756 - protein, 276 aa, Aeropyrum pernix
MLLWVFEYNSVSRASWGDRVPVDKNSCACLEGGYAACLCGVAKSVKGRPVLRGVSLSVKFGEIHVLAGLNGAGKTTSLRVLVGLLSRDSGEARVLGVDPWGGGFERVKGEVGYLPEDASVYERLTGMENILFYARLYSGWRDVEELVENAVFYSGLSREDLARRAGGYSKGMKRRLLLGITLMSKPRLVVLDEPTSGVDPIASNRIKKILRGLSREGRAILVTTHDLALAEEIADRVTIIHGGSTVASGPPYRLVEEYCGETLEDAFVNIVTGGGC

SEQ ID NO: 1757 - protein, 1241 aa, Leishmania major
MMAPQRKEARNAVPRSHHASSLSAATTLIAVFLLLVACASVTQALHVSPASAEAAMWSGTDVFASSDSHSDPITCVNGGIPSGDHCICPLYYTSANCSQRQCPNSVGGEGPHRVLPVNSTNKLCDHCDEKEFTGLSCQICQSNAACRQYAGSAAECDNSTFTRGDNKQFQCTLKNEFFVRLMSGNRNITAEVLFNCTTSDGTAFRKGEQGMCNMAIYRIEPNHSYVDPFFRCDAQACSLKYGQKGPDMSDANNNTLRQRFFRAARTAGQVALIVECALLALLGGFTALLGPRRTTSITVALASVITVTVLVYISLMMLSMQSISAPEQTVIYECKKTHCACAEDPPPQYDPICSQKEELSKQILPSIKNSIRVVCGQNTSLCELTLADLSLVFQADCRASECVDTVRFPDDSSSDSNDDGGGGTAVLAKLNLGFLLVLLVLLVVSGIGTHYYYTCSISYERDRDFLVTFHVSTPYSDDGDVHETGDPAVLDDRHVHLNGNADGSAVEREQEPLLYNSPAPRAERRNFLPRGVSSSRHSEGNVSVRASVYEQARALTPAARARIEELRRLTAAPLELQVSELRYTLNTPLLGAADEGSQRTLLHRINFTVHSGDVLAIMGPSGAGKTTLLDLLSARAKPGEVSGTITLNGTPITTTGSRTAQYRNIIGYVSQEDTLLPSLTVEQTILYAARLKLPKALSHITVRRIVARVIETLKLQHCAQTLIGGETTRGISGGEKRRVSIAVELLANPRILYLDEPTSGLDAVSAKRVVEAVVALAKDSAMSMYAMHYFAFQPIVIFSIHQPSQEIYELFDKVLLLSRGMSIYCGSAASAAATIERRVTAAFGHTREVPRREVHNNQAEYLMKVEEILDDAVRAELQEEDALENTDTAGAPYRSASADGSPLAAARTQVPPCRSPESPAPRAPSQSVGCHDSDDGEQVSGADILSTTFGFRMYYANVYEQLQLLISRSITCLFGSFHLVICHSAVVACLATLMCVLYHEQALDLPGSLNRAGSVSFLLLVTSFLSLSCLEQLIVERKLFNVERENGFYTTCPYLISKIVVDIIPLRIIPAVVLASVIYFPMGFRVDAGLHFFYFILIIVLFSICMTMVILCIGIVSGSFGAAALLSSVLILWNFVFGGALVQAETIPPSLRAFKSISPFFLAFESLMVNELDGQHCVFSPTDETGKKSSASIPIMCVQYLANIGLKPERFNADVMQLAVYCLLFVGLSWVLLSSCSKLVH

SEQ ID NO: 1758 - protein, 1896 aa, Leishmania tropica
MGAANKKTQRDRAASGMSTLSPPRRTRETALCDGTENSPDSCAVQRPGERTCLKPLNNGGAQSGPTSSAQRHSEGDEVELRNVNEVDKSGFGVGGDSHKGGSSRSTGDALEDGKDKYDVYMRAVEAQRRSETSTSLSSDCSSFCFQLVVTVKRMLILQSRDPLSLACELITPIFFLVGSIILWGVIKKGFVPASDYFSVAGESITNAVMTQATGMMCYNATLTGGVPIEGLLECREFLKKPLFLPTLLCAESNITGAPVGLCVSEMYALSAYATMRGYATRNTTRVPTVDEMILLQWAWRLLYQWSGVSLDRFQTVDSAMLSSGTLYFAPASTETEALVAYFRKTSIYFQYVYGGTFATVAEAEARVQSRTWRDPPIWGIVQVSNLTAEMFDVAIRLNATALPRTKWMLARYYVGGVVTEGPVMYILSGFTTLQQTVYHYFLTRILGTTSTPSAELLMLPAPTRGYRDDQFLAYGGRFVPLILVLGFLYPVSQMTKRIVLEKELRLREAMLIMGLSEVVMYTAWFLIYVVQYAAVSLIMAILLRATYLAKSNFGIVFFLLFFFSLSIITLSGLMAVFFNKARLSAILAPLIYFALAIPLFTVQNLQGPAQIGFSFLSPSGLAVGVTILFSHELSGGMTGSDLTYFRDSPKMLAVIIILFMDFIIYLVLMLYLDAVLPKQWGTPKHPLFFIMEPVRWCCRSKTRVLEGGADGRAEDGVFEEITEGGADYAVCATGLRKEYSRGGKRFVAVNNLYWGMREGEISVLLGHNGAGKTTTMNMMTGMVSADAGDCYIYGYSVRNQLEKARQQIGYCPQHNILWPNMTCYEHLWYYAALKGLRGAAQEEAISRMLAGVDLQDKRDCPSKMLSGGQKRKLSVAVAFVGGSRLVFLDEPTAGMDVGARRYTWGLLRAMAKYHTILLSTHFMDEADLLGDSVAIMSKGCLQCAGSNMFLKAKLGVGYVLTLSVVAHVDRMAVAGMVREHVPSATRLGSGAGEMAFRLPMKTKEAFPNLLAEIEGRGSQLGVSAYSVSATTLEEIFIQIAQQGEAKEAMERKREQLTAPFTGTTPVAAAASAGSSANHVSALADISTVDGVCQEPPRPSDVWNVGLIGNELGVLHSQFKAMLWKRLWNALRDLRTQFFQIACPMLCVLLAMLLTLIKLFQYPAITLSSDLYGTVVEIDVVGCESAMNLSIPFSSKAVTVQPPSATSIATLSSYMLETYNTHKAERYTGLVCVDAVTFPLPFTPENRSVSAVIYNTSGLHSSPIGLYNLYNGYYMAHRGNNASVLTTVVQTMPKTKTEVEVQDSIYALIIAIVIMIPFTFIPSTFVSWIVKERECKARHLQNVSGLYFSVYWLANFLFDICCYVITMFLIIIVLAIFSRDEYIGARAVGATIVLFFLYGLSGVAMAYAVSFLFKEHSTAQNVVMLANFITGFLLVLCVSMLSVFESTKKVAEVLPWIFRVVPSFCVGEGISNLAKLKLEESFGTTNTPWSMSVVGWPCVYMAAGLPFYVLVTLFVDHPGRRQRTQRLFHDPDAEPDFVENEDEDVMAERRSVLECEARQSDLVRVENMSKVYSNGKVAVRNVTFGVRPGEVFGFLGTNGAGKTTTISILCQEIYPTTGRASICGNDIVTKSREALQCIGYCPQFDACLDLLTVKEHLELYAGVRAISYDCRKRVVEGLLALCELTNYKHTLAHDLSGGNRRKLSVALSLIGGPRVVFLDEPSAGMDPVARRGLWTAIEAVADNSSVVLTTHHLEEVEALAHRVAIMVDGTLRCIGDKTHLKNKFGTGFEVNVRIRSDDEALKEAVQNFFSESFPGSSLREYRARRFTFELPPGTKLPRTFRLMEEHASALGATDYSVSQTSIEQVFMQISEEAERQHEAEEAEQLAQTTKSYCTCCC

SEQ ID NO: 1759 - protein, 1843 aa, Leishmania tropica
MPGAGPLVPSPNSTTTTQNPLLLFASPGALPGLSFSRNNSEAFGEGQLFTPAVEGEYSPMSGGGSAFLRSDDRMIRGTALRTGEMRATTLEAGNHASPSAAENDVNDGSCVEMTAEQIPLAQADDQYDVLHRRSASANSPARCRPRAGCCQQLGHTILRVLILMKREWCSTLCEFLIPILFVFGSVMLWAVFGTAQNSAGVYYSSTGPEKVSAMTDKISSSLCYNASLASGIAGLTPCLEGQKYYCPHGRGIPTGFCYDPPLKNVVAQLLGALPLTTSPMLPLDTLIACQWVGMDQSIRASTPFSYGGLLYFAPRTPEVESLVSYMRAQSKLFDNAYGGTFATAADATSHILSLTHDDPPTWGVVELDSYTADTFNVKIMVNSSALPATSDSILSGYLGGLDMSTNSPYIFSGYTTLQTLVYNHYTTSVLGKPATKPLTYTAMPTKAYNTSSFLLTGASLAPLILVLGFLYPVSQLTKRIVVEKELRIREAMLIMGLSEWTMYLAWLVVYGVWYTVVSIIITVLLRLTYLPESSPGYVFFMFLLFSWSTIALSGAIAAVFSKARLAAIIAPLIYFAMAIPLFAMERASGGAKMGIMILGPSAFAVGFALLFEHEVNGGAGVGALAYFRDEPKLIVVFVLLFVDIFVYLLLMMYFDRVVPKEWGTTKNPLFFVIDPVRWCFCRRRAGDADNDGDVPGDGRAEDGVFEAVDPAVEEAAAVRIRGLRKTFRRGGKAFAAVDDLCWSLNEGEISVLLGHNGAGKSTTMNLMTGMLEADGGDCYVYGHSVRHELSAVRQEIGLCPQHNILWPQLTVREHLDYYAAIKGLRGSEKEDAIRRLLAAVDLEDKEHYMSKALSGGQKRKLSVAVAFVGGSRLVILDEPTAGMDVGARRHTWSLLKEMAKWHTILLTTHFMDEADLLGDTVAIMSKGRLQCAGSNMFLKSKLGVGFVLTMSVVSHARRGPIEQMVQTLVPAAEAIGSGAGEVAYRLPMASKPMFPDLLCAVEEGIPGLGINAYSLSATTLEEVFIKIAEGPDAERDADALAAKEKAEATAAVWNVEMEKGRWARRRLQFRAMMVKRLWNALRDRRTQFFQIVCPVACVLLAMLLTLVRLFSTPTIVLSSDVYGTAVDIPLANCEGVLDVTTPFSTKAHMDIWTDVPDASAFSTKLNRTYQTHAKERYGGVSCAAAGSGELYHSVFYNTSALHEVAIETANVFAAHLRVATGRDNVSVTTAVASLPKTSQQRAVESSLYAMMIAVIIMIPFTFIPSTFVGWIVRERECKARHLQNVSGLSFYIYWLSNFLFDLCSYIVTMCLVIVVFLAFGRDEYVAVNNIGATFVVFLLYGVSGILMAYALSFAFDNHSTAQNVVMLVNFIVGFLLVLAVSALSLKESTRNLAKVLRWIFRIVPSYCVGEAINNLASLKVTRAFGIDTSTWDMDVVGWVCVYMAIEIPVFLFITLFIDHPGRRQRSQRLFHNPDGAAEVIEDEDEDVAAERRAVLEGGEREGDLVRVLNLRKEYPNGKVAVRNIALGVRPGEVFGFLGTNGAGKTTTISILCQEFYPTSGRAYVCGNDIVTESSEALRCIGYCPQFDACLDLLTVEEHLYLYAGVRGISSRACDRVVRGLMKLCGLTEYRRTKSHELSGGNRRKLSVAVSLIGGPRVVFFDEPSAGMDPVARRGLWNAIETVADNCSVVLTTHHLEEVEALAHRVAIMVDGTLRCIGDKTHLKQKYGTGFEVAVRVADESPEVMAGVELFFEEEFPSSKLTEVRAGRFTYQLPSTVRLSSVFTALEQQKEKLQICDYSVSQTSIEQVFMRISEKAELEHEEEHRQRMESKKSCCVCCCGGLPR

SEQ ID NO: 1760 - protein, 670 aa, Bactrocera tryoni
MGQEDQEVLIRGGKATSTSAESLDNNNEQSYEQSSINQGFSKNYGTLSPPSPTLTADNLTYSWYNLDVFGAVHQPGSGWKQLLNRVKGVLCNERHIPAPRKHLLKNVSGVAYPGELLAIMGSSGAGKTTLLNAIAFRSSKGVQISPSTVRLLNGHPIDAKEMQARCAYVQQDDLFIGSLTAREHLIFQAMVRMPRHTTKKQKIQRVDQVIQDLSLGKCQNTLIGVPGRVKGLSGGERKRLAFASEALTDPPLLICDEPTSGLDSFMAHSVVQVLKKLSQKGKTVILTIHQPSSELFELFDKILLMAEGRVAFLGTPGEAVDFFSYIGAQCPNNYNPADFYVQVLAVVPGREAESRDRIAKICDNFAVGKVSREMEQNFQKLEKSNGLNKEDENGFTYKASWFMQFRAVLWRSWLSVLKEPLLMVAVLIGLIFLGQQLTQVGVMNINGAIFLFLTNMTFQNAFATITVFTSELPVFIRETRSRLYRCDTYFLGKTIAELPLFLIVPLLFTAIAYPMIGLRPGIDHFLTALALVTLVANVSTSFGYLISCACSSTSMALSVGPPVIIPFLLFGGFFLNSGSVPVYFKWLSYLSWFRYANEGLLINQWADVKPGEITCTSSNTTCPSSGEVILETLNFSASDLPFDFIGLALLIVGFRISAYIALRVRARRKE

SEQ ID NO: 1761 - protein, 698 aa, Bactrocera tryoni
MDAAEQIELQDVVGVPSNGNNKHSNDNGRARSSSVNGHSGAEGSPGASGAGSRIAITDISTTPPRTASTRNSSERSLPLRSYSKWSPTEQGATLVWRDLCVYTTGEPNGASGGGSLHKMKRIINNSTGAVQPGNLMALMGSSGSGKTTLMSTLAFRQPAGTIVQGDILINGRRIGPFMHRISGYVYQDDLFIDTLTVLEHMTFMAHLRLDRRVSRRERKEIINDLLERTGLLSVAHTHIGSGDDKKMLSGGERKRLAFAVELLNDPVILFCDEPTTGLDSFSAQQLVQTLYDLAKKGTTILCTIHQPSSQLFDMFNNVLLLADGRVAFTGSPQNALNFFAENGYHCPEAYNPADFLIGVLATDPGYEQASQRSAQHLCDMFAVSGAAKQRDMLVNLEIHMAQTGDYPFDVEVDTFRSAAWYKKFHMIWYRASLSLMRDPTVQRMRFFQKMAMAVIIGACFAGTITVSQLGVQAVQGALFVMISENTYHPMYSVLNAFPQGFPLFLRETRSGMYSTAQYYVANIRAMLPGMIIEPLLFVIICYWITGLRATFFAFSITAISIVLVMNVATACGCFFSTAFNSVPLAMAYLVPVDYIFMITSGIFIKISTLPMAFYWTQSLSWMLYANEAMTIAQWSGSQNITCFEESEDLPCFHTGQDVLDKYSFNESNLYRNLLAIVAIYFGFHILGYYCLWRRAKKI

SEQ ID NO: 1762 - protein, 590 aa, Encephalitozoon cuniculi
MKLESQKSELLWRNLRLTTKGADGAWRTILRGVSGVIEPSTMTALMGTSGAGKTTLMNALAGRISPNMHLKGEILLNSHPRSKDTWPEIVGYVEQEFHAYEYQTVFETLSFASKIKMRGEEMEQKVVNRIEEIVSLLGLKNAKNTYIANLSGGERKRVSIGVELLGNPSILFCDEPTSGLDSFNALNILSLLRDLSNMGKTVLVTIHQPSYEMINFFDKFILMSMGKVIYDGDVKGCIGFFARCGHRLPEFTNPVDFFLKTISLDTRTKSSEEKSLDVINHISAKWRRERKEVVPKLSSEVRMRDKTIKTTLSFFLLWSRNLKNYLRNSEYFKIKAFQKMFFITVFGLAYLRMGYSVESIYTRLGGITFILTNMLFGVCNPIFNVFSSEKMVILRERRSGMYSGFMAFIAKYFSEIFINFMLEIPYLVIIYWTIGLNPDVRVFLVFMAIIISLILLSIAYSLAISTMTSTQNNSQVLGSMGLLVFLIYSGSFNNPNTISKWLKWIVWISPMYYATKASFQNQLNGVVFKSPNVQTTGEEQIKSRGLDGMGVWPCVFVLLGMTLLWMLSGATVLHWTTKNNMKVEINDEEV

SEQ ID NO: 1763 - protein, 584 aa, Encephalitozoon cuniculi
MDTEDIRVEVVWRNVTVESVSEPFKGALIKRIQGKIEPSTMTALLGASGAGKTTMLNAIIGKTNERLKVSGEILLNGYPVDASVWKCAVGFVGEHLHAYETQTVEETLRFAVAISRDTGPETVVNEEVSCLIKALGLSRIAHTQISSISTGERTRLSLGITLAKRPSILIMDEVTNELDSFNVVHILKILMALRQQGKGIMISFQRLPQEMLSFFDKIMIICQGGVVFNGCPEECVEFFRSCGHDLKKYVGSSDFFMDVLSVDTTTPESEKMSLGRIARLKMCWKRIEPLAVSSIIEKTEFPTVSRRYILSFTLIFKRNLSDFLRRHELMRILSIQKLTTLALLVLVYFRLDYTQKGIRDRFGILSFIVMGSFEKTAAAAIIFLDSYRKALKREVCAGMYGAAMSYFASLVSSFCILGTSWIAYIAAAYWIVGLNPNILRFVFFVLILVIVTVFSMSFGIVVALHTKTLVQAQVLTSVLIMSFIILGGAFVDPGTIPGFARWAIWISPVYYALEIALQSQFEGLVFECKGSERCISNGNEALHLYGFRRVGYGVSVGMLLLITTVSIALGAISTNRVFKPRNSI

SEQ ID NO: 1764 - protein, 608 aa, Caenorhabditis elegans
MSFKFPSLHNLHQMKNFENFATLGCETLPNFRKFRVTTIKEKRLLLKNVSGYAKSGELLALMGASGAGKTTLLNMLMCRNLKGLSTEGTITVNGNEMAHKISSISGFAQQEELFVGTLTVKEYLMIQAKLRINGSKKLREDRVTDVLHQLKLWKCRDSKIGVIGEKKGISGGEARRLTFACEMLSNPSLLFADEPTTGLDSFMAESVIQILKGIAKTGRTIICTIHQPSSQLYQMFHRVIYLANGSTAFQGTPQESISFFEKCGHRVPDEYNPSEWIIYKLAVQPGQEKQSNDRIQKIVEQYEDSDHQKRVMEQLSDVSEKIPPPEMHRANVFTQIFALSTRCGIDVWRAPQLTLAKVIQKILFGLFIGLLYLRTPYDARGIHNINGALFFLAGEYIYSTAYAIMFFLNNEFPLVAREYHDGLYNLWTYYFARCISLIPLFSTDGLILLFIVYWLIGLNTSVMQVIVASIITVLASQAASAFGIAMSCIFPTAQMTAVMASPPLVLFRLFGGLYGNTNTFPAAIRWLQWISMYRFAFEGLVVNQWSEIDDFHSNAKNNWTNSTTNDVLDYFAFSESAIPLDIIGLILISLAFYLIGFIALVHRMKKAR

SEQ ID NO: 1765 - protein, 610 aa, Caenorhabditis elegans
MATETCSLLSVGQSEYGAAASMISALEAVDPVTLTWHNISIHAEKSGKQILENVSGIAKPGQLLALMGASGAGKTTLLNMLLSRNLRGLETSGSVKVNGHELGRGITAISGYAQQDELFVGTLTVKEYLDIQAKLRVNGDSEKRRRRVGNVMSQLGLYKCQNTRIGTIGGQKGISGGEMRRLTFACELLSNPSILFCDEPTTGLDSFMAESVVQVLSNLAKSGRTVICTIHQPSSQLYLMFDRVMFMAGGKTAFLGSPRDAIQFFEDAGFACPRNFNPADLIIHTLAVMPNEEDKCRQRIEVIYTKFQNSSYGRTLKFGVEKSDEGQRPSERHKTGILTQIGALLERSAIDTWRNPSLTRAKVIQKSIMGLFIGLLYLQSPLTSIGISNLNGALFYLVCELTYSTIFGILNFLPADFPLVSREYHDGLYSVFSYYVARCLSYLPLFTADGLIMLLVSYWMVGFSSSITQVLYACLIAFLIEQSSSACGIMISCISPSLPIAMSTAGPMLTLLSLTGGLYANVGALPSYISWIQYLSWFRYGFEAFAINQWSSVNEQNTTIWTDEKRDSVLSQLSFRAEMFYPDLFIMSAFILIFYTIGYAGLALRVSKAR

SEQ ID NO: 1766 - protein, 633 aa, Caenorhabditis elegans
MATETCSLLSVGQSEYGAAASMISALEAVDPVTLTWHNISIHAEKSGKQILENVSGIAKPGQLLALMGASGAGKTTLLNMLLSRNLRGLETSGSVKVNGHELGRGITAISGYAQQDELFVGTLTVKEYLDIQAKLRVNGDSEKRRRRVGNVMSQLGLYKCQNTRIGTIGGQKGISGGEMRRLTFACELLSNPSILFCDEPTTGLDSFMAESVVQVLSNLAKSGRTVICTIHQPSSQLYLMFDRVMFMAGGKTAFLGSPRDAIQFFEDAGFACPRNFNPADLIIHTLAVMPNEEDKCRQRIEVIYTKFQNSSYGRTLKFGVEKSDEGQRPSERHKTGILTQIGALLERSAIDTWRNPSLTRAKVIQKSIMGLFIGLLYLQSPLTSIGISNLNGALFYLVCELTYSTIFGILNFLPADFPLVSREYHDEMSYFPFIILRILYYGDPEKCVFNWRQNNTKHFRIHGFAAKYLMGPNFEIRIILRLHNIFEKLEFQVLYACLIAFLIEQSSSACGIMISCISPSLPIAMSTAGPMLTLLSLTGGLYANVGALPSYISWIQYLSWFRYGFEAFAINQWSSVNEQNTTIWTDEKRDSVLSQLSFRAEMFYPDLFIMSAFILIFYTIGYAGLALRVSKAR

SEQ ID NO: 1767 - protein, 639 aa, Caenorhabditis elegans
MATETCSLLSVGQSEYGAAASMISALEAVDPVTLTWHNISIHAEKSGKQILENVSGIAKPGQLLALMGASGAGKTTLLNMLLSRNLRGLETSGSVKVNGHELGRGITAISGYAQQDELFVGTLTVKEYLDIQAKLRVNGDSEKRRRRVGNVMSQLGLYKCQNTRIGTIGGQKGISGNTEKRCGEMRRLTFACELLSNPSILFCDEPTTGLDSFMAESVVQVLSNLAKSGRTVICTIHQPSSQLYLMFDRVMFMAGGKTAFLGSPRDAIQFFEDAGFACPRNFNPADLIIHTLAVMPNEEDKCRQRIEVIYTKFQNSSYGRTLKFGVEKSDEGQRPSERHKTGILTQIGALLERSAIDTWRNPSLTRAKVIQKSIMGLFIGLLYLQSPLTSIGISNLNGALFYLVCELTYSTIFGILNFLPADFPLVSREYHDEMSYFPFIILRILYYGDPEKCVFNWRQNNTKHFRIHGFAAKYLMGPNFEIRIILRLHNIFEKLEFQVLYACLIAFLIEQSSSACGIMISCISPSLPIAMSTAGPMLTLLSLTGGLYANVGALPSYISWIQYLSWFRYGFEAFAINQWSSVNEQNTTIWTDEKRDSVLSQLSFRAEMFYPDLFIMSAFILIFYTIGYAGLALRVSKAR

SEQ ID NO: 1768 - protein, 610 aa, Caenorhabditis elegans
MPFDLLAERKRWNAGYESIDTSSQKLTEVVTPITVTWENIEVKTRKKLFSKKQKQLLNRVSGIAKPGEMVALMGASGAGKTTLMNVLMCRNMKGLEKNGTVKVNGTKIGKEISLISGFAQQQEIFIPTLTVDEYLMIQARLRMKANKHTRRERVDEIIEMLRLQNCRDLKIGTPGLVKGISGGEARRLTFACELLSNPSLLFADEPTSGLDSFMAASVVQILKNLANSGRTLIHQPTAELFFQFDKIIFLSMGKTAFMGTPHESVKFFADCGHPIPKLFNPPEWIQSKLSVIPNNETKSRETIGKIIEFYEKSIIHQKSIVEIRVIATTELPPYIENPGFFAETGALLKRACLDVIRSPAQMRMKLIQKVVMGLFIGSLYWQQPLDPRGVRNTNSALYFLIAELTFSTMFGIMTFMEHELPLIAREYHDGLFYVISYYISRFLSYLPLFTIDGALMIVISYWMIGLNSTWQQVAKSILISVLVEQSATSCGLFLACLFETTSLAIAFAVPASGLFALLSGLYGNTNNFPVYIRWMQWTSWCRYGFEGLVVNQWSQVDNPKWDPFYRELILKQFSFNKDNYQLDVIGLCSIVIFFYLAGYIALFIRIRLSR

SEQ ID NO: 1769 - protein, 559 aa, Caenorhabditis elegans
MPKRRVKEILHNVSGMAESGKLLAILGSSGAGKTTLMNVLTSRNLTNLDVQGSILIDGRRANKWKIREMSAFVQQHDMFVGTMTAREHLQFMARLRMGDQYYSDHERQLRVEQVLTQMGLKKCADTVIGIPNQLKGLSCGEKKRLSFASEILTCPKILFCDEPTSGLDAFMAGHVVQALRSLADNGMTVIITIHQPSSHVYSLFNNVCLMACGRVIYLGPGDQAVPLFEKCGYPCPAYYNPADHLIRTLAVIDSDRATSMKTISKIRQGFLSTDLGQSVLAIGNANKLRAASFVTGSDTSEKTKTFFNQDYNASFWTQFLALFWRSWLTVIRDPNLLSVRLLQILITAFITGIVFFQTPVTPATIISINGIMFNHIRNMNFMLQFPNVPVITAELPIVLRENANGVYRTSAYFLAKNIAELPQYIILPILYNTIVYWMSGLYPNFWNYCFASLVTILITNVAISISYAVATIFANTDVAMTILPIFVVPIMAFGGFFITFDAIPSYFKWLSSLSYFKYGYEALAINEWDSIKVIPESISRLRIKFLIFQFCLECSSEFA

SEQ ID NO: 1770 - protein, 598 aa, Caenorhabditis elegans
MPKRRVKEILHNVSGMAESGKLLAILGSSGAGKTTLMNVLTSRNLTNLDVQGSILIDGRRANKWKIREMSAFVQQHDMFVGTMTAREHLQFMARLRMGDQYYSDHERQLRVEQVLTQMGLKKCADTVIGIPNQLKGLSCGEKKRLSFASEILTCPKILFCDEPTSGLDAFMAGHVVQALRSLADNGMTVIITIHQPSSHVYSLFNNVCLMACGRVIYLGPGDQAVPLFEKCGYPCPAYYNPADHLIRTLAVIDSDRATSMKTISKIRQGFLSTDLGQSVLAIGNANKLRAASFVTGSDTSEKTKTFFNQDYNASFWTQFLALFWRSWLTVIRDPNLLSVRLLQILITAFITGIVFFQTPVTPATIISINGIMFNHIRNMNFMLQFPNVPVITAELPIVLRENANGVYRTSAYFLAKNIAELPQYIILPILYNTIVYWMSGLYPNFWNYCFASLVTILITNVAISISYAVATIFANTDVAMTILPIFVVPIMAFGGFFITFDAIPSYFKWLSSLSYFKYGYEALAINEWDSIKVIPECFNSSMTAFALDSCPKNGHQVLESIDFSASHKIFDISILFGMFIGIRIIAYVALLIRSYNNT

SEQ ID NO: 1771 - protein, 339 aa, Nostoc punctiforme
MAPAVLIQNLQKRYGTVVAVQDVSFQVEPGEIFGLLGPNGAGKTTTLRALCTLTTPDAGKIEVSGISVLDNPRVARQRLGYVAQEVAIDKVLTGKELLQLQAALYHLPRAVAKQRIETVLDLLGLQEYANKKTGTYSGGLRKRLDLAAGLLHAPDVLVLDEPTVGLDIETRFVVWDFLRKLRASGTTVVITSHYLEEIDALADRVAIIDRGVVIASGTPSQLKDKVGGDRITLRIREFSPIEEAEIAKNLLQPLPFVQEVIINSAQGNSLNLVVTPQNDVLINIQQALNTAGLPIFGIAQSRPSLDDVYLAATGRTLMDAELAAVATRDPKAEKKQLMR

SEQ ID NO: 1772 - protein, 650 aa, Nostoc punctiforme
MKLSTPKPLQLSNHSTTTIKVSNLHKHYGQLIAVRGIDFTVNQGEMFGLIGPDGAGKTTTFHILGGVMEATAGEVQVFGQPARDARLRTGYLTQQFSLYLDLSIDENLRYAAGLRQVSDDLLRERRQKYLKLMSLEQFGDRLAGQLSGGMKQKLALCCALVSQPDVLLLDEPTTGVDPVSRREFWDVLAELSADGMTIVVATPYLDEAERCDRVALMYSGQIHEIGTPAALRANLGLHRLEVRTANLEIAEKLLLQNVQTNIVDVQTFGDRLDVLVQDVTLGETQVNQLLQQHHPSIERGEPTLENVFVTRLRQQGSAPEFLSFPRSRGGNREQFKPQNSPDQIAIYAHNLNRVFGNFQAVKNVNVEVRYGEIFGLLGANGAGKTTTIKMLCGLLAASGGDISLGGETGNLRSRDLRRRIGYMSQKFTLYDDLTILQNLEFYSGIYSVPRKLRREKIDWVIATCGLEGQEQMLTGQLPGGWKQRVAFGASVMHEPDILFLDEPTSGVDPLARRQFWKLINDFARNGTAILVTTHYLEEAEQCNRMSFMVAGEIAAEGSPSSIKASQPGQLIEIIVNQNQAASKILKQHLDSWRVSIFADSLHIVLDRPEKEIPEITQLLKSAHLTIESLRPIPFSLEDAFIGIVERAVRD

SEQ ID NO: 1773 - protein, 669 aa, Tribolium castaneum
MENETEPLLSGVVSQINGNSGDSTSSATSIDLSTFRVPTYGTTSHPTSKLVPPDERITYSWTEINAFANVSPSKTKFFNLIKRKDSPVQKKHILKNVFGVAYPGELLAILGSSGAGKTTLLNTLTFHTSSNLTVSGLRCVNGIPVSSKTLASQSAYVQQDDLFIGTLTVKEHLIFQALLRMDRDISYSQRMARVEEVISDLALSKCQNTPIGILGRIKGISGGEKKRLSFAAEVLTNPKLMFCDEPTSGLDSFMALTVMQVLKEMAMTGKTVICTIHQPSSEVYSMFDKLLLMSEGRTAFLGSPEEAETFFRELEAPCPRNYNPADYFIQLLAIVPEKEESSRQAVNLICDKFERSNIGVKIALEAATTEREGGYHDIWMSGESFKSPYKASCWAQFKAVLWRSILAVFKEPLLIKVRLLQTLIISLVIGAIYFGQDLNQDGVMNINGVLFVFLTNMTFQNVFAVINVFSGELPVFLQEHRNGMYRPSIYFISKTLAESPIFIIIPVILTSVCYFMIGLNSQGFRFYIACGIMILVANVAISFGYLISCVSRSVSMALSIGPPLVIPFLLFGGFFLNVSSIPIYFKWLSFLSWFRYGNGALMINQWENVTNIQCPNADLPCPKDGHVILETFHFSEADFVMDVVMLAVLIVGFRLVAFLALLVKTWRFK

SEQ ID NO: 1774 - protein, 669 aa, Tribolium castaneum
MENETEPLLSGVVSQINGNSGDSTSSATSIDLSTFRVPTYGTTSHPTSKLVPPDERITYSWTEINAFANVSPPKTKFFNLIKRKDSPVQKKHILKNVFGVAYPGELLAILGSSGAGKTTLLNTLTFHTSSNLTVSGLRCVNGIPVSSKTLASQSAYVQQDDLFIGTLTVKEHLIFQALLRMDRDISYSQRMARVEEVISDLALSKCQNTPIGILGRIKGISGGEKKRLSFAAEVLTNPKLMFCDEPTSGLDSFMALTVMQVLKEMAMTGKTVICTIHQPSSEVYSMFDKLLLMSEGRTAFLGSPEEAETFFRELEAPCPRNYNPADYFIQLLAIVPEKEESSRQAVNLICDKFERSNIGVKIALEAATTEREGGYHDIWMSGESFKSPYKASCWAQFKAVLWRSILAVFKEPLLIKVRLLQTLIISLVIGAIYFGQDLNQDGVMNINGVLFVFLTNMTFQNVFAVINVFSGELPVFLQEHRNGMYRPSIYFISKTLAESPIFIIIPVTLTSVCYFMIGLNSHGFRFYIACGIMILVANVAISFGYLISCVSRSVSMALSIGPPLVIPFLLFGGFFLNVSSIPIYFKWLSFLSWFRYGNGALMINQWENVTNIQCPNADLPCPKDGHVILETFHFSEADFVMDVVMLAVLIVGFRLVAFLALLVKTWRFK

SEQ ID NO: 1775 - protein, 687 aa, Bombyx mori
MTAGNKKQEPLISTSVDNQRVTYNNSPQDGQTPNDSPQSSVGEVTVAIPQNRNYGAIGGIEKVTYTWADVNAFATESRSRGRRFWSFWKNSSDRMFQQRKQLLRNVNGAAYPGELLAIMGSSGAGKTTLLNTLTFRTPGGVVATGTRALNGQPATPDALTALSAYVQQQDLFIGTLTVREHLVFQAMVRMDRHIPYAQRMKRVQEVIQELALSKCQNTVIGIPGRLKGISGGEMKRLSFASEVLTDPPLMFCDEPTSGLDSFMAQNVIQVLKGLAQKGKTVVCTIHQPSSELYAMFDKLLIMADGRVAFLGSSDEAFQFFKELGAACPANYNPADHFIQLLAGVPGREEVTRHTIDTVCTAFAKSEIGCRIAAEAENALYNERKIQAGLADAPWAMSSTTRAGRSPYKASWCTQFRAVLWRSWLSVTKEPMLIKVRFLQTIMVSILIGVIYFGQNLDQDGVMNINGAIFMFLTNMTFQNIFAVINVFCSELPIFIREHHSGMYRADVYFLSKTLAEAPVFATIPLVFTTIAYYMIGLNPDPKRFFIASGLAALVTNVATSFGYLISCASSSVSMAASVGPPIIIPFMLFGGFFLNSGSVPPYLSWISYLSWFHYGNEALLINQWAGVETIACTRENFTCPASGQVVLETLSFSQDDFAMDVVNMILLFVGFRFLAYLALLWRTRRAK

SEQ ID NO: 1776 - protein, 385 aa, Bombyx mori
DGQTPNDSPRSSGGEVTVAIPQNRNYGAIGGIEKVTYTWADVNAFATESRSRGRRFWSFWKNSSDRMFQQRKQLLRNVNGAAYPGELLAIMGSSGAGKTTLLNTLTFRTPGGVVATGTRALNGQPATPDALTALSAYVQQQDLFIGTLTVREHLVFQAMVRMDRHIPYAQRMKRVQEVIQELALSKCQNTVIGIPGRLKGISGGEMKRLSFASEVLTDPPLMFCDEPTSGLDSFMAQNVIQVLKGLAQKGKTVVCTIHQPSSELYAMFDKLLIMADGRVAFLGSSDEAFQFFKELGAACPANYNPGDHFIQLLAGVPGREEVTRHTIDTVCTAFAKSEIGCRIAAEAENALYNERKIQAGLADAPWAMSSTTRAGRSPYKASWCT

SEQ ID NO: 1777 - protein, 692 aa, Aedes aegypti
MTINTDDHYADNESKSNITSRRYSTSSYQDVDEGINSSFGSNDKSTLIQVWKPKSYGAVKEQIPQHERLTYTWKEIDVFGETPGDTKKEPLCSRLCCCFSRQKKDFNPRKHLLKNVTGMAKSGELLAVMGSSGAGKTTLLNALSFRSPPGVKIAPTSVRALNGIPVNAEQLRARCAYVQQDDLFIPALTTREHLVFHAMLRMGKDVPKSVKMNRVNEVLQELSLAKCADTIIGAPGRMKGLSGGERKRLAFASETLTDPHLLLCDEPTSGLDSFMAHSVLQVLKGMALKGKTIILTIHQPSSELYCLFDKILLVAEGRVAFLGSPYQASEFFSQLGIPCPPNYNPADFYVQMLAIAPNKEAECRDTIKKICDSFAVSPMAREVMEVANSGKNVEEQYYLQPMEGASRTGYRSTWWTQFYYVLWRSWLTVLKDPMLVKVRLLQTAMVATLIGSIYFGQRLDQDGVMNINGALFLFLTNMTFQNVFAVINVFSAELPVFLREKRSRLFRVDTYFLGKTIAEVPLFLAVPFVFTSITYPMIGLKSGATYYLTALLIVVLVANVATSFGYLISCASSSISMALSVGPPVIIPFLIFGGFFLNSASVPSYFEYLSYFSWFRYANEALLINQWSTVQEGDIACTRANVTCPSSGQIILETFNFKVEDFGFDIACLCMLIVIFRLGALFCLWLRSRSKE

SEQ ID NO: 1778 - protein, 695 aa, Anopheles gambiae
MTINTDDQYGDAESKTTISSSRRYSSSSYQDQSMDDALNTTLTNDKATLIQVWKPKSYGSVKGQIPQCERLTYTWKEIDVFGEAPTDGKPREPLCTRLRNCCTRQRKDFNPRKHLLKNVTGVAKSGELLAVMGSSGAGKTTLLNALAFRSPPGVKISPNAVRALNGVPVNAEQLRARCAYVQQDDLFIPSLTTREHLLFQAMLRMGRDVPASVKQHRVQEVLQELSLVKCADTIIGAPGRIKGLSGGERKRLAFASETLTDPHLLLCDEPTSGLDSFMAHSVLQVLKGMAMKGKTIILTIHQPSSELYCLFDKILLVAEGRVAFLGSPYQSAEFFSQLGIPCPPNYNPADFYVQMLAIAPAKEAECRDMIKKICDSFAVSPIAREVLETASVAGKGMDEPYMLQQVEGVGSTGYRSSWWTQFYCILWRSWLSVLKDPMLVKVRLLQTAMVATLIGSIYFGQVLDQDGVMNINGSLFLFLTNMTFQNVFAVINVFSAELPVFLREKRSRLYRVDTYFLGKTIAELPLFIAVPFVFTSITYPMIGLRTGATHYLTTLFIVTLVANVSTSFGYLISCASSSISMALSVGPPVVIPFLIFGGFFLNSASVPAYFKYLSYLSWFRYANEALLINQWSTVVDGEIACTRANVTCPRSEIILETFNFRVEDFALDIACLFALIVLFRLGALLCLWLRSRSKE

SEQ ID NO: 1779 - protein, 673 aa, Anopheles gambiae
RYSSSSYQDQSMDDALNTTLTNDKATLIQVWKPKSYGSVKGQIPQCERLTYTWKEIDVFGEAPTDGKPREPLCTRLRSCCTRQRKDFNPRKHLLKNVTGVAKSGELLAVMGSSGAGKTTLLNALAFRSPPGVKISPNAVRALNGVPVNAEQLRARCAYVQQDDLFIPSLTTREHLLFQAMLRMGRDVPASVKQHRVQEVLQELSLVKCADTIIGAPGRIKGLSGGERKRLAFASETLTDPHLLLCDEPTSGLDSFMAHSVLQVLKGMAMKGKTIILTIHQPSSELYCLFDKILLVAEGRVAFLGSPYQSAEFFSQLGIPCPPNYNPADFYVQMLAIAPAKEAECRDMIKKICDSFAVSPIAREVLETASVAGKGMDEPYMLQQVEGVGSTGYRSSWWTQFYCILWRSWLSVLKDPMLVKVRLLQTAMVATLIGSIYFGQVLDQDGVMNINGSLFLFLTNMTFQNVFAVINVFSAELPVFLREKRSRLYRVDTYFLGKTIAELPLFIAVPFVFTSITYPMIGLRTGATHYLTTLFIVTLVANVSTSFGYLISCASSSISMALSVGPPVVIPFLIFGGFFLNSASVPAYFKYLSYLSWFRYANEALLINQWSTVVDGEIACTRANVTCPRSEIILETFNFRVEDFALDIACLFALIVLFRLGALLCLWLRYARKE

SEQ ID NO: 1780 - protein, 709 aa, Anopheles albimanus
MTINTDDQYADGESKTTISSNRRYSTSSFQDQSMEDDGINATLTNDKATLIQVWRPKSYGSVKGQIPAQDRLTYTWREIDVFGQAAIDGKSREPLCSRLRHCFTRQRLVKDFNPRKHLLKNVTGVARSGELLAVMGSSGAGKTTLLNELAFRSPPGVKISPNAIRTLNGVPVTAEQMRARCAYVQQDDLFIPSLTTKEHLMFQAMLRMGRDVPATPIKMHRVDEVLQELSLVKCADTIIGVAGRVKGLSGGERKRTAFRSETLTDPHLLLCDEPTSSLDSFMAQSVLQVLKGMAMKGKTIILTIHQPSSELYCLFDRILLVAEGVAFLGSPYQSADFFSQLGIPCPPNYNPADFYVQMLAIAPNKETECRETIKKICDSFAVSPIARDIIETASQVNGDGGIELTRTKHTTDPYFLQPMEGVDSTGYRASWWTQFYCILWRSWLSVLKDPMLVKVRLLQTAMVASLIGSIYFGQVLDQDGVMNINGSLFLFLTNMTFQNVFAVINVFSAELPVFLREKRSRLYRVDTYFLGKTIAELPLFIAVPFVFTSITYPMIGLKAAISHYLTTLFIVTLVANVSTSFGYLISCASSSISMALSVGPPVVIPFLIFGGFFLNSASVPAYFKYLSYLSWFRYANEALLINQWADHRDGEIGCTRANVTCPASGEIILETFNFRVEDFALDIGCLFALIVLFRLGALFCLWLRSRSKE

SEQ ID NO: 1781 - protein, 679 aa, Ceratitis capitata
MGQEDQEVLIRGGKATSTSAESLNNNNEQPYEQSSINQGFSKNYGTLSPPSPALTADNLTYSWYNLDVFGAVHQPGSSWKQLVNRVKGVFCNERHIPAPRKHLLKNVSGVAYPGELLAVMGSSGAGKTTLLNAIAFRSSKGVQISPSTIRMLNGHPVDAKEMQARCAYVQQDDLFIGSLTAREHLIFQAMVRMPRHMTQKQKVQRVDQVIQDLSLGKCQNTLIGVPGRVKGLSGGERKRLAFASEALTDPPLLICDEPTSGLDSFMAHSVVQVLKKLSQKGKTVILTIHQPSSELFELFDKILLMAEGRVAFLGTPGEAVDFFSYIGATCPTNYNPADFYVQVLAVVPGREVESRERIAKICDNFAVGKVSREMEQNFQKLVKSNGFGKEDENGYTYKASWFMQFRAVLWRSWLSVLKEPLLVKVRLLQTTMVAVLIGLIFLGQQLTQVGVMNINGAIFLFLTNMTFQNAFATITVFTTELPVFMRETRSRLYRCDTYFLGKTIAELPLFLVVPFLFTAIAYPLIGLRPGVDHFFTALALVTLVANVSTSFGYLISCACSSTSMALSVGPPVIIPFLLFGGFFLNSGSVPAYFKWLSYLSWFRYANEGLLINQWADVKPGEITCTLSNTTCPSSGEVILETLNFSASGLPFDFIGLALLIVGFRISAYIALTMRARRKE

SEQ ID NO: 1782 - protein, 593 aa, Ceratitis capitata
MGQEDQEVLIRGGKATSTSAESLNNNNEQPYEQSSINQGFSKNYGTLSPPSPALTADNLTYSWYNLDVFGAVHQPGSSWKQLVNRVKGVFCNERHIPAPRKHLLKNVSGVAYPGELLAVMGSSGAGKTTLLNAIAFRSSKGVQISPSTIRMLNGHPVDAKEMQARCAYVQQDDLFIGSLTAREHLIFQAMVRMPRHMTQKQKVQRVDQVIQDLSLGKCQNTLIGVPGRVKGLSGGERKRLAFASEALTDPPLLICDEPTSGLDSFMAHSVVQVLKKLSQKGKTVILTIHQPSSELFELFDKILLMAEGRVAFLGTPGEAVDFFSYIGATCPTNYNPADFYVQVLAVVPGREVESRERIAKICDNFAVGKVSREMEQNFQKLVKSNGFGKEDENGYTYKASWFMQFRAVLWRSWLSVLKEPLLVKVRLLQTTMVAVLIGLIFLGQQLTQVGVMNINGAIFLFLTNMTFQNAFATITVFTTELPVFMRETRSRLYRCDTYFLGKNHCRTAALLGGTVSLHRYRISSHWFTSRCRSFFHRSGACHLSSQCFNFLWLFDFLRLLVDINGSIGGSTCYYTIFTFWRFLFKLRLGAGVL

SEQ ID NO: 1783 - protein, 679 aa, Ceratitis capitata
MGQEDQEVLIRGGKATSTSAESLNNNNEQPYEQSSINQGFCKNYGTLSPPSPALTADNLTYSWYNLDVFGAVHQPGSSWKQLVNRVKGVFCNERHIPAPRKHLLKNDSGVAYPGELLAVMGSSGAGKTTLLNASAFRSSKGVQISPSTIRMLNGHPVDAKEMQARCAYVQQDDLFIGSLTAREHLIFQAMVRMPRHMTQKQKVQRVDQVIQDLSLGKCQNTLIGVPGRVKGLSGGERKRLAFASEALTDPPLLICDEPTSGLDSFMAHSVVQVLKKLSQKGKTVILTIHQPSSELFELFDKILLMAEGRVAFLGTPGEAVDFFSYIGATCPTNYTPADFYVQVLAVVPGREVESRDRVAKICDNFAVGKVSREMEQNFQKLVKSNGFGKEDENEYTYKASWFMQFRAVLWRSWLSVLKEPLLVKVRLLQTTMVAVLIGLIFLGQQLTQVGVMNINGAIFLFLTNMTFQNSFATITVFTTELPVFMRETRSRLYRCDTYFLGKTIAELPLFLVVPFLFTAIAYPLIGLRPGVDHFFTALALVTLVANVSTSFGYLISCACSSTSMALSVGPPVIIPFLLFGGFFLNSGSVPVYFKWLSYLSWFRYANEGLLINQWADVKPGEITCTLSNTTCPSSGEVILETLNFSASDLPFDFIGLALLIVGFRISAYIALTMRARRKE

SEQ ID NO: 1784 - protein, 696 aa, Drosophila melanogaster
MGQEDQELLIRGGSKHPSAEHLNNLIFEIPYHCRVTADASQSCINQGFGQAKNYGTLLPPSPPEDSGSGSGQLAENLTYAWHNMDIFGAVNQPGSGWRQLVNRTRGLFCNERHIPAPRKHLLKNVCGVAYPGELLAVMGSSGAGKTTLLNALAFRSPQGIQVSPSGMRLLNGQPVDAKEMQARCAYVQQDDLFIGSLTAREHLIFQAMVRMPRHLTYRQRVARVDQVIQELSLSKCQHTIIGVPGRVKGLSGGERKRLAFASEALTDPPLLICDEPTSGLDSFTAHSVVQVLKKLSQKGKTVILTIHQPSSELFELFDKILLMAEGRVAFLGTPSEAVDFFSYVGAQCPTNYNPADFYVQVLAVVPGREIESRDRIAKICDNFAISKVARDMEQLLATKNLEKPLEQPENGYTYKATWFMQFRAVLWRSWLSVLKEPLLVKVRLIQTTMVAILIGLIFLGQQLTQVGVMNINGAIFLFLTNMTFQNVFATINVFTSELPVFMREARSRLYRCDTYFLGKTIAELPLFLTVPLVFTAIAYPMIGLRAGVLHFFNCLALVTLVANVSTSFGYLISCASSSTSMALSVGPPVIIPFLLFGGFFLNSGSVPVYLKWLSYLSWFRYANEGLLINQWADVEPGEISCTSSNTTCPSSGKVILETLNFSAADLPLDYVGLAILIVSFRVLAYLALRLRARRKE

SEQ ID NO: 1785 - protein, 687 aa, Drosophila melanogaster
MGQEDQELLIRGGSKHPSAEHLNNGDSGAASQSCINQGFGQAKNYGTLRPPSPPEDSGSGSGQLAENLTYAWHNMDIFGAVNQPGSGWRQLVNRTRGLFCNERHIPAPRKHLLKNVCGVAYPGELLAVMGSSGAGKTTLLNALAFRSPQGIQVSPSGMRLLNGQPVDAKEMQARCAYVQQDDLFIGSLTAREHLIFQAMVRMPRHLTYRQRVARVDQVIQELSLSKCQHTIIGVPGRVKGLSGGERKRLAFASEALTDPPLLICDEPTSGLDSFTAHSVVQVLKKLSQKGKTVILTIHQPSSELFELFDKILLMAEGRVAFLGTPSEAVDFFSYVGAQCPTNYNPADFYVQVLAVVPGREIESRDRIAKICDNFAISKVARDMEQLLATKNLEKPLEQPENGYTYKATWFMQFRAVLWRSWLSVLKEPLLVKVRLIQTTMVAILIGLIFLGQQLTQVGVMNINGAIFLFLTNMTFQNVFATINVFTSELPVFMREARSRLYRCDTYFLGKTIAELPLFLTVPLVFTAIAYPMIGLRAGVLHFFNCLALVTLVANVSTSFGYLISCASSSTSMALSVGPPVIIPFLLFGGFFLNSGSVPVYLKWLSYLSWFRYANEGLLINQWADVEPGEISCTSSNTTCPSSGKVILETLNFSAADLPLDYVGLAILIVSFRVLAYLALRLRARRKE

SEQ ID NO: 1786 - protein, 687 aa, Drosophila melanogaster
MGQEDQELLIRGGSKHPSAEHLNNGDSGAASQSCINQGFGQAKNYGTLLPPSPPEDSGSGSGQLAENLTYAWHNMDIFGAVNQPGSGWRQLVNRTRGLFCNERHIPAPRKHLLKNVCGVAYPGELLAVMGSSGAGKTTLLNALAFRSPQGIQVSPSGMRLLNGQPVDAKEMQARCAYVQQDDLFIGSLTAREHLIFQAMVRMPRHLTYRQRVARVDQVIQELSLSKCQHTIIGVPGRVKGLSGGERKRLAFASEALTDPPLLICDEPTSGLDSFTAHSVVQVLKKLSQKGKTVILTIHQPSSELFELFDKILLMAEGRVAFLGTPSEAVDFFSYVGAQCPTNYNPADFYVQVLAVVPGREIESRDRIAKICDNFAISKVARDMEQLLATKNLEKPLEQPENGYTYKATWFMQFRAVLWRSWLSVLKEPLLVKVRLIQTTMVAILIGLIFLGQQLTQVGVMNINGAIFLFLTNMTFQNVFATINVFTSELPVFMREARSRLYRCDTYFLGKTIAELPLFLTVPLVFTAIAYPMIGLRAGVLHFFNCLALVTLVANVSTSFGYLISCASSSTSMALSVGPPVIIPFLLFGGFFLNSGSVPVYLKWLSYLSWFRYANEGLLINQWADVEPGEISCTSSNTTCPSSGKVILETLNFSAADLPLDYVGLAILIVSFRVLAYLALRLRARRKE

SEQ ID NO: 1787 - protein, 666 aa, Drosophila melanogaster
MSDSDSKRIDVEAPERVEQHELQVMPVGSTIEVPSLDSTPKLSKRNSSERSLPLRSYSKWSPTEQGATLVWRDLCVYTNVGGSGQRMKRIINNSTGAIQPGTLMALMGSSGSGKTTLMSTLAFRQPAGTVVQGDILINGRRIGPFMHRNHGYVYQDDLFLGSVSVLEHLNFMAHLRLDRRVSKEERRLIIKELLERTGLLSAAQTRIGSGDDKKVLSGGERKRLAFAVELLNNPVILFCDEPTTGLDSYSAQQLVATLYELAQKGTTILCTIHQPSSQLFDNFNNVMLLADGRVAFTGSPQHALSFFANHGYYCPEAYNPADFLIGVLATDPGYEQASQRSAQHLCDQFAVSSAAKQRDMLVNLEIHMAQSGNFPFDTEVESFRGVAWYKRFHVVWLRAIVTLLRDPTIQWLRFIQKIAMAFIIGACFAGTTEPSQLGVQAVQGALFIMISENTYHPMYSVLNLFPQGFPLFMRETRSGLYSTGQYYAANILALLPGMIIEPLIFVIICYWLTGLRSTFYAFGVTAMCVVLVMNVATACGCFFSTAFNSVPLAMAYLVPLDYIFMITSGIFIQVNSLPVAFWWTQFLSWMLYANEAMTAAQWSGVQNITCFQESADLPCFHTGQDVLDKYTFNESNVYRNLLAMVGLYFGFHLLGYYCLWRRARKL

SEQ ID NO: 1788 - protein, 666 aa, Drosophila melanogaster
MSDSDSKRIDVEAPERVEQHELQVMPVGSTIEVPSLDSTPKLSKRNSSERSLPLRSYSKWSPTEQGATLVWRDLCVYTNVGGSGQRMKRIINNSTGAIQPGTLMALMGSSGSGKTTLMSTLAFRQPAGTVVQGDILINGRRIGPFMHRISGYVYQDDLFLGSLTVLEHLNFMAHLRLDRRVSKEERRLIIKELLERTGLLSAAQTRIGSGDDKKVLSGGERKRLAFAVELLNNPVILFCDEPTTGLDSYSAQQLVATLYELAQKGTTILCTIHQPSSQLFDNFNNVMLLADGRVAFTGSPQHALSFFANHGYYCPEAYNPADFLIGVLATDPGYEQASQRSAQHLCDQFAVSSAAKQRDMLVNLEIHMAQSGNFPFDTEVESFRGVAWYKRFHVVWLRASLTLLRDPTIQWLRFIQKIAMAFIIGACFAGTTEPSQLGVQAVQGALFIMISENTYHPMYSVLNLFPQGFPLFMRETRSGLYSTGQYYAANILALLPGMIIEPLIFVIICYWLTGLRSTFYAFGVTAMCVVLVMNVATACGCFFSTAFNSVPLAMAYLVPLDYIFMITSGIFIQVNSLPVAFWWTQFLSWMLYANEAMTAAQWSGVQNITCFQESADLPCFHTGQDVLDKYSFNESNVYRNLLAMVGLYFGFHLLGYYCLWRRARKL

SEQ ID NO: 1789 - protein, 706 aa, Drosophila melanogaster
MGQEDQELLIRGGSKHPSAEHLNNLIFEIPYHCRVTADASQSCINQGFGQAKNYGTLLPPSPPEDSGSGSGQLAENLTYAWHNMDIFGAVNQPGSGWRQLVNRTRGLFCNERHIPAPRKHLLKNVCGVAYPGELLAVMGSSGAGKTTLLNALAFRSPQGIQVSPSGMRLLNGQPVDAKEMQARCAYVQQDDLFIGSLTAREHLIFQAMVRMPRHLTYRQRVARVDQVIQELSLSKCQHTIIGVPGRVKGLSGGERKRLAFASEALTDPPLLICDEPTSGLDSFTAHSVVQVLKKLSQKGKTVILTIHQPSSELFELFDKILLMAEGRVAFLGTPSEAVDFFSYITLHLNSYPAWVPSVLPTTIRRTFTYRCWPLCPDGRSSPVIGSPRYGDNFAISKVARDMEQLLATKNLEKPLEQPENGYTYKATWFMQFRAVLWRSWLSVLKEPLLVKVRLIQTTMVAILIGLIFLGQQLTQVGVMNINGAIFLFLTNMTFQNVFATINVFTSELPVFMREARSRLYRCDTYFLGKTIAELPLFLTVPLVFTAIAYPMIGLRAGVLHFFNCLALVTLVANVSTSFGYLISCASSSTSMALSVGPPVIIPFLLFGGFFLNSGSVPVYLKWLSYLSWFRYANEGLLINQWADVEPGEISCTSSNTTCPSSGKVILETLNFSAADLPLDYVGLAILIVSFRVLAYLALRLRARRKE

SEQ ID NO: 1790 - protein, 609 aa, Drosophila melanogaster
MADNAVQAQPNGLGPQKQKALELHFSQVSYSLKGATKGSTPIINEACGVFKSGRLTAILGPSGAGKSTLLNALAGFKLQGVTGQFLLNGRPRDIMSFRKMSAYIAQNFVMLNLLTVEETLRVSTDLKMPSSTAAQEKQKIIDDIIDILQLQSCRRTLVKNLSGGEHKRLSIGIELVTNPPIMFFDEPTSGLDCVGSYQVICHLQRLAHDGRIVVCVVHQPGSRLFQLFDDVLVLAHGEVLYAGEQREMLPTFAQSGHICPQYYNPADFALEVCSQSSTTERCESLITQNKMMHSTASNVVKLQVDEETALIDVHKDALDLSHLRGKEQVGFWTQLSVLLRRHLRSMSRDMFAVQMRLVMHVVVALLLGVVYWQIGGDAQKIVSNVSCLFFVILFVFAGNAMPSILLCMQDSAVFIREYYNGWYSLGAYYLSKVLADLPLQLTCPTMFISIGYFMTGQPPEFQRFAMCWALCVMTAFIGHFIGVIAGSLFTMQLAIFLVPSATIPFLLFSGFFIRLNELSWFLRPICDVSFFRYIFEGLMRAIYGYDRGELECYATSNFCYYRTAEQFLKDFQMEGNEFDWDMAVLGIFLILLLLAFFVTLNAVIRRALR

SEQ ID NO: 1791 - protein, 687 aa, Drosophila simulans
MGQEDQELLIRGGSKHPSAEHLNNGDSGAASQSCINQGFGQAKNYGTLRPPSPPEDSGSGSGQVAENLTYAWHNMDIFGAVNQPGSGWRQLVNRTRGLFCNERHIPAPRKHLLKNVCGVAYPGELLAVMGSSGAGKTTLLNALAFRSPQGIQVSPSGMRLLNGQPVDAKEMQARCAYVQQDDLFIGSLTAREHLIFQAMMRMPRHLTYRQRVARVDQVIQELLLSKCQHTIIGVPGRAKGLSGGERKRLAFASEALTDPPLLICDEPTSGLDSFTAHSVVQVLKKLSQKGKTVILTIHQPSSELFELFDKILLMAEGRVAFLGTPSEAVDFFSYVGAQCPTNYNPADFYVQVLAVVPGREIESRDRIAKICDNFAISKVARDMEQLLATKNLEKPLEQPENGYTYKATWFMQFRAVLWRSWLSVLKEPLLVKVRLIQTTMVAILIGLIFLGQQLTQVGVMNINGAIFLFLTNMTFQNVFATINVFTSELPVFMREARSRLYRCDTYFLGKTIAELPLFLTVPLVFTAIAYPMIGLRAGVMHFFNCLALVTLVANVSTSFGYLISCASSSTSMALSVGPPVIIPFLLFGGFFLNSGSVPVYLKWLSYLSWFRYANEGLLINQWADVEPGEISCTSSNTTCPSSGKVILETLNFSAADLPLDYVGLAILIVSFQVLAYLALRLRARRKE

SEQ ID NO: 1792 - protein, 668 aa, Drosophila virilis
  unsure (1)..(668): unsure at all Xaa locations
MPMDEGDAQGSLLLEWKQLNYYVPAQEQSNYSFWNECRKQRELGILHDVSGHLKTGDLIAILGGSGAGKTTLLAAISQRLRGNLTGDVVLNGMAMERDQMTRISSFLREFEINVKTFTAYDDLYFMSHFKMHRRTTKSEKRQAVSDLLLAVGLRDAAHTRIQQLSGGERKRLSLAEELITDPIFLFCDEPTTGLDSFSAYTVIKTLRHLCTRRRIAKHSLTQVYGEDSFATPSDNGSSGSNSIEMEIVDNSHESLLQAMKELPTLGVLNNSPNGTQKKAAICSIHQPTSDIFELFTHIILMDGGRIVYQGRTEQAAKFFTEGFMQPKNCNPADFYLKTLADGQGSKNAGELLRAKYEHETDGLYSGSWLLARNYSGDYMKHVQNFKKIRWIYQVYLLVIRFMTEDLANIRSGLIGFGFFMTTAVTLSLMYSGVGGLTQRTVQDVGGSIFMLSNEMIFTFSYGVTYIFPAALPIIRREVAEGTYSLSAYYVALVLSFVPVAFFKGYMFLSVIYASIYYTRGFLLYITMGFLMSLSAIAAVGYGVFLSSLFETDKMASECAAPFDLIFLIFGGTYMNVDSVPLLKYFSLFFYSNEALMYNFWIDIDNIACXVNDEHPCCQTGLEVLQQASFRTADYTFWLDCASLLVVALVFHIVSFTLIRRYINRSGYY

SEQ ID NO: 1793 - protein, 1837 aa, Plasmodium yoelii yoelii
MKKFGNNSNIFSPYWVKKIVQIKKENNEQREVEINLENEKPNDPVLLYHDIKTETTYYYTSEGNNFYIFFKINHYINKELFYTNTNKYIPSIFIYFYDINKIENNTLPIQIYDQGKNASSMNYQLLLTKYYEIYNHYKKEINIFLKNSNNLIKKNIKKKKEIPINNTNVEGEKQTNQNYIKKNINDEQPTKICTEKLFIKDQKKKKKNMYTQSQSITKKIVDNYVLLTNYENHNEISYFDFINVFENTFHKYNIIHSNFEHNLAKLNFFDGKWNNKTYDEKIDIYFNFKEKYKNDGTNKLSDTDNLKNYKKQLHKYQTNNYFSKERNNIVKNDHTKKSEFHILMKENKIFNWWYNSLFILILTKNKNNFNQISAIKNFKKIIHLLKKNKNQIINNPIYIYTTKSTGGNEFYITYNNVNKSFSIFMSPFLIYFNKDKWSLLNFNEYNSQDQKKKNLRFVLNILLELFLYIRMIYFKKKNIRKLKVYLLERTLNGYARCKMVSAKNKSSNYTKDSTKLNRKNNITYKYTFYSVVDNFFLVQGENYSGNNKLFKKIKKVLLKCTNFNKYVFFEFSKTKLEHICTCIHDLMSWANKFDHEIFKNERKEHVYIHFVQKKTNFVQNSINQSCDKTNVISKRENNLYKICSFKITSYKDKILQISKNICMHLFHLFKSLEKSLNSDTIYILKHAQFILVRFPYICYTICCGKRKVQNLKRVLCKTYVRYRSMWFCKNYLKSTDKNILHLIKKKKKKVLWNIFLNKKNIFLFWYLLKIQKLLIYFYLCMITNYCAKTKSRCCCYCSVKHKKEQKKKEPKQVSYAYNMLHKTFTNLIKEIKSEKQKKKIFLHFRKNTNISCLCKVKNGTFYECLEKSSYFDCYKKAKKKKKKKKTAFTLKSVHMNEYFLKNNKKSVQIIQNGNNNQEEGIVKDTNQIQNSTLQRKYRIEEKRCLKQKNYYNFFKLKNMKKLIIKYGNCLTTKVNEEFNISKKKRKHIFLNANKVKHELIKIAHLFQCEAKDIINFVDIISKETNQTKLEISTEKNINGDKNISSYKNKEKEKEKMKDNLQEINQTCIHTIAISLSKNIQANKNFAIFNILPIILKEKKSYINKNEQINYKIIREFFYSSDYSLNKIYNNSNVHKYYIKLNYLAFFINGHMTYSVDIFSNQYENYFTFLYTHFPYFPSATKMSIKELKNKKDLSSSCEQITYKFSNVKYSVDNGNLEILHGINGMILPQKITIIMGPSGSGKTTLLNILSMQILDGVEGNFLINNKPRTKSVKHHMGYVLQDDYFFANLTVYETLEFAARIKLDIKDKKKLEDLINSVLNIMDLTHVKDTIVGNAFIRGISGGQRKRLSIATEILSNPPLLFMDEPTSGLDSAAALSLVECMQKMSRFSNTTILSSLHQPSSQIFEKFDKLIAISSGYIIYQGKTTDLNIYLKKIGFICPHGWNIADYLMEILSNKKNEPILLENYNKYISFNEEEGYYMDLNNINNTIIHNDHDSEIKKKENLENDSNKNNNEQILLSNNISQQDFDNEIKKRDQDSKKLKAIELLISFEMKKASYIMQFLYLLIRGLKKFIVDELTIIKIIDLSITLTIFGFLWSKAFSDPHRVLDSMGAIFFMIAYWTYYPAYLSLYSFPSERVIIAKERNVKTYQVSNYFLSQALAEFIFFFCLIAVWSLFSHIALYGSFKFDVYIGFVFIITLNSLISSSLGYFISTLFDNLSRSVSLLSVSLLTMTLSNGFYVEVAKLKPPVKYLQWFSFQTYTASAMAKIKFSDIFIECLPNNISIECQNINKIPENMVIKQRFADIQLYVSILILFTFYFIIKTCIYISLRWSNALKMK

SEQ ID NO: 1794 - protein, 677 aa, Lucilia cuprina
  unsure (1)..(677): unsure at all Xaa locations
MGQEDQEFLIQEHKKRTATSVESLNNTPGTLEASAINSGFSKSYGSLVSNESASEKLTYSWCNLDVFGEVHQPGSNWKQLVNRVKGVFCNERHIPKPRKHLIKNVCGVAYPGELLAVMGSSGAGKTTLLNALAFRSARGVQISPSSVRMLNGHPVDAKEMQARCAYVQQDDLFIGSLTAREHLIFQATVRMPRTMTQKQKLQRVDQVIQDLSLIKCQNTIIGVPGRVKGLSGGERKRLAFASEALTDPPLLICDEPTSGLDSFMAASVVQVLKKLSQRGKTVILTIHQPSSELFELFDKILLMAEGRVAFLGTPVEAVDFFSFIGAQCPTNYNPADFYVQVLAVVPGREIESRDRISKICDNFAVGKVSREMEQNFQKIAAKTDGLQKDDETTILYKASWFTQFRAIMWRSWISTLKEPLLVKVRLIQTTMVAVLIGLIFLNQPMTQVGVMNINGAIFLFLTNMTFQNVFAVINVFTSELPVFMRETRSRLYRCDTYFLGKTLAELPLFLVVPFLFIAIAYPMIGLRPGITHFLSALALVTLVANVSTSFGYLISCASTSTSMALSVGPPLTIPFLLFGGVFLNSGSVPVYFKWLSYFSWFRYANEGLLINQWADVQPGEITCTSTNTTCPSSGXVXLETLNFRDKFTFRLYGLILLILIFRIAGYVAXKMRTKRKE

SEQ ID NO: 1795 - protein, 863 aa, Mycobacterium tuberculosis CDC1551
MSQPAAPPVLTVRYEGSERTFAAGHDVVVGRDLRADVRVAHPLISRAHLLLRFDQGRWVAIDNGSLNGLYLNNRRVPVVDIYDAQRVHIGNPDGPALDFEVGRHRGSAGRPPQTTSIRLPNLSAGAWPTDGPPQTGTLGSGQLQQLPPATTRIPAAPPSGPQPRYPTGGQQLWPPSGPQRAPQIYRPPTAAPPPAGARGGTEAGNLATSMMKILRPGRLTGELPPGAVRIGRANDNDIVIPEVLASRHHATLVPTPGGTEIRDNRSINGTFVNGARVDAALLHDGDVVTIGNIDLVFADGTLARREENLLETRVGGLDVRGVTWTIDGDKTLLDGISLTARPGMLTAVIGPSGAGKSTLARLVAGYTHPTDGTVTFEGHNVHAEYASLRSRIGMVPQDDVVHGQLTVKHALMYAAELRLPPDTTKDDRTQVVARVLEELEMSKHIDTRVDKLSGGQRKRASVALELLTGPSLLILDEPTSGLDPALDRQVMTMLRQLADAGRVVLVVTHSLTYLDVCDQVLLLAPGGKTAFCGPPTQIGPVMGTTNWADIFSTVADDPDAAKARYLARTGPTPPPPPVEQPAELGDPAHTSLFRQFSTIARRQLRLIVSDRGYFVFLALLPFIMGALSMSVPGDVGFGFPNPMGDAPNEPGQILVLLNVGAVFMGTALTIRDLIGERAIFRREQAVGLSTTAYLIAKVCVYTVLAVVQSAIVTVIVLVGKGGPTQGAVALSKPDLELFVDVAVTCVASAMLGLALSAIAKSNEQIMPLLVVAVMSQLVFSGGMIPVTGRVPLDQMSWVTPARWGFAASAATVDLIKLVPGPLTPKDSHWHHTASAWWFDMAMLVALSVIYVGFVRWKIRLKAC

SEQ ID NO: 1796 - protein, 865 aa, Mycobacterium tuberculosis H37Rv
MPMSQPAAPPVLTVRYEGSERTFAAGHDVVVGRDLRADVRVAHPLISRAHLLLRFDQGRWVAIDNGSLNGLYLNNRRVPVVDIYDAQRVHIGNPDGPALDFEVGRHRGSAGRPPQTTSIRLPNLSAGAWPTDGPPQTGTLGSGQLQQLPPATTRIPAAPPSGPQPRYPTGGQQLWPPSGPQRAPQIYRPPTAAPPPAGARGGTEAGNLATSMMKILRPGRLTGELPPGAVRIGRANDNDIVIPEVLASRHHATLVPTPGGTEIRDNRSINGTFVNGARVDAALLHDGDVVTIGNIDLVFADGTLARREENLLETRVGGLDVRGVTWTIDGDKTLLDGISLTARPGMLTAVIGPSGAGKSTLARLVAGYTHPTDGTVTFEGHNVHAEYASLRSRIGMVPQDDVVHGQLTVKHALMYAAELRLPPDTTKDDRTQVVARVLEELEMSKHIDTRVDKLSGGQRKRASVALELLTGPSLLILDEPTSGLDPALDRQVMTMLRQLADAGRVVLVVTHSLTYLDVCDQVLLLAPGGKTAFCGPPTQIGPVMGTTNWADIFSTVADDPDAAKARYLARTGPTPPPPPVEQPAELGDPAHTSLFRQFSTIARRQLRLIVSDRGYFVFLALLPFIMGALSMSVPGDVGFGFPNPMGDAPNEPGQILVLLNVGAVFMGTALTIRDLIGERAIFRREQAVGLSTTAYLIAKVCVYTVLAVVQSAIVTVIVLVGKGGPTQGAVALSKPDLELFVDVAVTCVASAMLGLALSAIAKSNEQIMPLLVVAVMSQLVFSGGMIPVTGRVPLDQMSWVTPARWGFAASAATVDLIKLVPGPLTPKDSHWHHTASAWWFDMAMLVALSVIYVGFVRWKIRLKAC

SEQ ID NO: 1797 - protein, 602 aa, Macaca fascicularis
MALLINGFCLLTVTERTTKAKHIQFVSGVSVIVYWLSALLCDFIIFFASCCLVMGVIKYRKLDIYVTDYHILETMLIFTLYGWSAIPFVYLISFVFSGSTSAYIKLLLLSYFSGTFGFLIGEIIENKKLTNISNTTRTVVRNSLLLFPNYNLAKCVSQYTTIYDVKILCTTLKKHPVHLNCSKANTEKNTYSLKEPMIGKYLIDMSTAGFIFLVLIFFWETTSWRLRTFLNQYIYFGIYKRYRKEIVSKELSGRSEDEDVQNERKRILEQPQELLDSIVLVKELIKIYFKCPAILAVKNISLAIQKGECFGLLGFNGAGKTTTFQILTGEASPTSGDVLIDGFSITKDILQVRSRIGYCPQFDALLEYMTAQEIMIMYARIWGVSEPQIKLYVNKWLNSLELESHADRLISTYSEGNKRRLSTAIALMGRSSIIFLDEPSTGMDPVARRLLWNIVTKTRESGRAIVITSHSMEECDALCTSLAIMVQGKFMCLGSPQHLKNKFGNIYILKVKVKTKDKLEDFKRFVTTTFPGSVLKHENQGILNYYIPSKDNRWGKVFGILEQAKEQFDLEDYSVSQITLEQVFLTFANPEKVSSDDENEVP

SEQ ID NO: 1798 - protein, 581 aa, Macaca fascicularis
MDLLISLLSLLMKCLSALLCDFIIFFASCCLVMGVIKYRKLDIYVTDYHILETMLIFTLYGWSAIPFVYLISFVFSGSTSAYIKLLLLSYFSGTFGFLIGEIIENKKLTNISNTTRTVVRNSLQLFPNYNLAKCVSQYTTIYDVKILCTTLKKHPVHLNCSKANTEKNIYSLKEPMIGKYLIDMSTAGFIFLVLIFFWETTSWRLRTFLNQYIYFGIYKRYRKEIVSKELSGQSEDEDVQNERKRILEQPQELLDSIVLVKELIKIYFKCPAILAVKNISLAIQKGECFGLLGFNGAGKTTTFQILTGEASPTSGDVLIDGFSITKDILQVRSRIGYCPQFDALLEYMTAQEIMIMYARIWGVSEPQIKLYVNKWLNSLELESHADRLISTYSEGNKRRLSTAIALMGRSSIIFLDEPSTGMDPVARRLLWNIVTKTRESGKAIVITSHSMEECDALCTSLAIMVQGKFMCLGSPQHLKNKFGNIYILKVKVKTKDKLQDFKRFVTTTFPGSVLKHENQGILNYYIPSKDNRWGKVFGILEQAKEQFDLEDYSVSQITLEQVFLTFANPEKVSSDDENEVP

SEQ ID NO: 1799 - protein, 2281 aa, Bos taurus
  unsure (1)..(2281): unsure at all Xaa locations
MGFARQIKLLLWKNWTLRKRQKIRFVVELVWPLSLFLVLIWLRNVNPLYSKHECHFPNKAMPSAGMLPWLQGIFCNVNNPCFQSPTAGESPGIVSNYNNSILARVYRDFQELLMDAPESQHLGQVWRELRTLSQLMNTLRMHPERIAGRGIRIREVLKDDEMLTLFLVKNIGLSDSVVYLLVNSQVRPEQFARGVPDLMLKDIACSEALLERFLIFPQRRAAQTVRGSLCSLSQGTLQWMEDTLYANVDFFKLFHVFPRLLDSRSQGMNLRSWGRILSDMSPRIQEFIHRPSVQDLLWVTRPLVQTGGPETFTQLMGILSDLLCGYPEGGGSRVFSFNWYEDNNYKAFLGIDSTRKDPIYSYDERTTTFCNALIQSLESNPLTKIAWRAAKPLLMGKILFTPDSPATRRILKNANSTFEELERVRKLVKVWEEVGPQIWYFFDKSTQMSMIRDTLENPTVKAFWNRQLGEEGITAEAVLNFLYNGPREGQADDVDNFNWRDIFNITDRALRLANQYLECLILDKFESYDDEFQLTQRALSLLEENRFWAGVVFPDMHPWTSSLPPHVKYKIRMDIDVVEKTNKIKDRYWDSGPRADPVEDFRYIWGGFAYLQDMVEHGITRSQAQEEVPVGIYLQQMPYPCFVDDSFMIILNRCFPIFMVLAWIYSVSMTVKSIVLEKELRLKETLKNQGVSNRVIWCTWFLDSFSIMSMSICLLTIFIMHGRILHYSNPFILFLFLLAFSIATIMQCFLLSTFFSRASLAAACSGVIYFTLYLPHILCFAWQDRITADMKMAVSLLSPVAFGFGTEYLAXFEEQGVGLQWSNIGNSPMEGDEFSFLMSMKMMLLDAALYGLLAWYLDQVFPGDYGTPLPWYFLLQESYWLGGEGCSTREERALEKTEPITEEMEDPEYPEGINDCFFERELPGLVPGVCVKNLVKIFEPYGRPAVDRLNITFYESQITAFLGHNGAGKTTTLSIMTGLLPPTSGTVLVGGKDIETNLDAIRQSLGMCPQHNILFHHLTVAEHILFYAQLKGRSWDEAQLEMEAMLEDTGLHHKRNEEARDLSGGVQRKLSVAIAFVGDAKVVVLDEPTSGVDPYSRRSIWDLLLKYRSGRTIIMSTHHMDEADILGDRIAIISQGRLYCSGTPLFLKNCFGTGFYLTLVRRMKTIQSQGRGREATCSCASKGFSVRCPACAEAITPEQVLDGDVNELTDMVHHHVPEAKLVECIGQELIFLLPNKNFKQRAYASLFRELEETLADLGLSSFGISDTPLEEIFLKVTEDLDSGHLFAGGTQQKRENINLRHPCSGPSEKAGQTPQGSSSHPGEPAAHPEGQPPPEREGHSRLNSGARLIVQHVQALLVKRFQHTIRSHKDFLAQIVLPATFVFLALMLSLIIPPFGEYPALTLHPWMYGQQYTFFSMDQPDSEWLSALADVLVNKPGFGNRCLKEEWLPEFPCGNSSPWKTPSVSPDVTHLLQQQKWTADQPSPSCRCSTREKLTMLPECPEGAGGLPPPQRIQRSTEILQDLTDRNVSDFLVKTYPALIRSSLKSKFWVNEQRYGGISVGGKLPAPPFTGEALVGFLSDLGQLMNVSGGPMTREAAKEMPAFLKQLETEDNIKVWFNNKGWHALVSFLNVAHNAILRASLHKDKNPEEYGITVISQPLNLTKEQLSEITVLTTSVDAVVAICVIFAMSFVPASFVLYLIQERVNKAKHLQFVSGVSPTTYWLTNFLWDIMNYTVSAALVVGIFIGFQKKAYTSSENLPALVALLMLYGWAVIPMMYPASFLFDIPSTAYVALSCANLFIGINSSAITFVLELFENNRTLLRINAMLRKLLIIFPHFCLGRGLIDLALSQAVTDVYAQFGEAHSSNPFQWDLIGKNLAAMAVEGVVYFLLTLLIQYQFFFSRWTTEPAKEPITDEDDDVAEERQRIISGGNKTDILRLNELTKVYSGTSSPAVDRLCVGVRPGECFGLLGVNGAGKTTTFKMLTGDTAVTSGDATVAGKSILTNISDVHQSMGYCPQFDAIDDLLTGREHLYLYARLRGVPAEEIERVTNWSIQSLGLSLYADRLAGTYSGGNKRKLSTAIALIGCPPLVLLDEPTTGMDPQARRMLWNTIMGIIREERAVVLTSHSMEECEALCTRLAIMVKGAFQCLGTIQHLKSKFGDGYIVTMKIRSPKDDLLPDLGPVEQFFQGNFPGSVQRERHYNTLQFQVSSSSLARIFRLLVSHKDSLLIEEYSVTQTTLDQVFVNFAKQQNETYDLPLHPRTAGASRQAKEVDKGNSAPQG

SEQ ID NO: 1800 - protein, 578 aa, Mus musculus
MSAPRAEEQPSRSGERQPLVARGPRGPRRWRRTAAAAVLLVQMLERAAFFGVTSNLVLYLNSLNFNWDGQQASRATLLFLGASYLLAPVGGWLADVYLGRFLTISLSLLLYLAASGLLLTTITNDGRRSFCGEMPELPLEPACPSSSCQGSWSSPYCATTLYLVLLLLALAASSVRSTLTSFGADQVMDLGRDATRRFFNWFYWSINLGAILSLLVVAFIEQNISFLWGYSIIVGLVGLAFFIFLFATPVFITKPPTGSQVSSMLKLAFQNCCPCRKSSSRDSESAHLLPDQRSNQPGPSPQEDMANFQVLVKILPVMVTLVPYWMVYFQMQSTYVLQGLHLHIPNIFRTNPNISLLLRSDSSNYRIPEAWLLLANVAVILILIPVKDHLIDPLLLRCKLLPSSLQKMALGMFFGFTSIIVAGVLEKERLQYIAANQTVPQLIGKDLYYAAPLSIWWQIPQYLLIGVSEIFASIPGLEFAYSEAPRSMQGAIMGIFFCLSGVGSLLGSGLVALLSFPGGWMYCPKDFGNINNCQMDRYFFLLAGIEAVTAVLFLWIAGRYERTRQDPASQRSSSRVRG

SEQ ID NO: 1801 - protein, 578 aa, Mus musculus
MSAPRAEEQPSRSGERQPLVARGPRGPRRWRRTAAAAVLLVQMLERAAFFGVTSNLVLYLNSLNFNWDGQQASRATLLFLGASYLLAPVGGWLADVYLGRFLTISLSLLLYLAASGLLLTTITNDGRRSFCGEMPELPLEPACPSSSCQGSWSSPYCATTLYLVLLLLALAASSVRSTLTSFGADQVMDLGRDATRRFFNWFYWSINLGAILSLLVVAFIEQNISFLWGYSIIVGLVGLAFFIFLFATPVFITKPPTGSQVSSMLKLAFQNCCPCRRSSSRDSESAHLLPDQRSNQPGPSPQEDMANFQVLVKILPVMVTLVPYWMVYFQMQSTYVLQGLHLHIPNIFRTNPNISLLLRSDSSNYRIPEAWLLLANVAVILILIPVKDHLIDPLLLRCKLLPSSLQKMALGMFFGFTSIIVAGVLEKERLQYIAANQTVPQLIGKDLYYAAPLSIWWQIPQYLLIGVSEIFASIPGLEFAYSEAPRSMQGAIMGIFFCLSGVGSLLGSGLVALLSFPGGWMYCPKDFGNINNCQMDRYFFLLAGIEAVTAVLFLWIAGRYERTRQDPASQRSSSRVRG

SEQ ID NO: 1802 - protein, 574 aa, Mus musculus
MEGERAPLLGSRRPAVSAASAVFAGRRAACGAVLLAELLERAAFYGVTANLVLFLNGAPFDWEGAQASQALLLFMGLTYLGSPFGGWLADARLGRARAILLSLALYLLGLLAFPLLAAPRSRSFLCGDPRPELVRNCSAPFPNGSASCPENAARRCAPATFAGLVLVGLGVATVKANITPFGADQVKDRGPEATRRFFNWFYWSINLGAILSLGGIAYIQQNVSFFTGYLIPTVCVAIAFLVFLCGQSVFITKPPDGSAFTDMFRILTYSCCSQRGGQRRSGEGLGVFQQSSKHSLFDSCKMSRGGPFTEDKVEDVKALVKIVPVFLALIPYWTVYFQMQTTYALQSLHLKIPEISSITTTHHTLPAAWLTMFDAVLILLLIPLKDKLVDPVLRRHGLLPSSLKRIAVGMFFVMCSAFAAGILESKRLDLVKEKTINQTIGGVVYHAADLPIWWQIPQYVLIGISEIFASIAGLEFAYSAAPKSMQSAIMGLFFFFSGIGSFVGSGLLALVSLKAIGWMSSHTDFGNINSCHLHYYFFLLAAIQGATLLLFLIVSVKYDRQRARTDGGPASTRT

SEQ ID NO: 1803 - protein, 740 aa, Mus musculus
MLEERESKEPAMNPFQKNESKETLFSPVSTEEMLPGPPSPPKKSTPKLFGSSYPLSIAFIVVNEFCERFSYYGMKAVLTLYFLYFLHWNEDTSTSVYHAFSSLCYFTPILGAAIADSWLGKFKTIIYLSLVYVLGHVFKSLGAIPILGGKMLHTILSLVGLSLIALGTGGIKPCVAAFGGDQFEEEHAEARTRYFSVFYLSINAGSLISMFITPMLRGDVKCFGEDCYALAFGIPGLLMVLALVVFAMGSKMYRKPPPEGNIVAQVTKCIWFAICNRFRNRSEDIPKRQHWLDWAAEKYPKHLIMDVKALTRILFLYIPLPMFWALLDQQGSRWTLQANKMDGDLGFFVLQPDQMQVLNPFLVLVFIPLFDLVIYRLISKCGVNFSSLRKMAVGMILACLAFAVAALVEIKINGMIHPQPASQEIFLQVLNLADGEIEVTVQGNRNNPLLVESISSFQNTTHYSKLRLETKSQDLHFHLKYNNLSVHNEYSVEEKNCYQLVVHENGESLSSMLVKDTGIKPANGMTAIRFINTLHKDMNISLDANAPLSVGKDYGVSEYRTVQRGKYPAVHCETEDNVFSLNLGQLDFGTTYLFVITNITNRGLQAWKAEDIPANKLSIAWQLPQYVLVTAAEVMFSVTGLEFSYSQAPSSMKSVLQAAWLLTVAVGNIIVLIVAQFSGLVQWAEFVLFSCLLLVVCLIFSVMGYYYVPLKSEGIHEATEKQIPHIQGNMINLETKNTRL

SEQ ID NO: 1804 - protein, 729 aa, Mus musculus
MNPFQKNESKETLFSPVSTEEMLPGPPSPPKKSTPKLFGSSYPLSIAFIVVNEFCERFSYYGMKAVLTLYFLYFLHWNEDTSTSVYHAFSSLCYFTPILGAAIADSWLGKFKTIIYLSLVYVLGHVFKSLGAIPILGGKMLHTILSLVGLSLIALGTGGIKPCVAAFGGDQFEEEHAEARTRYFSVFYLSINAGSLISTFITPMLRGDVKCFGEDCYALAFGIPGLLMVLALVVFAMGSKMYRKPPPEGNIVAQVTKCIWFAICNRFRNRSEDIPKRQHWLDWAAEKYPKHLIMDVKALTRILFLYIPLPMFWALLDQQGSRWTLQANKMDGDLGFFVLQPDQMQVLNPFLVLVFIPLFDLVIYRLISKCGVNFSSLRKMAVGMILACLAFAVAALVEIKINGMIHPQPASQEIFLQVLNLADGEIEVTVQGNRNNPLLVSEISSFQNTTHYSKLRLETKSQDLHFHLKYNNLSVHNEYSVEEKNCYQLVVHENGESLSSMLVKDTGIKPANGMTAIRFINTLHKDMNISLDANAPLSVGKDYGVSEYRTVQRGKYPAVHCETEDNVFSLNLGQLDFGTTYLFVITNITNRGLQAWKAEDIPANKLSIAWQLPQYVLVTAAEVMFSVTGLEFSYSQAPSSMKSVLQAAWLLTVAVGNIIVLIVAQFSGLVQWAEFVLFSCLLLVVCLIFSVMGYYYVPLKSEGIHEATEKQIPHIQGNMINLETKNTRL

SEQ ID NO: 1805 - protein, 729 aa, Mus musculus
MNPFQKNESKETLFSPVSTEEMLPGPPSPPKKSTPKLFGSSYPLSIAFIVVNEFCERFSYYGMKAVLTLYFLYFLHWNEDTSTSVYHAFSSLCYFTPILGAAIADSWLGKFKTIIYLSLVYVLGHVFKSLGAIPILGGKMLHTILSLVGLSLIALGTGGIKPCVAAFGGDQFEEEHAEARTRYFSVFYLSINAGSLISTFITPMLRGDVKCFGEDCYALAFGIPGLLMVLALVVFAMGSKMYRKPPPEGNIVAQVTKCIWFAICNRFRNRSEDIPKRQHWLDWAAEKYPKHLIMDVKALTRILFLYIPLPMFWALLDQQGSRWTLQANKMDGDLGFFVLQPDQMQVLNPFLVLVFIPLFDLVIYRLISKCGVNFSSLRKMAVGMILACLAFAVAALVEIKINGMIHPQPASQEIFLQVLNLADGEIEVTVQGNRNNPLLVESISSFQNTTHYSKLRLETKSQDLHFHLKYNNLSVHNEYSVEEKNCYQLVVHENGESLSSMLVKDTGIKPANGMTAIRFINTLHKDMNISLDANAPLSVGKDYGVSEYRTVQRGKYPAVHCETEDNVFSLNLGQLDFGTTYLFVITNITNRGLQAWKAEDIPANKLSIAWQLPQYVLVTAAEVMFSVTGLEFSYSQAPSSMKSVLQAAWLLTVAVGNIIVLIVAQFSGLVQWAEFVLFSCLLLVVCLIFSVMGYYYVPLKSEGIHEATEKQIPHIQGNMINLETKNTRL

SEQ ID NO: 1806 - protein, 740 aa, Mus musculus
MLEERESKEPAMNPFQKNESKETLFSPVSTEEMLPGPPSPPKKSTPKLFGSSYPLSIAFIVVNEFCERFSYYGMKAVLTLYFLYFLHWNEDTSTSVYHAFSSLCYFTPILGAAIADSWLGKFKTIIYLSLVYVLGHVFKSLGAIPILGGKMLHTILSLVGLSLIALGTGGIKPCVAAFGGDQFEEEHAEARTRYFSVFYLSINAGSLISTFITPMLRGDVKCFGEDCYALAFGIPGLLMVLALVVFAMGSKMYRKPPPEGNIVAQVTKCIWFAICNRFRNRSEDIPKRQHWLDWAAEKYPKHLIMDVKALTRILFLYIPLPMFWALLDQQGSRWTLQANKMDGDLGFFVLQPDQMQVLNPFLVLVFIPLFDLVIYRLISKCGVNFSSLRKMAVGMILACLAFAVAALVEIKINGMIHPQPASQEIFLQVLNLADGEIEVTVQGNRNNPLLVESISSFQNTTHYSKLRLETKSQDLHFHLKYNNLSVHNEYSVEEKNCYQLVVHENGESLSSMLVKDTGIKPANGMTAIRFINTLHKDMNISLDANAPLSVGKDYGVSEYRTVQRGKYPAVHCETEDNVFSLNLGQLDFGTTYLFVITNITNRGLQAWKAEDIPANKLSIAWQLPQYVLVTAAEVMFSVTGLEFSYSQAPSSMKSVLQAAWLLTVAVGNIIVLIVAQFSGLVQWAEFVLFSCLLLVVCLIFSVMGYYYVPLKSEGIHEATEKQIPHIQGNMINLETKNTRL

SEQ ID NO: 1807 - protein, 709 aa, Mus musculus
MGMSKSRGCFGYPLSIFFIVVNEFCERFSYYGMRALLVLYFRNFLGWDDNLSTAIYHTFVALCYLTPILGALIADSWLGKFKTIVSLSIVYTIGQAVISVSSINDLTDHDHNGSPDSLPVHVALSMVGLALIALGTGGIKPCVSAFGGDQFEEGQEKQRNRFFSIFYLAINGGSLLSTIITPILRVQQCGIHSQQACYPLAFGVPAALMAVALIVFVLGSGMYKKFQPQGNIMGKVAKCIGFAIKNRFRHRSKAYPKREHWLDWAKEKYDERLISQIKMVTKVMFLFIPLPMFWGLFDQQGSRWTLQATTMNGKIGANEIQPDQMQTVNAILNVNNGPNVDAVVYRSIAKCGFNFTSLKKMTVGMFLASMAFVVAAIVQVEIDKTLPVFPGGNQVQIKVLNIGNNNMTVHFPGNSVTLAQMSQTDTFMTFDIDKLTSINISSSGSPGVTTVAHDFEQGHRHNLLVWEPSQYRVVKDGPNQKPEKGENGIRFVNTLNEMVTNKMSGKVYEKFTSHNASGYKFLPSGEKQYTINTTAVAPTCLTDFKSSNLDFGSAYTYVIRRASDGCLEVKEFEDIPPNTVNMALQIPQYFLLTCGEVVFSVTGLEFSYSQAPSNMKSVLQAGWLLTVAVGNIIVLIVAGAGHFPKQWAEYILFASLLLVVCVIFAIMARFYTYINPAEIEAQFDEDEKKKGIGKENPYSSLEPVSQTNM

SEQ ID NO: 1808 - protein, 701 aa, Mus musculus
MSKSRGCFGYPLSIFFIVVNEFCERFSYYGMRALLVLYFRNFLGWDDNLSTAIYHTFVALCYLTPILGALIADSWLGKFKTIVSLSIVYTIGQAVISVSSINDLTDHDHNGSPDSLPVHVALSMVGLALIALGTGGIKPCVSAFGGDQFEEGQEKQRNRFFSIFYLAINGGSLLSTIITPILRVQQCGIHSQQACYPLAFGVPAALMAVALIVFVLGSGMYKKFQPQGNIMGKVAKCIGFAIKNRFRHRSKAYPKREHWLDWAKEKYDERLISQIKMVTKVMFLYIPLPMFWGSRWTLQATTMNGKIGAIEIQPDQMQTVNAILIVIMVPIVDAVVYPLIAKCGFNFTSLKKMTVGMFLASMAFVVAAPVQVEIGKTLPVFPGGNQVQIKVLNIGNNNMTVHFPGNSVTLAQMSQTDTFMTFDIDKLTSINISSSGSPGVTTVAHDFEQGHRHTLLVWNPSQYRVVKDGPNQKPEKGENGIRFVNTLNEMVTIKMSGKVYENVTSHNASGYQFFPSGEKQYTINTTAVAPTCLTDFKSSNLDFGSAYTYVIRRASDGCLEVKEFEDIPPNTVNMALQIPQYFLLTCGEVVFSVTGLEFSYSQAPSNMKSVLQAGWLLTVAVGNIIVLIVAGAGHFPKQWAEYILFASLLLVVCVIFAIMARFYTYINPAEIEAQFDEDEKKKGIGKENPYSSLEPVSQTNM

SEQ ID NO: 1809 - protein, 259 aa, Mus musculus
MLRERESKEPAMNPFQKNESKETLFSPVSTEEMLPGPPSPPKKSTPKLFGSSYPLSIAFIVVNEFCERFSYYGMKAVLTLYFLYFLHWNEDTSTSVYHAFSSLCYFTPILGAAIADSWLGKFKTIIYLSLVYVLGHVFKSLGAIPILGGKMLHTILSLVGLSLIALGTGGIKPCVAAFGGDQFEEEHAEARTRYFSVFYLSINAGSLISTFITPMLRGDVKRFGEDCYALAFGIPGLLMVLALGEWSGKGCEQPLIPAT

SEQ ID NO: 1810 - protein, 259 aa, Mus musculus
MLEERESKEPAMNPFQKNESKETLFSPVSTEEMLPGPPSPPKKSTPKLFGSSYPLSIAFIVVNEFCERFSYYGMKAVLTLYFLYFLHWNEDTSTSVYHAFSSLCYFTPILGAAIADSWLGKFKTIIYLSLVYVLGHVFKSLGAIPILGGKMLHTILSLVGLSLIALGTGGIKPCVAAFGGDQFEEEHAEARTRYFSVFYLSINAGSLISTFITPMLRGDVKCFGEDCYALAFGIPGLLMVLALGEWSGKGCEQPLIPAT

SEQ ID NO: 1811 - protein, 248 aa, Mus musculus
MNPFQKNESKETLFSPVSTEEMLPGPPSPPKKSTPKLFGSSYPLSIAFIVVNEFCERFSYYGMKAVLTLYFLYFLHWNEDTSTSVYHAFSSLCYFTPILGAAIADSWLGKFKTIIYLSLVYVLGHVFKSLGAIPILGGKMLHTILSLVGLSLIALGTGGIKPCVAAFGGDQFEEEHAEARTRYFSVFYLSINAGSLISTFITPMLRGDVKCFGEDCYALAFGIPGLLMVLALGEWSGKGCEQPLIPAT

SEQ ID NO: 1812 - protein, 582 aa, Rattus norvegicus
MSALRAEQQPSRSGERQPLVAQGRWGPRRWRRTAAAAVLLVEMLERAAFFGVTSNLVLYLNSLNFNWDGEHASRATLLFLGASYLLAPVGGWLADVYLGRFLAISLSLLLYLAATGLLLTTITDDGRRSFCGEMPELPLKPACPSANCQGSWSSPYCATTLYLVLLLLALAASSVRSNLTSFGADQVMDLGRDATRRFFNWFYWSINLGAILSLLVVAFIEQNISFLQGYSIIVGLVGLAFFIFLIATPVFITKPPTGSQVSSMLNLAFQNCCPGWQWWRRPSSRNSEGAHLLPDQRSNQPGPSPQEDMANFQVLLKVLPVMVTLVPYWMVYFQMQSTYVLQGLHLHIPNIFRTNPNISLPLRSDSSNYRIPEAWLLLANVAVILILVPVKDHLIDPLLLRCKLLPSALQKMALGMFFGFTSIIVAGVLEKERLQYIAANQTVPQLIGKDLYYAAPLSIWWQIPQYLLIGISEIFASIPGLEFAYSEAPRSMQGAIMGIFFCLSGVGSLLGSGLVALLSLPGGWMYCPKDFGNINNCRMDLYFFLLAGIQAVTAVLFLWIAGRYERTRQDPDSQNSTSRVRG

SEQ ID NO: 1813 - protein, 572 aa, Rattus norvegicus
MEGERAPLLGSRRAAAAAGVFAGRRAACGAVLLAELLERAAFYGVTANLVLFLNGAPFNWEGAQASQALLLFMGLTYLGSPFGGWLADARLGRARAILLSLALYLLGMLAFPLLAAPRSRSFLCGDPHPELVRNCSAPFPNGTAVCPDAAARRCAPATFAGLVLVGLGVATVKANITPFGADQVKDRGPEATRRFFNWFYWSINLGAILSLGGIAYIQQNVSFLTGYLIPTVCVAIAFLVFLCGQSVFITKPPDGSAFTDMFRILTYSCCSQRGGQRRSGEGLGVFQQSSKHSLFDSCKMSRGGPFTEDKVEDVKALVKIVPVFLALIPYWTVYFQMQTTYVLQSLHLKIPEISSITTTHHTLPAAWLTMFDAVLILLLIPLKDKLVDPVLRRHGLLPSSLKRIAVGMFFVTCSAFAAGILESKRLDLVKEKTINQTIGGVVYHAADLPIWWQIPQYVLIGISEIFASIAGLEFAYSAAPKSMQSAIMGLFFFFSGIGSFVGSGLLALVSLKAIGWMSSHTDFGNINSCHLHYYFFLLAAIQGATLLLFLIVSVKYDRQRARTDGGTASTRT

SEQ ID NO: 1814 - protein, 710 aa, Rattus norvegicus
MGMSKSRGCFGYPLSIFFIVVNEFCERFSYYGMRALLVLYFRNFLGWDDDLSTAIYHTFVALCYLTPILGALIADSWLGKFKTIVSLSIVYTIGQAVISVSSINDLTDHDHDGSPNNLPLHVALSMIGLALIALGTGGIKPCVSAFGGDQFEEGQEKQRNRFFSIFYLAINAGSLLSTIITPILRVQQCGIHSQQACYPLAFGVPAALMAVALIVFVLGSGMYKKFQPQGNIMGKVAKCIGFAIKNRFRHRSKAFPKREHWLDWAKEKYDERLISQIKMVTKVMFLYIPLPMFWALFDQQGSRWTLQATTMTGKIGTIEIQPDQMQTVNAILIVIMVPIVDAVVYPLIAKCGFNFTSLKKMTVGMFLASMAFVVAAIVQVEIDKTLPVFPSGNQVQIKVLNIGNNDMAVYFPGKNVTVAQMSQTDTFMTFDVDQLTSINVSSPGSPGVTTVAHEFEPGHRHTLLVWGPNLYRVVKDGLNQKPEKGENGIRFVSTLNEMITIKMSGKVYENVTSHSASNYQFFPSGQKDYTINTTEIAPNCSSDFKSSNLDFGSAYTYVIRSRASDGCLEVKEFEDIPPNTVNMALQIPQYFLLTCGEVVFSVTGLEFSYSQAPSNMKSVLQAGWLLTVAIGNIIVLIVAEAGHFDKQWAEYVLFASLLLVVCIIFAIMARFYTYINPAEIEAQFDEDEKKKGVGKENPYSSLEPVSQTNM

SEQ ID NO: 1815 - protein, 710 aa, Rattus norvegicus
MGMSKSRGCFGYPLSIFFIVVNEFCERFSYYGMRALLVLYFRNFLGWDDDLSTAIYHTFVALCYLTPILGALIADSWLGKFKTIVSLSIVYTIGQAVISVSSINDLTDHDHDGSPNNLPLHVALSMIGLALIALGTGGIKPCVSAFGGDQFEEGQEKQRNRFFSIFYLAINAGSLLSTIITPILRVQQCGIHSQQACYPLAFGVPAALMAVALIVFVLGSGMYKKFQPQGNIMGKVAKCIRFAIKNRFRHRSKAFPKRNHWLDWAKEKYDERLISQIKIMTKVMFLYIPLPMFWALFDQQGSRWTLQATTMTGKIGTIEIQPDQMQTVNAILIVIMVPIVDAVVYPLIAKCGFNFTSLKKMTVGMFLASMAFVVAAIVQVEIDKTLPVFPSGNQVQIKVLNIGNNDMAVYFPGKNVTVAQMSQTDTFMTFDVDQLTSINVSSPGSPGVTTVAHEFEPGHRHTLLVWGPNLYRVVKDGLNQKPEKGENGIRFVSTLNEMITIKMSGKVYENVTSHSASNYQFFPSGQKDYTINTTEIAPNCSSDFKSSNLDFGSAYTYVIRSRASDGCLEVKEFEDIPPNTVNMALQIPQYFLLTCGEVVFSVTGLEFSYSQAPSNMKSVLQAGWLLTVAIGNIIVLIVAEAGHFDKQWAEYVLFASLLLVVCIIFAIMARFYTYINPAEIEAQFDEDEKKKGVGKENPYSSLEPVSQTNM

SEQ ID NO: 1816 - protein, 729 aa, Rattus norvegicus
MNPFQKNESKETLFSPVSTEEMLPRPPSPPKKSPPKIFGSSYPVSIAFIVVNEFCERFSYYGMKAVLTLYFLYFLHWNEDTSTSVYHAFSSLCYFTPILGAAIADSWLGKFKTIIYLSLVYVLGHVFKSLGAIPILGGKMLHTILSLVGLSLIALGTGGIKPCVAAFGGDQFEEEHAEARTRYFSVFYLAINAGSLISTFITPMLRGDVKCFGQDCYALAFGVPGLLMVLALVVFAMGSKMYRKPPPEGNIVAQVIKCIWFALCNRFRNRSGDLPKRQHWLDWAAEKYPKHLIADVKALTRVLFLYIPLPMFWALLDQQGSRWTLQANKMNGDLGFFVLQPDQMQVLNPFLVLIFIPLFDLVIYRLISKCRINFSSLRKMAVGMILACLAFAVAALVETKINGMIHPQPASQEIFLQVLNLADGDVKVTVLGSRNNSLLVESVSSFQNTTHYSKLHLEAKSQDLHFHLKYNSLSVHNDHSVEEKNCYQLLIHQDGESISSMLVKDTGIKPANGMAAIRFINTLHKDLNISLDTDAPLSVGKDYGVSAYRTVLRGKYPAVHCETEDKVFSLDLGQLDFGTTYLFVITNITSQGLQAWKAEDIPVNKLSIAWQLPQYVLVTAAEVMFSVTGLEFSYSQAPSSMKSVLQAAWLLTVAVGNIIVLVVAQFSGLAQWAEFVLFSCLLLVVCLIFSVMAYYYVPLKSEDTREATDKQIPAVQGNMINLETKNTRL

SEQ ID NO: 1817 - protein, 453 aa, Rattus norvegicus
  unsure (1)..(453): unsure at all Xaa locations
XEFCERFSYYGMRALLVLYFRNFLGWDDDLSTAIYHTSVALRYLTPILGALIADSWLGKFKTIVSLSIVYTIGQAVISVSSINDLTDHDHDGSPNNLPLHVALSMIGLGLIGLGTGGIKPCVSAFGGDQFGEGQEKQGNPVFSIFYLAINAGSLLSTIITPILRVQQCGIHSQQACYPLAFGVPAALMAVALIVFVLGSGMYKKFQPQGNIMGKVAKCIGFAIKNRFRHRSKAFPKREHWLDWAKEKYDERLISQIKMVTKVMFLYIPLPMSWALFDQQGSRWTLQATTMTGKIGTIEIQPDQMQTVNAILIVIMVPIVDAVVYPLIAKCGFNYTSLKKMTVGMFLASMAFVVAAIVQVEIDKTLPVFPSGNQVQIKVLNIGNNDMAVYFPGKNVTVAQMSQTDTFMTFDVDQLTSINVSSPGSPGVTTVAHEFEPGHRHTLLVWGPNNYRVV

SEQ ID NO: 1818 - protein, 439 aa, Rattus norvegicus
YYGMRALLVLYFRNFLGWDDDLSTAIYHTSVALRYLTPILGALIADSWLGKFKTIVSLSIVYTIGQAVISVSSINDLTDHDHDGSPNNLPLHVALSMIGLGLIGLGTGGIKPCVSAFGGDQFGEGQEKQGNPVFSIFYLAINAGSLLSTIITPILRVQQCGIHSQQACYPLAFGVPAALMAVALIVFVLGSGMYKKFQPQGNIMGKVAKCIGFAIKNRFRHRSKAFPKREHWLDWAKEKYDERLISQIKMVTKVMFLYIPLPMSWALFDQQGSRWTLQATTMTGKIGTIEIQPDQMQTVNAILIVIMVPIVDAVVYPLLIAKCGFNYTSLKKMTVGMFLASMAFVVAAIVQVEIDKTLPVFPSGNQVQIKVLNIGNNDMAVYFPGKNVTVAQMSQTDTFMTFDVDQLTSINVSSPGSPGVTTVAHEFEPGHRHTLLVWG

SEQ ID NO: 1819 - protein, 197 aa, Rattus norvegicus
MSALRAEQQPSRSGERQPLVAQGRWGPRRWRRTAAAAVLLVEMLERAAFFGVTSNLVLYLNSLNFNWDGEHASRATLLFLGASYLLAPVGGWLADVYLGRFLAISLSLLLYLAATGLLLTTITDDGRRSFCGEMPELPLKPACPSANCQGSWSSPYCATTLYLVLLLLALAASSVRSNLTSFGADQDSVDLDYPEAA

SEQ ID NO: 1820 - protein, 493 aa, Escherichia coli O157:H7 EDL933
  unsure (1)..(493): unsure at all Xaa locations
MNKHASQPRAIYYVVALQIWEYFSFYGMRALLILYLTNQLKYNDTHAYELFSAYCSLVYVTPILGGFLADKVLGNRMAVMLGALLMAIGHVVLGASEIHPSFLYLSLAIIVCGYGLFKSNVSCLLGELYEPTDPRRDGGFSLMYAAGNVGSIIAPIACGYAQEEYSWAMGFGLAAVGMIAGLVIFLCGNRHFTHTRGVNKKVLRATNFLLPNWGWLLVLLVATPALITVLFWKEWSVYALIVATIIGLGVLAKIYRKAENQKQRKELRLIVTLTFFSMLFWAFAQQGGSSISLYIDRFVNRDMFGYTVPTAMFQSINAFAVMLCGVFLAWVVKESVAGNRTVRIWGKFALGLGLMSAGFCILTLSARWSAMYGHSSLPXMVLGLAVMGFAELFIDPVAMSQITRIEIPGVTGVLTGIYMLLSGAIANYLAGVIADQTSQASFDASGAINYSINAYIEVFDQITWGALACVGVVLMIWLYQALKFRNRALALES

SEQ ID NO: 1821 - protein, 489 aa, Escherichia coli O157:H7 EDL933
MNTTTPMGMLQQPRPFFMIFFVELWERFGYYGVQGVLAVFFVKQLGFSQEQAFVTFGAFAALVYGLISIGGYVGDHLLGTKRTIVLGALVLAIGYFMTGMSLLKPDLIFIALGTIAVGNGLFKANPASLLSKCYPPKDPRLDGTFTLFYMSINIGSLIALSLAPVIADKFGYSVTYNLCGAGLIIALLVYIACRGMVKDIGSEPDFRPMSFSKLLYVLLGSVVMIFVCAWLMHNVEVANLVLIVLSIVVTIIFFRQAFKLDKTGRNKMFVAFVLMLEAVVFYILYAQMPTSLNFFAINNVHHEILGFSINPVSFQALNPFWVVLASPILAGIYTHLGNKGKDLSMPMKFTLGMFMCSLGFLTAAAAGMWFADAQGLTSPWFIVLVYLFQSLGELFISALGLAMIAALVPQHLMGFILGMWFLTQAAAFLLGGYVATFTAVPDNITDPLETLPVYTNVFGKIGLVTLGVAVVMLLMVPWLKRMIATPESH

SEQ ID NO: 1822 - protein, 731 aa, Anopheles gambiae str. PEST
AAGCSTMVSTRFEVNSTPPVRYPRSIFFIISNEFSERFNYYGMRTVLALYLTQKLAYSNDTATVIYHIFTSLAYFFPLMGAILADSWLGKFKTILYLSIVYCAGSTLIALGAIPPLNLPATSMTVLGLLFIAVGSGGIKPCVSAFGGDQFKLPEQAAQLAKFFSLFYFSINAGSLISTTLTPILREDVHCFGDNSCFSLAFGVPAVLMILAIVIFVCGGAMYTIKKPSGNMIVLVFKCIGNALAVRSKESSTSPRAHWLDYAESKYGKGIVADIKALLKILILYIPLPVFWALFDQQGSRWTFQATRMDGELAGYTIKPDQMQVINPLLILAFIPVFESVIYPALAKIGIRRPLQKLSLGGLLAGAAFVLSGFVEIALDSTEAMLPAAHEAQLRVFNGLPCDYRFHTDIPNLAGFSVPSRGAYEALHVELPPGLANGTFQFRAETSEIGCVRENMTEFSGSFSLQAGGAVSYFISRKGGRSSLLEYADTAAKDRNGLPRMRLLANVRTTKQISLRHNGNADVVYNVALNQYDQLTSVTEGEYGVYVGERPIATVKLSPGGVYTLILDEFLENEFNLQTHTITPSNSVHMLWLIPQYVVITAGEVMFSITGLEFSYSQAPESMKSVIQAFWLLTVAIGNMLVVFIAEAKFVQSQSLEFFLFAALMFLDMGLFMVLAMRYRYSDTTGGASSVESIEVEQQGKKKQHDPLAISDTLSERSAKSTTYANEAYRED

SEQ ID NO: 1823 - protein, 693 aa, Anopheles gambiae str. PEST
KLKYPRAIPFIISNEFCERFNYYGMRTVLVLYLTRKLDFDDDTATVLYHTFTTLVYFMCVIGAIIADSWLGKFRTILYLSIVYTIGSGCITLGAIPTWDLDARAMTIAGLLLIAFGSGGIKPCVAAFGGEQFKLPEQAKYLALFFSMFYFAVNSGSFVSTMVTPILREDVKCFDDDDCFPLAFGVPGVLMVISIIIFIIGKPLYKISAPAGNMFVKVSKCIWTAIRTRSREKSINPREHWLDYSEKRWGRQLVDETRILLNVLKLYIPLPVFWALFDQQGSRWTFQATRMDGDLGFWTIKPDQMQVINPLLILVFIPLYEVAFYPLLSLIGIRRPLQKLTLGGIFAGLAFVISTIVEIQLESTYAVMPKAGEAQLRIFNGMPCDYRIQSNIPEHADFTLKSMSMFEEKYLNVKGSATYTYTLSSTGPGPNCAVAEEQRTFVVDEEKQLSYFIRKQDSGISLLRYEDDTEKSSKGYPVFRVLGNTATNRTVVFRDIDSSDAFDRHKNGSYVYDRVESYPSDYEIYVDGELTLTYTMRLGGVYAFIVSDIDGMSTTPIIVTEPNSVNMLWLIPQYVVMTLGEVMYSITGLEFSFTQAPESMKSVLQGCWQLTVAVGNLIVVIVAEAKIFDEQKWEFVLFAVLMFVDMGLFSILAWRYKQIPLKNYDEEDDPNATLPIDQKEESGLDNPVFKKSDE

SEQ ID NO: 1824 - protein, 601 aa, Anopheles gambiae str. PEST
YPRSIFFIISNEFSERFNYYGMRTVLALYLTQKLAYSNDTATVIYHIFTSLAYFFPLMGAILADSWLGKFKTILYLSIVYCAGSTLIALGAIPPLNLPATSMTVLGLLFIAVGSGGIKPCVSAFGGDQFKLPEQAAQLAKFFSLFYFSINAGSLISTTLTPILREDVHCFGDNSCFSLAFGVPAVLMILAIVIFVCGRTMYTIKKPSGNMIESSTSPRAHWLDYAESKYGKGIVADIKALLKILILYIPLPVFWALFDQQGSRWTFQATRMDGELAGYTIKPDQMQVINPLLILAFIPVFESVIYPALSKIGIRRPLQKLSLGGLLAGAAFVLSGFVEIALDSTEAMLPAAHEAQLRVLQAGGAVSYFISRKGGRSSLLEYADTAAKDRNGLPRMRLLANVRTTKQISLRHNGNADVVYNVALNQYDQLTSVTEGEYGVYVGERPIATVKLSPGGVYTLILDEFLENEFVSNEYIKSIHLDQQSNSDPFPTPSRFNLQTHTITPSNSVHMLWLIPQYVVITAGEVMFSITGLEFSYSQAPESMKSVIQAFWLLTVAIGNMLVVFIAEAKFVQSQSLEFFLFAALMFLDMGLFMVLAMRYRY

SEQ ID NO: 1825 - protein, 537 aa, Xanthomonas axonopodis pv. citri str. 306
MGAGTIGPVFSMTGLPLTTSISPGASAGARLPLQIPFIIGNEACERFSFYGMRNILVQFLITSLLLQEISGPGREAEAKHILHSFMIGVYFFPLLGGWLADRFSGKYNTILWFSLVYCAGHACLALFEGSRDGFFLGLGLIALGAGGIKPLVASFMGDQFDQSNKHLAKVVFDAFYWIINFGSLFASLLIPLALKNLSPAWAFGIPGILMFVATLVFWLGRKRYVLVPLPPKDPHGFAAVVRTALLTHAPGQGRPGLLLAVVSVLLALAGFALIEPLGIVVCLCIALVLLLAGIGGGTWWQLERARGTHPDVAVEGVRALLRVLVIFALVMPFFSLFDQKASTWVLQGREMTMPAWFTASQMQALNPLLVMLLIPFNNLVLYPLLRRGGWEPTPLRRMTSGIAFSGVAWIAVGAIQMIMDGGEPMHIAWQILPYALLTFGEVLVSATGIEFAYSQAPPSMKGVVMSFWYLTTTVGNLWVLLSNVAVRNATVTAHIADTGLSEAAFLMFFFAAFAFLAALAFGLYARRYRMVDNYRTA

SEQ ID NO: 1826 - protein, 493 aa, Shigella flexneri 2a str. 301
MNKHASQPRAIYYVVALQIWEYFSFYGMRALLILYLTNQLKYNDTHAYELFSAYCSLVYVTPILGGFLADKVLGNRMAVMLGALLMAIGHVVLGASEIHPSFLYLSLAIIVCGYGLFKSNVSCLLGELYEPTDPRRDGGFSLMYAAGNVGSIIAPIACGYAQEEYSWAMGFGLAAVGMIAGLVIFLCGNRHFTHTRGVNKKVLRATNFLLPNWGWLLVLLVATPALITVLFWKEWSVYALIVATIIGLGVLAKIYRKAENQKQRKELGLIVTLTFFSMLFWAFAQQGGSSISLYIDRFVNRDMFGYTVPTAMFQSINAFAVMLCGVFLAWVVKESVAGNRTVRIWGKFALGLGLMSAGFCILTLSARWSAMYGHSSLPLMVLGLAVMGFAELFIDPVAMSQITRIEIPGVTGVLTGIYMLLSGAIANYLAGVIADQTSQASFDASGAINYSINAYIEVFDQITWGALACVGLVLMIWLYQALKFRNRALALES

SEQ ID NO: 1827 - protein, 493 aa, Escherichia coli CFT073
MNKHASQPRAIYYVVALQIWEYFSFYGMRALLILYLTNQLKYSDNHAYELFSAYCSLVYVTPILGGFLADKVLGNRMAVMLGALLMAIGHVVLGASEIHPSFLYLSLAIIVCGYGLFKSNVSCLLGELYEPTDPRRDGGFSLMYAAGNVGSIIAPIACGFAQEEYSWAMGFGLAAVGMIAGLVIFLCGNRHFTHTRGVNKKVLRATNFLLPNWGWLLVLLVATPALITVLFWKEWSVYALIVATIIGLGVLAKIYRKAENQKQRKELGLIVTLTFFSMLFWAFAQQGGSSISLYIDRFVNRDMFGYTVPTAMFQSINAFAVMLCGVFLAWVVKESVAGNRTVRIWGKFALGLGLMSAGFCILTLSARWSAMYGHSSLPLMVLGLAVMGFAELFIDPVAMSQITRIEIPGVTGVLTGIYMLLSGAIANYLAGVIADQTSQASFDASGAINYSINAYIEVFDQITWGALACVGLVLMIWLYQALKFRNRALALES

SEQ ID NO: 1828 - protein, 489 aa, Escherichia coli CFT073
MNTTTPMGMLQQPRPFFMIFFVELWERFGYYGVQGVLAVFFVKQLGFSQEQAFVTFGAFAALVYGLISIGGYVGDHLLGTKRTIVLGALVLAIGYFMTGMSLLKPDLIFIALGTIAVGNGLFKANPASLLSKCYPPKDPRLDGAFTLFYMSINIGSLIALSLAPVIADKFGYSVTYNLCGAGLIIALLVYIACRGMVKDIGSEPDFRPMSFSKLLYVLLGSVVMIFVCAWLMHNVEVANLVLIVLSIVVTIIFFRQAFKLDKTGRNKMFVAFVLMLEAVVFYILYAQMPTSLNFFAINNVHHEILGFSINPVSFQALNPFWVVLASPILAGIYTHLGNKGKDLSMPMKFTLGMFMCSLGFLTAAAAGMWFADAQGLTSPWFIVLVYLFQSLGELFISALGLAMIAALVPQHLMGFILGMWFLTQAAAFLLGGYVATFTAVPDNITDPLETLPVYTNVFGKIGLVTLGVAVVMLLMVPWLKRMIATPESH

SEQ ID NO: 1829 - protein, 516 aa, Shewanella oneidensis MR-1
MTTPVDAPKWPRQIPYIIASEACERFSFYGMRNILTPFLMTALLLSIPEELRGAVAKDVFHSFVIGVYFFPLLGGWIADRFFGKYNTILWLSLIYCVGHAFLAIFEHSVQGFYTGLFLIALGSGGIKPLVSSFMGDQFDQSNKSLAQKAFDMFYFTINFGSFFASLSMPLLLKNFGAAVAFGIPGVLMFVATVFFWLGRKRYIHMPPEPKDPHGFLPVIRSALLTKVEGKGNIGLVLALIGGVSAAYALVNIPTLGIVAGLCCAMVLVMGFVGAGASLQLERARKSHPDAAVDGVRSVLRILVLFALVTPFWSLFDQKASTWILQANDMVKPQWFEPAMMQALNPLLVMLLIPFNNFVLYPAIERMGVKLTALRKMGAGIAITGLSWIVVGTIQLMMDGGSALSIFWQILPYALLTFGEVLVSATGLEFAYSQAPKAMKGTIMSFWTLSVTVGNLWVLLANVSVKSPTVTEQIVQTGMSVTAFQMFFFAGFAILAAIVFALYARSYQMQDHYRQAT

SEQ ID NO: 1830 - protein, 574 aa, Lotus japonicus
MEGKGYTLDGTVDLAGRPVLSSLTGKQKACTYILVYRVLERFAYYGVGANLVNFMTTQLNKDVVSSITSFNNWSGLATLTPILGAYIADTYTGRFWTITFSLLIYAIGLVLLVLTTTLKSLRPACENGICREASNLQVALFYTSLYTIAVGSGAVKPNMSTFGADQFDDFRHEEKEQKVSFFNWWAFNGACGSLMATLFVVYIQEKNGWGLAYSLSAIGFLLSSIIFFWGSPVYRHKSRQARSPSMNFIRVPLVAFRNRKLQLPCNPSELHEFQLNYYISSGARKIHHTSHFSFLDRAAIRESNTDLSNPPCTVTQVEGTKLVLGMFQIWLLMLIPTNCWALESTIFVRQGTTMDRTLGPKFRLPAASLWCFIVLTTLICLPIYDHYFIPFMRRRTGNHRGIKLLQRVGIGMAIQVIAMAVTYAVETQRMSVIKKHHIAGPEETVPMSIFWLLPQNIILGVSFAFLATGMLEFFYDQSPEEMKGLGTTLCTSCVAAGSYINTFLVTMIDKLNWIGNNLNDSQSRITIMPFFSVISALNFGVFLWVSSGYIYKKENTSTTEVHDIEMSAEKTVKY

SEQ ID NO: 1831 - protein, 190 aa, Chionodraco hamatus
DSWLGRFKTIVYLSIVYMLGQVVMAISAIHDLTDANMDGTPDNMTLHVALSMVGLILIALGTGGIKPCVAAFGGDQFLDHQEKQRSTFFSIFYLSINAGSLLSTVITPILRAQECGINTKQSCYPLAFGVPAALMVVALVVFILGSRMYIKTPPQGNIMVKVCTCIGFAVKNRFRHRSSQYPKRAHWLDW

SEQ ID NO: 1832 - protein, 604 aa, Cucumis sativus
MEIESLRVSVDEKVLKDEEKNEKEEMKMKMKMKRKLGGVKTMPFILGNEVCDRFASSGFHSNIITYLTQDLNMPLVPASNILTNFAATSSFTSLIGALIADSFAGRFWTITIASIIYELGMVTITISAILPSLHPPPCPTQINCTQASGTQLMILYLALLLTSLGAGGIRPCVVAFAADQFDMTKVGIAGRTWNFFNWYYFCMGMATLTALTVVVYIQDNVGWGWGFGLPTIAMALSVVAFVVGSPLYNKLKPSGSPLVRLAQVVVAAFKNRKAVLPDDSKLLYRNHELDAAIAIQGRLVHTDQFKWLDKAAVITSPDSTANPPNLWRLATVHRVEELKSIIRMLPIWAAGILLVTASSHQHSFTIQQARTMNRHLTPTFQIPPATLSIFGILSMLTGLVLYDRLLVPFAKKLTHNPSGITCLQRMGVGFAINILATLVSSIVEIKRKKVAANHGLLDNPTATIPFSVFWLVPQFWLHGIAEVFMSVGHLEFMYDQSPESLRSTATALYWLAISVGNYIGTLMVYLVHKYTGEEHNWLPDRNLNRGRLEYYYWLVSGIQVMNLVYYVICAWFYTYKPLEEEKINIENKDGDQEWERCEDTIKIA

SEQ ID NO: 1833 - protein, 484 aa, Cucumis sativus
MVTITISAILPSLHPPPCPTQINCTQASGTQLMILYLALLLTSLGAGGIRPCVVAFAADQFDMTKVGIAGRTWNFFNWYYFCMGMATLTALTVVVYIQDNVGWGWGFGLPTIAMALSVVAFVVGSPLYNKLKPSGSPLVRLAQVVVAAFKNRKAVLPDDSKLLYRNHELDAAIAIQGRLVHTDQFKWLDKAAVITSPDSTANPPNLWRLATVHRVEELKSIIRMLPIWAAGILLVTASSHQHSFTIQQARTMNRHLTPTFQIPPATLSIFGILSMLTGLVLYDRLLVPFAKKLTHNPSGITCLQRMGVGFAINILATLVSSIVEIKRKKVAANHGLLDNPTATIPFSVFWLVPQFWLHGIAEVFMSVGHLEFMYDQSPESLRSTATALYWLAISVGNYIGTLMVYLVHKYTGEEHNWLPDRNLNRGRLEYYYWLVSGIQVMNLVYYVICAWFYTYKPLEEEKINIENKDGDQEWERCEDTIKIA

SEQ ID NO: 1834 - protein, 589 aa, Brassica napus
MSLPETKTQTLLDAWDFQGRPADRSKTGGWASAAMILCIEAVERLTTLGIGVNLVTYLTGTMHLGNATAANTVTNFLGTSFMLCLLGGFIADTFLGRYLTIAIFAAIQATGVSILTLSTIIPGLRPPRCDPTTSSHCVQANGIQLTVLYLALYLTALGTGGVKASVSGFGSDQFDDTEPKERSQMTYFFNRFFFCINVGSLMAVTVLVYIQDDVGRKWGYGICALAIVLSLSIFLAGTNRYRFKKLIGSPMTQVGTVLVAAWRNRRLELPSDPSFLYDLDDVIAAEGSMKSKQKLPHTNQFRSLDKAAIKDQEMAMTQNVYNKWTLSTVTDIEEVKQIVRMLPIWATCILFWTVHAQLTTLSVAQSETMDRHIGSFEIPPAAMAVFYIGGLLLTTAVYDRLAIPLCKKLFNYPHGLRPLQRIGLGLLLAAMGMAVAALVEIKRLRTAHAHGPTVKTLPLGFSLLIPQYLIVGIGEALIYTGQLDFFLRECPKGMKTMSTGLLLSTLALGFFFSSVLVTIVEKVTDKAHPWIADDLNKGRLYNFYWLVAVIVALNFLVFLVFSKWYVYKEKRLADLGIELEDEPDIPMGH

SEQ ID NO: 1835 - protein, 588 aa, Brassica napus
MSLPETKSQTLLDAWDFQGRPADRSKTGGWASAAMILCIEAVERLTTLGIGVNLVTYLTGTMHLGNATAANTVTNFLGTSFMLCLLGGFIAHTFLGRYLTIAIFAAIQATGVSILTLSTIIPGFQPPRCPTTSSHCVQPSGIQLTVLYLALYLTALGTGGVKASVSGFGSDQFDETEPKEQSQMTYFFNRFFFCINVGSLLAVTVLVYMQDDVGRKWGYGLCALAIVLSLSIFLAGTNRYRFKKLIGSPMTQVAAVIVAAWWNRRLELPSDPSFLYDLDDVIAAEGSMKSKQKLPHTNQFRSLDKAAIKDQEMAMTQNVYNKWTLSTVTDIEEVKQIVRMLPIWATCILFWTVHAQLTTLSVAQSETMDRHIGSFEIPPAAMAVFYIGGLLLTTAVYDRLAIPLCKKLFNYPHGLRPLQRIGLGLLLAAMGMAVAALVEIKRLRTAHAHGPTVKTLPLGFSLLIPQYLIVGIGEALIYTGQLDFFLRECPKGMKTMSTGLLLSTLALGFFFSSVLVTIVEKVTDKAHPWIADDLNKGRLYNFYWLVAVIVALNFLVFLVFSKWYVYKEKRLADLGIELEDEPDIPMGH

SEQ ID NO: 1836 - protein, 559 aa, Prunus dulcis
  unsure (1)..(559): unsure at all Xaa locations
MGSLEEERSLLEDGLIQDETNGLYTGDGSVDITGKPVLKQSTGNWXACPFILGTECCERLAFYGISTNLVTYLTHKLHEGNVSAARNVTTWSGTCYLTPLIGAVLADAYWGRYWTIAIFSTIYFIGMCTLTISASVPALKPPQCVDSVCPSASPAQYGVFFFGLYLIALRTGGIKPCVSSFGADQFDDTDSRERVKKGSFFNWFYFSINIGALVSSTLIVWVQDNAGWGLGFGIPALFMGIAIVSFFSGTPLYRFQKPGGSPLTRMCQVLVASFRKWNLDVPRDSSLLYETQDKGSAIKGSRKLEHSDELNCLDKAAVISETETKTGDFSNPWRICTVTQVEELKILIRMFPIWATGIVFSAVYAQMATMFVEQGMMMDTSVGSFTIPPASLSSFDVISVIFWVPIYDRFIVPIARKFTGKERGFSELQRMGIGLFLSVLCMSAAAVVEMKRLQLATELGLVDKEVAVPLSIFWQIPQYFLLGAAEIFTFIGQLEFFYDQSSDAMRSLCSALSASDDFIGKLSELFDSDIVTYFTTQGGKAGWIPDNLNDGHLDYFSGS

SEQ ID NO: 1837 - protein, 201 aa, Cicer arietinum
AILITLAVNDRIIMPLWKKMKGKPGFTNLQRIAIGLLLSTFGMAAASLCEVKRLSVAKSVKGNQATIPISVFLLIPQFFLVGSGEAFIYTGQLDFFITQSPKGMKTMSTGLFLTTLSLGFFISSFLVSVVKKVTGTRDGQGWLADNINKGRLDLFFALLTILSFINFVAFLVCAFWYKPKKAKPSMQMGAINNGSSVEEKC

SEQ ID NO: 1838 - protein, 586 aa, Glycine max
  unsure (1)..(586): unsure at all Xaa locations
MKEKMSWTVADAVDYKGFPADRSKTGGWVPAALILGIEIVERLSTMGIAVNLVTYMISIMHLPSSTAANTVTDFMGTSFLLCLLGGFLADSFLGRYKTIGIFASIQTLGTATLAISTKLPGLRPPPCHANSDSCKQANGFQMGILYLSLYLIALGTGGLKSSVSGFGSDQFDEKDEKEKSQMAYFFNRFFFFISFGTLAAVTVLVYLQDEVSRSLAYGICSVSMIIAIIVFLSGTKRYRYKRSLGSPIVHIFQVIAASIKKRKMQLPYNVGSLYEDTPEASRIEHTEQFRFLEKAAIVAEDDFETNLCGSGPNPWKLCSLTRVEEVKMMVRLLPVWATTIIFWTIYAQLITFSVEQASTMERNIGSFQIPAGSVTVFFXVAAILITLAVYDRLIMPLWKKWNGKPGFTDLQRIAIGLVFSIFGMAAASVCERKRLSVAKSVSGGNQATTTLPISVFLLIPQFFLVGSGEAFIYTGQLDFFITRSPKGMKTMSTGLFLTTLSLGFFFSSFLVSVVKKVTGTRDGQGWLADSINKGRLDLFYALLTILSFVNFAAFAVCAVWFKPKKPKQPAAMQMGPVNGSTAEEKC

SEQ ID NO: 1839 - protein, 123 aa, Narcissus pseudonarcissus
QPMSVFWLVPQFFLVGAGEAFCYIGQLDFFLRECPKGMKTMSTGMFLSTLSLGFFLSSALVTIVHKVTGESGQGAWLPDDLNRGKLYDFYWLLAVLSAVNLVAFLVSARWYVYKENRMATDDG

SEQ ID NO: 1840 - protein, 594 aa, Oryza sativa (japonica cultivar-group)
MVLPETAAEGKALTDAWDYKGRPAGRAATGGWGCAAMILGAELFERMTTLGIAVNLVPYMTGTMHLGNAAAANTVTNFIGTSFMLCLLGGFVADTYLGRYLTIAIFEAVQATGVMILTISTAAPGLRPPACGDPKGASAECVAADGTQLGVLYLGLYLTALGTGGLKSSVSGFGSDQFDESDVDGERKKMMRFFNWFYFFVSLGALLAVTVLVYVQDNVGRRWGYGICAAGILAGLAVFLSGTRRYRFKKLVGSPLTQVAAVTAAAWSKRSLPLPSDPDMLYDVDDAAAAGHDVKGKQRMPHSKECRFLDHAAIIDRSAAESPATASKWRLCTRTDVEEVKQVVRMLPIWATTIMFWTIHAQMTTFAVAQAELMDRRLAGGFLIPAGSLTVFLIASILLTVPFYDRLVVPVARRATANPHGLTPLQRVFVGLSLSIAGMAVAAAVERHRATASASAAAAAPTVFLLMPQFLLVGAGEAFTYMGQLDFFLRECPKGMKTMSTGLFLSTCAIGFFFSTLLVTIVHKVTGHGARGGGWLADNLDDGRLDYFYWLLAVISAINLVLFTVAARGYVYKEKRLADAGIELADEETIAVGH

SEQ ID NO: 1841 - protein, 594 aa, Nicotiana plumbaginifolia
MALPETQQDSKALPDAWDYKGRPALRSSSGGWASGAMILGVEAVERLTTLGIAVNLVTYLTGTMHLGNATAANNVTNFLGTSFMLTLLGGFVADTFLGRYLTIGIFATVQAMGVTILTISTIIPSLRPPKCEQVGSSSCIPANSKQLMVLYIALYMTALGTGGLKSSVSGFGTDQFDDGDKKEKGQMIKFFDWFFFFINVGSLGAVTVLVYIQDNLGREWGYGICACAIVIGLVVFLSGTRKYRFKKLVGSPLTQIASVIVAAWKKTHLELPSNSSLLFEIDNIFGEGNKKSKQKLPHSKEYRFLDKAAIKEDNDLESNGTKVVINKWKLATLTDVEEVKLLIRMLPTWATTIMFWTVYAQMTTFSVSKATTMDRHIGTFEIPPASLTVFFVGSILLTVIFYDRIIVPICRRFMNKPHGLTPLHRIFTGLVLSILAMIAAALTEVKRLKVAHLHGLTNDANATIPLTVFWLVPQFLLVGAGEAFTYIGQLDFFLRECPKGMKTMSTGLFLSTLALGFFVSSILVTIVHVVTGTKNPWLADNLNQGRLYDFYWLLAILSVFNLMFFLYSSRKYVYKEKRLAEMGIELEDDGPVCH

SEQ ID NO: 1842 - protein, 590 aa, Nicotiana plumbaginifolia
MALPETQQDTKTLPDAWDYKGRPAVRSSSGGWSSAAMILGIEAVERLTTLGIAVNLVTYLTGTMHLGNASSANNVTNFLGTSFMLTLLGGFVADTFLGRYLTIGIFTTIQAMGVTILTISTIIPSLRPPKCSPGSSTCIPASSKQLMVLYIALYMTALGTGGLKSSVSGFGSDQFDETDKKERGQMIKFFNWFFFFINVGSLGAVTVLVYIQDNLGREYGYGICACAIVIGLVIFLSGTRKYRFKKLVGSPLTQIASVFVAAWNKRHMDLPSDSTLLYNIDDIPGDGNKKAKQRLPHSKEFRFLDKAAIKVQDTESAGITVVNKWNLSTLTDVEEVKLVVRMLPTWATTIMFWTVYAQMTTFSVSQATTMDRHIGNFEIPPASLTLFFVGSILLTCIFYDRAVVPVCRRVLNNPHGTTPLQRIAVGLILSIIAMVAAALTEVKRLNVAHLHGLTNDANAKVPLSVFWLVPQFLLVGAGEAFTYIGQLDFFLRECPKGMKTMSTGLFLSTLSLGFFVSSILVTIVHKVTVKNPWLADNLNQGRLYDFYWLLATLSVLNLMVFLFISRRYVYKEKRLAECGIEMEDSEPACH

SEQ ID NO: 1843 - protein, 594 aa, Nicotiana tabacum
MALPETQQDSKALPDAWDYKGRPALRSSSGGWASGAMILGVEAVERLTTLGIAVNLVTYLTGTMHLGNATAANNVTNFLGTSFMLTLFGGFVADTFLGRYLTIGIFATVQAMGVTILTISTIIPSLRPPKCEQVGSSSCIPANSKQLMVLYIALYMTALGTGGLKSSVSGFGTDQFDDADKKEKGQMIKFFDWFFFFINVGSLGAVTVLVYIQDNLGREWGYGICACAIVIGLVVFLSGTRKYRFKKLVGSPLTQIASVIVAAWKKRHLELLSDSSLLFEIDDIFGEGNKKNKQKLPHSKEYRFLDKAAIKEDHDLESNGTNVVINKWKLATLTDVEEVKLLIRMLPTWATTIMFWTVYAQMTTFSVSQATTMDRHIGTFEIPPASLTVFFVGSILLTVIFYDRVIVPICRRFMNKPHGLTPLQRIFTGLVLSILAMIAAALTEVKRLKVAHLHGLTNDANATIPLSVFWLVPQFLLVGAGEAFTYIGQLDFFLRECPKGMKTMSTGLFLSTLALGFFFSSILVTIVHVVTGTTNPWLADNLNQGRLYDFYWLLAILSVLNLMFFLYFSRKYVYKEKRLAEMGIELEDDGPVCH

SEQ ID NO: 1844 - protein, 594 aa, Nicotiana tabacum
MALPETQQDSKALPDAWDYKGRPALRSSSGGWASGAMILGVEAVERLTTLGIAVNLVTYLTGTMHLGNASSANNVTNFLGTSFMLTLLGGFVADTFLGRYLTIGIFATVQAMGVTILTISTIIPSLRPPKCEQVGSSSCIPANSKQLMVLYIALYMTALGTGGLKSSVSGFGTDQFDDSDKKEKGQMIKFFDWFFFFINVGSLGAVTVLVYIQDNLGREWGYGICACAIVIALVVFLFGTRKYRFKKLGGSPLTQIASVIVAAWKKRHLELPSDSSLLFEIDDIFGEGNKKSKQKLPHSKEYRFLDKAAIKEDDDLESNGTNVVINKWKLATLTDVEEVKILIRMLPTWATTIMFWTVYAQMTTFSVSQATTMDRHIGTFEIPPATLTVFFVGSILLTVIFYDRIIVPICRRFMNKPHGLTPLQRIFTGLVLSILAMIAAALTEVKRLKVAHLHGLTNDANATIPLTVFWLVPQFLLVGAGEAFTYIGQLDFFLRECPKGMKTMSTGLFLSTLALGFFFSSILVTIVHVVTGTTNPWLADNLNQGRLYDFYWLLAILSVFNLMFFLYSSRKYVYKEKRLAEMGIELEDDGPVCH

SEQ ID NO: 1845 - protein, 590 aa, Nicotiana tabacum
MALPETQQDTKTLPDAWDYKGRPAVRSSSGGWSSAAMILGIEAVERLTTLGIAVNLVTYLTGTMHLGNASSANNVTNFLGTSFMLTLLGGFVADTFLGRYLTIGIFTTIQAMGVTILTISTIIPSLRPPKCSPGSSTCIPASSKQLMVLYIALYMTALGTGGLKSSVSGFGSDQFDETDKKERGQMIKFFNWFFFFINVGSLGAVTVLVYIQDNLGREYGYGICACAIVIGLVIFLSGTRKYRFKKLVGSPLTQIASVFVAAWNKRHMELPSDSSLLYNIDDIPGDGNKKAKQRLPHSKEFRFLDKAAIKVQDPESAGITVVNKWNLSTLTDVEEVKLVVRMLPTWATTIMFWTVYAQMTTFSVSQATTMDRHIGNFEIPPASLTLFFVGSILLTCIFYDRAVVPVCRRVLNNPHGTSPLQRIAVGLILSIIAMIAAALTEVKRLNVAHLHGLTNDANAKVPLSVFWLVPQFLLVGAGEAFTYIGQLDFFLRECPKGMKTMSTGLFLSTLSLGFFFSSILVTIVHKVTGKNPWLADNLNQGRLYDFYWLLATLSVLNLMIFLFISRRYVYKEKRLAECGIEMEDSEPACH

SEQ ID NO: 1846 - protein, 590 aa, Nicotiana tabacum
MALPETQQDTKTLPDAWDYKGRPAVRSSSGGWSSAAMILGIEAVERLTTLGIAVNLVTYLTGTMHLGNASSANNVTNFLGTSFMLTLLGGFVADTFLGRYLTIGIFTTIQAMGVTILTISTIIPSLRPPKCSPGSSTCIPASSKQLMVLYIALYMTALGTGGLKSSVSGFGSDQFDETDKKERGQMIKFFNWFFFFINVGSLGAVTVLVYIQDNLGREYGYGICACAIVIGLVIFLSGTRKYRFKKLVGSPLTQIASVFVAAWNKRHMDLPSDSYLLYNIDDIPGDGNKKAKQRLPHSKEFRFLDKAAIKVQDPESAGITVVNKWNLSTLTDVEEVKLVVRMLPTWATTIMFWTVYAQMTTFSVSQATTMDRHIGNFEIPPASLTLFFVGSILLTCIFYDRAVVPVCRRVLNNPHGTTPLQRIAVGLILSIIAMVAAALTEVKRLNVAHLHGLTNDANAKVPLSVFWLVPQFLLVGAGEAFTYIGQLDFFLRECPKGMKTMSTGLFLSTLSLGFFFSSILVTIVHKVTVKNPWLADNLNQGRLYDFYWLLATLSVLNLMIFLFISRRYVYKEKRLAECGIEMEDSEPACH

SEQ ID NO: 1847 - protein, 297 aa, Nepenthes alata
DQFDDTDPREKIKKGSFFNWFYFSVNIGALISSSLIVWVQENLGWALGFGIPAISMGIAIASFFSGTALYRLQKPGGSPLTRMCQVLVASFRKSKLALPEDSNLLYETSDENSVIEGGRKLEHTNDLKCLDKAAVVSDKEIKCEDFSNPWRLCTVTQIEELKILIRMFPIWATGIVFSAIYAQMSTMFVEQGEVMDRTIGSFTIPAASLSMFDTISVIFWVPVYDKILVPLARKSTGKQRGFSELQRMGIGLFISILSMAAAALVEMKRLQLAKELGLVDEDVAVPLSIFWQIPPYF

SEQ ID NO: 1848 - protein, 582 aa, Dictyostelium discoideum
MAIEEESSNSGVSTSIDNLGSSIDGKGSSKGKQGDMEGIDNEVFVYGGDENHFPSSIKYIMGNEICERYSYYALRGILTNYLISFMGYSEKNASSIGHGFNAGAYIFSLVGAYVADGVLGKYKTILYFSILYCFGAAIFSITAIPGITGDSPGERSPWGLIVGLTCIAIGTGGIKPVVSSFCGDQFGPHQKKLLQNLFQVFYWCVNLGSFFSSILSPILRTNVGYWCAFVIPAGILIISILIYLVGNKQYVKRKPQGSVLSTAFCIVGTGISESVKKTFRGSKYNDHYYNNSFLDRAKLKYSPRIVEQVKLVLRVLTVFVPLPFFWALYDQTGTRWTIQANSMDRHLGSWEIDSEIINCINPLLVMIFVPIFEYGIYRPLERKKINFTLLRRMGTGMFLSVIAFYISAIIQVHIDNSPPESVHIALQIPQYVVLTAAEVLLSITGLEFAYANSPRSMKSLVIAGWLICVSIGNMFDAFVIELIELPEYVLSLLFGSVMFVFIFIFIIIAYRFKEIDQSVLDELNGDTPMTDDNANANSKELDVVTQKDLSSSSNPIINNNNNNNNSTLGNSIDYGYDHEKSN

SEQ ID NO: 1849 - protein, 748 aa, Dictyostelium discoideum
MGGIDEDGMINHLFDDIPEFANSSGNDSGGKSSIYSKNETNKNSESTIENTSENVGIELGNQLEKDEFQYGGDETHFPPSIKFILGNEIGERYSYFAMKSILNNYLIMFMGYNSKTAETIGHIFNASAYFFTLFGAYIADARLGKFKTILLFSVIYCFGAGIFSITAIPGVTGSGPGSRSPWGLILGLGGIAIGTGGIKPLISSFCGDQFGPHQKKLLTSLFQVFYWCVNLGSFFSSILSPILRTQVGYWIAFLIPSIILIISIVIFICGTKKFIKRKPQGSVFSTFLKIIICGIQEKIKYLKATDDEPYQDIYYQDSYLDRAKFKFSSQSVDQVKQVLRVLLVFTPLPFFWALYDQTGTRWTTQGNIMNRRIGSITMDTEIIGALNPLLILIFVPIFEYGLYRPIAKRGINFSPLRRMAAGMILSVIAFYIAAFVQLAIDNSPPNSVHIALQIPQYVVLTWGEILLSITGLEFAYANSPRSMKSIVMAGWLISVSIGNLFDAFVIGLIKASEFILYILFGSVMLVFIFIFVFIAYYFKPIDPSVLDALNGQAPTNIDELNSIEVDQQRLDNEIVQQQQQQEEQQQQKQQGKEQQQEKSIISSKNSSPRSLKSNSLNGSTKLRKSKGFKKGDYENNIDDIDIPTSSSMCRRNTSNNNSLNNSKGNEISTNSGEIVNNNISNDNNNNNNNNNNNNNNNNNNNNNNNNNNNNNNNNNNNNNNNNNNEELQEIDIDTSSQYTINSNKSNAK

SEQ ID NO: 1850 - protein, 594 aa, Oryza sativa
  unsure (1)..(594): unsure at all Xaa locations
MVGMLPETNAQAAAEEVLGDAWDYRGRPAARSRTGRWGAAAMILVAELNERLTTLGIAVNLVTYLTATMHAGNAEAANVVTNFMGTSFMLCLLGGFVADSFLGRYLTIAIFTAVQASGVTILTISTAAPGLRPAACAAGSAACERATGAQMGVLYLALYLTALGTGGLKSSVSGFGSDQFDESDSGEKSQMMRFFNWFFFFISLGSLLAVTVLVYVQDNLGRPWGYGACAAAIAAGLVVFLAGTRRYRFKKLVGSPLTQIAAVVVAAWRKRRLELPSDPAMLYDIDLAASSKKSKLKQRLPHTKQFRFLDHAAIKTRRTASXSKWTLATLTDVEEVKTVARMLPIWATTIMFWTVYAQMTTFSVSQATTMDRHIGASFQIPAGSLTVFFVGSILLTVPIYDRLVVPVARRATGNPHGLTPLQRIGVGLVLSIVAMVCAALTEVRRLRVXXGTRASAAARXVPMTVFWLIPQFLFVGAGEAFTYIGQLDFFLRECPKGMKTMSTGLFLSTLSLGFFVSSALVAAVHKLTGDRHPWLADDLNKGQLHKFYWLLAGVCLANLLVYLVAARWYKYKAGRAAAAGDGGVEMADAEPCLH

SEQ ID NO: 1851 - protein, 594 aa, Oryza sativa; identical to SEQ ID NO: 1840

SEQ ID NO: 1852 - protein, 596 aa, Oryza sativa
MGERIRKLEELELVVVDMAMVLPETAAEGKALTDAWDYKGRPAGRAATGGWGCAAMILGAELFERMTTLGIAVNLVPYMTGTMHLGNAAAANTVTNFIGTSFMLCLLGGFVADTYLGRYLTIAIFEAVQATGVMILTISTAAPGLRPPACGDPKGASAECVAADGTQLGVLYLGLYLTALGTGGLKSSVSGFGSDQFDESDVDGERKKMMRFFNWFYFFVSLGALLAVTVLVYVQDNVGRRWGYGICAAGILAGLAVFLSGTRRYRFKKLVGSPLTQVAAVTAAAWSKRSLPLPSDPDMLYDVDDAAAAGHDVKAIIDRSAAESPATASKWRLCTRTDVEEVKQVVRMLPIWATTIMFWTIHAQMTTFAVAQAELMDRRLAGGFLIPAGSLTVFLIASILLTVPFYDRLVVPVARRATANPHGLTPLQRVFVGLSLSIAGMAVAAAVERHRATASASAAAAAPTVFLLMPQFLLVGAGEAFTYMGQLDFFLRECPKGMKTMSTGLFLSTCAIGFFFSTLLVTIVHKVTGHGARGGGWLADNLDDGRLDYFYWLLAVISAINLVLFTVAARGYVYKEKRLADAGIELADEETIAVGH

SEQ ID NO: 1853 - protein, 729 aa, Zea mays
  unsure (1)..(729): unsure at all Xaa locations
MALTGRRQTFGSSPHRTHTHRQQHSDLPSALPRPHPAQSSSARCRPATAAGRIRSLGLLLLLPPLNPPRVGSSRILTRSPARHLAAGRRHTDRERERDRERERGRGSEETRTRAKMVGLLPETNAAAETDVLLDAWDFKGRPAPRATTGRWGAAAMILVAELNERLTTLGIAVNLVTYLTGTMHLGNAESANVVTNFMGTSFMLCLLGGFVADSFLGRYLTIAIFTAVQASGVTILTISTAAPGLRPASCSATGGGVVGECARASGAQLGVLYLALYLTALGTGGLKSSVSGFGSDQFDESDGGEKRQMMRFFNFFFFFISLGSLLAVTVLVYVQDNLGRRWGYGACACAIAAGLLVFLAGTRRYRFKKLAGSPLTQIAAVVVAAWRKRRLPLPADPAMLYDVDVGKAAGKKSKRKERLPHTDQFRFLDHAAINEDPAAGASSSSKWRLATLTDVEEVKTVARMLPIWATTIMFWTVYAQMTTFSVSQATTMDRRVGGSFQIPAGSLTVFFVGSILLTVPVYDRLVVPVARRVSGNPHGLTPLQRIAVGLALSVVAMAGAALTEVRRLRVARESSESASGGVVPMSVFWLIPQFFLVGAGEAFTYIGQLDFFLRECPKGMKTMSTGLFLSTLSLGFFVSSALVAAVHRVTGDRHXXWIANDLNKGRLDNFYWLLAAVCLANLLVYLVAARWYKYKAGRPGADGIEMADEPTLHXSIHVRSIDEARDGRP

SEQ ID NO: 1854 - protein, 590 aa, Zea mays
  unsure (1)..(590): unsure at all Xaa locations
XDPRGSAGPARPTGRWGAAAMILVAELNERLTTLGIAVNLVTYLTGTMHLGNAESANVVTNFMGTSFMLCLLGGFVADSFLGRYLTIAIFTAVQASGVTILTISTAAPGLRPASCSATGGGVVGECARASGAQLGVLYLALYLTALGTGGLKSSVSGFGSDQFDESDGGEKRQMMRFFNWFFFFISLGSLLAVTVLVYVQDNLGRRWGYGACACAIAAGLLVFLGGTRRDRFKKLAGSPLTQIAAVVVAAWGKRGLPLPADPAMLYDVDGGKAAALDDGSSSKKSKRKERLPHTDQFRFLDHAAIXXEDPAAGASSSSKWRLATLTDVEEVKTVARMLPIWATTIMFWTVYAQMTTFSVSFCXTTMDRRVGGSFQIPAGSLTVFFVGSILLTVPVYDRLVVPVARRVSGNPHGLTPLQRIAXVGLALSVVAMAGAALTEVRRLRVARESSESASGGVVPMSVFWXLIPQFFLVGAGEAFTYIGQLDFFLRECPKGMKTMSTGLFLSTLXALGFFVSSALVAAVHRVTGXTAHPWIANDLNKGRLDNFYWLLAAVCLANLLVYLVAARWYKYKAGRPGADGIEMADEPTLH

SEQ ID NO: 1855 - protein, 489 aa, Escherichia coli
  unsure (1)..(489): unsure at all Xaa locations
MNTTTPMGMLQQPRPFFMIFFVELWERFGYYGVQGVLAVFFVKQLGFSQEQAFVTFGAFAALVYGLISIGGYVGDHLLGTKRTIVLGALVXAIGYFMTGMSLLKPDLIFIALGTIAVGNGLFKANPASLLSKCYPPKDPRLDGAFTLFYMSINIGSLIALSLAPVIADRFGYSVTYNLCGAGLIIALLVYIACRGMVKDIGSEPDFRPMSFSKLLYVLLGSVVMIFVCAWLMHNVEVANLVLIVLSIVVTIIFFRQAFKLDKTGRNKMFVAFVLMLEAVVFYILYAQMPTSLNFFAINNVHHEILGFSINPVSFQALNPFWVVLASPILAGIYTHLGNKGKDLSMPMKFTLGMFMCSLGFLTAAXAGMWFADXQGLTSPWFIVLVYLFQSLGELFISALGLAMIAALVPQHLMGFILGMWFLTQXAAFLLGGYVATFTAVPDNITDPLETLPVYTNVFGKIGLVTLGVAVVMLLMVPWLKRMIATPESH

SEQ ID NO: 1856 - protein, 477 aa, Encephalitozoon cuniculi
MTIMNGTTLFLIICNEFCERFCFYGLKSLLFSFTRSEYGFTIKESTVNLHFFISMSYLFTLFGGLLSDMFLGRYSTIVLLSSLYLTGTSLLTYCSIVSGSPGLMVGSLLMIAVGTGGIKPCVAAFGGDQFGPDDAQDLRRFFDFFYFAINIGSMVSMVLTPTMSSVGCLGKQSCYPLAFGTSSTLLGASILLFIIGKRFYVIKPVRKEQFSRTFHSLVQNLKELFRRQSRDSERKTQGTLKTVSEAACISHEEDDKEKTLKILRILGPAAFFWMLSDQQSSSWVEQGTKMETHQSILGYGMDILPSQMQAFNAVFILLFIPLFSKMIYPLMGLAGVFSSPEEKMGFGIALASLSFFCSGYLEYRIGLPAPAGQRLSIMWQLPQYVLMTAGEIMLNVTGMEYMYTEAPEPMKSLVSSMWLLTVTAGNLLVMVLTFLDPVALFSSRAHDMWSFVAYGTAGLLASRCMFQASKAAKRNRK

SEQ ID NO: 1857 - protein, 785 aa, Caenorhabditis elegans
MGASHLHDDPRPGSPVDHQPTTWGGIIKKWPKQTFLIVGNELCERFSFYGMRAVLTLYFFNILNFSQSFSTVLFHAFTVICYSSPLLGSILADGYIGKFWTIFFISIFYACGQILLAFSSIAPSGSSHHPLLDLLGLLIVGLGTGGIKPCVSAFGGDQFPAHYTRMISLFFSMFYFSINAGSLISMWLTPYFRSMSCFGHDSCYPLAFGIPAILMIVATLVFMAGSFWYKKVPPKENIIFKVIGTITTALRKKASSSSTHQRSHWLEYSLDGHDCALSTECKNLHGNCAQRRYIEDIKRLFRVIVMMIPVPMFWALYDQQGSTWVLQAVGMDAKVFGFEILPDQMGVLNAFLILFFIPIFQSIVYPTIEKLGFQMTMLRKMAGGGILTAVSFFVCGIVQLFVNPTLPYIPMANEAHLTIINTIPSCDFNVLIDSREPFDLLRKSGIAPDDSVRKPISFTGDDFFQPNITFDNLAPNCPKFTAEPMLAPATSYVLTLSPNGWAYNAVRPEKPKSGKGELSMGLNLIVPCDKIPSNVTWEQCNGTEGYSGAIALCKVESDVITDNNNVCDPTAKGKFYVLSNANPLDVHDFSKKSTVTAFGRTYSPIEMKPGTYRLFYTDDSRTHFTPLNLPPVQQDHMGGQYLITVSTRSKNDSEVLATTESLVSYNRVSILWQIPQYVILTAGEVLFSITGLEFAYTEASPQLKSVVQALWLFTTAIGDLIVVVIFMLNIFSDVAVQMFVFGGIMLFVIFVFILLAVFYYEYADYSNESEVLTEKMIVDDDHTRI

SEQ ID NO: 1858 - protein, 786 aa, Caenorhabditis elegans
MGASHLHDDPRPGSPVDHQPTTWGGIIKKWPKQTFLIVGNELCERFSFYGMRAVLTLYFFNILNFSQSFSTVLFHAFTVICYSSPLLGSILADGYIGKFWTIFFISIFYACGQILLAFSSIAPSGSSHHPLLDLLGLLIVGLGTGGIKPCVSAFGGDQFPAHYTRMISLFFSMFYFSINAGSLISMWLTPYFRSMSCFGHDSCYPLAFGIPAILMIVATLVFMAGSFWYKKVPPKENIIFKVIGTITTALRKKASSSSTHQRSHWLEYSLDGHDCALSTECKNLHGNCAQRRYIEDIKRLFRVIVMMIPVPMFWALYDQQGSTWVLQAVGMDAKVFGFEILPDQMGVLNAFLILFFIPIFQSIVYPTIEKLGFQMTMLRKMAGGGILTAVSFFVCGIVQLFVNPTLPYIPMANEAHLTIINTIPSCDFNVLIDSREPFDLLRKSVGIAPDDSVRKPISFTGDDFFQPNITFDNLAPNCPKFTAEPMLAPATSYVLTLSPNGWAYNAVRPEKPKSGKGELSMGLNLIVPCDKIPSNVTWEQCNGTEGYSGAIALCKVESDVITDNNNVCDPTAKGKFYVLSNANPLDVHDFSKKSTVTAFGRTYSPIEMKPGTYRLFYTDDSRTHFTPLNLPPVQQDHMGGQYLITVSTRSKNDSEVLATTESLVSYNRVSILWQIPQYVILTAGEVLFSITGLEFAYTEASPQLKSVVQALWLFTTAIGDLIVVVIFMLNIFSDVAVQMFVFGGIMLFVIFVFILLAVFYYEYADYSNESEVLTEKMIVDDDHTRI

SEQ ID NO: 1859 - protein, 785 aa, Caenorhabditis elegans
MGASHLHDDPRPGSPVDHQPTTWGGIIKKWPKQTFLIVGNELCERFSFYGMRAVLTLYFFNILNFSQSFSTVLFHAFTVICYSSPLLGSILADGYIGKFWTIFFISIFYACGQILLAFSSIAPSGSSHHPLLDLLGLLIVGLGTGGIKPCVSAFGGDQFPAHYTRMISLFFSMFYFSINAGSLISMWLTPYFRSMSCFGHDSCYPLAFGIPAILMIVATLVFMAGSFWYKKVPPKENIIFKVIGTITTALRKKASSSSTHQRSHWLEYSLDGHDCALSTECKNLHGNCAQRRYIEDIKRLFRVIVMMIPVPMFWALYDQQGSTWVLQAVGMDAKVFGFEILPDQMGVLNAFLILFFIPIFQSIVYPTIEKLGFQMTMLRKMAGGGILTAVSFFVCGIVQLFVNPTLPYIPMANEAHLTIINTIPSCDFNVLIDSREPFDLLRKSGIAPDDSVRKPISFTGDDFFQPNITFDNLAPNCPKFTAKPMLAPATSYVLTLSPNGWAYNAVRPEKPKSGKGELSMGLNLIVPCDKIPSNVTWEQCNGTEGYSGAIALCKVESDVITDNNNVCDPTAKGKFYVLSNANPLDVHDFSKKSTVTAFGRTYSPIEMKPGTYRLFYTDDSRTHFTPLNLPPVQQDHMGGQYLITVSTRSKNDSEVLATTESLVSYNRVSILWQIPQYVILTAGEVLFSITGLEFAYTEASPQLKSVVQALWLFTTAIGDLIVVVIFMLNIFSDVAVQMFVFGGIMLFVIFVFILLAVFYYEYADYSNESEVLTEKMIVDDDHTRI

SEQ ID NO: 1860 - protein, 835 aa, Caenorhabditis elegans
MGYSESRSESVSSKGKTSYGHELETVPLPEKKIYTTWPDMIRHWPKTTLCIVSNEFCERFSYYGMRTVLTFYLLNVLKFTDSQSTIFFNGFTVLCYTTPLLGSIVADGYIGKFWTIFSVSILYAIGQVVLALASTKNFQSSVHPWMDLSGLLIIAFGTGGIKPCVSAFGGDQFELGQERMLSLFFSMFYFSINAGSMISTFISPIFRSQPCLGQDSCYPMAFGIPAILMIVATLVFMGGSFWYKKNPPKDNVFGEVSRLMFRAVGNKMKSGSTPKEHWLLHYLTTHDCALDAKCLELQAEKRNKNLCQKKKFIDDVRSLLRVLVMFLPVPMFWALYDQQGSVWLIQAIQMDCRLSDTLLLLPDQMQTLNAVLILLFIPLFQVIIYPVAAKCVRLTPLRKMVTGGLLASLAFLITGFVQLQVNTTLPTLPEEGEASISFWNQFETDCTITVMSGIHKRVLPHDKYLHEDKKNKSGIYNLFTTKSPAKGNGDWTLTYDLSYDGACGDTSKLEKTVKVTAKSKKIIYVGVGSFGYYQNTANTDKPTDGTGEFSMGIVTVFNSSYGGNFAMCRQNTSDFDVNHPCNPRHPADFYFWETDYNSHTDDRDQNATITGSLSSQPAVTYKQKSVKPGYWQLYYLLNTPKDVDRQTYNKTATLVAPTNYGFHRVKQGGVFIYALTGTYENPKIHELQIVQSNSVSILWQIPQIVVITAAEILFSITGYEFAYSQSAPSMKALVQALWLLTTAAGDSIIVVITILNLFENMAVEFFVYAAAMFVVIAIFALLSIFYYTYNYYTTDEEDGEIGVDDEEEIEDHNPRYSIDNKGFHPDEKDTFDMHF

SEQ ID NO: 1861 - protein, 796 aa, Caenorhabditis elegans
MIRHWPKTTLCIVSNEFCERFSYYGMRTVLTFYLLNVLKFTDSQSTIFFNGFTVLCYTTPLLGSIVADGYIGKFWTIFSVSILYAIGQVVLALASTKNFQSSVHPWMDLSGLLIIAFGTGGIKPCVSAFGGDQFELGQERMLSLFFSMFYFSINAGSMISTFISPIFRSQPCLGQDSCYPMAFGIPAILMIVATLVFMGGSFWYKKNPPKDNVFGEVSRLMFRAVGNKMKSGSTPKEHWLLHYLTTHDCALDAKCLELQAEKRNKNLCQKKKFIDDVRSLLRVLVMFLPVPMFWALYDQQGSVWLIQAIQMDCRLSDTLLLLPDQMQTLNAVLILLFIPLFQVIIYPVAAKCVRLTPLRKMVTGGLLASLAFLITGFVQLQVNTTLPTLPEEGEASISFWNQFETDCTITVMSGIHKRVLPHDKYLHEDKKNKSGIYNLFTTKSPAKGNGDWTLTYDLSYDGACGDTSKLEKTVKVTAKSKKIIYVGVGSFGYYQNTANTDKPTDGTGEFSMGIVTVFNSSYGGNFAMCRQNTSDFDVNHPCNPRHPADFYFWETDYNSHTDDRDQNATITGSLSSQPAVTYKQKSVKPGYWQLYYLLNTPKDVDRQTYNKTATLVAPTNYGFHRVKQGGVFIYALTGTYENPKIHELQIVQSNSVSILWQIPQIVVITAAEILFSITGYEFAYSQSAPSMKALVQALWLLTTAAGDSIIVVITILNLFENMAVEFFVYAAAMFVVIAIFALLSIFYYTYNYYTTDEEDGEIGVDDEEEIEDHNPRYSIDNKGFHPDEKDTFDMHF

SEQ ID NO: 1862 - protein, 701 aa, Caenorhabditis elegans
MEEKSLLQKLRSYPPAVFFMLGNEFCERFSFYGMKTILFIYLITEHEFSPSKATFIYHLFTCIAYLTPLIGSIMADSVFGRFKVILYGSSIYVVGHVLLSLGAVPFLSYPIRSSLDFSGLFVIAFATGCIKPCVSAFAADQFTEDQKDLRSQFFSFFYFAINGGSLFAIIITPILRGRVQCFGNAHCFPLAFGVPGVLMLLALILFLMGWSMYKKHPPSKENVGSKVVAVIYTSLRKMVGGASRDKPVTHWLDHAAPEHSQKMIDSTRGLLNVAVIFCPLIFFWALFDQQGSTWVLQARRLDGRVGHFSILPEQIHAINPVCVLILVPIFEGWVYPALRKITRVTPLRKMAVGGLLTAFSFAIAGVLQLKVNETMEFPPSLGRIYLQRVGNESLISDFRYKSDGRLIGDGMLPKGRTELDAGIYTFNTGLKNESQEIDISTPNKGYVMAVFRLKDAVEVVKFDYKVEKTDNGATRVFVVTAREDADTLVYAINKKGKILSSCELKSGSYVDVIPGIISDPNVRLYWGPKNSCSGVDCPNTVTLNAQMGAVHVLHIHPSTTEGDFNLLVRPNSVSILWSLPQYIIITLGEVLLSVTGLEFAYSQAAPNMKSVLTAMWLLTVFAGNLIDMMISGTRLIPHPALEFFFYSTLMVIVMGVFILLAMQYTYVEDNDDEITITESEKKDVIALTEIESGTATSDKKE

SEQ ID NO: 1863 - protein, 701 aa, Caenorhabditis elegans
MEEKSLLQKLRSYPPAVFFMLGNEFCERFSFYGMKTILFIYLITEHEFSPSKATFIYHLFTCIAYLTPLIGSIMADSVFGRFKVILYGSSIYVVGHVLLSLGAVPFLSYPIRSSLDFSGLFVIAFATGCIKPCVSAFAADQFTEDQKDLRSQFFSFFYFAINGGSLFAIIITPILRGRVQCFGNAHCFPLAFGVPGVLMLLALIQFLMGWSMYKKHPPSKENVGSKVVAVIYTSLRKMVGGASRDKPVTHWLDHAAPEHSQKMIDSTRGLLNVAVIFCPLIFFWALFDQQGSTWVLQARRLDGRVGHFSILPEQIHAINPVCVLILVPIFEGWVYPALRKITRVTPLRKMAVGGLLTAFSFAIAGVLQLKVNETMEFPPSLGRIYLQRVGNESLISDFRYKSDGRLIGDGMLPKGRTELDAGIYTFNTGLKNESQEIDISTPNKGYVMAVFRLKDAVEVVKFDYKVEKTDNGATRVFVVTAREDADTLVYAINKKGKILSSCELKSGSYVDVIPGIISDPNVRLYWGPKNSCSGVDCPNTVTLNAQMGAVHVLHIHPSTTEGDFNLLVRPNSVSILWSLPQYIIITLGEVLLSVTGLEFAYSQAAPNMKSVLTAMWLLTVFAGNLIDMMISGTRLIPHPALEFFFYSTLMVIVMGVFILLAMQYTYVEDNDDEITITESEKKDVIALTEIESGTATSDKKE

SEQ ID NO: 1864 - protein, 783 aa, Caenorhabditis elegans
MGYSESRSESVSSKAVLTFYLLNVLKFTDSQSTIFFNGFTVLCYTTPLLGSIVADGYIGKFWTIFSVSILYAIGQVVLALASTKNFQSSVHPWMDLSGLLIIAFGTGGIKPCVSAFGGDQFELGQERMLSLFFSMFYFSINAGSMISTFISPIFRSQPCLGQDSCYPMAFGIPAILMIVATLVFMGGSFWYKKNPPKDNVFGEVSRLMFRAVGNKMKSGSTPKEHWLLHYLTTHDCALDAKCLELQAEKRNKNLCQKKKFIDDVRSLLRVLVMFLPVPMFWALYDQQGSVWLIQAIQMDCRLSDTLLLLPDQMQTLNAVLILLFIPLFQVIIYPVAAKCVRLTPLRKMVTGGLLASLAFLITGFVQLQVNTTLPTLPEEGEASISFWNQFETDCTITVMSGIHKRVLPHDKYLHEDKKNKSGIYNLFTTKSPAKGNGDWTLTYDLSYDGACGDTSKLEKTVKVTAKSKKIIYVGVGSFGYYQNTANTDKPTDGTGEFSMGIVTVFNSSYGGNFAMCRQNTSDFDVNHPCNPRHPADFYFWETDYNSHTDDRDQNATITGSLSSQPAVTYKQKSVKPGYWQLYYLLNTPKDVDRQTYNKTATLVAPTNYGFHRVKQGGVFIYALTGTYENPKIHELQIVQSNSVSILWQIPQIVVITAAEILFSITGYEFAYSQSAPSMKALVQALWLLTTAAGDSIIVVITILNLFENMAVEFFVYAAAMFVVIAIFALLSIFYYTYNYYTTDEEDGEIGVDDEEEIEDHNPRYSIDNKGFHPDEKDTFDMHF

SEQ ID NO: 1865 - protein, 810 aa, Drosophila melanogaster
MTDKKNEIQPAAEPVAEPEPSPAAEIAPASPDGSGPSAAAAEEVTPSVATVEDTTPIAAPAESQPSGESNGTAEAKKLPEIAKKNGKEPDQNDKEPDQNGKELAETNDFKNVSETEGQQKKLPYPKSVFFIISNEFCERFNYYGMRTVLVLYLSRVLGYSDDTATVVFHIFTMFVYFLCVFGAIISDSWLGKFKTILYLSLVYICGSVLLTLGAIGPLNLPMETFTMLGLALIALGSGGIKPCVSAFGGDQFKVPEQVKQITSFFSLFYFSINAGSLISTTVTPILREDVSCFDDINCYPLAFGVPAVLMIVSVIIFVLGRSLYKMKPPAGNMVVLVSSTIWTALTTKCKEKKTNPREHWLDYADKKYDRQLIDDVKVLMRVLFLYLPLPVFWALFDQQGSRWTFQATRMDGDMGSWDIKPDQLQVLNPLLILIFIPLYDVALYPALKLVGIRRPLQKLTMGGILAGIAFIISGVVELSLEKTYPDLPYSQNIQLRIFNADNCDYFFTSNIPGAENVTVTSLNAYTNKDIYAPGSLDVEFSLSSASEACTISADKIPKVLTDNTAWSLFLNPLNGSGYYWEEDFVDKPSQSHPLIRNVANVPQELSIRWEKASTGEVVYDDLASKTLLTRVNSAEYVVMVGERNVGTFDVHTGGVYTLLIKDNNNIYEANLEEVTSPNSVKILWLVPQYVVMTLGEVMFSVTGLEFSYAQAPPSMKSVLQACWLLTVAFGNVIVVVIAEAALFESQASEFFLFAGLMFADMLIFMVMAYYYVPNDPNKVEEAQPLTAGDAKTEIPALEGGVENKGKDINE

SEQ ID NO: 1866 - protein, 803 aa, Drosophila melanogaster
MTDKKNEIQPAAEPVAEPEPSPAAEIAPASPDGSGPSAAAAEEVTPSVATVEDTTPIAAPAESQPSGESNGTAEAKKLPEIAKKNGKEPDQNDKEPDQNGKELAETNDFKNVSETEGQQKKLPYPKSVFFIISNEFCERFNYYGMRTVLVLYLSRVLGYSDDTATVVFHIFTMFVYFLCVFGAIISDSWLGKFKTILYLSLVYICGSVLLTLGAIGPLNLPMETFTMLGLALIALGSGGIKPCVSAFGGDQFKVPEQVKQITSFFSLFYFSINAGSLISTTVTPILREDVSCFDDINCYPLAFGVPAVLMIVSVIIFVLGRSLYKMKPPAGNMVVLVSSTIWTALTTKCKEKKTNPREHWLDYADKKYDRQLIDDVKVLMRVLFLYLPLPVFWALFDQQGSRWTFQATRMDGDMGSWDIKPDQLQVLNPLLILIFIPLYDVALYPALKLVGIRRPLQKLTMGGILAGIAFIISGVVELSLEHTYPLIPSSGNTQLRVFSGIPDCDYRFSTNLGARESFTLRGLDFYYSGSVATNTDGIFQLTYTVESLTEGCAILEGGTQQLYEATAHSLFLRPSHAITKFWYEDEVQKSNRSWAFVRNLANLLATTRVVWREDSGDTVALDLPARNHDLYELSTGGYNVQVADHNLTSIELRAGGVYALLIGQSHGTFVSRIIEVTSPNSMHMLWLVPQYVVMTLGEVMFSVTGLEFSYSQSPPSMKSVLQACWLLTVAFGNVIVVVVAELKFFDSQASEFFLFAGLMFVDMLVFMFVAYYYKPYDEVAALAERVRARRERKWQDLDRFKRD

SEQ ID NO: 1867 - protein, 810 aa, Drosophila melanogaster
MTDKKNEIQPAAEPVAEPEPSPAAEIAPASPDGSGPSAAAAEEVTPSVATVEDTTPIAAPAESQPSGESNGTAEAKKLPEIAKKNGKEPDQNDKEPDQNGKELAETNDFKNVSETEGQQKKLPYPKSVFFIISNEFCERFNYYGMRTVLVLYLSRVLGYSDDTATVVFHIFTMFVYFLCVFGAIISDSWLGKFKTILYLSLVYICGSVLLTLGAIGRLNLPMETFTMLGLALIALGSGGIKPCVSAFGGDQFKVPEQVKQITSFFSLFYFSINAGSLISTTVTPILREDVSCFDDINCYPLAFGVPAVLMIVSVIIFVLGRSLYKMKPPAGNMVVLVSSTIWTALTTKCKEKKTNPREHWLDYADKKYDRQLIDDVKVLMRVLFLYLPLPVFWALFDQQGSRWTFQATRMDGDMGSWDIKPDQLQVLNPLLILIFIPLYDVALYPALKLVGIRRPLQKLTMGGILAGIAFIISGVVELSLEKTYPDLPYSQNIQLRIFNADNCDYFFTSNIPGAENVTVTSLNAYTNKDIYAPGSLDVEFSLSSASEACTISADKIPKVLTDNTAWSLFLNPLNGSGYYWEEDFVDKPSQSHPLIRNVANVPQELSIRWEKASTGEVVYDDLASKTLLTRVNSAEYVVMVGERNVGTFDVHTGGVYTLLIKDNNNIYEANLEEVTSPNSVKILWLVPQYVVMTLGEVMFSVTGLEFSYAQAPPSMKSVLQACWLLTVAFGNVIVVVIAEAALFESQASEFFLFAGLMFADMLIFMVMAYYYVPNDPNKVEEAQPLTAGDAKTEIPALEGGVENKGKDINE

SEQ ID NO: 1868 - protein, 743 aa, Drosophila melanogaster
MASEITNGKNGQNGKNGQKEESDSQIAPPIPYPKSVAFIISNEFCERFNYYGMRTILVLYLTNKLGYNEETATVLFHTFTMLVYIFPLIGALIADGWLGKYKTILYLSLVYSLGAMVVSFGAVPLSGMPTKAVTVVGLLLIAIGTGGIKPCVSAFGGDQFSLPAQSFQLAKFFSLFYFAINAGSLISTTFTPILRADVHCFGDQDCFSLAFGVPAILMIFSVIIFMAGKRLYRCQPPAGNMIFGVSRCIADAFKGWQKRRHSEPMESFLDYAKPTVGSRMVQETKCLGRILRLFLPFPVFWALFDQQGSRWTFQATRMDGNVLGFQIKPDQMQVVNPLLILGFLPLFDYIIYPALARCGIRRPLQKLTLGLLLAALGFFLSAGLEMKMEQAAYRATPIEPDMTHLRIYNGMPCRYEISSAVVQTPRVIEPLNVWEDLSLQMTESKEYTFNAQPVSGECPSIIDKLRLQPGKSVSYFLAQDKLVEFADGLQMAATDTGRTSVRALLNTPDGEGPVLLSTESATSQEPPLTLDKGNVPQLHRITPGFARVDINGKKVASFEAKEGRLYSILVTGSARDGYQHNVIEVVALSTVSILWQLPQIVVMTAAEVMFSVTGLEFSYSQSPPSMKSVLQACWLLSVAIGNMLVVVIAEFKFTSSQSGEFTLFASLMLVDMMIFLWLARSYQYKDQREDFEDDDDATIDSVMQSKPKATTVDTTARKTNGIEAEPGYGAYRNHAYDNDFSEA

SEQ ID NO: 1869 - protein, 734 aa, Drosophila melanogaster
MAFVSNAIVGPENCKSVTPPIPYPKSVAFIISNEFCERFNYYGMRTILVLYLTNKLGYNEETATVLFHTFTMLVYIFPLIGALIADGWLGKYKTILYLSLVYSLGAMVVSFGAVPLSGMPTKAVTVVGLLLIAIGTGGIKPCVSAFGGDQFSLPAQSFQLAKFFSLFYFAINAGSLISTTFTPILRADVHCFGDQDCFSLAFGVPAILMIFSVIIFMAGKRLYRCQPPAGNMIFGVSRCIADAFKGWQKRRHSEPMESFLDYAKPTVGSRMVQETKCLGRILRLFLPFPVFWALFDQQGSRWTFQATRMDGNVLGFQIKPDQMQVVNPLLILGFLPLFDYIIYPALARCGIRRPLQKLTLGLLLAALGFFLSAGLEMKMEQAAYRATPIEPDMTHLRIYNGMPCRYEISSAVVQTPRVIEPLNVWEDLSLQMTESKEYTFNAQPVSGECPSIIDKLRLQPGKSVSYFLAQDKLVEFADGLQMAATDTGRTSVRALLNTPDGEGPVLLSTESATSQEPPLTLDKGNVPQLHRITPGFARVDINGKKVASFEAKEGRLYSILVTGSARDGYQHNVIEVVALSTVSILWQLPQIVVMTAAEVMFSVTGLEFSYSQSPPSMKSVLQACWLLSVAIGNMLVVVIAEFKFTSSQSGEFTLFASLMLVDMMIFLWLARSYQYKDQREDFEDDDDATIDSVMQSKPKATTVDTTARKTNGIEAEPGYGAYRNHAYDNDFSEA

SEQ ID NO: 1870 - protein, 743 aa, Drosophila melanogaster
MASEITNGKNGQNGKNGQKEESDSQIAPPIPYPKSVAFIISNEFCERFNYYGMRTILVLYLTNKLGYNEETATVLFHTFTMLVYIFPLIGALIADGWLGKYKTILYLSLVYSLGAMVVSFGAVPLSGMPTKAVTVVGLLLIAIGTGGIKPCVSAFGGDQFSLPAQSFQLAKFFSLFYFAINAGSLISTTFTPILRADVHCFGDQDCFSLAFGVPAILMIFSVIIFMAGKRLYRCQPPAGNMIFGVSRCIADAFKGWQKRRHSEPMESFLDYAKPTVGSRMVQETKCLGRILRLFLPFPVFWALFDQQGSRWTFQATRMDGNVLGFQIKPDQMQVVNPLLILGFLPLFDYIIYPALARCGIRRPLQKLTLGLLLAALGFFLSAGLEMKMEQAAYRATPIEPDMTHLRIYNGMPCRYEISSAVVQTPRVIEPLNVWEDLSLQMTESKEYTFNAQPVSGECPSITDKLRLQPGKSVSYFLAQDKLVEFADGLQMAATDTGRTSVRALLNTPDGEGPVLLSTESATSQEPPLTLDKGNVPQLHRITPGFARVDINGKKVASFEAKEGRLYSILVTGSARDGYQHNVIEVVAPSTVSILWQLPQIVVMTAAEVMFSVTGLEFSYSQSPPSMKSVLQACWLLSVAIGNMLVVVIAEFKFTSSQSGEFTLFASLMLVDMMIFLWLARSYQYKDQREDFEDDDDATIDSVMQSKPKATTVDTTARKTNGIEAEPGYGAYRNHAYDNDFSEA

SEQ ID NO: 1871 - protein, 734 aa, Drosophila melanogaster
MAFVSNAIVGPENCKSVTPPIPYPKSVAFIISNEFCERFNYYGMRTILVLYLTNKLGYNEETATVLFHTFTMLVYIFPLIGALIADGWLGKYKTILYLSLVYSLGAMVVSFGAVPLSGMPTKAVTVVGLLLIAIGTGGIKPCVSAFGGDQFSLPAQSFQLAKFFSLFYFAINAGSLISTTFTPILRADVHCFGDQDCFSLAFGVPAILMIFSVIIFMAGKRLYRCQPPAGNMIFGVSRCIADAFKGWQKRRHSEPMESFLDYAKPTVGSRMVQETKCLGRILRLFLPFPVFWALFDQQGSRWTFQATRMDGNVLGFQIKPDQMQVVNPLLILGFLPLFDYIIYPALARCGIRRPLQKLTLGLLLAALGFFLSAGLEMKMEQAAYRATPIEPDMTHLRIYNGMPCRYEISSAVVQTPRVIEPLNVWEDLSLQMTESKEYTFNAQPVSGECPSITDKLRLQPGKSVSYFLAQDKLVEFADGLQMAATDTGRTSVRALLNTPDGEGPVLLSTESATSQEPPLTLDKGNVPQLHRITPGFARVDINGKKVASFEAKEGRLYSILVTGSARDGYQHNVIEVVAPSTVSILWQLPQIVVMTAAEVMFSVTGLEFSYSQSPPSMKSVLQACWLLSVAIGNMLVVVIAEFKFTSSQSGEFTLFASLMLVDMMIFLWLARSYQYKDQREDFEDDDDATIDSVMQSKPKATTVDTTARKTNGIEAEPGYGAYRNHAYDNDFSEA

SEQ ID NO: 1872 - protein, 737 aa, Drosophila melanogaster
MAFVSNAIVGPENCKSVTVSLPPIPYPKSVAFIISNEFCERFNYYGMRTILVLYLTNKLGYNEETATVLFHTFTMLVYIFPLIGALIADGWLGKYKTILYLSLVYSLGAMVVSFGAVPLSGMPTKAVTVVGLLLIAIGTGGIKPCVSAFGGDQFSLPAQSFQLAKFFSLFYFAINAGSLISTTFTPILRADVHCFGDQDCFSLAFGVPAILMIFSVIIFMAGKRLYRCQPPAGNMIFGVSRCIADAFKGWQKRRHSEPMESFLDYAKPTVGSRMVQETKCLGRILRLFLPFPVFWALFDQQGSRWTFQATRMDGNVLGFQIKPDQMQVVNPLLILGFLPLFDYIIYPALARCGIRRPLQKLTLGLLLAALGFFLSAGLEMKMEQAAYRATPIEPDMTHLRIYNGMPCRYEISSAVVQTPRVIEPLNVWEDLSLQMTESKEYTFNAQPVSGECPSIIDKLRLQPGKSVSYFLAQDKLVEFADGLQMAATDTGRTSVRALLNTPDGEGPVLLSTESATSQEPPLTLDKGNVPQLHRITPGFARVDINGKKVASFEAKEGRLYSILVTGSARDGYQHNVIEVVAPSTVSILWQLPQIVVMTAAEVMFSVTGLEFSYSQSPPSMKSVLQACWLLSVAIGNMLVVVIAEFKFTSSQSGEFTLFASLMLVDMMIFLWLARSYQYKDQREDFEDDDDATIDSVMQSKPKATTVDTTARKTNGIEAEPGYGAYRNHAYDNDFSEA

SEQ ID NO: 1873 - protein, 737 aa, Drosophila melanogaster
MAFVSNAIVGPENCKSVTVSLPPIPYPKSVAFIISNEFCERFNYYGMRTILVLYLTNKLGYNEETATVLFHTFTMLVYIFPLIGALIADGWLGKYKTILYLSLVYSLGAMVVSFGAVPLSGMPTKAVTVVGLLLIAIGTGGIKPCVSAFGGDQFSLPAQSFQLAKFFSLFYFAINAGSLISTTFTPILRADVHCFGDQDCFSLAFGVPAILMIFSVIIFMAGKRLYRCQPPAGNMIFGVSRCIADAFKGWQKRRHSEPMESFLDYAKPTVGSRMVQETKCLGRILRLFLPFPVFWALFDQQGSRWTFQATRMDGNVLGFQIKPDQMQVVNPLLILGFLPLFDYIIYPALARCGIRRPLQKLTLGLLLAALGFFLSAGLEMKMEQAAYRATPIEPDMTHLRIYNGMPCRYEISSAVVQTPRVIEPLNVWEDLSLQMTESKEYTFNAQPVSGECPSIIDKLRLQPGKSVSYFLAQDKLVEFADGLQMAATDTGRTSVRALLNTPDGEGPVLLSTESATSQEPPLTLDKGNVPQLHRITPGFARVDINGKKVASFEAKEGRLYSILVTGSARDGYQHNVIEVVALSTVSILWQLPQIVVMTAAEVMFSVTGLEFSYSQSPPSMKSVLQACWLLSVAIGNMLVVVIAEFKFTSSQSGEFTLFASLMLVDMMIFLWLARSYQYKDQREDFEDDDDATIDSVMQSKPKATTVDTTARKTNGIEAEPGYGAYRNHAYDNDFSEA

SEQ ID NO: 1874 - protein, 743 aa, Drosophila melanogaster
MASEITNGKNGQNGKNGQKEESDSQIAPPIPYPKSVAFIISNEFCERFNYYGMRTILVLYLTNKLGYNEETATVLFHTFTMLVYIFPLIGALIADGWLGKYKTILYLSLVYSLGAMVVSFGAVPLSGMPTKAVTVVGLLLIAIGTGGIKPCVSAFGGDQFSLPAQSFQLAKFFSLFYFAINAGSLISTTFTPILRADVHCFGDQDCFSLAFGVPAILMIFSVIIFMAGKRLYRCQPPAGNMIFGVSRCIADAFKGWQKRRHSEPMESFLDYAKPTVGSRMVQETKCLGRILRLFLPFPVFWALFDQQGSRWTFQATRMDGNVLGFQIKPDQMQVVNPLLILGFLPLFDYIIYPALARCGIRRPLQKLTLGLLLAALGFFLSAGLEMKMEQAAYRATPIEPDMTHLRIYNGMPCRYEISSAVVQTPRVIEPLNVWEDLSLQMTESKEYTFNAQPVSGECPSIIDKLRLQPGKSVSYFLAQDKLVEFADGLQMAATDTGRTSVRALLNTPDGEGPVLLSTESATSQEPPLTLDKGNVPQLHRITPGFARVDINGKKVASFEAKEGRLYSILVTGSARDGYQHNVIEVVAPSTVSILWQLPQIVVMTAAEVMFSVTGLEFSYSQSPPSMKSVLQACWLLSVAIGNMLVVVIAEFKFTSSQSGEFTLFASLMLVDMMIFLWLARSYQYKDQREDFEDDDDATIDSVMQSKPKATTVDTTARKTNGIEAEPGYGAYRNHAYDNDFSEA

SEQ ID NO: 1875 - protein, 737 aa, Drosophila melanogaster
MAFVSNAIVGPENCKSVTVSLPPIPYPKSVAFIISNEFCERFNYYGMRTILVLYLTNKLGYNEETATVLFHTFTMLVYIFPLIGALIADGWLGKYKTILYLSLVYSLGAMVVSFGAVPLSGMPTKAVTVVGLLLIAIGNGGINPCVSPFGGEQFSLPAQSFQLAKFFSLFYFAINAGSLISTTFTPILRADVHCFGDQDCFSLAFGVPAILMIFSVIIFMAGKRLYRCQPPAGNMIFGVSRCIADAFKGWQKRRHSEPMESFLDYAKPTVGSRMVQETKCLGRILRLFLPFPVFWALFDQQGSRWTFQATRMDGNVLGFQIKPDQMQVVNPLLILGFLPLFDYIIYPALARCGIRRPLQKLTLGFLLAALGFFLSAGLEMKMEQAAYRATPIEPDMTHLRIYNGMPCRYEISSAVVQTPRVIEPLNVWEDLSLQMTESKEYTFNAQPVSGECPSIIDKLRLQPGKSVSYFLAQDKLVEFADGLQMAATDTGRTSVRALLNTPDGEGPVLLSTESATSQEPPLTLDKGNVPQLHRITPGFARVDINGKKVASFEAKEGRLYSILVTGSARDGYQHNVIEVVAPSTVSILWQLPQIVVMTAAEVMFSVTGLEFSYSQSPPSMKSVLQACWLLSVAIGNMLVVVIAEFKFTSSQSGEFTLFASLMLVDMMIFLWLARSYQYKDQREDFEDDDDATIDSVMQSKPKATTVDTTARKTNGIEAEPGYGAYRNHAYDNDFSEA

SEQ ID NO: 1876 - protein, 170 aa, Anguilla anguilla
LGRFRAIIYLSIVYVIGHVVKSVGAIPDVGDTTTHIVLSILGLVLIAFGTGGIKPCVAAFGGDQFTEEHAEERTKFFSIFYMSINAGSVLSTVITPILRGDVQCFGGDCYALAFGVPALLMIIALVVFIAGSGLYKKNPPEGNILLKVCQCIGYAIKNRWRNRKKSHKRA

SEQ ID NO: 1877 - protein, 428 aa, Danio rerio
MAGRDVNESSPLLENSVTSTRSESVFNGRRLACAAILLAESLERMAFYGITSNLVLFLNSSPFYWEGTLASQGPLIFMGVTYLISPFGGWLLFPFVASDNTRNYLCGEEMAFPVQPAECFPENGTVPANVTCVNRPSYCRPAIYSGLVLVALGVGAVKSNITPFGADQVKDRGPEATRRFFNWFYWCINLGAIFSLGGIAYIQQNISFSIGYIIPAVCLGVSLIIFFLGKAVFITKPADGSAFSDMFRILGSALCGRGPKEPSLLRPKPTVLDGAKVTYGGRFSDEKVEEVKSLVKILPVFLALIPYWTVYFQMQTTYYLQSLHLTIPGADPNSTDSHPNTFRFPAAWLTMFDAVLILMLIPLVSEENRCGHVLCHVLGGGGWHFRDEEAGHCPHTGSHPAVAGWSYILCSRSTYMVASASVCPHRCQ

SEQ ID NO: 1878 - protein, 493 aa, Escherichia coli K12
MNKHASQPRAIYYVVALQIWEYFSFYGMRALLILYLTNQLKYNDTHAYELFSAYCSLVYVTPILGGFLADKVLGNRMAVMLGALLMAIGHVVLGASEIHPSFLYLSLAIIVCGYGLFKSNVSCLLGELYEPTDPRRDGGFSLMYAAGNVGSIIAPIACGYAQEEYSWAMGFGLAAVGMIAGLVIFLCGNRHFTHTRGVNKKVLRATNFLLPNWGWLLVLLVATPALITILFWKEWSVYALIVATIIGLGVLAKIYRKAENQKQRKELGLIVTLTFFSMLFWAFAQQGGSSISLYIDRFVNRDMFGYTVPTAMFQSINAFAVMLCGVFLAWVVKESVAGNRTVRIWGKFALGLGLMSAGFCILTLSARWSAMYGHSSLPLMVLGLAVMGFAELFIDPVAMSQITRIEIPGVTGVLTGIYMLLSGAIANYLAGVIADQTSQASFDASGAINYSINAYIEVFDQITWGALACVGLVLMIWLYQALKFRNRALALES

SEQ ID NO: 1879 - protein, 489 aa, Escherichia coli K12
MNTTTPMGMLQQPRPFFMIFFVELWERFGYYGVQGVLAVFFVKQLGFSQEQAFVTFGAFAALVYGLISIGGYVGDHLLGTKRTIVLGALVLAIGYFMTGMSLLKPDLIFIALGTIAVGNGLFKANPASLLSKCYPPKDPRLDGAFTLFYMSINIGSLIALSLAPVIADRFGYSVTYNLCGAGLIIALLVYIACRGMVKDIGSEPDFRPMSFSKLLYVLLGSVVMIFVCAWLMHNVEVANLVLIVLSIVVTIIFFRQAFKLDKTGRNKMFVAFVLMLEAVVFYILYAQMPTSLNFFAINNVHHEILGFSINPVSFQALNPFWVVLASPILAGIYTHLGNKGKDLSMPMKFTLGMFMCSLGFLTAAAAGMWFADAQGLTSPWFIVLVYLFQSLGELFISALGLAMIAALVPQHLMGFILGMWFLTQAAAFLLGGYVATFTAVPDNITDPLETLPVYTNVFGKIGLVTLGVAVVMLLMVPWLKRMIATPESH

SEQ ID NO: 1880 - protein, 493 aa, Escherichia coli O157:H7
MNKHASQPRAIYYVVALQIWEYFSFYGMRALLILYLTNQLKYNDTHAYELFSAYCSLVYVTPILGGFLADKVLGNRMAVMLGALLMAIGHVVLGASEIHPSFLYLSLAIIVCGYGLFKSNVSCLLGELYEPTDPRRDGGFSLMYAAGNVGSIIAPIACGYAQEEYSWAMGFGLAAVGMIAGLVIFLCGNRHFTHTRGVNKKVLRATNFLLPNWGWLLVLLVATPALITVLFWKEWSVYALIVATIIGLGVLAKIYRKAENQKQRKELRLIVTLTFFSMLFWAFAQQGGSSISLYIDRFVNRDMFGYTVPTAMFQSINAFAVMLCGVFLAWVVKESVAGNRTVRIWGKFALGLGLMSAGFCILTLSARWSAMYGHSSLPLMVLGLAVMGFAELFIDPVAMSQITRIEIPGVTGVLTGIYMLLSGAIANYLAGVIADQTSQASFDASGAINYSINAYIEVFDQITWGALACVGVVLMIWLYQALKFRNRALALES

SEQ ID NO: 1881 - protein, 714 aa, Gallus gallus
MAAKSKSKGRSVPNCFGYPLSIFFIVINEFCERFSYYGMRAVLVLYFKYFLRWDDNFSTAIYHTFVALCYLTPILGALIADSWLGKFKTIVSLSIVYTIGQAVMAVSSINDMTDQNRDGNPDNIAVHIALSMTGLILIALGTGGIKPCVSAFGGDQFEEHQEKQRSRFFSIFYLSINAGSLISTIITPILRAQECGIHSRQQCYPLAFGVPAALMAVSLVVFIAGSGMYKKVQPQGNIMVRVCKCIGFAIKNRFRHRSKEYPKREHWLDWASEKYDKRLIAQTKMVLKVLFLYIPLPMFWALFDQQGSRWTLQATTMDGDFGAMQIQPDQMQTVNPILIIIMVPVVDAVIYPLIQKCKINFTPLRRITVGMFLAGLAFVAAALLQVQIDKTLPVFPAAGQAQIKIINLGDSNANVTFLPNLQNVTVLPMESTGYRMFESSQLKSVMVNFGSESRSENIDSISSNTHTVTIKNAAAGIVSSLRSDNFTSKPEEGKNLVRFVNNLPQTVNITMGDTTFGILEETSISNYSPFSGGRTYDIVITAGSTNCKPTSEKLGYGGAYTIVINECSGDVTQLRYIEDIQPNTVHMAWQIPQYFILTCGEVVFSVTGLEFSYSQAPSNMKSVLQAGWLLTVAVGNIIVLIVAGASKLSEQWAEYVLFAALLFAVCIIFAVMAYFYTYTDPNEVEAQLDEEEKKKQIKQDPDLHGKESEAVSQM

SEQ ID NO: 1882 - protein, 489 aa, Salmonella enterica subsp. enterica serovar Typhi
MNTTAPTGLLQQPRPFFMIFFVELWERFSYYGVQGILAVFFVKQLGFSQEQAFITFGAFAALVYGLISIGGYVGDHLLGTKRTLVLGAIVLAIGYFMTGMSLLNPDLIFIALGTIAVGNGLFKANPASLLSKCYQPKDPRLDGAFTLFYMSINIGSLLSLSLAPVIADKFGYAVTYNLCGAGLIVALLVYFACRGMVKNIGSEPDHKPLRFRNLLLVLLGTVVMIFLCAWLMHNVKIANLVLIVLSIVVTIFFFREAFRLDKTGRNKMFVAFILMIEAVLFYILYAQMPTSLNFFAINNVHHEILGFAINPVSFQALNPFWVVVASPVLAAIYTRLGSKGKDLTMPMKFTLGMFLCALGFLTAAAGMWFADAQGLTSPWFIVLVYLFQSLGELLISALGLAMVAALVPQHLMGFILGMWFLTQAAAFLLGGYVATFTAVPENITDPLQTLPIYTGVFSKIGLVTLAVTVVMAIMVPWLNRMINTQGTEQ

SEQ ID NO: 1883 - protein, 493 aa, Salmonella enterica subsp. enterica serovar Typhi
MNKQASQPRAIYYVVALQIWEYFSFYGMRALLILYLTNQLKYDDNHAYELFSAYCSLVYVTPILGGYLADKVLGNRMAVMLGAFLMAIGHLVLGASEIAPTFLYLSLAIIVCGYGLFKSNISCLLGELYQPEDPRRDGGFSLLYAAGNIGSIVAPIACGYVQEEYSWAMGFALAAIGMLAGLVIFLCGNRHFTHTTGVNKAVLCARNYLLPNWGWLLILLVAAPLLITVLFWKEWSVYALIVATAIGLVVLAKIYRQAQTAKQRKELGLIVTLTLFSMLFWAFAQQGGSSISLYIDRFVNRDILGYSVPTAMFQSVNAFAVMLCGVVLAWLVKESVSGNRTVRIWGKFALGLGLMSAGFCILTLSARWSAAYGHSSMPLMVLGLAVMGFAELFIDPVAMSQITRIDIPGVTGVLTGIYMLLSGAIANYLAGVIADQTSQSAFDASGAVNYAINAYVDVFEQITWGALACVGVVLLIWLYQSFKFKSRALAVES

SEQ ID NO: 1884 - protein, 714 aa, Meleagris gallopavo
MAAKSKSKGSSVPNCFGYPLSIFFIVINEFCERFSYYGMRAVLVLYFKYFLRWDDNLSTAIYHTFVALCYLTPILGALIADSWLGKFKTIVSLSIVYTIGQAVMAISSINDMTDQNRDGNPDNIAVHIALSVTGLILIALGTGGIKPCVSAFGGDQFEEHQEKQRSRFFSIFYLSINAGSLISTVITPILRAQECGIHSRQQCYPLAFGVPAALMAVSLIVFIAGSGMYKKVQPQGNIMVQVCKCIGFAIKNRFRHRSKEYPKREHWLDWASEKYDKRLIAQTKMVLKVLFLYIPLPMFWALFDQQGSRWTLQATTMDGDFGALQIQPDQMQTVNPILIIIMVPVVDAVIYPLIQKCKINFTPLRKITVGMFLAGLAFIAAALVQVQIDKTLPVFPAAGQAQIRIINLGNSNANVTFLPDLQNVTVLPMESTNYRIFETSQLKSVIINFGSENRSESIDSTSSNTHTVTIKNAATGIVSSLRSDNFTSKPEEGKNLIRFVNNLPQTVNITMGDTDFGILEETSISNYTLFSGGRTDDIVIVADSTNCTVTSEALGYGGAYTIIINECSEDVTQLRYIEDIQPNTVHMAWQIPQYFLLTCGEVVFSVTGLEFSYSQAPSNMKSVLQAGWLLTVAFGNIIVLIVAGASKLSEQWAEYVLFAALLFAVCIIFAVMAYFYTYIDPNEVEAQLDEEEKKKQIKQDPDLYGKESEADSRM

SEQ ID NO: 1885 - protein, 581 aa, Homo sapiens [sequence omitted]

SEQ ID NO: 1886 - protein, 581 aa, Homo sapiens
MPAPRAREQPRVPGERQPLLPRGARGPRRWRRAAGAAVLLVEMLERAAFFGVTANLVLYLNSTNFNWTGEQATRAALVFLGASYLLAPVGGWLADVYLGRYRAVALSLLLYLAASGLLPATAFPDGRSSFCGEMPASPLGPACPSAGCPRSSPSPYCAPVLYAGLLLLGLAASSVRSNLTSFGADQVMDLGRDATRRFFNWFYWSINLGAVLSLLVVAFIQQNISFLLGYSIPVGCVGLAFFIFLFATPVFITKPPMGSQVSSMLKLALQNCCPQLWQRHSARDRQCARVLADERSPQPGASPQEDIANFQVLVKILPVMVTLVPYWMVYFQMQSTYVLQGLHLHIPNIFPANPANISVALRAQGSSYTIPEAWLLLANVVVVLILVPLKDRLIDPLLLRCKLLPSALQKMALGMFFGFTSVIVAGVLEMERLHYIHHNETVSQQIGEVLYNAAPLSIWWQIPQYLLIGISEIFASIPGLEFAYSEAPRSMQGAIMGIFFCLSGVGSLLGSSLVALLSLPGGWLHCPKDFGNINNCRMDLYFFLLAGIQAVTALLFVWIAGRYERASQGPASHSRFSRDRG

SEQ ID NO: 1887 - protein, 577 aa, Homo sapiens
MEGSGGGAGERAPLLGARRAAAAAAAAGAFAGRRAACGAVLLTELLERAAFYGITSNLVLFLNGAPFCWEGAQASEALLLFMGLTYLGSPFGGWLADARLGRARAILLSLALYLLGMLAFPLLAAPATRAALCGSARLLNCTAPGPDAAARCCSPATFAGLVLVGLGVATVKANITPFGADQVKDRGPEATRRFFNWFYWSINLGAILSLGGIAYIQQNVSFVTGYAIPTVCVGLAFVVFLCGQSVFITKPPDGSAFTDMFKILTYSCCSQKRSGERQSNGEGIGVFQQSSKQSLFDSCKMSHGGPFTEEKVEDVKALVKIVPVFLALIPYWTVYFQMQTTYVLQSLHLRIPEISNITTTPHTLPAAWLTMFDAVLILLLIPLKDKLVDPILRRHGLLPSSLKRIAVGMFFVMCSAFAAGILESKRLNLVKEKTINQTIGNVVYHAADLSLWWQVPQYLLIGISEIFASIAGLEFAYSAAPKSMQSAIMGLFFFFSGVGSFVGSGLLALVSIKAIGWMSSHTDFGNINGCYLNYYFFLLAAIQGATLLLFLIISVKYDHHRDHQRSRANGVPTSRRA

SEQ ID NO: 1888 - protein, 461 aa, Homo sapiens
MLAFPLLAAPATRAALCGSARLLNCTAPGPDAAARCCSPATFAGLVLVGLGVATVKANITPFGADQVKDRGPEATRRFFNWFYWSINLGAILSLGGIAYIQQNVSFVTGYAIPTVCVGLAFVVFLCGQSVFITKPPDGSAFTDMFKILTYSCCSQKRSGERQSNGEGIGVFQQSSKQSLFDSCKMSHGGPFTEEKVEDVKALVKIVPVFLALIPYWTVYFQMQTTYVLQSLHLRIPEISNITTTPHTLPAAWLTMFDAVLILLLIPLKDKLVDPILRRHGLLPSSLKRIAVGMFFVMCSAFAAGILESKRLNLVKEKTINQTIGNVVYHAADLSLWWQVPQYLLIGISEIFASIAGLEFAYSAAPKSMQSAIMGLFFFFSGVGSFVGSGLLALVSIKAIGWMSSHTDFGNINGCYLNYYFFLLAAIQGATLLLFLIISVKYDHHRDHQRSRANGVPTSRRA

SEQ ID NO: 1889 - protein, 708 aa, Homo sapiens [sequence omitted]

SEQ ID NO: 1890 - protein, 605 aa, Homo sapiens
MGMSKSHSFFGYPLSIFFIVVNEFCERFSYYGMRAILILYFTNFISWDDNLSTAIYHTFVALCYLTPILGALIADSWLGKFKTIVSLSIVYTIGQAVTSVSSINDLTDHNHDGTPDSLPVHVVLSLIGLALIALGTGGIKPCVSAFGGDQFEEGQEKQRNRFFSIFYLAINAGSLLSTIITPMLRVQQCGIHSKQACYPLAFGVPAALMAVALIVFVLGSGMYKKFKPQGNIMGKVAKCIGFAIKNRFRHRSKAFPKREHWLDWAKEKYDERLISQIKMVTRVMFLYIPLPMFWALFDQQGSRWTLQATTMSGKIGALEIQPDQMQTVNAILIVIMVPIFDAVLYPLIAKCGFNFTSLKKMAVGMVLASMAFVVAAIVQVEIDKTLPVFPKGNEVQIKVLNIGNNTMNISLPGEMVTLGPMSQTNAFMTFDVNKLTRINISSPGSPVTAVTDDFKQGQRHTLLVWAPNHYQVVKDGLNQKPEKGENGIRFVNTFNELITITMSGKVYANISSYNASTYQFFPSGIKGFTISSTEIPPQCQPNFNTFYLEFGSAYTYIVQRKNDSCPEVKVFEDISANTVNMALQIPQYFLLTCGEVVFSVTGLEF

SEQ ID NO: 1891 - protein, 708 aa, Homo sapiens
MGMSKSHSFFGYPLSIFFIVVNEFCERFSYYGMRAILILYFTNFISWDDNLSTAIYHTFVALCYLTPILGALIADSWLGKFKTIVSLSIVYTIGQAVTSVSSINDLTDHNHDGTPDSLPVHVVLSLIGLALIALGTGGIKPCVSAFGGDQFEEGQEKQRNRFFSIFYLAINAGSLLSTIITPMLRVQQCGIHSKQACYPLAFGVPAALMAVALIVFVLGSGMYKKFKPQGNIMGKVAKCIGFAIKNRFRHRSKAFPKREHWLDWAKEKYDERLISQIKMVTRVMFLYIPLPMFWALFDQQGSRWTLQATTMSGKIGALEIQPDQMQTVNAILIVIMVPIFDAVLYPLIAKCGFNFTSLKKMAVGMVLASMAFVVAAIVQVEIDKTLPVFPKGNEVQIKVLNIGNNTMNISLPGEMVTLGPMSQTNAFMTFDVNKLTRINISSPGSPVTAVTDDFKQGQRHTLLVWAPNHYQVVKDGLNQKPEKGENGIRFVNTFNELITITMSGKVYANISSYNASTYQFFPSGIKGFTISSTEIPPQCQPNFNTFYLEFGSAYTYIVQRKNDSCPEVKVFEDISANTVNMALQIPQYFLLTCGEVVFSVTGLEFSYSQAPSNMKSVLQAGWLLTVAVGNIIVLIVAGAGQFSKQWAEYILFAALLLVVCVIFAIMARFYTYINPAEIEAQFDEDEKKNRLEKSNPYFMSGANSQKQM

SEQ ID NO: 1892 - protein, 729 aa, Homo sapiens
MNPFQKNESKETLFSPVSIEEVPPRPPSPPKKPSPTICGSNYPLSIAFIVVNEFCERFSYYGMKAVLILYFLYFLHWNEDTSTSIYHAFSSLCYFTPILGAAIADSWLGKFKTIIYLSLVYVLGHVIKSLGALPILGGQVVHTVLSLIGLSLIALGTGGIKPCVAAFGGDQFEEKHAEERTRYFSVFYLSINAGSLISTFITPMLRGDVQCFGEDCYALAFGVPGLLMVIALVVFAMGSKIYNKPPPEGNIVAQVFKCIWFAISNRFKNRSGDIPKRQHWLDWAAEKYPKQLIMDVKALTRVLFLYIPLPMFWALLDQQGSRWTLQAIRMNRNLGFFVLQPDQMQVLNPLLVLIFIPLFDFVIYRLVSKCGINFSSLRKMAVGMILACLAFAVAAAVEIKINEMAPAQPGPQEVFLQVLNLADDEVKVTVVGNENNSLLIESIKSFQKTPHYSKLHLKTKSQDFHFHLKYHNLSLYTEHSVQEKNWYSLVIREDGNSISSMMVKDTESRTTNGMTTVRFVNTLHKDVNISLSTDTSLNVGEDYGVSAYRTVQRGEYPAVHCRTEDKNFSLNLGLLDFGAAYLFVITNNTNQGLQAWKIEDIPANKMSIAWQLPQYALVTAGEVMFSVTGLEFSYSQAPSGMKSVLQAAWLLTIAVGNIIVLVVAQFSGLVQWAEFILFSCLLLVICLIFSIMGYYYVPVKTEDMRGPADKHIPHIQGNMIKLETKKTKL

SEQ ID NO: 1893 - protein, 729 aa, Homo sapiens
MNPFQKNESKETLFSPVSIEEVPPRPPSPPKKPSPTICGSNYPLSIAFIVVNEFCERFSYYGMKAVLILYFLYFLHWNEDTSTSIYHAFSSLCYFTPILGAAIADSWLGKFKTIIYLSLVYVLGHVIKSLGALPILGGQVVHTVLSLIGLSLIALGTGGIKPCVAAFGGDQFEEKHAEERTRYFSVFYLSINAGSLISTFITPMLRGDVQCFGEDCYALAFGVPGLLMVIALVVFAMGSKIYNKPPPEGNIVAQVFKCIWFAISNRFKNRSGDIPKRHDWLDWAAEKYPKQLIMDVKALTRVLFLYIPLPMFWALLDQQGSRWTLQAIRMNRNLGFFVLQPDQMQVLNPLLVLIFIPLFDFVIYRLVSKCGINFSSLRKMAVGMILACLAFAVAARVEIKINEMAPAQPGPQEVFLQVLNLADDEVKVTVVGNENNSLLIESIKSFQKTPHYSKLHLKTKSQDFHFHLKYHNLSLYTEHSVQEKNWYSLVIREDGNSISSMMVKDTESRTTNGMTTVRFVNTLHKDVNISLSTDTSLNVGEDYGVSAYRTVQRGEYPAVHCRTEDKNFSLNLGLLDFGAAYLFVITNNTNQGLQAWKIEDIPANKMSIRWQLPQYALVTAGEVMFSVTGLEFSYSQAPSSMKSVLQAAWLLTIAVGNIIVLVVAQFSGLVQWAEFILFSCLLLVICLIFSIMGYYYVPVKTEDMRGPADKHIPHIQGNMIKLETKKTKL

SEQ ID NO: 1894 - protein, 208 aa, Homo sapiens
MDQWGVYFNPVLVSFCQSFFGYPLSIFFIVVNEFCERFSYYGMRAILILYFTNFISWDDNLSTAIYHTFVALCYLTPILGALIADSWLGKFKTIVSLSIVYTIGQAVTSVSSINDLTDHNHDGTPDSLPVHVVLSLIGLALIALGTGGIKPCVSAFGGDQFEEGQEKQRNRFFSIFYLAINAGSLLSTIITPMLRGKRYLKGTSVGLF

SEQ ID NO: 1895 - protein, 282 aa, Homo sapiens
MRAILILYFTNFISWDDNLSTAIYHTFVALCYLTPILGALIADSWLGKFKTIVSLSIVYTIGQAVTSVSSINDLTDHNHDGTPDSLPVHVVLSLIGLALIALGTGGIKPCVSAFGGDQFEEGQEKQRNRFFSIFYLAINAGSLLSTIITPMLRGKRYLKGTSVGLFLVRPSPCLLRFVLFFPSALFSSCQLHAGMHVGIWSKCFLPCEFHLLFVLFKSLIPVTTGESKPSLAWASIFLNCYSCKVMLVVRGKRQERCLGSQAGGRSCHFSLQALLPSDISVT

SEQ ID NO: 1896 - protein, 708 aa, Canis familiaris
MGMSKSYGCFGYPLSIFFIVVNEFCERFSYYGMRALLILYFRRFIGWDDNLSTAIYHTFVALCYLTPILGALIADSWLGKFKTIVSLSIVYTIGQAVTAVSSINDLTDYNKDGTPDNLSVHVALSMIGLALIALGTGGIKPCVSAFGGDQFEEGQEKQRNRFFSIFYLAINAGSLISTIVTPMLRVHECGIYSQKACYPLAFGVPAALMAVSLIVFVIGSGMYKKFQPQGNVMGKVVKCIGFALKNRFRHRSKQFPKREHWLDWAKEKYDERLISQIKMVTKVMFLYIPLPMFWALFDQQGSRWTLQATAMSGKIGLLEVQPDQMQTVNAILIVVMVPIMDAVVYPLIAKCGFNFTSLKRMTVGMFLASMAFVMAAIVQLEIDKTLPVFPKQNEVQIKVLNIGNGAMNVSFPGAVVTVSQMSQSDGFMTFDVDKLTSINISSTGSPVIPVTYNFEQGHRHTLLVWAPNNYRVVKDGLNQKPEKGENGIRFINSLNESLNITMGDKVYVNVTSHNASEYQFFSLGTKNITISSTQQISQNCTKVLQSSNLEFGSAYTYVIGTQSTGCPELHMFEDISPNTVNMALQIPQYFLITCGEVVFSVTGLEFSYSQAPSNMKSVLQAGWLLTVAVGNIIVLIVAGAGQFSEQWAEYILFAALLLVVCVIFAIMARFYTYVNPAEIEAQFDDDEKKNLEKMNVYSTVTPVSQTQM

SEQ ID NO: 1897 - protein, 535 aa, Cytophaga hutchinsonii
MSNQTIQTPTTNGMPSGIPFIVGNEAAERFSFYGMRAILAVFMTSYLHMTESTATEWAHTFNSAVYFTPILGAFLADIFIGKYRTILYLSVLYCFGHLVLALNESKDGLFWGLTLISIGAGGIKPCVSAHVGDQFGIKNKHLIERVFSIFYFAVNFGSLFSTLLIPYLLEHYGPAYAFGLPGILMFVATFIFWSGRNKFVHVPPFGKAYFKTVFGKEGLSAIGRLIFIYAFIAIFWALYDQHASTWVYQSKSAFLNKDINLFGLVEFTLLPSQIQAANPVLVLVLIPAFAFFIYPALNKIITLKPLIKILLGMFMCVLAFLVAAYIEKRISSGIETSVWWQFLAYLILTMAEVMVSITALEFSYTQAPNQMKSTVMGIFMFSISLGNILVAVISNYNNLHEEVKTVEIGTKTYISIKDYTPVKGEKIEFEDGTGLFILQQNSKTSLMDTIPLGGTYLVGDVDAVSNRFTLEDNGWHAIQTIKKSELPKGYKVVFHRFKHQSYFYMYALLMFVTAVLFIGVALKYKGKTYIQGEAV

SEQ ID NO: 1898 - protein, 707 aa, Ovis aries
MGMSVPKSCFGYPLSIFFIVVNEFCERFSYYGMRALLILYFQRFLGWNDNLGTAIYHTFVALCYLTPILGALIADSWLGKFKTIVSLSIVYTIGQVVIAVSSINDLTDFNHDGTPNNISVHVALSMIGLVLIALGTGGIKPCVSAFGGDQFEEGQEKQRNRFFSIFYLAINAGSLLSTIITPMLRVQVCGIHSKQACYPLAFGVPAALMAVSLIVFVIGSGMYKKVQPQGNIMSKVARCIGFAIKNRISHRSKKFPKREHWLDWASEKYDERLISQIKMVTRVMFLYIPLPMFWALFDQQGSRWTLQATTMSGKIGIIEIQPDQMQTVNAILIVVMVPIVDAVVYPLIAKCGLNFTSLKKMTVGMFLASMAFVAAAIVQVDIDKTLPVFPKGNEVQIKVLNIGNNSMTVSFPGTTVTCDQMSQTNGFLTFNVDNLSINISSTGTPVTPVTHNFESGHRHTLLVWAPSNYQVVKDGLNQKPEKGRNGIRFVNAFGESFGVTMDGEVYNNVSGHNASEYLFFSSGVKSFTINSPEISQQCEKQFKTSYLEFGSAFTYVISRKSDGCPEPKIFEDISPNTVSMALQIPQYFLLTCGEVVFSITGLEFSYSQAPSNMKSVLQAGWLLTVAVGNIIVLIVAGAGQFSEQWAEYVLFAALLLVVCIIFAIMARFYTYVNPAEIEAQFDEDDKEDDLEKSNPYAKLDFVSQTQM

SEQ ID NO: 1899 - protein, 707 aa, Oryctolagus cuniculus
MGMSKSLSCFGYPLSIFFIVVNEFCERFSYYGMRALLILYFRNFIGWDDNLSTVIYHTFVALCYLTPILGALIADAWLGKFKTIVWLSIVYTIGQAVTSLSSVNELTDNNHDGTPDSLPVHVAVCMIGLLLIALGTGGIKPCVSAFGGDQFEEGQEKQRNRFFSIFYLAINAGSLLSTIITPMVRVQQCGIHVKQACYPLAFGIPAILMAVSLIVFIIGSGMYKKFKPQGNILSKVVKCICFAIKNRFRHRSKQFPKRAHWLDWAKEKYDERLIAQIKMVTRVLFLYIPLPMFWALFDQQGSRWTLQATTMSGRIGILEIQPDQMQTVNTILIIILVPIMDAVVYPLIAKCGLNFTSLKKMTIGMFLASMAFVAAAILQVEIDKTLPVFPKANEVQIKVLNVGSENMIISLPGQTVTLNQMSQTNEFMTFNEDTLTSINITSGSQVTMITPSLEAGQRHTLLVWAPNNYRVVNDGLTQKSDKGENGIRFVNTYSQPINVTMSGKVYEHIASYNASEYQFFTSGVKGFTVSSAGISEQCRRDFESPYLEFGSAYTYLITSQATGCPQVTEFEDIPPNTMNMAWQIPQYFLITSGEVVFSITGLEFSYSQAPSNMKSVLQAGWLLTVAVGNIIVLIVAGAGQINKQWAEYILFAALLLVVCVIFAIMARFYTYVNPAEIEAQFEEDEKKKNPEKNDLYPSLAPVSQTQM

SEQ ID NO: 1900 - protein, 707 aa, Oryctolagus cuniculus
MGMSKSLSCFGYPLSIFFIVVNEFCERFSYYGMRALLILYFRNFIGWDDNLSTVIYHTFVALCYLTPILGALIADAWLGKFKTIVWLSIVYTIGQAVTSLSSVNELTDNNHDGTPDSLPVHVAVCMIGLLLIALGTGGIKPCVSAFGGDQFEEGQEKQRNRFFSIFYLAINAGSLLSTIITPMVRVQQCGIHVKQACYPLAFGIPAILMAVSLIVFIIGSGMYKKFKPQGNILSKVVKCICFAIKNRFRHRSKQFPKRAHWLDWAKEKYDERLIAQIKMVTRVLFLYIPLPMFWALFDQQGSRWTLQATTMSGRIGILEIQPDQMQTVNTILIIILVPIMDAVVYPLIAKCGLNFTSLKKMTIGMFLASMAFVAAAILQVEIDKTLPVFPKANEVQIKVLNVGSENMIISLPGQTVTLNQMSQTNEFMTFNEDTLTSINITSGSQVTMITPSLEAGQRHTLLVWAPNNYRVVNDGLTQKSDKGENGIRFVNTYSQPINVTMSGKVYEHIASYNASEYQFFTSGVKGFTVSSAGISEQCRRDFESPYLEFGSAYTYLITSQATGCPQVTEFEDIPPNTMNMAWQIPQYFLITSGEVVFSITGLEFSYSQAPSNMKSVLQDRWLLTVAVGNIIVLIVAGAGQINKQWAEYILFAALLLVVCVIFAIMARFYTYVNPAEIEAQFEEDEKKKNPEKNDLYPSVAPVSQTQM

SEQ ID NO: 1901 - protein, 729 aa, Oryctolagus cuniculus
MNPFQQNESKETLFSPVSTEETPPRLSSPAKKTPPKICGSNYPLSIAFIVVNEFCERFSYYGMKAVLTLYFLYFLHWNEDTSTSVYHAFSSLCYFTPILGAAIADSWLGKFKTIIYLSLVNVLGHVIKSLSAFPILGGKVVHTVLSLVGLCLIALGTGGIKPCVAAFGGDQFEEKHAEERTRYFSGFYLAINAGSLISTFITPMLRGDVQCFGEDCYALAFGVPGLLMVIALVVFAMGSKMYKKPPPEGNIVAQVVKCIWFAISNRFKNRSEDIPKRQHWLDWAAEKYPKQLIMDVKTLTRVLFLYIPLPMFWALLDQQGSRWTLQATKMNGNLGFFVLQPDQMQVLNPLLVLIFIPLFDLVIYRLISKCGINFTSLRKMAVGMVLACLAFAAAATVEIKINEMAPPQPGSQEILLQVLNLADDEVKLTVLGNNNNSLLADSIKSFQKTPHYSKIHLNTKSQDFYFHLKYHNLSIYTEHSVEERNWYSLIIREDGKSISSIMVKDMENETTYGMTAIRFINTLQENVNISLGTDISLNVGENYGVSAYRTVQRGEYPAVHCKTEDKDFSLNLGLLDFGASYLFVITNSTKQGLQAWKMEDIPANKVSIAWQLPQYALVTAGEVMFSVTGLEFSYSQAPSSMKSVLQAAWLLTVAIGNIIVLVVAQFSGLVQWAEFVLFSCLLLVVCLIFSIMGYYYIPIKSEDIQGPEDKQIPHMQGNMINLETKKTKL

SEQ ID NO: 1902 - protein, 447 aa, Mus musculus
MLAFPAENFYRGAYPVFNNTSVEEQAGLFHVALLTLCLGTGGIRAVVCPPDMCGSQERESKKPMPFCNWASWSANLNAAVVFLGISSIQPLGSGALGILLPSLSVFTALVTLYLKHCDLIYRPENRCSLLTIARAFVRALKTRCLPYCHFGRDGSSWLDHAMEKQGGHHSELQEEDTRNISALLPLFSFQILYRTCLLQIPSGYYLQTMNSNRNWGGFSLPIALMNAISLLPLLILPPFMDYFSNCLLPSKRDGPFLSACMIAGNICAASSVAMAGFLEIYRKLAREQSPSGKLFSVSSMACVCLVPQYVLLGVSEVLVNPAVSMVTHRVIPGASMAFLTLSHGSACFAGAMLIKLLYLISEGNWFPNTLDKGNLENFFFVLASLMLLNILGLWRASWRYCNLNHFNAQRIRGNRCEETLLLTEKSLKFYGSTQGASSSIDLWETAL

SEQ ID NO: 1903 - protein, 434 aa, Leptospira interrogans serovar lai str. 56601
MDVQNKDVNSHPKGLTILFFTETWERFSFYGMRALLVLFLTKVFHFSDVDANRIYGIYTGLVYLTPLLGGYLADRYLGFKKCIFLGATLMMFGHLSLAFETKPFFFLGLGLLILGVGFFKPNIATVLGRIYDEDNKTRMKDSGFTIFYMGINLGGFLGPLFCGYFSKSWGWGYGFGVAAFGVLFGILILLLGQKQFPEKVFEPGKKYHTVEGQKHSTLKKEEKQKLAVIFIFTLFVIIFWAAFEQIGSSINLFIDRHVNRNLFGYDIPTPFFQSLNPLLILIFAPIIASFWTTLAKNNWKPDTSTRFATGFFILALGFSVLTLVTLDFRPGHKISAVWLLLMVLCITVGELFTSPGGLALVTKLSPKQLGGFMMGVWLLSSFFGNILAGELAGFMKTDSFPTFFGMFAILAFVGGMILYITRKKLQNWMHGADQ

SEQ ID NO: 1904 - protein, 620 aa, Xanthomonas campestris pv. campestris str. ATCC 33913
MVYRHGVQSPNAQWQAATLAGRRPHTGAVRSARNAARPTAAVASPGTPLLPLHRLPRRHTHASAAACGPFRTSNPVPRDGGQQAAAGTIGLVFCSTGLPLTTSTLPAPAADARLPRQIPFIIGNEACERFSFYGMRNILVQFLITSLLLQEVGAPERDAEAKHILHSFMIGVFFFPLLGGWLADRFFGKYTTIIWFSLIYCAGHACLALFEDSRSGFFVGLGLIAFGAGGIKPLVASFMGDQFDQSNKHRAKVVFDAFYWIINFGSLFASLLIPLALKHLGPSWAFGIPGILMFIATAVFWLGRKRYVRVPLPPKDPHGFGAVVRSALLAHAPGQGRPGLALAAISVLLALACLGLTEQLGLVICLCMALVLLLAGIGGGTWWQLERARGTHPDAAVDGVRALLRVLVIFALVTPFFSLFDQKASTWVLQGREMRMPAWFTASQMQALNPLLVMLLIPFNNLVLYPLLRRLGWEPTSLRRMTSGIAFSGVAWIAVGAIQVAMDGGEPMHIAWQILPYALLTFGEVLVSATGIEFAYSQAPPSMKGVVMSFWYLTTTVGNLWVLLSNVAVRNATVTSHIADTGLSEAAFLMFFFAAFAFLAALAFGLYARRYRMVDNYRPA

SEQ ID NO: 1905 - protein, 585 aa, Arabidopsis thaliana
MGSIEEEARPLIEEGLILQEVKLYAEDGSVDFNGNPPLKEKTGNWKACPFILGNECCERLAYYGIAGNLITYLTTKLHQGNVSAATNVTTWQGTCYLTPLIGAVLADAYWGRYWTIACFSGIYFIGMSALTLSASVPALKPAECIGDFCPSATPAQYAMFFGGLYLIALGTGGIKPCVSSFGADQFDDTDSRERVRKASFFNWFYFSINIGALVSSSLLVWIQENRGWGLGFGIPTVFMGLAIASFFFGTPLYRFQKPGGSPITRISQVVVASFRKSSVKVPEDATLLYETQDKNSAIAGSRKIEHTDDCQYLDKAAVISEEESKSGDYSNSWRLCTVTQVEELKILIRMFPIWASGIIFSAVYAQMSTMFVQQGRAMNCKIGSFQLPPAALGTFDTASVIIWVPLYDRFIVPLARKFTGVDKGFTEIQRMGIGLFVSVLCMAAAAIVEIIRLHMANDLGLVESGAPVPISVLWQIPQYFILGAAEVFYFIGQLEFFYDQSPDAMRSLCSALALLTNALGNYLSSLILTLVTYFTTRNGQEGWISDNLNSGHLDYFFWLLAGLSLVNMAVYFFSAARYKQKKASS

SEQ ID NO: 1906 - protein, 586 aa, Arabidopsis thaliana
MGSIEEEARPLIEEGLILQEVKLYAEDGSVDFNGNPPLKEKTGNWKACPFILGNECCERLAYYGIAGNLITYLTTKLHQGNVSAATNVTTWQGTCYLTPLIGAVLADAYWGRYWTIACFSGIYFIGMSALTLSASVPALKPAECIGDFCPSATPAQYAMFFGGLYLIALGTGGIKPCVSSFGADQFDDTDSRERVRKASFFNWFYFSINIGALVSSSLLVWIQENRGWGLGFGIPTVFMGLAIASFFFGTPLYRFQKPGGSPITRISQVVVASFRKSSVKVPEDATLLYETQDKNSAIAGSRKIEHTDDCQYLDKAAVISEEESKSGDYSNSWEDLCTVTQVEELKILIRMFPIWASGIIFSAVYAQMSTMFVQQGRAMNCKIGSFQLPPAALGTFDTASVIIWVPLYDRFIVPLARKFTGVDKGFTEIQRMGIGLFVSVLCMAAAAIVEIIRLHMANDLGLVESGAPVPISVLWQIPQYFILGAAEVFYFIGQLEFFYDQSPDAMRSLCSALALLTNALGNYLSSLILTLVTYFTTRNGQEGWISDNLNSGHLDYFFWLLAGLSLVNMAVYFFSAARYKQKKASS

SEQ ID NO: 1907 - protein, 590 aa, Arabidopsis thaliana
MVNSNEEDERRILDVEESLLTQEEVNNHLTGLSSTAEDGSIDIYGNPPSKKKTGNWKACPFILGNECCERLAYYGIAKNLITYYTSELHESNVSAASDVMIWQGTCYITPLIGAVIADSYWGRYWTIASFSAIYFIGMALLTLSASLPVLKPAACAGVAAALCSPATTVQYAVFFTGLYLIALGTGGIKPCVSSFGADQFDDTDPRERVRKASFFNWFYFSINIGSFISSTLLVWVQENVGWGLGFLIPTVFMGVSIASFFIGTPLYRFQKPGGSPITRVCQVLVAAYRKLKLNLPEDISFLYETREKNSMIAGSRKIQHTDGYKFLDKAAVISEYESKSGAFSNPWKLCTVTQVEEVKTLIRMFPIWASGIVYSVLYSQISTLFVQQGRSMNRIIRSFEIPPASFGVFDTLIVLISIPIYDRFLVPFVRRFTGIPKGLTDLQRMGIGLFLSVLSIAAAAIVETVRLQLAQDFVAMSIFWQIPQYILMGIAEVFFFIGRVEFFYDESPDAMRSVCSALALLNTAVGSYLSSLILTLVAYFTALGGKDGWVPDDLNKGHLDYFFWLLVSLGLVNIPVYALICVKHTKKKAL

SEQ ID NO: 1908 - protein, 593 aa, Oryza sativa (japonica cultivar-group)
MAEVTVVRAEREEESTLEQGLLAIPEESNQLTYTGDGSVDFSGNPVVKERTGRWRACPFILGNECCERLAYYGISTNLVTYLTKKLHDGNASAASNVTAWQGTCYLTPLIGAILADAYWGRYWTIATFSTIYFIGMAVLTLSASVPTFMPPPCEGSFCPPANPLQYTVFFLGLYLIALGTGGIKPCVSSFGADQFDDTDPVERIQKGSFFNWFYFSINIGALISSSFLVWVQDNIGWGIGFGIPTIFMGLAIISFFSGTSLYRFQKPGGSPITRVCQVVVASFRKWNVHVPEDSSRLYELPDGASAIEGSRQLEHTDELRCLDKAATITDLDVKADSFTNPWRICTVTQVEELKILVRMFPVWATTIVFSAVYAQMSTMFVEQGMMLDTSVGPFKIPPASLSTFDVVSVIIWVPLYDSILVPIARRFTGNPRGFTELQRMGIGLVISIFSMAAAAVLEIKRLDIARAEHLVDQNVPVPLNICWQIPQYFLVGASEVFTFVGSLEFFYDQSPDAMRSLCSALQLVTTALGNYLSAFILTLVAYFTTRGGNPGWIPDNLNQGHLDYFFWLLAGLSFLNFVIYVICANKYKSKKAA

SEQ ID NO: 1909 - protein, 618 aa, Schizosaccharomyces pombe
MSSIEEQITKSDSDFIISEDQSYLSKEKKADGSATINTADEQSSTDELQKSMSTGVLVNGDLYPSPTEEELATLPRVCGTIPWKAFIIIIVELCERFAYYGLTVPFQNYMQFGPKDATPGALNLGESGADGLSNFFTFWCYVTPVGAALIADQFLGRYNTIVCSAVIYFIGILILTCTAIPSVIDAGKSMGGFVVSLIIIGLGTGGIKSNVSPLMAEQLPKIPPYVKTKKNGSKVIVDPVVTTSRAYMIFYWSINVGSLSVLATTSLESTKGFVYAYLLPLCVFVIPLIILAVSKRFYKHTPPSGSIFVRVGQVFFLAAQNKFNLEKTKPSCTTTVGRVTLKDQWDDLFIDELKRALRACKTFLFYPIYWVCYGQMTNNLISQAGQMQTGNVSNDLFQAFDSIALIIFIPICDNIIYPLLRKYNIPFKPILRITLGFMFATASMIYAAVLQAKIYQRGPCYANFTDTCVSNDISVWIQIPAYVLIAFSEIFASITGLEFAFTKAPPSMKSIITALFLFTNAFGAILSICISSTAVNPKLTWMYTGIAVTAFIAGIMFWVCFHHYDAMEDEQNQLEFKRNDALTKKDVEKEVHDSYSMADESQYNLEKATAEEEIMKST

SEQ ID NO: 1910 - protein, 601 aa, Saccharomyces cerevisiae
MLNHPSQGSDDAQDEKQGDFPVIEEEKTQAVTLKDSYVSDDVANSTERYNLSPSPEDEDFEGPTEEEMQTLRHVGGKIPMRCWLIAIVELSERFSYYGLSAPFQNYMEYGPNDSPKGVLSLNSQGATGLSYFFQFWCYVTPVFGGYVADTFWGKYNTICCGTAIYIAGIFILFITSIPSVGNRDSAIGGFIAAIILIGIATGMIKANLSVLIADQLPKRKPSIKVLKSGERVIVDSNITLQNVFMFFYFMINVGSLSLMATTELEYHKGFWAAYLLPFCFFWIAVVTLIFGKKQYIQRPIGDKVIAKSFKVCWILTKNKFDFNAAKPSVHPEKNYPWNDKFVDEIKRALAACKVFIFYPIYWTQYGTMISSFITQASMMELHGIPNDFLQAFDSIALIIFIPIFEKFVYPFIRRYTPLKPITKIFFGFMFGSFAMTWAAVLQSFVYKAGPWYNEPLGHNTPNHVHVCWQIPAYVLISFSEIFASITGLEYAYSKAPASMKSFIMSIFLLTNAFGSAIGCALSPVTVDPKFTWLFTGLAVACFISGCLFWLCFRKYNDTEEEMNAMDYEEEDEFDLNPISAPKANDIEILEPMESLRSTTKY

SEQ ID NO: 1911 - protein, 601 aa, Saccharomyces cerevisiae
MLNHPSQGSDDAQDEKQGDFPVIEEEKTQAVTLKDSYVTDDVANSTERYNLSPSPEDEDFEGPTEEEMQTLRHVGGKIPMRCWLIAIVELSERFSYYGLSAPFQNYMEYGPNDSPKGVLSLNSQGATGLSYFFQFWCYVTPVFGGYVADTFWGKYNTICCGTAIYIAGIFILFITSIPSVGNRDSAIGGFIAAIILIGIATGMIKANLSVLIADQLPKRKPSIKVLKSGERVIVDSNITLQNVFMFFYFMINVGSLSLMATTELEYHKGFWAAYLLPFCFFWIAVVTLIFGKKQYIQRPIGDKVIAKSFKVCWILTKNKFDFNAAKPSVHPEKNYPWNDKFVDEIKRALAACKVFIFYPIYWTQYGTMISSFITQASMMELHGIPNDFLQAFDSIALIIFIPIFEKFVYPFIRRYTPLKPITKIFFGFMFGSFAMTWAAVLQSFVYKAGPWYNEPLGHNTPNHVHVCWQIPAYVLISFSEIFASITGLEYAYSKAPASMKSFIMSIFLLTNAFGSAIGCALSPVTVDPKFTWLFTGLAVACFISGCLFWLCFRKYNDTEEEMNAMDYEEEDEFDLNPISAPKANDIEILEPMESLRSTTKY

SEQ ID NO: 1912 - protein, 410 aa, Streptomyces coelicolor A3(2)
MAEHPAYPVGLRLAGRRVVVLGGGQVAQRRLPALVAAGADIRLVSPEATPSVEAMADAGEITWEQRPYAEGDLADAWYALIATSDTAANDAASAEGERHRVWCVRSDDADRATAWTPATGHSEGVTVAVLTTEARHRDPRHTAAIRDAVVEGLRDGTLVAPHRRTRTPGVALVGGGPGDPDLITVRGRRLLAEADVVIADRLGPRDLLAELPPHVEVIDAAKIPYGRFMAQEAINNALIEHARQGKAVVRLKGGDPFVFGRGMEEAQALAEAGIACTVVPGISSTISVPGAAGIPVTHRGVAHEFTVVSGHVAPDDERSLVDWPSLAKLTGTLVILMGVDKIGKIAGTLIAHGKSPDTPVALVQEGTTAAQRRVDATLATVAEVAVAEEVRPPAVIVVGEVVAVGPHGTA

SEQ ID NO: 1913 - protein, 565 aa, Streptomyces coelicolor A3(2)
MSPTTLPAGPEHGHVTFLGAGPGDPGLLTLRAVEALAHADVLVAEHEVLDVVRTHAKQGVSEVHTDADPSDPGTGAPQLTVVDGASTTFGAPAVRDAAHLVMEAARGGRRVVRAVTGDPGLDAYAAEEMLACAAAGVPFEVVPGIANAVGVPAYAGVPLRDAEGADVRFVDARTASDRCWTEVGASDGTVVVSTTLDSVAAAAGELVSAGRKPDTPLTVTIAGTTTRQRTWTATLGTVAQTLKQAKVLPSPDGGRPVIAVVGERSSAARRDQLSWFESKPLFGWKVLVPRTKEQAASLSDQLRSYGAVPSEVPTIAVEPPRTPQQMERAVKGLVTGRYEWIAFTSVNAVKAVREKFEEYGLDARAFAGIKVAAVGEQTANALIAFGVKPDLVPSGEQSAAGLLEDWPPYDPVFDPIDRVFLPRADIATETLVAGLIELGWEVDDVTAYRTVRASPPPATTREAIKGGGFDAVLFTSSSTVRNLVGIAGKPHNVTVIACIGPATAKTAEEHGLRVDVMSPEPSVTKLAEALADFGLRRRAAALEAGDPVTRPSERRPGSRRRRSST

SEQ ID NO: 1914 - protein, 242 aa, Rhodobacter capsulatus
MSGFVSFVSSGPGDPELLTLKAADRLAKADVVLFDDLSAGADPGAMPARGAELIAVGKRAGRPSPKQDHVSRLLVDHALTGQRVVRLKSGDSGLFGRLEEELDALTGAGIGYEIIPGVPSACAAAAASGLPLTRRLTARRVQFVTGADVTGDLPEGLNWAALADKGATTVVFMGKRTFPKLAADLIAHGLAPDTPALLAEAVGHPGQSVTRSTVTDLAASLAAERSDKPALILYGPLYAPEA

SEQ ID NO: 1915 - protein, 407 aa, Rhodobacter sphaeroides
MSPASRCASSTSGRSRRALRNFRCHSASCSEVRISTKKQASSPSASASRSAVCRRITPASRIRRMRFHTGVFDEPTLRAISSSDWLASACSSARIFLSISSSRTAIRATPLPAEPGSIRRSIRNDLPYLQADMASKGENVLDWAANSQQWMARMLNPLTAPGQVIFVGAGPGSIDHLTMGACRALTQAEVVIHDRLVGPEILDLIPPQALRIEAGKEGFGPSTPQETINALIVDHAASGRRVVRLKSGDSGIFGRLDEEIEALDAAGLGWRIVPGLTTAAAAAAAIGQGLTKRGRNAALRIVTGHDMAGYAEQDWRGLARVGEVAAIYMGKKSARFIQGRLMMHGADPETPVTVIENVSRADERIVAATLATLPEAVAGLSGPAIVLYGLAPRRAAAALPLLKEATA

SEQ ID NO: 1916 - protein, 241 aa, Rhodobacter sphaeroides
MTGFVSFVSSGPGDPELLTLKAVDRLGRADAVLFDDLSSGPILAHARPEADLVGVGKRAGRASPKQDHVSRLLVDYARTGGRVVRLKSGDAGLFGRLEEEIEALEAAGIGYEIVPGVPSACAAAAAAGIPLTRRLTARRVQFLTGADVTGGLPQQNLAALADPAATTVVFMGKRTFPTLAAALFAAGLPETTPALLAEGVSTPAQRIWRGTLGTLVEEVARAGEAPALILYGPLADAEEER

SEQ ID NO: 1917 - protein, 499 aa, Rhodopseudomonas palustris
MACVVMVEKIILNSPSGDGVDMRFLPVFLDLATGPVVLVGAGEMARAKLRLLLGAGASVRWYVTDGDRDLAGLTEPERSRISFPEGAPLHADLTGAIALLCAGAGDVAAPLAAKARALGVPVNVMDELSHSTFIFPAIVDRGDVVVAIGTGGSSPVVARRLRELIETVVPARIGELAALIGRWRTPIKARIPEFPLRRRFWERVVDGPIGRAVLEGRLTDAETELKTIDDATDYARHSLGRRADGHVSIVGAGPGDPDLLTLKALRALSDADVVFYDELVSPEILDRIRRDAKRVPVGRRVGQPGIGQDAINKLLIETARSGQRAVRLKGGDPFVFGRGGEEVEALREAGVSYSVVPGISAALGAASQFEVPLTYRHEALRITFLTAHKAKDAEAVDWSALTDQKMTVVVYMGMSAAPTIRDGLLAAGRAADTPVGVFARVTRSDAVSAVGTLNDLPALVDEVDGGPALLVIGDVVAHSAPWRQQQLLQLVSTYQMAAE

SEQ ID NO: 1918 - protein, 249 aa, Rhodopseudomonas palustris
MSKLIESAPAAGRITLVGAGPGDADLLTLRAIKRLQAADVVLYDDLAGEDFMAYLHPDAELVAVGKRAGHPSPRQDEVSRLAISYALRGKHVVRLKAGDPTLFARADEELRAARDAGIAVEIVPGITTATAAAAAIGASLTKRGVARRVQFVTGHDVDGRLPRDLDLAALADATATTCVYMGKATFPALVAQLIARGLSAATPAVMVESLGTDATNVQRGSVSEIAARLTADRPSGPCMILYGAALEES

SEQ ID NO: 1919 - protein, 473 aa, Buchnera aphidicola str. APS (Acyrthosiphon pisum)
MNYLPIFIDLKSKNVLVIGAGEVGLNKIRILLRAKAKVNVIAKELCSEVKLLLRDQKINWLSKNFDLIYLNKIFLVVSATNDIKLNQYIFKKCNERCVLVNIVDDKLKCSFIFPSIIDRSPLIVAISSGGTAPVLLRLLREKIEAILPNKLGDVAKIAGKWRLAIKKHFSNFLERRKFWEKLFHSIFVEHILNGNKEQAINVLKKNMNQNISLTGEIILVGAGPGDSGLLTLRGLQVLQQADVVLYDYLVSEDILDLIRRDAKRICVGKRVGLKNITQNEIIKLLIFFAQKGKKVVRLKGGDPFIFGRGSEEIEAAKDAGIHFQVVPGITSAIGIAAYTGIPLTHRKYSQGVIFITGHKCIDGFLNNWSILSDPSYTLVVYMGTLKAVYIAQKLITFGRSKLTPIAIIVQGTTIHQKVIVGCLGEIEKIIPFAATPSLLIIGDVVHLHKKLAWFQSENILKKIKNKFSTLTFI

SEQ ID NO: 1920 - protein, 291 aa, Rhodospirillum rubrum
MKQSFAFSRLGLALPPVEPGWVWLVGAGPGDPGLLTVLAAHALAEADVVVHDALIDGRVLGLAREEAVLIPAGKRGGRPSHSQPDISARLVDLARAGKRVVRLKGGDPFVFGRGAEEARTLVAAGVPFRIVPGVTAGVGGLAYAGIPATTRDTNATVTFVTGHAATGEVPDTFDWEALARLPVLVFYMALKTLDVIAARLMEHGRSGETPVAFVSDATTAAQRVHITTLAQAVTERDRLGIAPPALVVLGDVVPLARDLAWWSPPKQGCGGEVWPDPMQSIPGSATPLIGD

SEQ ID NO: 1921 - protein, 244 aa, Rhodospirillum rubrum
DDLVGEGILDMARRDAARIYVGKRKGRASLTQEQIGRLMCDLAAAGRVVVRLKGGDPAVFARLSEEIDALAAAGVAWTVVPGITAASAAAAAIGISLTDRDGAPSVTLLSGHRRAPAAGESEAAVDWRAAARTGGTLAVYMGLSRATAAAEGLIEGGLSAETPVAVVHDASRQGQRVSRGTLGELPRLVAQGALAAPDAPGLVLVGKVVAKAGRLPAIAPVFSTPRAFAGDPSFASQALPSQAG

SEQ ID NO: 1922 - protein, 268 aa, Chloroflexus aurantiacus
MSGKAYLVGAGPGRADLITVRGLTVLRQADVVLYDRLIAAALLDEAPAHAERIFVGKRPGHHAFRQDGINETLVRLVREGLQVVRLKGGDPGVFAHVAEEAAALAAAGLPFEIVPGVSSALAVPLYAGIPLTWRGVATAFTVVSGHEATPHGCSGISWSLLAASPTVVVLMALGRLEQVCSALIAAGRNPDTPAALISRGATSQQATLRATLATLCDQQRLIQLPPPRCWWWERLRRWQIDLPGTTLPDLLATPCCGKSSDTAPISHG

SEQ ID NO: 1923 - protein, 268 aa, Chloroflexus aurantiacus
MSKVYLVGAGPGDPELLTLRALRVLGEADVVLYDRLVSAEILAYVNPQAERIYVGKAKGDQDRVQREILHLLLHYARAGRTVVRLKGGDPMVYGRGAEEWLFLAQHGITVELVPGLSSALALPGMAGIPLTLRGIGRSFAVICGQEQGGAAPEIAPYARIDTLVILMGVERRAELAQALIQAGRDAWEPCAFIENGSTPNERIVLAALEAVAQGRVAVQAPAVWVIGPVVAVREQLQAVAADEPVHAMPVPAYTGMHQARDVVVVERG

SEQ ID NO: 1924 - protein, 239 aa, Sulfolobus tokodaii
MGKVFIVGAGPGDPELITLKAYNLIKKANVIIYDRLVPKTLLEDTKAELIYVGKEIGDSKLQDYINELLVEKAKTNSIVVRLKGGDPYVFGRGEEECIYVLSHGIECEVVPGVSSAIAVPAYAGIPVTSRLTNSSSFTVITGTRADNKIIDASYIPREGTLIILMGIHVIEQLERVLLSVRDYEEYVAIIENGTTEKQRVITGRLKDLSKLIIEHKIRPPAIIVVGDVVKLREKLWKLT

SEQ ID NO: 1925 - protein, 243 aa, Synechococcus sp. PCC 7942; identical to SEQ ID NO: 501

SEQ ID NO: 1926 - protein, 505 aa, Selenomonas ruminantium subsp. ruminantium
MTYMAGMVYLVGAGPGDYRLISMKAVDCLKMADVVVYDRLADDRILRWAPEDAEFIYVGKASSNHTMKQEDINQLLVDKAKEGKCVVRLKGGDPFVFGRGGEEGLLLRENNLPFEIVPGITSAISVPAYAGIPVTHRAVATSFAVVTGHEDPTKGKSNMRWEHLATGVDTLVFLMGVANLPHITGKLIENGRSADTPAAVIRWGTKPEQRTLITTVGKAAEDVAKNGIKPPAIFIVGEVVKLRDSLQWFDNLSQRPLFGKRILVTRARSQASKLTAKLEKLGAEVLEAPAISMADPADNYAALDKAIDHVADYHWLIFTSANGVGRFFARLFKAGKDARALGYAKIAAIGLATAEKLKQYGLVADVIPQEYRAEGVLEALKGKLPPHAKILIPRAEEAREVLPDTLREMGAEVEVAPAYRTICGQVDGEALAAELKEGNIDLVTFTSSSTVKNLVNIIGSAEVLKGVKTACIGPVTADTAKSLGIEPDIIAKEYTIDGLVEAICK

SEQ ID NO: 1927 - protein, 254 aa, Ralstonia metallidurans
MDRQHGKATGKVYLIGAGPGAADLITVRGARLLGEAQVVLHDALVSPEMLAWCPQAELVEVGKRCGQRSTAQLFINRQIVDLATKHERVVRLKGGDPMLFGRADEELQALEAAGIEYEVVPGITAALAAASAIGRPLTKRGVSRSVAFATQAKAADAVDVEADVKADTIIYYMGRDQAANIATQLIARGKPASTPAWVVEAATTPRQRSHQFTLGQMAAGEAARWMDPVQPSLLMIGEALGSRATEYVEAERAA

SEQ ID NO: 1928 - protein, 285 aa, Ralstonia metallidurans
MQTTGKVWLVGVGPGDPELATMKAVRALREADVWLVDDLVPEAMLCYANPGTQIISVGKRGGRCSVSQSSIHEQALEHAQAGRCVARVKGGDPLLFGRGGEEAEFLRGHGIEVEIVNGISSGMAAAQALGIALTHRQHCHGVTFVTAHTRDDGDPDWAALVGSRTTLVIYMGMSRLAAIRDALLQAGMRSEMPVAVVMHASRGDEKRWVGSLATLTEAADAGLASPAVILVGEVVDIPNPASLTDQHAFGDLAAGLPSKQPEHDLQRERQRAHQEDHITEGTHPA

SEQ ID NO: 1929 - protein, 317 aa, Staphylococcus carnosus
MSVSPTGHVYLIGAGPGNPNLLTRKAEHLIRTADIILYDRLVNPFILQLAPPEIEIIDVGKKPYSRHIQQSEINEVLLDAAYKHRNVVRLKGGDPAIFGRVHEEVDILKEHNIPCEIVPGITTASAAAATLGVGLTCRNVSTSVTLTTGSFKGSEEQEIDIASLIDGGTLAIYMGIKRLHTIITQIYKQVGKDYPICAVFDVSYATQKVITGHLSDIEKKVQANAPEDAPGILLIGDALEYADENTHIQLEETSKYFGKECIVTGPREAAIEKAFEIYDAGGWCMIDPNSDDHYHQSQLDLIYRYMQVNDNTIIVKA

SEQ ID NO: 1930 - protein, 517 aa, Deinococcus radiodurans
MKNWVLIRRPPHKEKSPMSEVSLPAALPAPFVSLVGAGPGDPGLLTLRAREVLAQADVVLTDALVSPALLAHCPQARVVEVGKRGFLPSAKQEDINDLIVREALAGGGQRVVRLKGGDPFVFGRGGEEALACRAAGVPCEIVPGVSSAVAAAAYAGIPVTHRGLSRSFAVLTGTDRHGPAAYAEIAGVDTLVFLMGVRHLPQITADLIAAGRDPQTPAAAVQWASTPQQRTVRATLGTLAQRAAEAGLGAPAVTVVGAVAALHDDLDWFCPAPLPLQGAQVAVTRTREQTGSELAALLSGRGAQVSEIPLLRFVPASSPRTLVGALNGFDGWVLLTSEQAVRALARTLLAAGRDLRVLARARIAAVGSGTAWTLREYGLAPDFVPTRSGSRHLGAELPAAPGEVALHVGSQDTDAVLEMALSARGIEYVAAEAYRSELSELTPAQREQLQEAQVVTLASAVGARALAQVAGTSFTAAVIGPQTELAAREAGFTRLILAEQPTLASLSDAVQRACRAG

SEQ ID NO: 1931 - protein, 292 aa, Burkholderia fungorum
MPESIAVHAPKVRAPALVRACLSSARHDMAPAMHVAMTRAWLIGAGPGDVELMTLKATRALAQADVVLVDDLVNPDVLQFARADARIVHVGKRGGHPSTPQEGIVAQLLEHVRAGRSVARLKGGDPFVFGRGGEEQQALHAAGIEVEVINGITAGIAAPAAIGIPVTHRDHAQGVVFVTGHGAGSAEPAWAALVATRMTLVIYMGMRRLGDIVDALLAAGMSAETPCAAIESATRPGQRHVLARLGEFAGSVSRAGLGSPAIVVIGGVASLALARDAAYADAATLPANGDVA

SEQ ID NO: 1932 - protein, 412 aa, Burkholderia fungorum
MKRVPKGRCAGLWGKWHARAASPARDAFRCSEAHAWCDAALWACEVLARKRCVGGRFLRWRAGAARHRTLVVDAWRSPCMTAPAQTNHNAVFRPTRSREAVHTRQQTDNGVPSRPSRADAVFYLAPAIQLSLADTEPKDTAMNPNTGKVTLLSAGPGDLDLLTLKAAKALAAADVVLLDDLANPEIVTLAPQARVIRVGKRGGCRSTPQAFIERLMRCYALKGLHVVRVKGGEALLFGRAGEELAVLRGAGIPVEIVNGISSGFAAAAGLGISLTHRRHCHGVSFVTAHTEDHGEPDWAALAATRTTLAIYMGMRRIGSIAAALLASLPADTPAAVVQWAGGGNERRLMSRLDRLAEDAVSAGFGSPAVILVGSAIGESIERAWGEDSAGRDEKAAMQADMRIAREAIAQAA

SEQ ID NO: 1933 - protein, 255 aa, Geobacillus stearothermophilus
MTIGKVYLVGAGPGDEKLITVYGRECLEPADVIIYDRLINRKLLRYAKPGAEVLYCGKEPGKHDTVQEQIHELLVWHAQQGKTVVRLKGGDPCVFGRVGEEAEVLAKAGIPFEIVPGVTSGIAVPAYAFRSPTVITPPRWRWSAGIGVQRIDWEALTRGCDTILVYMGAANLPDICGRLMAAGKPSDTPAAIIEWGTTERQRTVAATLSTLSDEAEQAGISHPAIIIIGDVVRLRETLQWFPERQGGVVDADASS

SEQ ID NO: 1934 - protein, 490 aa, Clostridium acetobutylicum
MKRSGKVYIIGAGPGEEELITLKAIRKMKECTAVLYDRLVGQGILKYLNEKCEIYYCGKEPGCHYKTQDEINEMIIKLAKEGHIVGRIKGGDPYIFGRGGEEGLSLLKENIEFEVISGVTSPVAVLNYAGIPVTHRGIARSFHVFTAKTANDDSINFSAAAKIDGTLIFLMGYRQLNDITRKLIENGMDSKMPCAVVMRGTTSLQKKVIGNLSDIKEKCDNANMTSPCIIVVGKVVGFNQQLNWYEKKPLFGRNICITRSKNQSKTMREELLDLGAEVTEVHSIEIENTASNLEEYINKISEYDYIILTSVNAVEVLFDYLASKDYDVRKVRAKFAVIGNATKEALKKRGIVPEIVSRKHNGEGLFDEIRGYLKKDDKIFIPRSENSRKYIKEQLVSLGLSVDECFIYRTVPGKLYDKAAFENADTIVFTSPSTVKNMIALFGEKNIKKKSIIAIGPITGRELGKINAEYSTCSECSVDAIIRECLNSDK

SEQ ID NO: 1935 - protein, 504 aa, Clostridium josui
MEHGFVALVGAGPGDKGLITIRGAELLSQADVVVYDRLVSQEIIKMIPTTAEKIDVGKENKFHPVKQEEINHILLEKSLEGKKVIRLKGGDPFVFGRGGEELELLYENNIPFEVVPGVTSAVAALCYGGIPATHRDFCSSLHIITGHAREGGQLSIPFHELKELNGTIVFLMGDSSLSYLMNGLINAGMEKDMPAAIVENGTRPNQRKLVATVGTLEQKALEMEIKSPAIIAVGKVCSLSEKFSWFMKKPLFGTKILVTRPKESSGTLVEKLRQLGAEPVEYPCIEVVPIPQNEKLYHACENIREYGWILLTSKNGIQIFFDYLNSKGLDARVLANTKIGTVGSQTAKALKEVGLISDFTPEIFDGRHLALGIAERVGENEKVLICDAAIASDDIVNILRSNNIKFDRVPLYNTNYINENSNKVKKSIVHGELKYITFTSASTVEGFIASMKDIPLESLTAVCIGNKTAEAAKKYNLRYVVAEKSTIDSMIDKLLEIGGGNIYD

SEQ ID NO: 1936 - protein, 492 aa, Clostridium perfringens
MSKKAYIIGAGPGDEELLTLKAINALQKCTAVLYDRLVGNNILNYLNDDCEIYYCGKEPGCHYKTQEEINESIVELAKKGHVVGRVKGGDPYVFGRGGEEVLALVEENIPFEVIPGVTSPISVLNYAGIPITHRGLAQSFHIVTGMSARTLNVNWKALSKENGTLVFMMGLSNLETIVEKLLENGKDIETPCGVVMRGTTSKQRKVIGTLENICKKVREAKLESPCIIVVGDVVSLNEKLSWYENLPLFGANICLTRSKEQSKEIKWKLKELGAEVTEINSIKIKETAYNLDEYINTLEKYDHIVFTSVNAVNVFFDYLVKNRVDIRKIKADFAVLGKATKKALIARGIVPSIMAHSFTAEGLFEVLKDNIKEGEEVLIPCSSLSREYLFDNLASLGAKCHRVNIYDTICGDVKNPRAFKEVDMVLYTSPSTVKNMIDMIGLEALKEKVSIAIGPITLKALNESGIEGKMCKTHCGDGFLSEIEGIWQEVKK

SEQ ID NO: 1937 - protein, 476 aa, Xylella fastidiosa Dixon
MTANALFPLFANLHDRAVLVVGGGKVAERKTEALLKVGALPIIGAPSLTTSLQRWAETGRITWRQGTFEDSWLQEDIWLVIAATDQPEVNHAAARAAHAQRLFVNVVDDIALSNVQVPAVVERGPLRIAISSGGGAPMVARYLRQQLESLIDDSWGRLTTLFAQRRDTIRARYPNIEARRRFFETQLAGPLQRLLRKQRHAEAEAVLEAALAETPLTESGSVTLVGAGAGDAGLLTLNALRALNEADIILYDRLVSDTVLQMARRDAEQIEVGKSATGHSVRQEDIHTLMLQHAHAGQRVVRLKGGDPFVFGRGGEELEFLRTHGIPYEVIPGITAALACAAYAGIPLTHRDHAQSLCLITAHCQSSLDTLDWAALAQERQTLTFYMGVAGLPTIQQRLCEAGRAETTPFALIENGARAQQRVLTGTLKTLAHTAQTYAVRPPALLILGEVTALAEHLHWFGTAPLSAPCPPARIL

SEQ ID NO: 1938 - protein, 476 aa, Xylella fastidiosa Ann-1
MTANVLFPLFANLHDRAVLVVGGGKVAERKTEALLKVGALPIIGAPSLTASLQRWAETGRITWRQGTFEDSWLQEDIWLVIAATDQPEVNHAAARAAHAQRLFVNVVDDIALSNVQVPAVVERGPLRIAISSGGGAPMVARYLRQQLESLIDDSWGRLTTLFAQRRDTIRARYPNIEARRRFFETQLVGPLQRLLRKQRHAEAEAVLEAALAETPPTESGSVTLVGAGAGDAGLLTLNALRALNEADIILYDRLVSDTVLQMARRDAEQIEVGKSATGHSVRQEDIHTLMLQHARAGQRVVRLKGGDPFVFGRGGEELEFLRTHGIPYEVIPGITAALACAAYAGIPLTHRDHTQSLCLITAHCQSSLDTLNWVALAQERQTLAFYMGVAGLPTIQQRLCEAGRAETTPFALIENGARAQQRVLTGTLKTLAHTAQTYAVRPPALLILGEVTALAEHLHWFGTTPLSAPCPHARIL

SEQ ID NO: 1939 - protein, 325 aa, Staphylococcus aureus subsp. aureus Mu50
MSVDKYGKVYLIGAGPGNPNYLTKKAERLIREADVILYDRLVNPLILQYANLTTEIIDVGKKPYAKHIQQEKINECIVEAARRYNKVVRLKGGDPAIFGRVQEEVDTLNNFNIAFEIVPGVTSASAAVATMQTGLTMRAVAKSVTFSTGHFKDSEENEVDVNALVNGGTLAIYMGVKRLGKIIAQIQQYTDIDYPIAIVFQASCFNEFVVKGRLSNIVGKLEHYAIEAKPGICIIGEVVGYTENVSTTSNPTQQFYVVSGSRHDALMLCEHLYDEGYGCLLNPNDTSNGTYHSSQYDYYDAFIKQQENVTYISTDRADANTVLCH

SEQ ID NO: 1940 - protein, 476 aa, Xylella fastidiosa 9a5c
MTANVLFPLFANLHDRAVLVVGGGKVAERKTEALLKVGALPIIGAPSLTASLQHWAETGRITWRQGTFENSWLQEDIWLVIAATDQPEVNHAAARAAHAQRLFVNVVDDIALSNVQVPAVVERGPLRIAISSGGGAPMVARYLRQQLESLIDDSWGRLTTLFAQRRDTIRARYPNIEARRRFFETQLTGPLQRLLRKQRHAEAEAVLEAALAETPPTGSGSVTLVGAGAGDAGLLTLNALRALNEADIILYDRLVSDTVLQVARRDAEQIEVGKSATGHSVRQEDIHSLMLQHARAGQRVVRLKGGDPFVFGRGGEELEFLRTHNIPYEVIPGITAALACAAYAGIPLTHRDHAQSLCLITAHCQSSLDTLDWAALAQERQTLAFYMGVAGLPTIQQRLCEAGRAETTPFALIENGARAQQRVLTGTLKTLAHTAQTYAVRPPALLILGEVTTLAEHLHWFGTAPLSAPCPPALIL

SEQ ID NO: 1941 - protein, 493 aa, Listeria innocua
MGKVMLIGAGPGDAQLLTVKGLAALQKADVIVYDRLVEPAMLQERKASCKLIYVGKEPLHHPIPQDEIEQILVREAATNELVVRLKAGDPYVFGRGGEEGETLHKAGIPFEVIPGITSAIGGLAYAGIPVTHRDFASSFHVITGHLKKRRDPLDWEALARLEGTLVFLMGMTNLPNICANLLANGQKPETGVAIVQWASRGKQLTVTGTLQTIEQKVAESGISSPALIVVGDVVSLRPQLNFFEEMPLFHTKVLLPRARAGKSMLAEKIRDLGGEVTMYPNIQVLDILPTKTKAELCETSELLFTSKEAVERFFDYLATLELDIRSLKNTHLTAIGKQTKEAFSEKGIIPDSFIKRRSTELILEHIARFQKNASNLIIGSVVDTAEVSAILSEVKTTEMMPLYDMRPVTERPFDLESFEQICFSSSRSVQNLLDVLTTEEKAILQTKTILSIGRFTSATLQSFGINEFEEAENATPESLIELIQKTKLEGVPQ

SEQ ID NO: 1942 - protein, 590 aa, Corynebacterium glutamicum
MAETTGIETNQVSETIGVESLTHGNLRPVSSFEGQHEGQTEELLPGKVIFVGAGPGNPDLLTVRAREVLGNAVRAITDEQVLSGVRAFVATEIPVPEDKLQAAEDEYERICIEAKENGARRKPPRPAPPTAAEITEVSEATPAQIVELVQNALSYGGDVIRLVTGNPLSSDTTLAEISAVSEAGLEFQVVPGMSLPATVPAFAGIALGSTYTETDVNGQNVDWDQLASAPQPLVLQARVQDLSRIAQELKARNMPLETPVSVTANGTTRLQRTYDTTLGLLHKLDAELNGPLVVTLGKGVDDRSKYSWWENRALYGWRVLVPRAREQAASMSARLSSHGAIPQEVPTISVEPPRNPAQMERAIKGIVEGRYQWVVLTSVNAVKAVWEKITEFGLDSRSFAGVRIAAVGEKTAAEIRALGITPELLPARTRQNAQGLVDVFPEYFEELDPVGRVLLPRADIATDVLVDGLTHLGWEVEDVVAYRTVRAAPPSADIRDMIKTGGFDAVAFTSSSTVKNLVGIAGKPHPRTIVACIGPMTAATAEELGLRVDVMPEIAEVPELIDALAEHVADLRAKGELPPPRKKRRRRKAS

SEQ ID NO: 1943 - protein, 257 aa, Propionibacterium freudenreichii subsp. shermanii
MTTTLLPGTVTLVGAGPGDPELVTVAGLRAVQQAEVILYDRLAPQDLLSEASDDAELVPVGKIPRGHYVPQEEINQLLVAHAREGRKVVRLKGGDSFVFGRGGEEWQACAEAGIPVRVIPGVSSATAGPALAGIPLTHRHLVQGFTVVSGHVSPSDERSEVPWRQLAKDRLTLVILMGVAHMRDIAPELMAGGLPADTPVRVVSNASLASQESWRTTLGDAVADMDAHHVRPPALVVVGTLAGVDLSHPDHRAPSDH

SEQ ID NO: 1944 - protein, 262 aa, Staphylococcus epidermidis ATCC 12228
MVHMGKVYLVGAGPGDPELITLKGLKAIKEADVILYDRLVNKEILNYASPSTKFFYCGKDPHRHSLPQEETNKMMVTLAKKGHIVTRLKGGDPFVFGRGGEEAEELACHNIHFEIIPGITSGIAAPAYAGIPVTHRDYSSSVAFVTAVNKPGMDKGKYWQHLANGPETLCIYMGVKRLSEICELLIQYGRSSETPVALVHMGTSKQQMTVTGTLDTIQERAHHIQNPAMIIVGEVVKMREKINWFVEQATVQNETLTEMSST

SEQ ID NO: 1945 - protein, 311 aa, Staphylococcus epidermidis ATCC 12228
MSITYPGTVYLIGAGPGNPNLLTKKAERLIRSADVILFDRLVNPFILQYASSQTKVINVGKKPYCKHIQQEEINQKIVEVANQYQCVVRLKGGDPAIFGRITEEVQTLENHHIHYEIVPGVTSASAAVATMNMGLTMRSIAPSVTFSTGHFKDSVNHDTDIRNLINGGTLAIYMGVKRLGQIIKQIESYTNEDYPIAIVFNASCYNEKIVIGHLSTIEEQLVSQQLEGHPGICILGNILDDINRTLLNNNKNDKGNLYLIKGDKERAIAKAETLYDEGIQCLIDFDHSYHISQQNVYNEMIKHKSIKTIYV

SEQ ID NO: 1946 - protein, 472 aa, Mycobacterium leprae
MVGATMTTRGRKLRPGRITFVGAGPGAPGLLTAQAVAVLANAALVFIDPDVPEPVLALIGKDLPPVSGPAPAGPAAVTAGRAADGTLEGDHYQAAPMVMSGGADIRPALGDPTEVAKTLTAEARSGVDVVRLVAGDPLTVDAVIAEVNAVARTNLQIEIVPGLVTSSVVPTYAGLPLGSSHTVADVRGDVDWEALAAAPGPLILQATASHLADAAHILIDHGLDDATPCVVTAQGTTCQQRSVETTLEGLADSAVLVGTDTAGPLTGPLVVTIGKTVTSRARLNWWESRALYGWTVLVPRTKDQAGEMSERLTSYGALPVEVPTIAVEPPRSPAQMERAVKGLVDGRFQWVVFTSTNAVRAVWEKFGEFGLDARAFSGVKIACVGEATADRVRAFGISPELVPAGEQSSLGLLDEFPPYDSVFDPVNRVLLPRADIATETLAEGLRGCGWEIEDVTAYRTVRAAAAAGPPGK

SEQ ID NO: 1947 - protein, 563 aa, Mycobacterium leprae
MVGATMTTRGRKLRPGRITFVGAGPGAPGLLTAQAVAVLANAALVFIDPDVPEPVLALIGKDLPPVSGPAPAGPAAVTAGRAADGTLEGDHYQAAPMVMSGGADIRPALGDPTEVAKTLTAEARSGVDVVRLVAGDPLTVDAVIAEVNAVARTNLQIEIVPGLVTSSVVPTYAGLPLGSSHTVADVRGDVDWEALAAAPGPLILQATASHLADAAHILIDHGLDDATPCVVTAQGTTCQQRSVETTLEGLADSAVLVGTDTAGPLTGPLVVTIGKTVTSRARLNWWESRALYGWTVLVPRTKDQAGEMSERLTSYGALPVEVPTIAVEPPRSPAQMERAVKGLVDGRFQWVVFTSTNAVRAVWEKFGEFGLDARAFSGVKIACVGEATADRVRAFGISPELVPAGEQSSLGLLDEFPPYDSVFDPVNRVLLPRADIATETLAEGLRGCGWEIEDVTAYRTVRAAPPPAATREMIKTGGFDAVCFTSSSTVRNLVGIAGKPHARTVIACIGPKTAETASEFGLRVDVQPETAAVGPLVDALAEHVARLRAEGALPPPRKKSRRR

SEQ ID NO: 1948 - protein, 241 aa, Pyrobaculum aerophilum str. IM2
MGSVYIVGAGPGDPELITVKGLRLIERADVILHDRLVSRELLKAAKPGALIIDVGKSPGGVGPSQEEINKMLLSYATSYDIVVRLHGGDPLVFGRGFEECKYLVERGIPCEIVPGVTSGLAAPAKYYIPPVLRGVASSVALVTGREDPSKGTRQVDFKKLASAVDTIIIYMGASVAGDVARELIAGGLSPNTPVAVIKSAFFPDEEFIVTTLGGLSAVPNPSIIVVGEVVKRGVDLWKRRL

SEQ ID NO: 1949 - protein, 394 aa, Anopheles gambiae str. PEST
MDFLPLFCQLQHKPVLIVGGGEVAVRKARLLLDAKARVTINAPHLEPQLMSWAEQGLLAVCAADFHPELLDGKWLVIAATDNPEVNHQVFSEANLRQIFCNVVDSPAHCSAIMPAIIDRSPLMVAISSAGVAPVLSRQLREKLEALLPQHLGQLATLAGKLRERVKAIPDKLARRRVWERLFSHERLACQLARGQQQAAEQSINALLNEPQQSKGSVTLVGAGPGDAGLLTLNGLQQLQQADVVVYDRLVSQEVLALVRRDAERIFVGKEAGRHCVPQQAINQLLLDQALLGKQVVRLKGGDPFIFGRGGEELETLAEAGIPFSVVPGITAASGCAAYSGIPLTHRDHAQRVQFITGHDKEGNIAQEWSALATPRQTLVFYMGLAHAARIQDEL

SEQ ID NO: 1950 - protein, 262 aa, Agrobacterium tumefaciens str. C58 (U. Washington)
MSIPQILNSIAAKGPVFEAGHVWLAGAGPGDVRYLTLEVALALSQADIIVRDALVSDDVVALGPQAEVVFAGKRGGKPSATQDDITASLIDFALQGKKVLRLKGGDPFIFGRGGEEAEALVHAGIPFRILPGMTSSFTALASARIPATMRGISRAVTLATGHAAGTEEDLDWLALAKTQEPIVVYMGLKNIGTIAGLLMQGGRSGKTPVAVIMSATTAKERIFIGTLQSIADDAKRESFEAPALIIIGEIVSMRDRLGVSGS

SEQ ID NO: 1951 - protein, 487 aa, Agrobacterium tumefaciens str. C58 (U. Washington)
MHNEHDFSAAGDRLSTFPAFFRVEGRQVAVFGNGDEAFAKVRLLANTNAHIVAYADHPEADFARYISENSIDHRALAFASPLVDDATLVFAATGDEALDREIVSVARTKKIPANAVDQPEFCDFFTPALVARAPVAIAIGTEGAGPVLAQMIRARIDQMLSPSLGKLARLAVQYRDAAEENVPKGALRRNFWRRFFSGAVADAVALGDTSSARHAADRLLQSPERSEGRVWLVGAGPGAEDLLTLRAQRVLMEADVIVYDALVPQAIVDMGRRDAERLSVGKRKGCHSKSQNDINRLLVRLGLEGKRVVRLKSGDPLVYGRAGEEMAALREAGVAYEIVPGITSAFAAAADFELPLTLRGVASSLIFTTGHDLMGDVLPDWARLAVSGATIAVYMGRSVAASVAKRLIDAGLGVETTVAVIENASRADRRLLHGTLNDLPDLEYRDELIGPVMVIIGDAVAGANFDRSEALALAAKPASLKREYVNG

SEQ ID NO: 1952 - protein, 475 aa, Agrobacterium tumefaciens str. C58 (U. Washington)
MERLAKLPVFWGLEGKRVVLTGGSDGAAWKAELLLACGAQLDLYCEESGLSESLATLVAKSPMLTWHDRCWDADIFKGAELALADCEAEEEAGRFYHAARAAGVPVNVIDKPEFCQFQFGSIVNRSPVVVSISTDGAAPILAQAIRRRIETLLPLSLKDWGALAQTIRERVNLRLAPGAARRSFWEKFVDRAFTERLDEGSEERLLKDVATRTGLAESGRGFVTLVGAGPGDAELLTLKAVRALQAADVILFDDLVSAEVLELARREAKRMLVGKRGGRESCKQEDINDMMIRFAKAGRRVVRLKSGDPMIFGRAGEEIAALEAENIPVEVVPGITAASAMASRLGVSLTHRDHAQSVRFVTGHSRQGKLPENIDWQSLSNPSVTTVFYMGGRTAADIQSCLLAHGMPASTPVVVMISVSRVNEQRWCGSLAQLVAAVERLGVNEPVLIGVGDAFRSASVNGGEQTAAAPFQKAG

SEQ ID NO: 1953 - protein, 297 aa, Agrobacterium tumefaciens str. C58 (Cereon)
MPVVQPRRRVFPSVSICIPIAGTAFSVIVKKQPRTMSIPQILNSIAAKGPVFEAGHVWLAGAGPGDVRYLTLEVALALSQADIIVRDALVSDDVVALGPQAEVVFAGKRGGKPSATQDDITASLIDFALQGKKVLRLKGGDPFIFGRGGEEAEALVHAGIPFRILPGMTSSFTALASARIPATMRGISRAVTLATGHAAGTEEDLDWLALAKTQEPIVVYMGLKNIGTIAGLLMQGGRSGKTPVAVIMSATTAKERIFIGTLQSIADDAKRESFEAPALIIIGEIVSMRDRLGVSGS

SEQ ID NO: 1954 - protein, 493 aa, Agrobacterium tumefaciens str. C58 (Cereon)
MRDICPMHNEHDFSAAGDRLSTFPAFFRVEGRQVAVFGNGDEAFAKVRLLANTNAHIVAYADHPEADFARYISENSIDHRALAFASPLVDDATLVFAATGDEALDREIVSVARTKKIPANAVDQPEFCDFFTPALVARAPVAIAIGTEGAGPVLAQMIRARIDQMLSPSLGKLARLAVQYRDAAEENVPKGALRRNFWRRFFSGAVADAVALGDTSSARHAADRLLQSPERSEGRVWLVGAGPGAEDLLTLRAQRVLMEADVIVYDALVPQAIVDMGRRDAERLSVGKRKGCHSKSQNDINRLLVRLGLEGKRVVRLKSGDPLVYGRAGEEMAALREAGVAYEIVPGITSAFAAAADFELPLTLRGVASSLIFTTGHDLMGDVLPDWARLAVSGATIAVYMGRSVAASVAKRLIDAGLGVETTVAVIENASRADRRLLHGTLNDLPDLEYRDELIGPVMVIIGDAVAGANFDRSEALALAAKPASLKREYVNG

SEQ ID NO: 1955 - protein, 488 aa, Agrobacterium tumefaciens str. C58 (Cereon)
MDALKPQRNEPARMERLAKLPVFWGLEGKRVVLTGGSDGAAWKAELLLACGAQLDLYCEESGLSESLATLVAKSPMLTWHDRCWDADIFKGAELALADCEAEEEAGRFYHAARAAGVPVNVIDKPEFCQFQFGSIVNRSPVVVSISTDGAAPILAQAIRRRIETLLPLSLKDWGALAQTIRERVNLRLAPGAARRSFWEKFVDRAFTERLDEGSEERLLKDVATRTGLAESGRGFVTLVGAGPGDAELLTLKAVRALQAADVILFDDLVSAEVLELARREAKRMLVGKRGGRESCKQEDINDMMIRFAKAGRRVVRLKSGDPMIFGRAGEEIAALEAENIPVEVVPGITAASAMASRLGVSLTHRDHAQSVRFVTGHSRQGKLPENIDWQSLSNPSVTTVFYMGGRTAADIQSCLLAHGMPASTPVVVMISVSRVNEQRWCGSLAQLVAAVERLGVNEPVLIGVGDAFRSASVNGGEQTAAAPFQKAG

SEQ ID NO: 1956 - protein, 478 aa, Xylella fastidiosa Temecula1
MTANVLFPLFANLHDRAVLVVGGGKVAERKTEALLKVGALPIIGAPSLTASLQRWAETGRITWRQGTFENSWLQEDIWLVIAATDQPEVNHAAARAAHAQRLFVNVVDDIALSNVQVPAVVERGPLRIAISSGGGAPMVARYLRQQLESLIDDSWGRLTTLFAQRRDTIRARYPNIEARRRFFETQLAGPLQRLLRKQRHAEAEAVLEAALAKTPPTESGSVTLVGAGAGDAGLLTLNALRALNEADIILYDRLVSDTVLQMARRDAEQIEVGKSATGHSVRQEDIHTLMLQHARAGQRVVRLKGGDPFVFGRGGEELEFLRTHGIPYEVIPGITAALACAAYAGIPLTHRDHAQSLCLITAHCQSSLDTLNWAALAQERQTLAFYMGVAGLPTIQQRLCEAGRTETTPFALIENGARAQQRVLTGTLKTLAHTAQTYAVRPPALLILGEVTALAEHLHWFGTTPLSAPCPPRTHPIS

SEQ ID NO: 1957 - protein, 241 aa, Methanothermobacter thermautotrophicus str. Delta H
MMLMVVYLVGAGPGDPELITLKAIRVLEGADVVIYDRLAGEEILRYAPDDARLIYVGKRAGEHHRTQDEINRILVEEGKKHETVVRLKGGDPFVFGRGGEEILALKEAGIPYRVIPGVTSAVGVPTSVGLPVTHRGVATSFTVVTGHEDPSKPAKQVHWDYNADTLIILMGVGNIRENMEEIMKHRPADTPVCVIESGTLDDERIILGTLGDIADKDLRPPGIIVVGDVVNVYREIRGTEK

SEQ ID NO: 1958 - protein, 279 aa, Leptospira interrogans serovar lai str. 56601
MLNADTNKDSRPGKVYLVGAGPGNPEDLTLRAYRILTKAEIILYDALLDPSFLEIFPKSAIVHYVGKRSGAHSATQEEINQLLLSYALSGKNVVRLKGGDPFVFGRGGEELITLVNHNIKYEIVPGVSSLNAGSSFAGFPLTHRGLSRQVLIMDGHTVLNEETDWEWFAKFKGTIALFMGTSSLPKIANLLLQHGSSADLPVALVENASLENFNIQICSLKEAANSYLEKKTQGPGIIYIGKVVRFLENKKLTSTFSQFSKESFLGQISSEIQGGKNES

SEQ ID NO: 1959 - protein, 246 aa, Methanopyrus kandleri AV19
MAGKLVLVGAGPGDPELLTFKAARAISRGDVILKDRLVPDEIIKEHAPEDAEVIDVGKKPGGEGWTQEEINELIVREGSKGKTVVRVKSGDPLIFGRGAEEIEVALKHGMDVEVVPGVTSAIGVPTSLGLPLTHRKCASSFAVATGHEDPSKPENRVDFGALAEAADTLVVLMGARRLREIAREILEKRGNEPVAILERGTTEQERVKVGTLEDAAEGKLKARPPAVVVVGEVVKWWREVLGRETR

SEQ ID NO: 1960 - protein, 485 aa, Fusobacterium nucleatum subsp. nucleatum ATCC 25586
MKKGKAYIIGAGPGDFELLTIKAKRIIENADCIIYDRLISDDVLKLAKKDAELIYLGKGNTEGGLIQDEINQTLVNKCLDGKNVARVKGGDPFVFGRGGEEIEALFKNEIEFEVIPGITSSISVPAYAGIPVTHRGLARSFHIFTGHTMENGKWHNFENIAKLEGTLIFLMGVKNLDLIVNDLIKYGKDSKTPVAIIEKGATKNQRVTVGNLENILGLVEKNKITPPAITIIGEVVNLRETFKWFETENLAKKILVTRDKKQAVEMSENISKRGGIPVELPFIEIENLKIDLKDLEKYKAILFNSPNGVKAFFENIKDIRCLANIKIGAVGVKTKEILEKYKIVPDFVPNEYLVDKLAEEVVKYTNENDNILIVTSDISPCDTDKYNSLYKRNYEKVVAYNTKKLKVDREKVLETLKDIDIITFLSSSTVEAFYENLDGDFFILGDKKIASIGPMTSETIKKLGMKVDYEAEKYTADGLLDVIFK

SEQ ID NO: 1961 - protein, 307 aa, Caulobacter crescentus CB15
MARQPVRNRPPGLVVVGGKRAGRALGVVWLVGAGPGDPDLLTFRAFNALRAADVVVHDGLVSEEILDLAPSRARRINVAKRKSRHTLPQDDINQLLVALAQEGLTVVRLKGGDPFLFGRGGEELAACREAGVECHVVPGVTAALAASAGAGAPLTHRGAAQAVTFVTGHAAHGEPDLDWVALARPNQTVVVYMGVSTAALIAERLVAAGRAASTRALIVENASRADERRILTTLSGLAEAAASVRGPALLMVGEAMAMAEIQSPPPLTGEGHREAVEGALAAKRAPSVISPLGELTPPPLRWGGEFK

SEQ ID NO: 1962 - protein, 261 aa, Caulobacter crescentus CB15
MSSSVQPGRVLLVGAGPGPVDLMTVRAMRAVQEAGALLYDALCSEEAVALAPPGCIRIQTGKRAGKPSMKQDEINRIMLRLARRGLRVVRLKGGDPSIFGRVGEEAAFLNAYGITTEVVPGVTAACAAAAQFGFPLTHRGQARRVVFTTARVENGAMSHDWRSGADAQATIAVYMGAEAAPDLAKALVTAGRATSTPVAMVERAGAADASLTMTSLGALTSGPITTHGGPVLIVVGEVAAAAQTQASNASDCFREHASRTA

SEQ ID NO: 1963 - protein, 267 aa, Chlorobium tepidum TLS
MSDGKGKVFLVGGGPGDPELLTIRAHNVLQSADVVLHDALISPEILALLPNGAERISVGKRLGDGKDQTDRQTKINDLLVRHAREGKCVVRLKAGDPFMFGRGIEEVRALAAAGVPCEVVPGITTGIAAADLCGIPLTERHRNSSVLFCTGHTADYSLGHFAAVIELMKAGTPLVMYMGFENLDKIVERFIDSGLSPELPACAVSRVSRSDQTLVAATIGTIVQQIRERELSLPVVFIIGEHAVPEGACPDQSDASDPSDQNHNEQQ

SEQ ID NO: 1964 - protein, 461 aa, Chlorobium tepidum TLS
MTGSIHTEPQAAAKRGYVYIAGAGPGDPELLTLKADRVLRGADVILFDDLVLPQMLEPYKAEKIYTGKRKDAHHFAQDEINQEIVRHALMGKTVVRLKGGDPFIFGRGGEEIETLRQHGIGYEIIPGITAAHGASAYSEIPLTMRKVSSSVAFCTGHPVNSIQVPDTDTIVYYMVASNVHDVLDKVAASGRSGETMVAVVQNATRYNQRVITSTLDEFRKREKAVYSPALLIIGQNISQYIEENWFSRKKKVLMTGEAPKKYPPADYITVPFPCQQVAGADLGAVKACIEGIDRFSMLFFQNRFAVRYFFKYLFEHGRDVRHLAHLVICTANRSVASALQEYGIIPDCCLDREGVDAIAAMLRKEELTGQRILLSGAEHVDELVAGQLREGGNEVTPLVVYVHGAQDQVEKIDLDFIDEIYFASADCVKKFRGMYDAIPARIAVTPADERTAEEMRRQFGG

SEQ ID NO: 1965 - protein, 492 aa, Clostridium perfringens str. 13
MSKKAYIIGAGPGDEELLTLKAINALQKCTAVLYDRLVGNNILNYLNDDCEIYYCGKEPGCHYKTQEEINESIVELAKKGHVVGRVKGGDPYVFGRGGEEVLALVEENIPFEVIPGVTSPISVLNYAGIPITHRGLAQSFHIVTGMSARTLNVNWEALSKENGTLVFMMGLSNLETIVEKLLENGKDIETPCGVVMRGTTSKQRKVIGTLENICKKVREAKLESPCIIVVGDVVSLNEKLSWYEKLPLFGANICLTRSKEQSKEIKWKLKELGAEVTEINSIKIKKTAENLDEYINTLEKYDHIVFTSVNAVNVFFDYLVKNRVDIRKIKADFAVLGKATKKALISRGIVPSIMAHSFTAEGLFEVLKDNIKEGEEVLIPCSSLSREYLFDNLASLGAKCHRVNIYDTVCGDVKNPRAFKEVDMVLYTSPSTVKNMIDMIGLEALKEKVSIAIGPITLKALNESGIEGKMCKTHCGDGFLSEIEGIWQEVKK

SEQ ID NO: 1966 - protein, 264 aa, Corynebacterium efficiens YS-314
MNSPDSASATPAGEVPGTVHSVTLIGGGPGAWDLITVRGMNRLREADVILADHLGPTSELDKLCDLSTKEVVDVSKLPYGRQVAQSRTNELLVEYALAGRRVVRLKGGDPYVFGRGFEELEYLARHGIACEVIPGVTSAISVPGAAGVPITQRGIVHCFTVISGHLPPGHPDSLLDWDALARTGGTLSIIMGVKNAGRIADALMQGGLSPHTPVAIIQEGTTQAQRSVRCTLDSLGEVMIREEIQPPAVYVVGEVAGLGQPEVP

SEQ ID NO: 1967 - protein, 673 aa, Corynebacterium efficiens YS-314
MVAFDHIGCGSQWEPPGLTGREFVRRPVTSPSGHGQCPSSTAAGPSDMHESLMLIVVGWLVPSGDGYGFCPGQELEKILMTIAEKAEMADTRGIGTSQVPETTGVETHVARRLVSLVPHEVPCEELIPGKVIFVGAGPGNPDLLTVRAREVLGKTVRAVTDAQVLSSVRDFVAAELPVPEDKLKAAEEEYERLCAEAKEGGARRKPPRPAPPTAAEIIEVDHADPEEIARILAEQLAKGGDVIRLVTGNPLSSDSTLAEITAVSEAGMSFQVVPGMSLPGTVPAFAGIALGSTYTETDVSGEDVDWDQLASAPQPLVLQARAENLATIATELKTRDLPLELPVSVTVNGTTRMQRTYDTTLGALAKLDAELPGPLVVTLGEGVSDREKYSWWENRALYGWRVLVPRAKPQAAAMSARLASHGAIPQEVPTISVEPPRNPAQMERAIKGIVEGRYQWVVLTSVNAVRAVWDMITEFGLDSRSFAGVRIAAVGEKTAAEIRALGITPELLPPRNRQNAQGIVDVFPEYIEELDPVGRVLLPRADIATDVLVDGLVALGWEVDDVVAYRTVRAAPPSADIRDMIKTGGFDAVCFTSSSTVRNLVGIAGKPHPRTIIACIGPMTADTARELGLRVDVMPEIAEVPDLVDALADHVADLRAKGELPPPRKKRRRRKAS

SEQ ID NO: 1968 - protein, 325 aa, Staphylococcus aureus subsp. aureus MW2
MSVEEYGKVYLIGAGPGNPNYLTKKAERLIREADVILYDRLVNPLILQYANLTTEIIDVGKKPYAKHIQQEKINDCIVEAARRYNKVVRLKGGDPAIFGRVQEEVDTLNEHHIAFEIVPGVTSASAAVATMQTGLTMRTVAKSVTFSTGHFKDSEENEVDVNSLVNGGTLAIYMGVKRLGKIITQIQQYKDIDYPIAIVFQASCFNEFVVKGRLSNIISKLQHYSIEAKPGICIIGEVVGYTENVSTTSNPTQQFYVVSGSKHDALMLCEHLYDEGYGCLLNPNNTSNGTYHSSQYDYYDAFIKQQENVTYISTDRADANTVLCH

SEQ ID NO: 1969 - protein, 250 aa, Corynebacterium glutamicum ATCC 13032
MTISQENQPIIQPVSLIGGGPGAWDLITVRGMNRLQEADVILADHLGPTDELEKLCDISSKTVVDVSKLPYGRQVTQERTNEMLVEYAQQGLKVVRLKGGDPYVFGRGFEELEFLGEHGIECEVIPGVTSAVSVPAAAGIPITNRGVVHSFTVVSGHLPPGHPKSLVDWAALAKSGGTLSIIMGVKNAGAIAEALMDGGLDADTPAAVIQEGTTDAQRSVRCTLGTLGAVMVEEEIKPPAVYVIGQVAGL

SEQ ID NO: 1970 - protein, 598 aa, Corynebacterium glutamicum ATCC 13032
MTIAHKPEMAETTGIETNQVSETIGVESLTHGNLRPVSSFEGQHEGQTEELLPGKVIFVGAGPGNPDLLTVRAREVLGNAVRAITDEQVLSGVRAFVATEIPVPEDKLQAAEDEYERICIEAKENGARRKPPRPAPPTAAEITEVSEATPAQIVELVQDALSYGGDVIRLVTGNPLSSDATLAEISAVSEAGLEFQVVPGMSLPATVPAFAGIALGSTYTETDVNGQNLDWDQLASAPQPLVLQARVDDLSRIAQELKARNMSLETPVSVTANGTTRLQRTYDTTLGLLHKLDAELSGPLVVTLGKGVDDRSKYSWWENRALYGWRVLVPRAREQAASMSARLSSHGAIPQEVPTISVEPPRNPAQMERAIKGIVEGRYQWVVLTSVNAVKAVWEKITEFGLDSRSFAGVRIAAVGEKTAAEIRALGITPELLPARTRQNAQGLVDVFPEYFEELDPVGRVLLPRADIATDVLVDGLTHLGWEVEDVVAYRTVRAAPPSADIRDMIKTGGFDAVAFTSSSTVKNLVGIAGKPHPRTIVACIGPMTAATAEELGLRVDVMPEIAEVPELIDALAEHVADLRAKGELPPPRKKRRRRKAS

SEQ ID NO: 1971 - protein, 590 aa, Corynebacterium glutamicum ATCC 13032
MAETTGIETNQVSETIGVESLTHGNLRPVSSFEGQHEGQTEELLPGKVIFVGAGPGNPDLLTVRAREVLGNAVRAITDEQVLSGVRAFVATEIPVPEDKLQAAEDEYERICIEAKENGARRKPPRPAPPTAAEITEVSEATPAQIVELVQDALSYGGDVIRLVTGNPLSSDATLAEISAVSEAGLEFQVVPGMSLPATVPAFAGIALGSTYTETDVNGQNLDWDQLASAPQPLVLQARVDDLSRIAQELKARNMSLETPVSVTANGTTRLQRTYDTTLGLLHKLDAELSGPLVVTLGKGVDDRSKYSWWENRALYGWRVLVPRAREQAASMSARLSSHGAIPQEVPTISVEPPRNPAQMERAIKGIVEGRYQWVVLTSVNAVKAVWEKITEFGLDSRSFAGVRIAAVGEKTAAEIRALGITPELLPARTRQNAQGLVDVFPEYFEELDPVGRVLLPRADIATDVLVDGLTHLGWEVEDVVAYRTVRAAPPSADIRDMIKTGGFDAVAFTSSSTVKNLVGIAGKPHPRTIVACIGPMTAATAEELGLRVDVMPEIAEVPELIDALAEHVADLRAKGELPPPRKKRRRRKAS

SEQ ID NO: 1972 - protein, 501 aa, Thermosynechococcus elongatus BP-1
MGAGLGTPSSLTLEAWTCLQQAQVVLYDALLSPSLLELTPADCLRVAVGKRAGAEAIPQLEINRLLVAYGQQYQRVVRLKSGDPGLFGRLHQELEAVLGAGLEAVVIAGVSSALAAPLLAGICVTAKDVSQSVAILSGHAPETLPWPAIARMETLIFLMATRSLRYIAEALLRQGRSPTEGLAILQWAGQPQQQFWFGTLESYLQSPQFPDMAPAVVVIGAIARKRYPLASLDLVFPEFLRISPSSMSALHGKTILVTRAAAQASDFTQQLTAAGATVLEMPTLEIVPPSSWQPLDQALAQLDTFDWLILTSHNAVTFFMKRLHSHGKDSRALAGLKIAVVGEKTAQTLNRYGLVADFTPREFVADALVVEFPEPVAGLRFLFPRVEKGGRPVLGEAFTAAGAEVVEVPAYNSRCPQTVDAPVLAALQAGQVDIVTFTSSKTVKHFCQLVGPQAAELLQNVQIASIGPQTSQTCRELLGRVDTEATEHTLEGLLQALLRIT

SEQ ID NO: 1973 - protein, 475 aa, Thermobifida fusca
MSRLRGTPRRWHRTAEAVGTRQASTGTRHTPQWSPERFETGQRDLEAASVTYLLGLRLQGRDVLVVGGGQVAQRRVPVLLEAGARVTVVSPHVTTALQGLAESGRIHWEQRPYRRGDVTGLGRFWLVHAATDDPEVNAAVVAEAEEARIWSVHADDRHASSAWTPATGSASGVTVGVITGTDPRRAAGLRDAIVTGLADGTLDARRGRAPLRGVALVGGGPGDPGLITVRGRQLLAQADVVVVDRLAPTSLLDQLSGDVEIIDAAKIPYGRSMSQEGINAVIVDRARQGKFVVRLKGGDPFVFGRGGEELAACVAAGIPVTVVPGVTSALAAPASVGIPVTHRGVAQHFHVVSAHVAPGDERSTVNWETLARSGGTIVVLMGVERLGRIAEALIRYGRDPHTPIAVIQEATLPSQTTLVATLETVEKEAHAAGVHPPAVLVIGEVVNTAQELDILHRSQNAAETPIAPAGGNGRN

SEQ ID NO: 1974 - protein, 493 aa, Clostridium thermocellum ATCC 27405
MADGKGKVYLVGAGPGDEELLTVKAADVIKKADVIVYDRLISDGILSKIPDNAEKIYVGKNAGNHPVPQHEINKILLAKALEAKIVVRLKGGDPFVFGRGGEELEFLHQNGIPFEVVPGITSAIAAAAYAGIPVTHRDFCSSLHIITGHVKDGGNPDIDYESLVKLKGTLIFMMSVASFPQIAQGLIEAGMESDMDAAVIENGTMPNQRKFVSKLCDIPKVIAENQVKSPAIIIVGKVCSLSEKLDWFSKLPLYGCNVLVTGPKKTSERLAGKLRGLGAHVVEYPCIETEPLDFDIDIREHSWIIFTSSLGVTIFFKKLYENKLDSRYLYNKKIAAVGSQTAEELLKHGICADFVPGKFDGRHLAEELLQSGKISPEDKVVIFRAKDGTQAIVDIFENNNIHYTDISVYETKCIENERIDISGFNYITFTSESCVKGFAHSFKNTIDYSKINAICIGEQTAKATRAYGMNTIISDVATVSSMVEKIIEMHCAK

SEQ ID NO: 1975 - protein, 259 aa, Trichodesmium erythraeum IMS101
MKVYIIGAGPGNKEYLTLKAHALITQGEVLIYDALIDDSILELAPENCLKIEMGKRGGKPSISQSEINSLLIEKYNLGKQVIRLKGGDPFIFGRATPEIQALIKAGCEFEIVPGISSTLAAPLLANIPLTDTVMSRAFVILTAHDIKVLDWETISKIETLVILMGAKNLGEIVHQLLKHQRKPQTPVAIIKNCATPKQQIWISNLSNIAKQTYAEYLSPCVIIVGEVVRLRDYLQYPNNMVREKSEAKTEIAPLANKLF

SEQ ID NO: 1976 - protein, 503 aa, Desulfovibrio desulfuricans G20
MKVYLIGAGPGDPGLLTIKGRDILKRADVIVYDYLANDAFLNYAAPGAEIIYVGKKGGDHTLSQEGINRLIVEKAREGKVVARLKGGDPYVFGRGGEEAEELLDAGVNFEVVPGVTSAVAGPAYAGIPLTHRSYSSSVSFITGHEDPSKPESAHNWKALAASASTLVFFMGMKNLPEISRKLIEAGMDPDTPAALVRWGTTSRHRSLAATIATLPEEGKKAGFSSPSLIVVGHVVKLRDRLNWFEQLPLLGRGIVVTRAREQASGLAASLTQLGAEVIQFPTILIRPLEDYAPVHDAIRRLAEYDWLVFTSVNGVKHFWQQMGLLGLDSRALGGVKVAAIGPATADVLREKGIEPDFIPEKYVAEGVVKGMIERGMDGSRVLLPRARVAREVLPEELARAGARVDVLPVYETVPGDANRSHVLEMLEEGRIDCITFGSSSTVDNFFSLVEPEAMRRYEHVHMACIGPVTRKTLERYGFTCSIQPEDYTIPALVDELVRQLGAQ

SEQ ID NO: 1977 - protein, 245 aa, Pseudomonas aeruginosa PAO1
MSGKVWLVGAGPGDPELLTLKAVRALQDADVVMVDDLVNPSILEHCPSARLVRVGKRGGCRSTPQDFIQRLMLRHARQGRSVVRLKGGDPCIFGRAGEEAEWLARHGIDSEIVNGITAGLAGATACGIPLTYRGISRGVTLVTAHTQDDSPLAWEALARSGTTLVVYMGVARLAEIQAGLLAGGMAEDTPLAMIENATLGNQRECRSNLGELLRDAGRFALKSPAILVIGEVTRDIVSQPISLSA

SEQ ID NO: 1978 - protein, 485 aa, Fusobacterium nucleatum subsp. vincentii ATCC 49256
MKKGKAYIIGAGPRDFELLTLKAKRIIENADCIVYDRLISEDILRFAKKDAELIYFGKENTEGGLIQDEINQTLVKKCLEGKNVARVKGGDPFVFGRGGEEIEALFKNKIEFEVIPGITSSISVPAYAGIPITHRGLARSFHIFTGHTMENGKWHNFENIAKLEGTLIFLMGVKNLDLIVNDLIKHGKDSKTPIAIVEKGATKNQRVTVGNLENILELVEKNKITPPAITVIGEVVNLRETFKWFESENLAKKILVTRDKKQAVEMSENISKRGGIPVELPFIEIENLTIDLKDLEKYKAILFNSPNGVKAFFENIKDIRCLANIKIGTVGVKTKEILEKYKIVPDFVPNEYLVDKLAEEVVKYTNENDNILIVTSDISPCDTDKYNSLYKRNYQKVVAYSTKKLKVDREKVLETLKDVDIITFLSSSTVEAFYENLDGNFFILGDKKIASIGPMTSETIRRLGMKVDYEAEKYTADGLLDVIFK

SEQ ID NO: 1979 - protein, 485 aa, Clostridium tetani E88
MGKVYLIGAGPGDEELITLKATRMLQKCTAVMYDRLAGPGFLKYLNEDCEIYYCGKEPGCHYKTQDEINEMLAKLAKKGHVVGRVKGGDPFIFGRGGEEILRLLEDNIEFEVIPGITSAISVPSYAGIPVTHRAIAQGFHVFTGMTAEKLDIDWKAVANVGGTLIFLMGYRNLDIIRNRLMENGMNENTPCAIIMRGTTSNQKKVVGTLKDISEKAEKQGVTSPCIILIGDVVQFNDKFNWYEKKRLFGKNICVTRSRVQAKELREKLSDLGAQVTEINAIKIKSRDDELEKYVERLKDYKFIVLTSVNAVNILFDYLVKKEYDIRNIKGRFAVIGPATEKALLKRGIKADIIAKEFVAEDLFNELKPYLNKDDKIFVPHSKQARQYLVEALKDKGCHVEEVYSYEVVKGEVPNLEIFDDVDIVLYTSPSIVRNMIDMIGLEKLKKKTSISIGPITAKELDKNGIDYIICDEYTTDGMIEKLLTL

SEQ ID NO: 1980 - protein, 231 aa, Methanobacterium ivanovii
MVVYLVGAGPGDPELITLKAVNVLKKADVVLYDKPANEEILKYAEGAKLIYVGKQAGHHYKSQNEINTLLVEEAKENDLVVRLKGGDPFVFGRGGEEILALVEEGIDFELVPGVTSAIGVPTTIGLPVTHRGVATSFTVVTGHEDPTKCKKQVGWDFKADTIVILMGIGNLAENTAEIMKHKDPETPVCVIENGTMEGQRIITGTLENIAGKDIKPPALVVLEMLSMFLKK

SEQ ID NO: 1981 - protein, 112 aa, Methanosarcina barkeri
MSGNYGKVYLVGSGPGDPELLTLKARRLIDSAEVIVYDQLPGKAILDSMPASAEKINVGKYAGSHTMTQAEINEVLVQKAKEGKMVVRLKGGDPYVFGRGGEEAEVLRSRRN

SEQ ID NO: 1982 - protein, 161 aa, Methanosarcina barkeri
MSSEEAEKKPRYFVAEEIEFEVVPGITSAIAVPAYAGIPVTHRESTSMVTFITGHEDPTKEESGLDWETLAKFGGTIVILMGVKMLGRNAEELMKHGKAPDTPVAVIERGTRADQRVTVGTLANIASLAEERKVKAPAITVVGDVVHLHDILGEQRTGVDF

SEQ ID NO: 1983 - protein, 257 aa, Oceanobacillus iheyensis HTE831
MGKVYLVGAGPGDPELITLKGLKAIQQSDIILYDRLVNEELLGYASKNAELIYCGKSPEHHSLTQDNINKLLCAYAKEDKIVTRLKGGDPFIFGRGGEEAMVLRENGLIFEIIPGITSGSAAPTYAGIPLTHRDYSSSVSFVSGVSKTGEEHERYWEHLAKSSDTLCIYMGVKSLPEICERLIRYGRHSTTPIAVIHWGTTEMQQTVTGTLEDITHVTEKLKNPSMIIIGEVVRLRDEIQWFNEETIEHFNPEVVIG

SEQ ID NO: 1984 - protein, 243 aa, Bradyrhizobium japonicum USDA 110
MSGFVSFISAGPGDPELLTLKGAARLREADVVLYDDLASGAILDLARPGANLVAVGKRAGRPSTKQHHVNRLLVDYAATGARVVRLKSGDAGIFGRLEEELETLREAGIGYEIVPGVTSACVAAAQAGIPLTRRHTSRRVQFVTGADVTGELPQNLNWAALADPEATTVVYMGRRTFPALAAKLIAHGLAPTTPALFAESLGRPDERLVRTTIAELAEQLARGGAASTAAVILFGALAGEYPS

SEQ ID NO: 1985 - protein, 474 aa, Bradyrhizobium japonicum USDA 110
MRFLPVFLDLKAGPVVLIGAGELLRAKLRVLTAAGARIRVHAIDGNQDMGLSSEDAARVDIATGDPLIADLSGVIAIVCAGAGDVGVAMSARAKALGLPVNVMDDLEHSSFIFPAIVDRGDVVVAVGTGGTSPVVARRVREKIEALLPARIGELAEFIGDFRKSINERIAEFPLRRRFWERVIDGPIGGAVLAGRKGEADAALKAIADPAAFARADKPEGSVALVGAGPGDPDLLTIKALRALQDADIVFHDELVSREILDRIRRDTTRVAVGRRVGKPGIGQDAINTRMIEAAQSGQRVVRLKGGDPFVFGRGGEEVEALRSAGVAYSIIPGITAGLGGAADFEVPLTYRHEATRITFLTAHRARDAEAVDWSTLTDTKMTVVVYMGMTAAPAVRAGLFAAGRSPETPVGVFARVTRPDAQGAIGTLRDLPELVRRTHGGPAMLIIGDVVRHAGSLRRQTPKQIISDLLDAAE

SEQ ID NO: 1986 - protein, 410 aa, Streptomyces avermitilis MA-4680
MAEHPAYPVGLRLTGRRVVVLGGGQVAQRRLPALIAAGAKVHLVSPEATPSVEAMADTGEITWSRRRYEDGDLAEAWYALIATSDAAANVAASAEAERLRVWCVRSDDADAATAWTPATGHSEGVTVAVLTTNAKGRDPRHTAAIRDAVVEGLRDGTLVAPHHRVRTPGVALVGGGPGDPDLITVRGRRLLAEADVVIADRLGPRDLLAELPPHVEVIDAAKIPYGRFMAQEAINNALIEHARQGKSVVRLKGGDPFVFGRGMEEAQALAEVGIPCTVVPGISSSISVPGAAGIPVTHRGVAHEFTVVSGHVAPDDERSLVDWPALAKLRGTLVILMGVDKIGKIADTLVAHGKPAGTPVALVQEGTTAAQRRVDATLATVAETVRAQDVKPPAVIVIGAVVDVGPQTFE

SEQ ID NO: 1987 - protein, 571 aa, Streptomyces avermitilis MA-4680
MSPTTLPAGPEHGHVTFLGAGPGDPGLLTLRAVEALARADVLVAEHEVLDVVRTHARQGVAVLNTSSDAYSDTSSGTYSATSTPQLAVVDSTSTTAGTPASRDAANLVMEAARGGRRVVRAVSGDPGLDTYAAEEMLACAAAGVPFEVVPGIAAAVGVPAYAGVPLRDAQGADVRFVDARSASERCWTEVGASDGTVVVSATLDSVAAAAGELVAAGRKPDTPMSVTIAGTTTRQRTWSATLGSIAQTLKQAKVLPSPDGGRPVIAVVGERSAAAQRDQLSWFESKPLFGWKVLVPRTKEQAASLSDQLRSYGAVPHEVPTIAVEPPRTPQQMERAVKGLVTGRYEWIAFTSVNAVKAVREKFEEYGLDARAFAGIKVAAVGEQTAKALVAFGVKPDLVPSGEQSAAGLLEDWPPYDPVFDPIDRVFLPRADIATETLVAGLIELGWEVDDVTAYRTVRASPPPAETREAIKGGGFDAVLFTSSSTVRNLVGIAGKPHNVTVIACIGPATAKTAEEHGLRVDVMAPEPSVLKLAEALADFGLRRRASALDAGDPVTRPSERRPGSRRRRTT

SEQ ID NO: 1988 - protein, 242 aa, Sulfolobus solfataricus
MSGKVYLVGAGPGDPELITVKGLKILQRADVVVYDRLISKELLNFCKIEAEKIYVGKNIGDYVIQDEINELLVKKAMENKVVVRLKGGDPYVLGRGEEECLYVISKGIECEVIPGITSAIAVPAYAGIPVTSRIYSASGFTIISGTKAEDKLIDEDYIPRKGTLVILMGLRKIENMVNILIKLRNEREPVAVIENGTTENQRVFTGELKDLVNIVRSNNVTSPAVIVIGEVVKFREYLWKFK

SEQ ID NO: 1989 - protein, 231 aa, Sulfolobus solfataricus
MGKVVLVGAGPGDPELITLKGIKYLQMADVIVYDKLVSRELINYAKPSSFVIFLSNDDIEVDLLRKYALEDKLVIRLKNGDPYIFGRGGKICQELIKDGIECEVIPGVSSVNSVPAYAGIPLTFNGVSDMVTIVSAVSQGGKLFNFQKIPDYGTLVVLMGGRRLEEVSKWLMAKRDPSEDVAVIERGTYLDQKVHVNKLEKLAEVGNNLATPSLLVLGNVVRLREILWKFR

SEQ ID NO: 1990 - protein, 287 aa, Paracoccus denitrificans
MAGKTVTNGAAQGKAARSGADGAVRGKAGMGRVDLIGAGPGDPELLTLRALRLLQQADVVVHDRLVSDEVMACIPAHVRRIPVGKAAGFHPVPQEQINALLVELGLSGLTVARLKGGDPTIFGRGGEEFEAVTRAGIPCDYVPGITAAQGAAVSARFPLTHRGLATGLRHVTGHRARDAALDLDWASLADPQTTLAIYMGAANMAEIARELIRHGMPADLPVLAVSQASTPQEQRLHATLQDIAAALARKPLPAPVLFIVGHVAAMAEDCALPQELYRPEWRLVAHG

SEQ ID NO: 1991 - protein, 251 aa, Cyanidium caldarium
MTHNKTIKKVYIVGAGPGDPELLTLKAQRVLREADVVIYDALVNPEILQHCKPNAEIIKVGKRRNNHSFSQLQIASLLIDRAKKGERVIRLKGGDPLIFGRLGEEILELFSKNIEIEIIPGITSAFAVAADMKFPLTHRQLGSSITFLTGEEFYEKTTNKLKWERIIWGADTIIVYMILYNLPKIIKKFLSVGYSAEKPIVLVQWASLKKKNFLIGTIGTIIHQVIESKFGPPSLAIIGEVIEISSIIQKL

SEQ ID NO: 1992 - protein, 513 aa, Geobacter metallireducens
MPDKSLKKPFVHLIGAGPGDPGLITVKGRESLGRADVVIYDYLANDDLLRFARPDAELIYAGKIGGHHNREQWQINALLVEKALAGNVVARLKGGDSFVFGRGGEECEALVAAGIPFEIVPGVTAGIGVTAYAGIPLTHRGVTTSVTFVTGHEGHDKEVSQIDWEGLSLGSGTVVFYMGIKNLPQITANLMAHGRPPETPVALIRWGTRPEQEVLTGTLADIAEQARRTGFRAPAITVVGEVVRLREKLRWFDNRPLFGTSILVTRAADQAGEFGAMLGALGARVLECPTIAIVPPESWDNLDAAIASLDRFHWAVFTSVNAVRFFFERLAAAGKDSRALGNCRVCAVGPKTAAALAPFGIRPDLIPADYKGEGVVEVFRSEEIAGKRIIFPKGDRARDVIPQGLAELGGEVTAPVAYRNVTPDSLPAGVIAELEERRITCVTFTSSSTVENLAAILGENRFLHLLKGVTIAAIGPITARTCRELGLEVHVEPSKYTLAAMTDALVDFFSRSK

SEQ ID NO: 1993 - protein, 247 aa, Pseudomonas fluorescens
MSAKVWLVGAGPGDPELLTLKAVRALHAADVVLIDDLVNPRVLEHCPDARVITVGKRGGCRSTPQDFIHRLMLAMRAKANAWCDLRAATPCIFGRGGEEALWLRERGVEVELVNGITAGLAGATNCDIPLTLRGVSRGVTLVTAHTQDDSSLNWRALAEGGTTLVVYMGVAKLEEIRQQLLEGAMAADTPVAMIENASLPQQRECRSTLAHMHTDAQVFALKSPAILVIGSVAGAGQAASITVSASA

SEQ ID NO: 1994 - protein, 478 aa, Rhizobium etli
MSPKTEQLSVFPAFFRVEGQKTAVFGNGDELSAKVRLLLNTRARIVAYADRPEADYHAFLIANRIETVRAGFAAEQVEGAALVFAATGNEADDRDIVDAARAARIPANAVDQPDYCDFFTPALVNRAPVAVAIGTEGRGPVLAQMIRAQVDQILSPSLGRLAALATSFRKSVEQFVPRGVSRRFWRRFFSGPVADAVANGNPAQARHAADRLLGSMDKVAGHVWLVGAGPGAEDLLTLRAQRVMMEAEVIVYDALVPQAIVDMGRRDAERLSVGKRKGCHSKSQEEINELLVELGRQGKRVVRLKSGDPLVYGRAGEEMAALRAAGITYEVVPGITSAFAPAADFELPLTLRRVASSLVFTTGHDLTGDVLPDWASLAVSGATIAVYMGRTVAASVAERLMQAGIPAETTVAVIENASRADRRLLHGTLADLPDLQHRDELTGPVMVIIGDAVAGRQFRTVRAAGARRTPGSREFARS

SEQ ID NO: 1995 - protein, 269 aa, Ralstonia solanacearum
MEAKTIPTTKGRVSLIGAGPGAADLITVRGARLLGEAEVVLHDALVSPEVFQYCPQAVLIPVGKRCGKRSTAQRFINRQLVDLATKYQRVVRLKGGDPMLFGRADEELQALEAAGIEYEVVPGITAALAAASAIRQPLTKRGVARSVAFVTQAKAADPDTPAPEGAAPEPAVQADSLVYYMGRDQAASIAADLIARGRAPSTPAWVVEAATMPQQRSACFTLQQMAEGAAAAWIHPEHPSLLMIGEAFAGRAASAAPAQCPGAPHVLAA

SEQ ID NO: 1996 - protein, 369 aa, Arabidopsis thaliana
MALVQRIPISSSSIRNWQQARTNLTPICCLHYNTASSSSSPFTEKHSVERYQRDQWLYKAVEPTPPSTPSPSPFEDEVFVRENDIASQLPELKKLLAVLKEKRVKGCKGGDCGPGDVYLVGTGPGDPELLTLKAVRVIQSADLLLYDRLVSNDVLELVAPDARLLYVGKTAGYHSRTQEEIHELLLNFAEAGATVVRLKGGDPLVFGRGGEEMDFLQQQGIRVQVIPGITAASGIAAELGIPLTHRGVATSVRFLTGHSRKGGTDPLFVAENAADPDTTLVVYMGLGTLPSLAQKLMDHGLPSDTPAVAVERGTTPLQRTVFAELKDFATEIQSAGLVSPTLIIIGKVVELSPLWPHCTKESSCLVETR

SEQ ID NO: 1997 - protein, 369 aa, Arabidopsis thaliana
MALVQRIPISSSSIRNWQQARTNLTPICCLHYNTASSSSSPFTEKHSVERYQRDQWLYKAVEPTPPSTPSPSPFEDEVFVRENDIASQLPELKKLLAVLKEKRVKGCKGGDCGPGDVYLVGTGPGDPELLTLKAVRVIQSADLLLYDRLVSNDVLELVAPDAKLLYVGKTAGYHTKTQEEIHELLLNFAEAGATVVRLKGGDPLVFGRGGEEMDFLQQQGIRVQVIPGITAASGIAAELGIPLTHRGVATSVRFLTGHSRKGGTDPLFVAENAADPDTTLVVYMGLGTLPSLAQKLMDHGLPSDTPAVAVERGTTPLQRTVFAELKDFATEIQSAGLVSPTLIIIGKVVELSPLWPHCTKESSCLVETR

SEQ ID NO: 1998 - protein, 272 aa, Mesorhizobium loti
MSGTSKNNGGNATLEQALARLNFKPRPLEPGHVWLAGAGPGDPGCLTLEVLAALAEADALVYDALVSPDVVAVAANAELFFAGKRGGQPSMKQDDITALLVRLARQGRRVIRLKGGDPYIFGRGGEEALALARENIPFRVLPGLTSGLSALAATGIPATMRGINKAVILATGHAAGTDDDIDWAAIARTGQPVVVYMGMANLPLIAAALLDGGLSPSTPAAVIVAATTPQERTVVATLATIAEEAAAAGLTSPALIVVGGIVAMRAALTRQA

SEQ ID NO: 1999 - protein, 483 aa, Mesorhizobium loti
MPQANAKLNAFPVFVRVEGEAVAIVGGGDEALAKARLIGQSSAVLRIIAENAEPELLAFIGQSGASHVAAAYDASQLEGAVMVFAASGDEALDRRVAADARELGIPVNAVDRPELCDFFTPALVNRAPVAIAIGTEGAGPVLAQMLRGRIDQMLSPSLGSLATLAATLRGAAEKLLPKGNARRRFWNSFFEGAPAHAVEAGQLSQAHDAAVDLLLSNAPASGHIALVGAGPGAEDLLTLRAHRLLMEADVIVHDALVPEAVVAMGRRDAERLPVGKRKGCHTKSQAEINALLVELGRQGKRVVRLKSGDPLVFGRAGEEMAALRDAGIAYEVVPGVTAAFAAAADFELPLTLRGVSSSMVFTTGHDLKGNSLPDWAKLAISGATVAVYMGRSVAAEVAGRLIEAGLSPDTAVAVVENASLANRRRFHGTLADLPSLEARGDLSGPVMTIIGDAVAGANFERSEPLAAHRNEGAAKVAAERVQP

SEQ ID NO: 2000 - protein, 434 aa, Glycine max
  unsure (1)..(434): unsure at all Xaa locations
MSPQPLQSPLHFYHYHSPIQTQTLPDSVYIILEVEARNARPLLCLLANYPTWLSSTRHLSPLSTPIPPIPHHPAATSSSPSPXSPFTEKHSTERYQRDQWVYQSTTQEGQPQTTPFPPLPCDSASLRDDDIALQLPELKKLLQVLREKRXXCINGEGCEPGNVFLVGTGPGDPELLTLKAVRVIKSADLLLYDRLVSNDVLDLVGPGARLLYVGKTAGYHSRTQEEIHELLLSFAEAGATVVRLKGGDPLVFGRGGEEMDFLQQQGIQVKVIPGITAASPRAPELGIPLTHRGIANSVRFLTGHSRKGGSDPLFVSENAADPDSTLVVYMGLATFPSLAQKLMHHGLSPQTPAAAIERGTTLHQRTVFAELKDLHEKITSAQLVSPTLIIIGKVVELSPFWPIPTKEESCLMQAXWMLSRNIIVKLGGNEGLPW

SEQ ID NO: 2001 - protein, 478 aa, Rhizobium leguminosarum bv. viciae
MPPRTEQLSVFPAFFRVEGLKTAVFGNGDEAFAKVRLLLNTKARIIAYADRPEADYHAFLIANRIETVRAAFAAEQVEGSALVFAATGNEADDRSIVDAARAARIPANAVDQPDYCDFFTPALVNRAPVAVAIGTEGAGPVLAQMIRAQIDQLLSPSLGRLAGLATSYRKAVEQLIPRGVSRRVFWRHFFSGSVADAVANGNLPQARHAADRLLHAMDKVAGHVWLVGAGPGAEDLLTLRAQRVMMEADVIVYDALVPQAIVDMGRRDAERLSVGKRKGCHSKSQEEINDLLVDLGRQGKRVVRLKSGDPLVYGRAGEEMAALRAAGITYEVVPGITCAFAAAADFELPLTLRGVASSLVFTTGHDLTGDVLPDWASLAVSGATIAVYMGRTVAASVAERLMQAGIPSETTVAVIENASRAERRLLHGTLADLPDLQHRDELTGPVMVIIGDAVAGANFELSEPLVRANARLEELARS

SEQ ID NO: 2002 - protein, 384 aa, Oryza sativa (japonica cultivar-group)
MALALRPPRFQPLPAPIPASTASTTALAARPSSSAHAIICAAAASPFTEATSSSRYRRDAWSYAASDGDSSSSSAAAAAAAASSGRRDDEIALQLPELRRLLEALRASRGRGAEGEGGGGGPGRVALVGTGPGDPELLTLKAVRAIEAADLVLYDRLVSNDVLDLVGEGARLLYVGKTAGYHSRTQEEIHELLLSFAEAGANVVRLKGGDPLVFGRGGEEMDFLQQQGIRVEVIPGITSASGIAAELGIPLTHRGVATSVRFLTGHSRNGGPDPLYVAENAADPDTTLVVYMGLSTLPSLAPKLMKHGLPPDTPAVAVERGTTPQQRMVFAMLKDFVNEVKSEDLVSPTLIIIGKVVALSPFWIDSSKQGAQSIENLYAAETKR

SEQ ID NO: 2003 - protein, 511 aa, Paenibacillus macerans
MDMTGRVYLVGAGPGDARLITLKGLDCIEKGDVIVYDRLANPSLLRKAKPGAEKIYVGKRTDRHTMKQEDISRLLVDLALAGKTVVRLKGGDPTVFGRGGEEAELLRKHGIPYEIVPGITAAISVPAYAGIPVTHRDLASSVSIIAGHESPDKLDLSINWEKVTNATGTLVFMMGVANIGYISKQLIAHGRPPETPVALVRWGTRAEQETLTGTLADIEQKVLDSGFKRRVTVVGEVVNQREQLLWAEAMPLFGKRILVTRSRSQASDLVRGIEELGGEPYEFPVIQISMPSGAALERTDEALSRLETYDWAFFTSVNGVDYFFKHLERLGKDIRALYKAIAAVGGHAGALRERGIAAEELPGRFQAEPCWKRTARSLCPAKAYCCRTGILPGRGCRSCAIKGWPSPRRSCMRRVPAGEKDEELIKLLEKGRIHAVTFTSSSTVTHLLAALSGMGVRPVAALRGREIACIGPVTARTAEEAGLRVSILAKEATIPSLIEALCDWKERGASV

SEQ ID NO: 2004 - protein, 304 aa, Oryza sativa
  unsure (1)..(304): unsure at all Xaa locations
XLTLKAVRAIEAADLVLYDRLVSNDVLDLVGEGARLLYVGKTAGYHSRTQEEIHELLLSFAEAGANVVRLKGGDPLVFGRGGEEMDFLQQQGIRVEVIPGITSASGIAAELGIPLTHRGVATSVRFLTGHSRNGGPDPLYVAENAADPDTTLVVYMGLSTLPSLAPKLMKHGLPPDTPAVAVERGTTPQQRMVXFAMLKDFVNEVKSEDLVSPTLIIIGKVVALSPFWIDSSQTGCTTXLENLYAAGTKRXQFLXNQMSEXPLSNVIHQIWTFTSKIXANLIWFSLGHANRXWNEPGQEIMHIP

SEQ ID NO: 2005 - protein, 268 aa, Triticum aestivum
  unsure (1)..(268): unsure at all Xaa locations
XPGRVALVGXGPGDPELLTLKAVRAIEAADLVLYDRLVSNEVLDLVADGARLLYVGKTAGYHSRPQEEIHELLLSFAEAGANVVRLKGGDPLVFGRGGEEMDFLQQQGIKVEVIPGITSASGIAAELGIPLTHRGVATSVRFLTGHSRNGGTDPLHVAENAADPDTTLVVYMGLSTLPSLAPKLMKHGLPPDTPAVAVERGTTPXQQRMVFAMLKDLVNEVHSADLVSPTLIIIGKVVALSPLWVESSEHDALNNENSSTSLATLNRX

SEQ ID NO: 2006 - protein, 424 aa, Zea mays
  unsure (1)..(424): unsure at all Xaa locations
MALAVRTPRFQPRPASISAPTTPASTSLAAGNARPRPCAGAAVRASPFTEATSSSRYRRDAWSYAADGSSNSASPSSAAAAAAGRRDDEIALQLPELRRLLDVLRASRGRGAEEGGGPGEVALVGTGPGDPELLTLKAVRAIEAADLVLYDRLVSNDVLDLVGEGARLLYVGKTAGYHSRTQEEIHELLLSFAEAGANVVRLKGGDPLVFGRGGEEMDFLQQQGIKVEVIPGITSASGIAAELGIPLTHRGVATSVRFLTGHSRNGGTDPLYVAGNAADPDTTLVVYMGLSTLPSLAPKLMKHGLPPDTPAVAVERGTTPQQRTVFASLKDLVDEVKSADLVSPTLIIIGKVVSLSPFWVESSEHDALKVQSSYANEAXDDNRFSWFLVTGQYLRNARSQIWEHRFDLVYTETSQEAWILNGGW

SEQ ID NO: 2007 - protein, 423 aa, Zea mays; identical to SEQ ID NO: 503

SEQ ID NO: 2008 - protein, 321 aa, Zea mays
  unsure (1)..(321): unsure at all Xaa locations
QXLLDALRAXXRRGAEGGGGGGRGPGSIAXXGTGPGDPELLTLKAVRAIEAADLVLYDRXXSNDVLDLVGEGSRLRYVGKXXGYHSRTQEEXHEXLXNXAEAGSNXVRLKGGDPLVFXRGGEXMDFLQQQGIKVEIIPGITSSXGIAAELGIPLTHRGVXTSFRFXXXHSRNXGTXPLYVXGXAAXPXTXLVVYMGXSTLPSLAPKLMKHXLPPETPSVAVXPGTTPQQRMXFALLKDLVDXVKSADLVSPTLIIIGKXVXXSPFWVEXSXHDALKIEXSYSXXAXEDNTFXXILVIGQYIRVGVIYXMQXRFDLVYTXFR

SEQ ID NO: 2009 - protein, 112 aa, Zea mays
  unsure (1)..(112): unsure at all Xaa locations
YWARTPYEGGIVWLVGAGPGDVDLLTVKALRLLQRADVVVYDRLVSEAVMAEVASSALCIDVGKQPGHHGLKQTQINQLLVALAASGRNVVRLXGDDPFIFGRGGEEMVSLX

SEQ ID NO: 2010 - protein, 256 aa, Novosphingobium aromaticivorans
MSNSSSRIGTVHLVGAGPGDADLLTLRAARLVMNARVLVHDGLVDPSILAMAPKGCRMISVAKSRSRHTMKQGEINALLVREALAGNDVVRLKGGDPFVFGRGGEEAEDCLAAGVPVQVVPGVSAAMGAAAAAMIPLTHRESASIVSFVAGQCKGLTDQNWAGLAGVGRTLVIYMGVATSEAIAEKLMADGLAPEMPVAVVENAARPQMRVLRGTLAGLGCLVADNKVRSPALIVIGEVAGRGDMMELRQVLEAAR

SEQ ID NO: 2011 - protein, 317 aa, Novosphingobium aromaticivorans
MRLPRRRRERDCRCRLRWRDDARSDRGMHPRRIELRKLPPGHRPDARRDEPGYTGGCGMNDFPAGMVWLVGAGPGDPELLTRKAERLIGRASVVFFDALVGREVLDLASPGARLVDVGKRSGRHSKDQRTIDALIVEAALSGERVVRLKGGDPSIFGRATEELEACRSAGVVVAVCPGVTAASAAAAGLSRSLTLRGLARKLVFVTAHARAGDTLDLDWAALADPGATLAIYMGKSAAGAIARGLQGTGMAGETPVALVENASLPDERRIVTRLDLLELAARTLGDGPALLLIGEAMRTPGRRAVAAAAQAMERETP

SEQ ID NO: 2012 - protein, 496 aa, Schizosaccharomyces pombe
MIVSWSLKDAVVVVVGSGKNAYRRVNLCLSENSSKIFWFCRSSADGGFDVGHLQLDAKKSDAIEILPISEFDPVRSLTTLGKEETDFLVDAVFVSESNHHEKEILHRTCKRYRIPLNIIDNPSLCSFTLPATWSEPPLQISLSTSSNGCRLAQRLLRHVVSSLPSGMPEAIERFGRVRAITKTPEKKQWINHVSDFWPLEKLVRMTEDDLLAIVSDNFSLPLSSSQSSSLANSYESLSTTLDKPSLTLDPEAFPTHKRGSIALIGSGPGSPDLLTVAARKAIMKADYVLADKLVPEAVLQLIPRHTPLFIARKFPGNADKAQDELHQVAFDALSRGDYVVRLKQGDPYIYGRGGEEYLFFTQHGYVPTVIPGISSALMAPISAGIPVTHRGVADQFLVCTGTGQKGSMPKIPSFVPTQTTVFLMALHRLEILVQALIESGWPRVLPVCIAERVSCPDQRFIFSTLEDVVEEYNKYESLPPGLLITGYSCNTLRNTA

SEQ ID NO: 2013 - protein, 251 aa, Schizosaccharomyces pombe
LTLDPEAFPTHKRGSIALIGSGPGSPDLLTVAARKAIMKADYVLADKLVPEAVLQLIPRHTPLFIARKFPGNADKAQDELHQVALDALSRGDYVVRLEQSDPYIYGRGGEEYLFFTQHGYVPTVIPGISSALMPPISAGIPVTHRGVADQFLVCTGTGQKGSMPKIPSFVPTQTTVFLMALHRLEILVQALIESGWPRVLPVCIAERVSCPDQRFIFSTLEDVVEEYNKYESLPPGLLITGYSCNTLRNTA

SEQ ID NO: 2014 - protein, 593 aa, Saccharomyces cerevisiae
MVRDLVTLPSSLPLITAGFATDQVHLLIGTGSTDSVSVCKNRIHSILNAGGNPIVVNPSSPSHTKQLQLEFGKFAKFEIVEREFRLSDLTTLGRVLVCKVVDRVFVDLPITQSRLCEEIFWQCQKLRIPINTFHKPEFSTFNMIPTWVDPKGSGLQISVTTNGNGYILANRIKRDIISHLPPNISEVVINMGYLKDRIINEDHKALLEEKYYQTDMSLPGFGYGLDEDGWESHKFNKLIREFEMTSREQRLKRTRWLSQIMEYYPMNKLSDIKLEDFETSSSPNKKTKQETVTEGVVPPTDENIENGTKQLQLSEVKKEEGPKKLGKISLVGSGPGSVSMLTIGALQEIKSADIILADKLVPQAILDLIPPKTETFIAKKFPGNAERAQQELLAKGLESLDNGLKVVRLKQGDPYIFGRGGEEFNFFKDHGYIPVVLPGISSSLACTVLAQIPATQRDIADQVLICTGTGRKGALPIIPEFVESRTTVFLMALHRANVLITGLLKHGWDGDVPAAIVERGSCPDQRVTRTLLKWVPEVVEEIGSRPPGVLVVGKAVNALVEKDLINFDESRKFVIDEGFREFEVDVDSLFKLY

SEQ ID NO: 2015 - protein, 507 aa, Desulfitobacterium hafniense
MFILAKGYVYLVGAGPGEPKLLTVKGAECIARADVLIYDRLASPRLLSLAGPDCEMIYVGKSPDRHTLRQDEINQLLVQKSLAGKVVTRLKGGDPFVFGRGGEEAEALLAVGIPFEIVPGITSAIAVPAYAGIPVTHREMTSSFAVITGHEDPGKNDSAIAWEHLVPAHGTLIFLMGMENLSLIAQRLIQHGKNPATPVGIIQWGTRPEQRTLVGRLDTIASLVQEQGFTNPATIIVGEVVSLREKLQWFEKKPLFGSRIVVTRARHQAGVLAQAIEDLGGEPWEFPAIEIREPSDPELLTRAMQDLRRFKWLVFTSANGVERFLSGLKDSGKDIRDLSGMEIVAVGPVTQAALEQRGLCVTCMPEEYRAEGILAELTGRILPGEGVLLARAEEARDVLPQSLQTLGAEVWDVPVYKTVSGSANKGLLKSMLEDKQIQAVTFTSSSTVRNFCRLIDNQTELLDGVKLFSIGPLTSAAARELGLPIHKEAARSTIDGLVAALVEGARG

SEQ ID NO: 2016 - protein, 473 aa, Desulfitobacterium hafniense
MLIYDRLASRRLLTLARPDCELIYVGKSPDRHTLRQEEINALLVQKGLEGKIVTRLKGGDPFVFGRGGEEAEDLLQAGIPFDIVPGVTSAISVPAYAGIPVTHRDLTSSFAVITGHEDPTKNSSALAWEHLATAHGTLIFLMGMENLSLIATKLMENGRSPSTPVGIIQWGTRPEQRVLVGELQNIAQLVKEEGFTNPSIIIVGEVVQLREKLQWFEKRPLFGQRIIVTRARHQASALSQGIEDLGGEPWEFPAIEIVPPRDPQPLIQAIKNLKRFEWLIFTSVNGVEEFFKVLMEQGRDVRDLAGMDVVAIGPATRDALEKRCLKVSFVPEEYRAEKIIEGLASRVLPGQSVLLARAEEARDILPESLKALGADVWDVPTYRTVLGNANKEELMKLLEEKAVAAVTFTSSSTVRNFLQLIDGRQSLLDGVKLYSIGPITSKTAQEFGLSIYREAKQYTIKGLLETLARGNEE

SEQ ID NO: 2017 - protein, 452 aa, Desulfitobacterium hafniense
MIYVGKSPDRHTLRQDEINQLLVQKSLAGKVVTRLKGGDPFVFGRGGEEAEALLAVGIPFEIVPGITSAIAVPAYAGIPVTHREMTSSFAVITGHEDPGKNDSAIAWEHLVPAHGTLIFLMGMENLSLIAQRLIQHGKNPATPVGIIQWGTRPEQRTLVGRLDTIASLVQEQGFTNPATIIVGEVVSLREKLQWFEKKPLFGSRIVVTRARHQAGVLAQAIEDLGGEPWEFPAIEIREPSDPELLTRAMQDLRRFKWLVFTSANGVERFLSGLKDSGKDIRDLSGMEIVAVGPVTQAALEQRGLCVTCMPEEYRAEGILAELTGRILPGEGVLLARAEEARDVLPQSLQTLGAEVWDVPVYKTVSGSANKGLLKSMLEDKQIQAVTFTSSSTVRNFCRLIDNQTELLDGVKLFSIGPLTSAAARELGLPIHKEAARSTIDGLVAALVEGARG

SEQ ID NO: 2018 - protein, 622 aa, Neurospora crassa
MASSNLPTAPSAYHTTLLTAQDCREHVHLIIGSNPLAASRVAQSLSVGAKPILIAPVESDMTPTAADSQQNQKRELHHNLANYISSGALTHLDRPFADEDLTTLGRSEVDNVVDAVFVTQHDQLLAERISALCKRKRIPVNVLDNPALCSFSLLSVHVDGPLQIGVTTNGRGCKLASRIRREVASALPKGLGAACARLGDVRRRIITEDAEARTAAGSAIAAAVNEGVDDSIDQSATFNKLVTELDVQAEAAKTRRMRWLAQVCEYWPLKKLVEITDDDVESILQAYPGFSSDNSSASPQPVLPGAVSEGGSSSTTTTSSSSNGRIGRIFLAGSGPGHPDLLTRATYKAIQSADLILADKLVPSGVLDMIPRRTPVSIARKFPGNADRAQEELLEQALEGVRAGKTVLRLKQGDPFIYGRGGEEVAFFREHGLGDRVVVLPGITSSLSAPLFAGIPATQRDVSDQVLICTGTGKKGKPPAPPEYVGSRTVVFLMALHRIGGLVKELTTRLGEADGVAEVQEGEKQRALWPLDTPCAVIERATCPDQRVMRTTLRYVEQAIEQEGSRPPGLLVVGRACEALYTPKQEGQPWVVEDGQFKDLDFEDSLGLSLDATSGVAHTGAA

SEQ ID NO: 2019 - protein, 252 aa, Aeropyrum pernix
MAVLARCRGKVVIVGGGPGDPGLITVKGMKALEEADAILYDRLAPKGLVEKLQTPALKIYVGKKPGEGMSQEEINRLMEILACRGMTVARLKGGDPYTYGRGEEECMYLMEKGVECIVIPGVPSYIAASALHGIPLTSRGISSSFAVITGKEAPGKPAGKRVKLEDIARSVDTLVILMGASTSAELAERLIKVLPPETPVAIASSVSTPEAETLVTDLRGLRELGRQGRVKSPAVIIVGEVVKLRDRLYKEA

SEQ ID NO: 2020 - protein, 261 aa, Prochlorococcus marinus subsp. pastoris str. CCMP1378
MEINVPGIVYLVGAGPGDPELLTLKALRLIKSCDALVHDALVSPQIIKETNKKTEIFNVGKRAGLCSVPQADTNLLIVKLAKEGKNVVRLKGGDPFVFSRGGEEVSFLEKNGISVEIVPGITSGIAAPSNFGIPLTHREAGSSITFVTGHEDINKDKKTVNWRLLAKSSDGLVIYMGMRNIGFIVKELLIGGLDENTKCAVIQEATLNNQKCLISELKNLAETISNKGFSSPSIIVIGSIVGFKVNNYINNLSDAFFPEKK

SEQ ID NO: 2021 - protein, 246 aa, Halobacterium sp. NRC-1
MTGTVYLVGSGPGDPELLTVKATRLLEAADVVLHDKLPGPEILSSIPEGKREDVGKRAGGERTPQSETNARLVELAEDGNDVVRLKGGDPFVFGRGGEEMLYLAEHGVDFEVVPGVTSPVAAPAAADIPVTHRDHASSVSFVTGHEDPGKDESAVDWGALADTGGTIVVLMGVGKLPEYTAALRDAGMDPETPVALVEKGTRPGQQVATGTLATIVAARDEAGISPPAITVIGGVAGLWDGVEGEP

SEQ ID NO: 2022 - protein, 261 aa, Prochlorococcus marinus str. MIT 9313
MSSLDFGTVYLVGAGPGDPDLLTLKAYRLLRQCGALVHDALVPKEVLELVPESCERHFVGKRRERHWVPQSKTNELLVELAQSHSCVVRLKGGDPFLFGRGGEEAAYLQSHGVSVEVVPGITAGMAAPAYVGIPLTHRCGGSSVTFVTGHEKIDKQRPSVNWKDLASASDSLVIYMGLHNLAYIVEELIAGGLDPATSAAIIQQGTVVGQRYLKAPLEQLVQRVQSEGFAAPSIVIVGAVVDEQVAECAPQPAEVVMPIKS

SEQ ID NO: 2023 - protein, 405 aa, Mycobacterium tuberculosis H37Rv
MTENPYLVGLRLAGKKVVVVGGGTVAQRRLPLLIASGADVHVIAPSVTPAVEAMDQITLSVRDYRDGDLDGAWYAIAATDDARVNVAVVAEAERRRIFCVRADIAVEGTAVTPASFSYAGLSVGVLAGGEHRRSAAIRSAIREALQQGVITAQSSDVLSGGVALVGGGPGDPELITVRGRRLLAQADVVVADRLAPPELLAELPPHVEVIDAAKIPYGRAMAQDAINAVLIERARSGNFVVRLKGGDPFVFARGYEEVLACAHAGIPVTVVPGVTSAIAVPAMAGVPVTHRAMTHEFVVVSGHLAPGHPESLVNWDALAALTGTIVLLMAVERIELFVDVLLKGGRTADTPVLVVQHGTTAAQQTLRATLADTPEKVRAAGIRPPAIIVIGAVVGLSGVRGLNNS

SEQ ID NO: 2024 - protein, 92 aa, Archaeoglobus profundus
MTGKVYIVGAGPGDPELLTVKALKVIEMADVILYDRLVGKSIEDMLKRMGKEIIYVGKNSYENGAERQRNINELMVKLAREGKIVVRLKGGD

SEQ ID NO: 2025 - protein, 429 aa, Ferroplasma acidarmanus
MGKAYIVGCGPGNKDLLTIKAIKIIKNADAIIYDHLVNPEILDYATPGTRKIYVGKKPYVKRISQEEINKIIVNEALKYRTVARLKGGDPFVFGRGGEEIEELIRNNIEYEIIPGISSLTGVPESAGIPLTHRNVNHGVLVTTGNSVENLNIPDCRTFNCRMYTLVIFMGAHNLRDIVSRLLSSGYDPALPIALIENGTYNYQKTYTGKLGDIDYSYDDSPSLIVIGDVVQYHKEFSRSEHRIYSGKIVTLFYDLYAPDTDDLENEGITVFKIRCADVFPGNMQTAQLYRKNIAFYGCYTDMLMDILRSSGFDLRWLGKIATDSTGKALLQSYGIFDTTDISESGNDYTWIGSGKEKELQAVKVKPLEMGSYIDDYVKKSDLVIIGGQSDTLPEGIEVKDGAGVIRIEYPYEGLYSKVMSYFGDGDEKN

SEQ ID NO: 2026 - protein, 256 aa, Cytophaga hutchinsonii
MHEPRVTLVGAGPGDPELITLKGMRALSSADVVLYDALIHKEILSFAPITAIQVFVGKKKGVCQFPQDEINALLVEYALKHGHVVRLKGGDPFIFGRGHEELLYVESFNIPTEVIPGISSSIAVPELQRIPLTRRGVNDSFWVLTGTTRDHQLSADIQIAAKSNATVVVLMGMTKLADIIQLFIAEGKSKLPVAIIHNGTMPDETYVLGTVETIVDIVARSGISSPAVIVIGEVVRLHPEYVLDEVQKIVGPEKES

SEQ ID NO: 2027 - protein, 281 aa, Streptomyces coelicolor A3(2)
MRRMHRRGPKTMDSEAKVTFVGAGPGAADLLTFRAARAIAEADVVIWAASLVQAEVLQHAREGAEVLDSATMSLEDVVAVYRRARAEGLRVARIHSGDPALWGGTQEQLDRCAEIGVATEVVPGVSAFSAVAALAQRELTIPEVAQSVVLTRLGGGKTPMPPGEEVREFAKHGTTMAVFLSAARSGQLVRELLEGGYPTETPVIVAYQATWPEELVVRCTIGTLEETVKEHRLWKHTLFLVGPALDAHGTRSHLYHPGHFHGYRKADPEARRELRSRGAST

SEQ ID NO: 2028 - protein, 260 aa, Nostoc sp. PCC 7120
MNRTDNQGQKGLGKVYLVGAGPGDPGLMTVKGKGILECADVVIYDALVSPAILAMINPQAEQINAGKRMGRHSLLQDETTQLLIEQAQNHAVVVRLKGGDPFIFGRGGEEMADLIAAGVPVEVVPGITSGIAAPAYAGIPLTHRLYSSSVTFVTGHESAGKYRPKVNWQAIAHGSETIVIYMGIHNLPYIVEQLKMAGLSLATPIALVRWGTRPEQEELIGELGTIVELVEKTGFEAPAIAVIGSVVNMHSILSVAARVN

SEQ ID NO: 2029 - protein, 517 aa, Nostoc sp. PCC 7120
MTQQNGKVYLVGAGPGDVAYLTVKAYNLLATAQVLVYDALVDEQLLQCVSSDCLKLDVGKRGGKPSTPQTEINNLLVKFCQEGALVVRLKSGDPFIFGRSTSEIEALKAAGCEFEVVPGISSAIAAPLLAGIPLTDPVMSRCFAVLTAHEPEVLDWEALSRLDTLVILMGGKNLADIVHELLRRERSHLTPIAIIRWAGTPSQEIWTGQLGDILQQTAGLSLSPVVIVIGEVVRLRKYLQPEKIFPENSTTPMSSNQPLTGKTILVTRSSGQSSQFSDRLTTLGATVIEMPALEIGPPSSWKELDQAIANLSHFDWLILTSTNGVDYFFERLYIQGKDTRALAGLKIAVVGEKTSQSLKQRGIQADFIPPNFVADSLVEHFPESLLNKKILFPRVESGGREILVKELSAKGADVIEVAAYQSCCPTSIPLAAELALKNRTIHIITFASSKTVQFFCQLADKIFPHNIPNALEGICIASIGPQTSKTCHTLLGRVDIEAEEYTLDGLTQAIIQWSLKP

SEQ ID NO: 2030 - protein, 261 aa, Nostoc sp. PCC 7120
MQNHVNSLASAVYIVGAGPGDPDLLTIKAQKLLSVADVILFADSLIPEELLQFCRKDAEIIQTANKTLEEIIPLMIARVRSQKSVVRLHSGDPSLYSAINEQMQLLAAANIPFEVIPGISVFQAAAAKLKVELTVPGLVQTIILTRISGRTQVPHTEELASLAAHQASLCLYLSARHVENAQAKLLEHYPPDTPVAICFRIGWPDEKIRVVPLQEMADCTQRENLIRTTLYVISPALSHTTGRSRLYHPEHSHLFRTAGDS

SEQ ID NO: 2031 - protein, 261 aa, Rhodobacter capsulatus
MTVHFIGAGPGAADLITIRGRDLIASCPVCLYAGSLVPEALLAHCPPGAKIVNTAPMSLDAIIDTIAEAHAAGQDVARLHSGDLSIWSAMGEQLRRLRALNIPYDVTPGVPSFAAAAATLGAELTLPGVAQSVILTRTSGRASAMPAGETLENFARTGAVLAIHLSVHVLDEVVQKLVPHYGEDCPVAIVWRASWPDQRVVRATLATLQTSLGAELERTALILVGRSLATEDFDESRLYAGDYDRRYRPLGTHPRFPEGSE

SEQ ID NO: 2032 - protein, 260 aa, Rhodobacter sphaeroides
MTVHFIGAGPGAPDLITLRGRDLIAASPVCLYAGSLVPEGVLAHCPPGCRIVNTAPLSLEAIVEEIAAAHAEGKDVARLHSGDLSVWSAMGEQLRRLRALGIPYDVTPGVPSFAAAAATLGAELTLPGVAQSVVLTRTSGRASPMPEGESLAAFAATGAVLAIHLSVHVLGRVLAELLPHYGADCPVAVVWRASWPDERVVRATLGSLEAALGPELERTALILVGRSLGAEDFAESRLYAGDYDRRYRPVGTHPRFPEEA

SEQ ID NO: 2033 - protein, 259 aa, Rhodopseudomonas palustris
MTVHFIGAGPGAPDLITVRGRDLVMRCPVCLYAGSLVPREIVALCPKDARVVDTAPLDLDAITAEFVAAAEAGHDIARLHSGDLSVWSAMGEQIRRLEQHGIPYTVTPGVPSFAAAAAVLGRELTLPEVAQTVVLTRTSGRASAMPPRETLEAFAATGATLAIHLSIHVLADVVERLRPHYGDDGAVAVVVRASWPEQQVIRGTLSSIAAQVAAEGIDRTALILVGPSLAATDFRESSLYAPDYDRRYRRSAEDGRDRD

SEQ ID NO: 2034 - protein, 373 aa, Rhodospirillum rubrum
MDDAGRPWPVGRGVVVCRHPGPQGRSARGAGFGAPPGSAAAAVPGPGAGARDPPPRLALAGRVPGRRLSWRRRGGGPGGGGRVRHSDRRQNPLPARHLRVGPHAARRPVFFGDARQGDDPMTVHFIGAGPGAPDLITLRGLRLIQSCPVVLFAGSLIPREVVAEAGAEARVIDSSALHLDEIIAVMAEATARGEDIARLHSGDPSLYGAIAEQIRRLRGLGIAYDICPGVPSYAAAAAALGNELTLPEVCQTVILTRTSVRASPMPAGEDLESLGRSGALLAIHLSIANLAEVEAKLTPLYGADCPVAVVYRASWPDQTVVRGTLADIAGKIAGVGITRTALILVGRGLGSEDFANSRLYAADCGHAFRSASA

SEQ ID NO: 2035 - protein, 401 aa, Rhodospirillum rubrum
  unsure (1)..(401): unsure at all Xaa locations
MDSFPIFLTLTGVRVLVVGGGAAAAAKARLALKAGARVSVFAPALSADWQDLRGHPALDHRQGFPGQGGEEEWRDVRLVYAAGESLEEDRAVHAAASARGVLVNVVDRPELCDFLTPAIVDRSPIVVAIGTGGRAPVLARRVRAAIDRLLPARLGALARLAEGFRGTVAQALPDGDRRRRFWDRFFDGAPXXXXXXXXXXXXXXXXXXXXXXXXXXXXXXXXXXXXXXXXXXXXXXXXXXXXXXXAAAAIGISLTDRDGAPSVTLLSGHRRAPAAGESEAAVDWRAAARTGGTLAVYMGLSRATAAAEGLIEGGLSAETPVAVVHDASRQGQRVSRGTLGELPRLVAQGALAAPDAPGLVLVGKVVAKAGRLPAIAPVFSTPRAFAGDPSFASQALPSQAG

SEQ ID NO: 2036 - protein, 262 aa, Chloroflexus aurantiacus
MTYPAIPGTVYFVGAGPGAPDLITVRGRDLLAQADLILYADSLVDAALPAAYARADARILGSVEMHLEQIVRLMCEAARAGQVVVRLHSGDPALYGAIHEQMAALDEAGVPYEIVPGVTAAFALAARLGVELTVPELVQTIILTRPAGRTPLPEHEQLSRMAAHGASLAIYLGITRMQQVVRDLLTGGVYTPDTPVVVAYRITWPDEVIIHGTLGDIAEKVKAAGFTRQALILVSLRLIRPTSVPTANHRLTIHLQYRAPSP

SEQ ID NO: 2037 - protein, 278 aa, Sulfolobus tokodaii
MNTAELTLEEITDLMIKKAKEGKLVARLKSGDFSIYGALMEELWALQDAGIDYELVPGITAAIAAASVLGIELTLPKVSQTVIITRASASVPMEGSIKDFAPLLNKGASLVIYTGVHVIDKVVEEIREAGISDDIPVAVVYKATWWGEQKIILGELRDIAEKVKKEKITRDAVIIVGKIVRPEKYKGLVRSSTYDPKHYTSFRTAEVTDKLKYFELRYMTDKIFGEEYLKALIEAYTTSSKEEKEVIVEKIKKVLNEAKINPKLKEEAEKIIKLHLDF

SEQ ID NO: 2038 - protein, 253 aa, Sulfolobus tokodaii
MAGKIYIIGIGPGDEKNRTLRMLEAIKESDVIIAYTTYADLIKDLTDGKEVITARMKEELYRAKMAIKKALEGHTVALVSSGDPQVYGMAPPTLEMMCANNVNVDFEIIPGVTAALAAAARLGSPLSMDFAVISLSDLLVPAEEILHRVRKAAEGDFVIALYNPINKPLLLKAMEIIAEYRKGETPVGIVKGAYRENEEVIVTTLSEWKKYLDKINMVTMMIIGNSRSYICNGKIITPRGYTSRYDYVNAFNS

SEQ ID NO: 2039 - protein, 263 aa, Synechocystis sp. PCC 6803
MVVRLQNGLMGKVYLVGAGPGDPGLITVKGKTLLENAEAVVYDALVSTAILAMVNPQAELIDAGKRRGRHTKLQSETTQLLAQLAEKHAVVVRLKGGDPFIFGRGGEEMEDLVKAGIEVEVVPGITAGIAAPAYAQIPLTHRAYSSSVTFVTGHESAGKYRPEVNWAAIAKGSETIVIYMGVYSLATILPQLMLAGLGEDTPIALIRWGTCPEQQKLVGTFATILAQIEVENFQAPAIVVIGAVVNYPANLRQQLAPILGGVN

SEQ ID NO: 2040 - protein, 538 aa, Synechocystis sp. PCC 6803
MAEKLPHPQCLGVPGRSPRRESNLIFTMLSTDSRAKVYLMGAGLGPVAYLTQRAIAVLGRANVVIYDALVSQELFDLLPPDCERIFVGKRGGQPSTPQAKINQLLVDHYRRGKQVVRLKSGDPWIFGRIMPELATLVTHHCAYEVVPGISSAIAGAGLASIPLTAKDSGAGFFVMDGHDPHRWPWPALAQLPTLVILMGTKNLSLLVNELVRAGKSPHTPMAVIKNAGRPEQQTWEGTLADMVEKTQGQSLAPAVIVIGDVVSQRIIPALPPLPLTEKTILVTRAADQASQFTELLHQQGATVLAMAALEIVPPKDWQPLDQAIAKLGDFDWLILTSANGVEFFFQRLQHHGLDSRALAGLKLAVVGKKTAQSLEKFGLKPDFIPPDFIADALVEHFPHSPAGLKILFPRVESGGRAQLVQELSQKQALVTEVPSYQSACPGHMPEEVWQSIVNQTVDVITFASSKTVSHFRQLLAQTSQANGYQDWRSLINHCQIASIGPQTSERCLRELGRVDIEATEYTLEGLTGAITNYVYQNP

SEQ ID NO: 2041 - protein, 264 aa, Synechocystis sp. PCC 6803
MDSQNSSFSPAVYFVGAGPGDPDLLTIKGQKLLQAADLVLYADSLVPKQILADVRPQAECVATGNKTLETIVPLMITAVRQGKIVVRLHSGDLTLYSAIHEQMQALGEADIPFVCVPGISAFQAAAAILNCELTVPDLVQTIVLTRISGAASAVPEREELAGLAYHQASLGLYLAARHVEKAQNQLLEHYPGDTPVAVCFRVGWPDEKIWLVPLAEMAALSLRENLIRTTLYLISPALKTDLPRRSRLYHPDHSHLFRPVRPLL

SEQ ID NO: 2042 - protein, 483 aa, Neisseria meningitidis MC58
MNYFPIFANLAGRPVLVVGGGAVAARKISLLLKAGAEVRVAAKHLNAELSALAAENKILWLAEEFRAEHIRTVFLIIAASSDQALNRRVFHLAESCQKPVNVVDDRDHCSFIFPSVIDRNPVQIAVSSSGSAPVLARLLRERLEALLPPSLGDMAEISGRWRDAVKGKLKSVTERRRFWEKQFNGRFAALVKNRQNTLAERELAGQLEQSRQNDQGGSVSLVGAGPGDAGLLTLKGLQEIQQADVVLYDALVSDGILSLVRRDAERIFVGKRARGERTPQEDTNALMVRLAREGRRVVRLKGGDPFVFGRGGEELETLARHQIPFSVVPGITAAVGATAYAGIPLTHRDYAQSAVFVTGHRKADAPDIEWQTLARSRQTLVIYMGALKAALIAERLQQHGRSPDTPAAVISQGTLPAQKTATGTLANLAELAETAPNPALIVIGEVVGLHEKLAWFGENGEGENRVGQTYPALGGLNAGQRAA

SEQ ID NO: 2043 - protein, 486 aa, Neisseria meningitidis Z2491
MNYFPIFANLAGRPVLVVGGGAVAARKISLLLKAGAEVRVAAKHLNAELSALAAENKILWLAEEFRAEHIRTVFLIIAASSDQALNRRVFHLAESCQKPVNVVDDRDHCSFIFPSVIDRNPVQIAVSSSGSAPVLARLLRERLEALLPPSLGDMAEISGRWRDAVKGKLKSVTERRRFWEKQFNGRFAALVKNRQNTLAERELAGQLEQSRQNDQGGSVSLVGAGPGDAGLLTLKGLQEIQQADVVLYDALVSDGILSLVRRDAERIFVGKRARGGRTPQEDTNALMVRLAREGRRVVRLKGGDPFVFGRGGEELETLARHQIPFSVVPGITAAVGATAYAGIPLTHRDYAQSAVFVTGHRKADAPDIEWQTLARSRQTLVIYMGALKAALIAERLQQHGRSPDTPAAVISQGTLPAQKTATGTLANLAELAETAPNPALIVIGEVVGLHEKLAWFGENAKKESNPAEHAYFALDGLGTGQEQQAA

SEQ ID NO: 2044 - protein, 241 aa, Burkholderia fungorum
MTVFFIGAGPGDPELITVKGQRLVRSCPVILYAGSLVPAAVLEGHAAVQVVNTAELDLDQIIALLEAAHLKGQDVARVHSGDPSLYGAIGEQIRRLRELKIPYEIVPGVTATAACAAALGCELTLPDISQTLILTRFASKTSMPEGEQLADLARHRATMAIHLGVRHLARIVDELRPHYGGACPIAVIYRASWPDEEKLTGTLDDIVGKVQSSSIERTALILVGQVLAAEGFADSTLYAKD

SEQ ID NO: 2045 - protein, 243 aa, Bacillus megaterium
MTVGKVYLVGAGPGDPKLITVYGMECIQEADVILYDRLANEQLLNYAKKDAELIFCGKLPGKHGVIQDRIHELLVEKALQGKVVTRLKGGDPFVFGRGAEEAEVLANQGIPYEVVPGITSGIAAPAYAGIPVTHRDYATSFAIVTGHGREEKGKDYLNWSALAQGIDTIAFYMGVGNLPHICKQLMDHGRDKHTPVGLVQWGTTKYQRTVTGTLATIEEIAKKAEIAHPAIVLVGDVVTIREK

SEQ ID NO: 2046 - protein, 238 aa, Bacillus megaterium
MGKVYLVGAGPGDPDLITLKGLKAIQQADVILYDRLVNKDLLEYAKSDADIIYCGKLPNYHTLKQETINNFLVKFAKKGKIVTRLKGGDPFVFGRGGEEAEALVQQGISFEIVPGITSGIAAAAYAGIPVTHREYSASFAFVAGHRKDSKHDAIKWDSLAKGVDTLAIYMGVRNLPYICQQLMKHGKTSATPIALIHWGTCADQRTVTGTLGTIVDIVKEEQIENPSMIIVGEVVNFS

SEQ ID NO: 2047 - protein, 258 aa, Bacillus megaterium
MKLYIIGAGPGDPDLITVKGLKLLQQADVVLYADSLVSQDLIAKSKPGAEVLKTAGMHLEEMVGTMLDRMREGKMVVRVHTGDPAMYGAIMEQMVLLKREGVDIEIVPGVTSVFAAAAAAEAELTIPDLTQTVILTRAEGRTPVPEFEKLTDLAKHKCTIALFLSATLTKKVMKEFINAGWSEDTPVVVVYKATWPDEKIVRTTVKDLDDAMRTNGIRKQAMILAGWALDPHIHDKDYRSKLYDKTFTHGFRKGVKSE

SEQ ID NO: 2048 - protein, 285 aa, Bacillus megaterium
MGSSHHHHHHSSGLVPRGSHMKLYIIGAGPGDPDLITVKGLKLLQQADVVLYADSLVSQDLIAKSKPGAEVLKTAGMHLEEMVGTMLDRMREGKMVVRVHTGDPAMYGAIMEQMVLLKREGVDIEIVPGVTSVFAAAAAAEAELTIPDLTQTVILTRAEGRTPVPEFEKLTDLAKHKCTIALFLSSTLTKKVMKEFINAGWSEDTPVVVVYKATWPDEKIVRTTVKDLDDAMRTNGIRKQAMILAGWALDPATPWLSGLGENPAIRAMFVAHLHQALNMAVEEAA

SEQ ID NO: 2049 - protein, 234 aa, Bacillus megaterium
GSHMKLYIIGAGPGDPDLITVKGLKLLQQADVVLYADSLVSQDLIAKSKPGAEVLKTAGMHLEEMVGTMLDRMREGKMVVRVHTGDPAMYGAIMEQMVLLKREGVDIEIVPGVTSVFAAAAAAEAELTIPDLTQTVILTRAEGRTPVPEFEKLTDLAKHKCTIALFLSSTLTKKVMKEFINAGWSEDTPVVVVYKATWPDEKIVRTTVKDLDDAMRTNGIRKQAMILAGWALDP

SEQ ID NO: 2050 - protein, 251 aa, Clostridium acetobutylicum
MVYFIGAGPGDVDLITVKGRKIVEKADIVIYAGSLVSKEHMDFCKKEVKIYNSAHMTLEEVISVIVKAEVENKITVRLHTGDPSIYGAIKEQMDELGKRNIAYEVVPGVSSFTAAASAIKREFTLPGVSQTVILTRIEGRTPVPENEDIEKLASIGASMAIFLSVGMIEKVVEKLKKGYKRNVPIAIIERASWEDERSIIGTLEDITDKVKKAGITKCAQILVGDFIDSNYSKSLLYDKNFTHMYREGKKK

SEQ ID NO: 2051 - protein, 457 aa, Escherichia coli O157:H7 EDL933
MDHLPIFCQLRDRDCLIVGGGDVAERKARLLLDAGARLTVNALAFIPQFTAWADAGMLTLVEGPFDESLLDTCWLAIAATDDDALNQRVSEAAEARRIFCNVVDAPKAASFIMPSIIDRSPLMVAVSSGGTSPVLARLLREKLESLLPLHLGQVAKYAGQLRGRVKQQFATMGERRRFWEKLFVNDRLAQSLANNDQKAITETTEQLINEPLDHRGEVVLVGAGPGDAGLLTLKGLQQIQQADVVVYDRLVSDDIMNLVRRDADRVFVGKRAGYHCVPQEEINQILLREAQKGKRVVRLKGGDPFIFGRGGEELETLCNAGIPFSVVPGITAASGCSAYSGIPLTHRDYAQSVRLITGHLKTGGELDWENLAAEKQTLVFYMGLNQAATIQQKLIEHGMPGEMPVAIVENGTAVTQRVIDGTLTQLGELAQQMNSPSLIIIGRVVGLRDKLNWFSNH

SEQ ID NO: 2052 - protein, 291 aa, Magnetococcus sp. MC-1
FCVCCFLLWKITMHTVDTYTSMAPGSVILAGSGPGDPNLLTLGVYKALQACDTLVYDALVSPEIMALVPASVEQHFVGKRGGHPSIGQEAINAILVQLAKAGKKVLRLKGGDPFVFGRGGEEAYCLSCEGIPFSIIPGVTAGVAGPAYAGIPITHRDVNANVAFLTGHESPTNAAGETVPTTVDWESVGAAFPVIVLYMGVKNLPTIAKRLIAGGRSGETPVALIRWATTPRQQTMITTLNRAADDISECKIKPPSIVVIGEVVNYRDHLSWFADDTLTRDNCKNKLRDDE

SEQ ID NO: 2053 - protein, 292 aa, Magnetococcus sp. MC-1
MGGGAAVASVVRAITKGVRVMVDADKPTVWFVGAGPGDPDLITVKGRRLLERADAVLYAGSLVAEGALAWCRTECVVADSKGMALQEITDWLSAHAGVGKVVVRLQTGDPSLYGSLVEMVQPLDAVGIASRVVPGVSSAFASAAAAVESLTLPEVTQTVMFTRMEGRTPMPAGEQLADLARHGTTLCIFLSVTLLAQVQQALLAAGWHEEAPLLVVYKASWPGEEQIVRGRLGEDLVARCRAAGIKSQTMIIASPALGARGRVGLKKSKLYDAHFSHGFRRGVADDDQGKQT

SEQ ID NO: 2054 - protein, 464 aa, Lactobacillus reuteri
MNGRVTLLGAGPGNPELLTLIGKRRLNEADIVLYDRLIDPSLLAFTNNEAELIDVGKLPLHHKVKQSKINEMLVDYAKQGKKVVRLKAGDPYVFGRGGEEAQVLQQFGVNFEVIPGITSAIAGLAAAGIPITHRDYASSFHIITGHHKKNGQQLDWENIAHQEGTIVFLMGMAQLPKICQQLVEHGKSSQTPVAIIQWATQWRQKMVIGDLENINELVARHQLSSPALIVVGQVVKLSKQLNINKPLTGVHLLIPFSEHQRLFNSLEDLGATADFYQRALIEPLEVTLPSIDEYDAIIVDDVLAYHQFITLLIKNGIDVRQLIDKKIIASNHRVVQALQKTGILAIKGMPQDIPVKRTIEIGGSKPTYNIGTFLSLYEKKKRSLVLPFDLKEFSAVIFPSTASINDFLASLSEKQLSQVSMLKAFAMGKKVQQAAIQAGFGHVVICPPDVKKTVIQVKEEFMHD

SEQ ID NO: 2055 - protein, 463 aa, Pseudomonas putida KT2440
MDYLPLFHKLQGGRVLVVGGGEIALRKARLLADAGGVLRVVAPDVDGQLAALAREGGGEVLVRGYQAADLVGCRLVIAATDDPGLNAQVSADAQALSLPVNVVDAPALCTVIFPAIVDRSPLVIAVSSGGDAPVLARLIRAKLEAWIPSAYGELAGLAARFRHKVKSLYPDVNQRRGFWETVFQGPIAERQLAGQGAEAERLLQAMVDGAPVQQGGEVYLVGAGPGDPDLLTFRALRLMQQADVVLYDRLVAPAIIDMCRRDAERIYVGKRRADHSVPQDQINRLLVDLARQGKRVLRLKGGDPFIFGRGGEEIEELAEHGIPFQVVPGITAASGCSAYGGIPLTHRDYAQSVRFVTGHLKDGTSNLPWNDLVAPAQTLVFYMGLVGLPTICAELIRHGRAASTPAALVQQGTTRNQRVFTGTLADLPDLVAQHEVHAPTLVIVGEVVQLRDKLAWFEGSQNS

SEQ ID NO: 2056 - protein, 246 aa, Pseudomonas putida KT2440
MNAKVWLVGAGPGDPELLTLKAVRALQQAAVVMVDDLVNPAVLEHCPQARIMTVGKRGGCRSTPQAFIQRLMLRHARQGRCVVRLKGGDPCIFGRGGEEALWLQGHGIEVEVINGITAGLAGATQCGIPLTSRGVSRGVTLVTAHTQDDSELNWAALAQGGTTLVVYMGVARLEQVRQGLLAGGMAPGMPVAMIENASLPQQRECRSDVQGMVEAARAFGLRSPAILVIGEVVGEQQAMGRIAIAG

SEQ ID NO: 2057 - protein, 250 aa, Pseudomonas putida KT2440
MTIYFIGAGPGDPELITVKGQRLIRQCPVIIYAGSLVPAAVLEGHQAETVINSAELHLEQIIAAMRSAHEKGQDVARVHSGDPSLYGAIGEQIRHLQALGIDYQIIPGVTATAASAALLGCELTLPQVAQTVILTRYGDSSPMPPGEQLGDLARHGSTLAIHLGVKHLSRIVAELMPHYGAHCPVAVVHRATWPDQDWVCGNLGDIVERVAAKDFRRTALILVGHVLGDTPFAESALYRAGHAHLYRPGD

SEQ ID NO: 2058 - protein, 249 aa, Listeria innocua
MAEVHFVGAGPGDKELITLKGYQLLKNADVVIYAGSLVNPELLEYCKPDCEIHNSASMNLIEIIDCMEAGVTAGKEVVRLQTGDFSIYGSIREQVEEMKKRSIPFTCTPGVSSFLGAASSFGVEYTVPEVSQSVIITRMAGRTPVPSRESLRSYAAHQTSMVIFLSVQGIRKVVSELIKGGYKPETPAAVIYKATWAEEKKVTGTLQDIAEKVTEAGITKTALIMVGDFLGEEFYYSKLYDKDFKHEYR

SEQ ID NO: 2059 - protein, 493 aa, Listeria monocytogenes EGD-e
MGKVMLIGAGPGDAQLLTVKGLAALQKADVIVYDRLVEPAMLQERKASCKLIYVGKEPLHHPIPQDEIERILVREAATNELVVRLKAGDPYVFGRGGEEGETLHKAGIPFEVIPGITSAIGGLAYAGIPVTHRDFASSFHVITGHLKKGRDPLDWEALARLEGTLVFLMGMTNLPNICANLLEHGQKPETGVAIVQWATRGKQLTVTGNLQTIEQKVAESGISSPALIVVGDVVSLRPQLNFFEEMPLFHTKVLLPRARAGKSMLAEQIRDLGGEVTMYPNIQVLDVAPTKTKEQLSEVSELLFTSKEAVERFFDYLAKLDLDIRSLKNSHLTAIGKQTKEAFSEKGIIPDSFIKRRSTELILEHLPRLQKNVSNLIIGSVVDTTEVNVILADVKAIEMMPLYDMRPVTERPFDLESFEQVCFSSSRSVQNLLDVLTIEEKAILQTKTILSIGRFTSATLASFGMNNFIEAESATPESLIELIQKTKLEGVPQ

SEQ ID NO: 2060 - protein, 249 aa, Listeria monocytogenes EGD-e
MAEVHFVGAGPGDKELITLKGYQLLKEADVVIYAGSLVNPELLEYCKASCEIHNSASMNLIEIIDCMEAGVTAGKEVVRLQTGDFSIYGSIREQVEEMKKRSIPFTCTPGVSSFLGAASSFGVEYTVPEVSQSVIITRMAGRTPVPSRESLRSYAAHQTSMVIFLSVQGIRKVVSELIKGGYKPETPAAVIYKATWAEEKKVTGTLEDIAEKVTEAGITKTALIMVGDFLGEEFYYSKLYDKDFKHEYR

SEQ ID NO: 2061 - protein, 319 aa, Propionibacterium freudenreichii subsp. shermanii
MSDTRSHEPDPAAGNEAAPLRGKVVFVGAGPGAADLISVRGAHVIAQADIIIWASSLVLPTWWPTTSRAPKLVDSAALSLEDFEPLLTRAHDEDLLVARVHTGDPSIYGATAEQRDLCRSLDLAFETVPGISAFSAAAARMNVELTVPEVSQSITITRLEGGRTPMPEGETIASFAAHGATMAVYLSAARNRALQEALIEGGYAPATPCIIGFEVTWPGEMMMRCRLDELSDTMREHKLWKHTIVLVGPALAEGPIATRSHLYHPGFRHEYRDAEPQASKELREQGALGINADSSKAINQHGAGNDTTGAHRSTEGEQA

SEQ ID NO: 2062 - protein, 881 aa, Propionibacterium freudenreichii subsp. shermanii
MIRVHGFLGGISEALRADLATADLVVGGRRQLDDAGVLAAQRVELGALAPAIERLKALDDDKLAVVIASGDPGFFGILRPLRRAGLHCEVVPTITSLQAAFAAVALPWDDAQLVSAHSGGIEAAIRIAGVHPKVGVLTAPGKGLAQLVAALRGRDKHFVVAERLGEADERVRVFDEAAALTVDEDDLASPYVVLILDAAPESAEAVGHSPQLAGDPNAPGPDDPKPASNTRADGSDRAPIIGQVVNTTRARHQADQIDQALGVESKRYDGPASAGLVAAWGECDLIVSHLALGATTRLIAPLLADKHTDPGVVVVDEAGHFAVPLVGGHIGGANELARRIGEALDATAVVSTATDSLGIPALDQLGWAVSGDVAGVTAAIIDGAPVSVLREHLWPMPPLPGNVLVPAPGEPAAPGTVGRVVVTDRAAPTAGGASDDQLPTVVLHPDSLVVGMGCNKGTSVEALRELLDATLAGAGLAKESIAALVSVDAKAGELGLIKLADELGVPYVTYPADQLAEQDAPNPSAVVEREIGSGSVSEASVLARGAELIVEKHKSTEATCAIGRIPARGRLHVVGLGPGSRDLLTPRAANVVRHANLVVGYGPYVRQVRDLVSPHAEVMATKMGTEEQRTRAAIDAARSGLDVAFLSGGDPAIYAMASPTLEMGTDGVDVDIVPGVTAELAASAILGAPLGHDHATISLSDLHTDWDLILKRVRAAAQGDFVITLYNPRSRSRIHQLPDALAIIAEYRGPDTPVASVSQAERPQQHVHMSSLADFQPEWVDMNTIVIVGSDTTTFATSGEGRRIIVTPRDYHWMDGAVSGHKRLNYPHGSRPRVSRAEFKGQAAPQADAAQPQSALPQVTQSRTTAAQPGSDVPTQEDSHD

SEQ ID NO: 2063 - protein, 262 aa, Pyrobaculum aerophilum str. IM2
MAGKVVFIGAGPGDPELLTVKAVKYLSQAEVVVYAGSLVNAEVLKYARQDAEVYNSASMVTEEIVKLMIQKAREGKLVARLKSGDPSIYGALWEEIIPLQLAGIEYEIVPGVTAALAAAAQLRIELTVPKRVQHVVITRASHRVPMRGSLKDVADFILKTGAVAVIYTGVHVIDKVVKELEEGGLSPGTPVAVVYKATWPDQKIIQGTLRDIAEKVKAERIVRDAVIIVGESVQPPEIPRSAVYNPDHAHSYRPRRELREDA

SEQ ID NO: 2064 - protein, 219 aa, Pyrobaculum aerophilum str. IM2
MPIYVVGAGPGDPKLLTLRAVELLREADVVAYGDLVPEELVHTYAPQAEKIKIGHKKSEHDAVVERLVEKAAGWARVVVLKNGDPTLFGRGIQICKKAEARGVPCEVVPGVSAFTAAAALHKIELTDGKTLRHVALFSFPHFDEDILGNIAADTAVIFMMGERLDVVRRAIERNCKKGVEVFVCHAVSMGGSCQQVKIEKLDTFNGYKPVLIIVRRCKS

SEQ ID NO: 2065 - protein, 194 aa, Pyrobaculum aerophilum str. IM2
MENKGAVVLGKIYVVGAGPGDPELITLRGFFLLLSADAVIAGSLVPEELVDIMREKVVYRERLTKERHEEAVATAIRLAKEGKTVVVLKNGDPVLYGRGFEICEEANREGVPCEIVPGVTSLTAAAAKYKIPIGRGGRPILLKTGRSSGDPDVVIFMPENGAEGLVVEDLYGPGERIYQGKPRGRPAIVFQIKG

SEQ ID NO: 2066 - protein, 245 aa, Pyrobaculum aerophilum str. IM2
MRGRLRIVGIGPGDPSVRTFRAVEAIKESEVVVGYETYIGLIKDLLEGKEVIPAKMRQEIFRAEISISKALEGRKVALVSDGDPNVYGMAPLVFELMAKRGVEVDVEVIPGVTAALAAAAKLGAPLGSDFAVINLSDLLTPREAILRRVKAAAEADFVLVFYNPIDSGLTKAALEVVRSVRGDSTPVGLVKNAYRQGEEVRITALGEVDMDWIDMRTTIIVGNSETFTWRGYLITPRGYSNKYRL

SEQ ID NO: 2067 - protein, 257 aa, Agrobacterium tumefaciens str. C58 (Cereon)
MTVHFIGAGPGAADLITVRGRDLIAACPVCLYAGSLVPKALIDYCPPGARIVDTAALSLDEIEAEFVAAAKAGKDVARLHSGDLSIWSAMGEQIRRLERLGLDYTVTPGVPSFAAAAATLQRELTVPEMAQSLVLTRISGRASKMPEGETLKAFGATGATLAIHLAIHAIGKVVEELTPLYGSDCPVAIVVRASWPDERIIRGTLFDIEGKLVAEPVERTALIFVGHGLASTDFRESALYSADYVRRFRSPKEDGAG

SEQ ID NO: 2068 - protein, 249 aa, Rhodococcus erythropolis
MTVYFIGAGPGAADLITVRAQRIIAASPVCLYAGSLVPQELLAECPEGARVIDTARLSLDEIVALLIEADAAGQDVARLHSGDPSIFSAVAEQVRRLESAGVAYQVVPGVPAFTAAAASLGRELTVPGVSQSIVLTRVSTLSTAMPEGEDLRSLGRSGATMVVHLGAHRIDQIAEELIEDYGRDCPAAVVAFASRPDEIVLRGTLATIADQVKAAGVTKTAVVIVGRVLAAEGFPDSYLYSATRERTTH

SEQ ID NO: 2069 - protein, 482 aa, Yersinia pestis KIM
MPCNRLKTEGLPMDYFPIFCQLQHKACLLVGGGEIAERKARLLLDAGALVTVNACEFTPQFHHWADQGQLSLISGEFVPELLADKWLVIAATDQLSVNALVYQSANQQRIFCNVVDDPKRTSFIMPSIIDRSPIMIAVSSGGKAPVLARLLREKLEALLPQHLGQLAGNLRQRVKQHFTVMTERRRFWEKLLTHDRLAQSLANNDHVQADQHVEQLFSAPLTDRGEVVLVGAGPGDAGLLTLKGLQQIQQADVVVYDRLVSDEVMNLVRRDAERIFVGKQSGHHCVPQEQINQILLQQAQSGKRVVRLKGGDPFIFGRGGEELEELAGYGIPFSVVPGITAASGCSAYSGIPLTHRDHAQSVRLVTGHAKKEGQLDWANLAAEKQTLVFYMGLSQAGEIQQQLIQHGMPATTQVALVENGTSRHQRVVSGELSQLALLSQQVSSPSLIIVGSVVSLREKLNWFSSRHHDDQPKVTECVAHVG

SEQ ID NO: 2070 - protein, 244 aa, Methanothermobacter thermautotrophicus str. Delta H
MGAGPGDPELITLKAVRALRGADVVIYAGSLVNRDILEYAPEDAEVHNSAHMNLEEITDIMVEACRAGKTVARVHTGDPSIYGAIKEQIRVLEKNSIPYTIIPGVSSVFAAAATLNTELTLPEVSQTVIITRPAGRTPVPPGEDLEELAVHGSTMCIFLGVHMIEDVAEKLMTHYPPDTPVAVVKRASWPDEEVVRGTLSDIAERVRAAGISKTAMIIVGSVLEPGDFKPSKLYDAGFSHEYRP

SEQ ID NO: 2071 - protein, 296 aa, Magnetospirillum magnetotacticum
MAPSSPIPGSMPRTIPMSCAPRRGKTRGAQRPIVRATMLDLPIDLPEFLPGSVWLAGAGPGDPGLLTLLALHAIKSAEVVIHDALVDGRILALIPAAAEIESMGKRGGEASVRQAEITARMIHLAKAGKRVLRLKGGDPFVFGRGPEEALALAGAGVPFRIVPGITAGIGGLAYAGIPVTAKETNSAVAFVTGHGPDGEMPDAFDWDALARGAPVLVFYMGLKHLERLTSRLMAAGRRPDEAAALVCNAATERQSVLETTLAEAAGAVERAGLKPPALFVVGQVVALRRQLDWWRG

SEQ ID NO: 2072 - protein, 366 aa, Magnetospirillum magnetotacticum
MTLHERRWTPEDLQGAAFAIGAMEDEEDCIAFVAAARAAGAIVNAVDRPHLCDVKFGAIVNRSPLVVGISTEGAAPVFGQTVRARIEAMLPRGFKHWVAAARDWREAVSARFHGFSERRGFWERFTDRAFAEPDRTPTEADLADLLGQAEALPVGGAVTLVGAGPGDAELLTLKALRALRNADVILYDDLVAPEILDYARREARTMLVGKTGHGPSCRQDDINALMVSLAKSGKQVVRLKSGDPLVFGRAGEEIEACEAAGIPCTIVPGVSAAQGAAASLGVSLTHRDAARRLQFVTGHDRRGALPEDLNWGALADRSVTTVVYMPKRTLGALLDRAIAEGLAPETPALVVFNATRAKQATVSGTA

SEQ ID NO: 2073 - protein, 186 aa, Magnetospirillum magnetotacticum
GQRRYDLLLVSGAFGPRRGAPQGRRSLRLRTRRARNALFLARHGIGFEVVPGISAARRAVPPMPGIPLTHRGLATGVRFVTGHLREDRSLDLDWPKLADPDITLAVYMGLQALPEISSRLIAAGLPGDTPAAAVERGTTPRQRRVIGTLTTLLDLTRAAGLQAPTLLIIGRVVSLADELDWFSKHA

SEQ ID NO: 2074 - protein, 253 aa, Magnetospirillum magnetotacticum
MTVHFIGAGPGAPDLITVRGLNLIRRCPVVLYAGSLVPPEIVAEAMTDARVIDTAPLHLDEIIAEMEMAHNLGQQVARVHSGDPSIYGAIAEQMRRLDALGIPYDVTPGVPAFAAAAAALATELTLPDISQTVILTRTSVRSSAMPNNEDLATLGKSGATLAIHLSVSNLAHVVKELSPLYGADCPVVVAFRVGWPDQSFIRGCLSDIRDKVKAAGLTRTALILVGRVLGGAEFTDSRLYAEDHTHVLRPAKG

SEQ ID NO: 2075 - protein, 255 aa, Methanosarcina acetivorans C2A
MSENYGKVYLVGSGPGDPELLTLKARRLIDNAEVIVYDQLPGKSILGSMPKSAEKIDVGKYAGNHTMTQSEINEVLVWKAKEGKMVVRLKGGDPYVFGRGGEEAEVLVAEGIEFEIVPGITSAIAVPAYAGIPVTHRESTSMVTFITGHEDPTKEESGLDWETLAKFDGTIVIFMGVKMLRRNTEELMKYGKDPKTPVAVIERGTRPDQRVTVGSLENIADLAEERKVKAPAITVIGDVVNLHAILGEQIAGKDF

SEQ ID NO: 2076 - protein, 242 aa, Methanosarcina acetivorans C2A
MERKVYFVGAGPGNPKLITVLGRELLEKADLVMYAGSLVNPEVLNYTKGETVDSYGLTLDETTKIIADAVDAGKFVVRLHSGDPSLYGSVIEQMEELKKYDIEVERVAGVSSVFASAAALGTQLTLNGVSDTLIITRPAGKTLEKDLISELSVYNTTMAIFLGTQKIREIMEKVRCPKDTPVAVVFHASWEDEEVITGTVEDIADKVKDAGITRSAMIIIGGVVDPKNYRRSYLYGVAQEPL

SEQ ID NO: 2077 - protein, 254 aa, Leptospira interrogans serovar lai str. 56601
MKVYIIGAGPGDPELITIKGAKLIEACPIVLYTGSLVPKAVIERTKKDAIVLDSSSMTLDEIISVILSAKENDQDVARVHTGDPSIFGSIAEQIRKLDSLNIQYEIVPGVSSFTAAAAVLGKELTLPEVSQTIIITRISGRTPVPERERLEILAQSGATLTLFLSVLHIRAIVERLTPYYGEKCPVAVIQKATWPEQKVVVGTLDDIVSKVKREKISSTAIIFIGPILDCNDFADSRLYSANFSHGFRKAKRNL

SEQ ID NO: 2078 - protein, 252 aa, Methanopyrus kandleri AV19
MSVTKVYFVGAGPGDPELMTLKGVRVLRRADLVIYPGSLIPRESVEEWAPNAELIDSHGKTLEELVETMVEAVEDSRTVVRLVSGDPFVYSSLYEQVRELRRRGVDYEVIPGVSSVNAAAAALGEELTKPGISQTVILTRPAGRTGKPEGESLSELAEHGCTMVIFLGAAYLERIVKSLLGGAYDEDTPAAVVYKASTPEEKVILGTLGDIAEKAREEGIDRTALIIVGDVLKEEGKRSHLYSEEYARRVRR

SEQ ID NO: 2079 - protein, 254 aa, Methanopyrus kandleri AV19
MIVGKLYVVGTGPGDPDLMTVKAQRVLRHVDVVVGYRTYVDLIEEILPEDVEIKRYGMREELDRAREAVRLAADGFEVALVSGGDPGVYGMAGVVLPIAVEEGVEVEVVPGVTAACAASALLGAPLMLDFAAVSLSDHLVPLEEILERVRAALEADFVLVVYNPNSSERRHIFEAFVDVLEEIVEEDRPVGIVRNAYRERQSVEVVRVRELRDLADRIDMRSILIVGSSRTRMVGDWLVTERGYSSRTGRNSSE

SEQ ID NO: 2080 - protein, 257 aa, Fusobacterium nucleatum subsp. nucleatum ATCC 25586
MEKYKEKVYFIGAGPGNPELITIKGQRIVKEADVIIYAGSLVPKEVIDCHKERAEVYNSASMSLDEVIDVTVKAIKDGKKVARVHTGDPAIYGAHREQMDMLDEYGIEYEVIPGVSSFLASAAALKKEFTLPNVSQTVICTRIEGRTAVPEKESLESLAKHRASMAIFLSVHMIDKVVEALATSYPMTTPVAVVQRASWSDQKIVLGTLETIEEKVKEAGINKTAQILVGDFLGNEYEKSKLYDKYFTHEYRKGIKK

SEQ ID NO: 2081 - protein, 401 aa, Xanthomonas campestris pv. campestris str. ATCC 33913
MTALFPLLADLRGRAVLVVGGGRAAESATASLLQAGAVPLVGAPELTPALRGWAQSGQVRWLVGSFDPQWLALPDQPVWLTIAASDVPAVNAALRSVAGAQRLLTHEAAPAAAALPPIASEPPPPASRLTLTPGSVALVGAGPGDPGLLTRNAVRALRQAEVILYDRLVSPQILRLAQRAARCIEVGKSAQGHSTRQEQIHALMLEHARAGRRVVRLKGGDPFVFGRGGEELEFLHAHGIGFQVVPGITAAVACAAYAGIPLTHRDHAQSLRLITAHCKDSLDTLDWHALGQERQTLAFYMGVAGLDSIQQRLLQAGRAADTPFALVENGSRPEQRVVTGTLSQLAATARLHAVRSPALLILGDVAALSQSLHWFGAAPLTGQPAHSPIATPHAPTLAHAA

SEQ ID NO: 2082 - protein, 258 aa, Xanthomonas campestris pv. campestris str. ATCC 33913
MINSSSRCRDVVLLSAGPGDLELLTIKAVKALATAQVLLLDDLANPQIVELAPQARVIRVGKRGGCRSTPQDFICRLMRRYALQGVQVVRVKGGDALLFGRAGEEIAFLRAAGVGVQVINGVSAAFAAAAALEVSLTHRAHCHGITFVTAHTHDHGGPNWGALAASGTTLGIYMGLRRADAVASALLAHLPATTPAAIVQAATRAEQQRRLTTLGELGRTAATLPPDLPTLLLVGGAMAEANAACDDSLGLLLQQAVG

SEQ ID NO: 2083 - protein, 332 aa, Xanthomonas campestris pv. campestris str. ATCC 33913
MPLFPLFANLQARAVLVIGGGEVATRKVLALLKAGAHIRLYAHALSPELEVLMQAGRFEQLRGSFDAAWIDDVWLVVAATDDTALNQQVAAAAGARQRLVNVVDDAELSTYQVPAIVDRDPLVIAISSAGAAPMLARRLRERLERELDASVGTFAGLFAHYRERIRSQFPDMNRRRRWFDRVIDGPVPLLLQGGDTAAADAAFRQALEDADAVPARGSVQLVGTGPGDPGLLTLKALRAMNLADVLLVAHDVPEAVVELARRDASRRVLPADVAEQQALLLQLAGDGLHVVALRGGAGFEAAHAQRIADALRVQGLACDQVPGVAAEPPSGD

SEQ ID NO: 2084 - protein, 423 aa, Xanthomonas axonopodis pv. citri str. 306
MKSFPTAISRRYGLALPQRCCRTVTPAFPLLADLRGRAVLVVGGGADAERATGQLLQAGALPLVGAPELTAQLRHWAQAGRLRWLAGRFDPAWLAQSDQPLWLTIAASESAALNDALRQAASAHRLLTHAAAPAASATVPARSTGPRSAIGTLAPGNVSLVGAGPGDPGLLTRHALRALRQAEVVLHDRLVSPQILRLARHGAHLIEVGKSAQGHSTRQEQIHGLMLEHARAGRRVVRLKGGDPFVFGRGGEELEFLRAHGIGFQVIPGITAAIACAAYAGIPLTHRDHAQSLRLITAHCKDSLDTLDWQALGQERQTLAFYMGVAGLDAIQQRLLQAGRAPTTPFALVENGSRPQQRVITGTLASLAASARQHAVTAPALLILGEVTALAQTLHWFGSAPLSASPPHSPGATPHTPTLAHAA

SEQ ID NO: 2085 - protein, 512 aa, Xanthomonas axonopodis pv. citri str. 306
MWWMVWRPRGCAHRAGGAGPFCAGKQQALQDRKQIDRAKGLLMEKRGLSEADAYAALRQQAMKQGVKLTEVARRIVAMAEYSRGWVVLHAACERAPDAMWMDRLVAALHLPAGADVLEYCDLRRGPMRRVGWRMHDGHRHIDGVLLTAAQPSDANRSLLATALAGKPWRGARLSVFTHTHSAWRSDRVHLHACLGRSDARRHRRRRHVAQLKQRGGCRSTPQEFICRLMRRYALQGRRVVRVKGDDALLFGHAGEEIAFLRRAGVGVQVIDGVSAAFAAVAALDVSLTHRSHCHGITFVTAHTHDHGEPNWGALAASGTTLGIYMGLRRADALAAALLAGTPAAIVQAATRPEQQRRLTALGDLGTTAAALPPGLPTLLLVGDALSEAAAACDDRDGPMAVQAVGWGQHTTDDAAAGQGHSGSRFPCDMMRAHPEDSLPSLWASRIRAWTACMRNGYGLVSTSAGGTGLHTTAKSFAGCIDVATEGASVRVQIRAQLCVRALPVSTCGCAAV

SEQ ID NO: 2086 - protein, 258 aa, Bacillus anthracis str. A2012
MGKVYIVGAGPGDPDLITVKGLKCIEKADVILYDRLVNKELLSYAKPEADLIYCGKLPNYHTMKQETINTFLIKYAKKGKIVTRLKGGDPFVFGRGGEEAEALAKQGVPFEIVPGISAGIAAPAYAGIPVTHRDASASFAIVTGHRKEDAAEEVKWGNLAKGVETLAVYMGVSNLPYICEQLMKHGKDKSTPAAIIERGTTSMQRTVVGTLGTIVDVAKKEQIQNPSMIVIGEVVRFREKIHWFEKQTESTYQVSGVL

SEQ ID NO: 2087 - protein, 474 aa, Bacillus anthracis str. A2012
MNGYVYLVGAGPGDEGLITKKAIECLKRADIVLYDRLLNPFFLSYTKQTCELMYCGKMPKNHIMRQEMINAHLLQFAQEGKIVVRLKGGDPSIFGRVGEEAETLAAANIPYEIVPGITSSTAASSYAGIPLTHRNYSNSVTLLTGHAKGSLTDHGKYNSSHNSDTIAYYMGIKNLPTICKNLRQAGKKEDTPVAVIEWGTTGKQRVVTGTLSTIVSIVKNENISNPSMTIVGDVVSLRDQIAWKEHKPLHGKKVLFTSATNKTSVMKQKLQEAGAEIYQIPTFKKEEYTLTLEQIIEIFNVNRLVFCSAESVEILMQSCSKYKKDIRSLQAELQHMNVATQEKLMQYGLLSKEAKFSSDTTVYLGRNINRIAFIQEKIGAGSYMMTHKYTIDHRFDEVHSRMLSEFLWDSIVFEGRASIDTFLAEVKRLGFLDIVTLPFSYTDVPTLRYANKVGFHNIDHQLQETLMQKDMVRQ

SEQ ID NO: 2088 - protein, 255 aa, Methanosarcina mazei Goe1
MSGNYGKVYLVGSGPGDPELLTLKARRLIDSAEVIIYDQLPGKTILSSMPETAEKIDVGKYAGNHTMTQSEINDVLVRKAKEGKMVVRLKGGDPYVFGRGGEEAEVLVAEGIEFEVVPGITSAIAVPAYAGIPVTHRESTSMVTFITGHEDPTKEESGLDWKTLAKFNGTIVIFMGVKMLRRNAEELIKHGKDPETPVAVIERGTRPDQRVTVGTLENIADLAEERKVKAPAITVVGEVVNLHEILGEQLTGAEF

SEQ ID NO: 2089 - protein, 242 aa, Methanosarcina mazei Goe1
MERKVYFVGAGPGNPKLITVLGREMLEKADLVMYAGSLVNPEVLNYTKGETVDSYGLTLDETTKIIADAVDAGKFVVRLHSGDPSLYGSVIEQMEELRKYDIEVERVAGVSSVFASAAALGTQLTLNGVSDTLIITRPAGKTLEKDLIPELSAYNTTMAIFLGTQKIREIMDKVRCPKDTPVAVVFHASWEDEEVIAGTVEDIADKVKDAGITRSAMIIIGGVVDPKNYRRSYLYGVAQEPL

SEQ ID NO: 2090 - protein, 300 aa, Chlorobium tepidum TLS
MVKMSQILTRKVLHLFFCQALYFLGNNESRKVIHQMAEHGENRVLIVGAGPGDPELLTVRGAAAIREADVILYDCGTVEPVLALASERAAIVRVDRSPYETGEGRREQTPMIVVIREYRDRGLRVVRLKTGDPSLFGGEVDEGDVLTRLGIPWAAIPGICAGAAAASAYALPISRKFESDAVLNLIAAAITDDFALIRDAAHLLGHGATVVLYMATANLPGILRTFREAGVPDAMPVVAVSKAGWPDEAFARTTLGELTAAGCSIALPEPVVYHIGRYVRVRNVPAGSQEFFVKAPENAG

SEQ ID NO: 2091 - protein, 624 aa, Chlorobium tepidum TLS
MHERIAIIAITETGIALARSLKSLLVADGFAGCGLFSSRVAEGVEPIESVPAFVRHSFGSFDAFLFIGSLGICVRSIAPVLQGKLRDPAVINCDESGRFVQSVLSGHAGGANALAGRVARLLGAQAVLSTSSDVQGLWPLDILGREEGWGVEFASPVAGESMTTAMAAFVNHEPTTLLLDVRDSLTDELERTAPPFVTIAYRYEEVDFSTCSLLLAVTPRIIEASVQTVFYRPKVLCVGVGSERGIDPERFVSSISEQFASNGFSMRSIRSVGSVDFKLNEEAFIAFAEACGTTLTGFTPEQLESVGPVPNPSDVVFRKTGVHSVSEASAALLSGENRWLIEKQKISLDGIPEGEPRHYTFAVSLLRGAERRGRIAIVGAGPGDPELVTVKGKRYLEQADLILYAGSLVPEKLTHYAKPGALVRSSASLSLEEQFALMERFYRQGKFVVRLHTGDPSIYGAIQEQMAFFDAEGFEYEIVPGVSSFQAAAAVLQSQFTVPEKVQTIILTRGSGRTPVPDKERLSELARARATMCIYLSAEWSDQVQSELLEHYAPDTPVAVCYRLTWDDQQVWRGRLDGLASLVRESGKTRTVLLVVGEAIGARGGRSKLYDPSFTHGFREGHGA

SEQ ID NO: 2092 - protein, 251 aa, Clostridium perfringens str. 13
MLYFIGAGPGAVDLITVRGRNLLEKADVVIYAGSLVSKEHLDVCKEGVKIYNSASMTLEEVVEVIKENDGEDKVIVRLHTGDPSIYGAIKEQMDELDKFNIQYEVVPGVSSFTAAASAIKKEFTLPSVTQTVILTRVEGRTPVPETEDLEKLAGIGASMALFLSISMIDKVVEKLKRGYGREDVPIAVISRATWDDQEIIIGTLENISEKVKEAGINKCAQILVGDFIDCNYEKSLLYDKHFTHMFRKGIE

SEQ ID NO: 2093 - protein, 255 aa, Thermosynechococcus elongatus BP-1
MSSSQLIGKVYLVGAGPGDAGLLTVRAKNLLEWADVVLYDALISPEILNLINPKAEKIHVGKRRGNHTLSQPEICRLLIELAQRHAVIVRLKGGDPFVFGRGGEECLALIEAGITVEVVPGITSGVAAPAYAHIPLTHRDFSSSVVFVTGHEAAGRYQPRVNWPALATAVDTIVIYMGLHHLGEIVPQLLAGGRSPQTPLAFIESGTTPQQRVVVTTLERAIATYDEAQIQTPALIVIGEVIHLRSQLGGSLHQA

SEQ ID NO: 2094 - protein, 261 aa, Thermosynechococcus elongatus BP-1
MISRNTAAGVYFVGAGPGDPELLTLKGQRLLQEADVILYADSLVPTGILQFAPPSTLCIPTAALTLEEIIPLMVEAVQAGKKVVRLQSGDPSLYSAIHEQICRLAEAGIAVEVVPGISAYQLAAARLKVELTLPELVQTIILTRASGRTRVPPTEELASLAAHKASLCLYLSANCIQRAQRDLLQHYPPETLVAVGYRLGWPDEQLWLVPLRDIAAFSQQQRLTRTTLYLISPALAVQQQGSDAWRSCLYSPEHHHLFRPH

SEQ ID NO: 2095 - protein, 457 aa, Shigella flexneri 2a str. 301
MDHLPIFCQLRDRDCLIVGGGDVAERKARLLLDAGARLTVNALAFIPQFTAWADAGMLTLVEGPFDESLLDTCWLAIAATDDDTLNQRVSEAAEARRIFCNVVDAPKAASFIMPSIIDRSPLMVAVSSGGTSPVLARLLREKLESLLPLHLGQVAKYAGQLRGRVKQQFATMSERRRFWEKLFVNDRLAQSLANNDQKAITETTEQLINEPLDHRGEVVLVGAGPGDAGLLTLKGLQQIQQADVVVYDRLVSDDIMNLVRRDADRVFVGKRAGYHCVPQEEINQILLREAQKGKRVVRLKGGDPFIFGRGGEELETLCNAGIPFSVVPGITAASGCSAYSGIPLTHRDYAQSVRLITGHLKTGGELDWENLAAEKQTLVFYMGLNQAATIQQKLIEHGMPGEMPVAIVENGTAVTQRVIDGTLTQLGELAQQMNSPSLIIIGRVVGLRDKLNWFSNH

SEQ ID NO: 2096 - protein, 457 aa, Escherichia coli CFT073
MDHLPIFCQLRDRDCLIVGGGDVAERKARLLLDAGARLTVNALAFIPQFTAWADAGMLTLVEGPFDESLLDTCWLAIAATDDDALNQRVSEAAEARRIFCNVVDAPKAASFIMPSIIDRSPLMVAVSSGGTSPVLARLLREKLESLLPLHLGQVAKYAGQLRGRVKQQFATMGERRRFWEKLFVNDRLAQSLANNDQKAITETTEQLINEPLDHRGEVVLVGAGPGDAGLLTLKGLQQIQQADVVVYDRLVSDDIMNLVRRDADRVFVGKRAGYHCVPQEEINQILLREAQKGKRVVRLKGGDPFIFGRGGEELETLCNAGIPFSVVPGITAASGCSAYSGIPLTHRDYAQSVRLITGHLKTGGELDWENLAAEKQTLVFYMGLNQAATIQQKLIEYGMPGEMPVAIVENGTAVTQRVIDGTLTQLGELAQQMNSPSLIIIGRVVGLRDKLNWFSNH

SEQ ID NO: 2097 - protein, 563 aa, Thermobifida fusca
MNPQTETPATGAEHAAKPAAGHIALVGAGPGDAELLTLRGAALLGQADVVLTFREPPHLARHRKGLLSHCRPDTVIVDPDEYGDSGDAFALSKAAQGLRVVRLYPGDPLLSGQGAALAEAASDAGIEFEIVPGLSSITAVPAYAGTELLPHGTNEVRILDAADTDVDWVNAAQSKATLVVLHPDAPTEDDPDAKGPGLDRICKTLIAGGRPDTTPVTVTRMGTTTYQTTITSTLARLAADLKAADAKGHTIPRPSLLIVGEGVAQRQKKLSWFETKPLFGWRVLVPRTRQQAPALSEQLRSYGAVPEEVPTISVEPPRTPQQMERAVRGLVTGRYQWVAFTSVNAVKAIRERIEDYGLDARAFAGVKVAAVGEQTAAALRAFGIHPDLQPPEDKQSAAGLVEVWPPYDPDIDPIERVLLPRADIATEVLSEGLVNLGWEVDDVTAYRTVRAAPPPAPIREAIKGGGFDAVMFTSSSTVRNLVGIAGKPHATTVIAVIGPETAKTAEEFGLRVDVRAPKASVAALAEALAEFGAAQRQAAIEAGKPVLRPSQKRRGRRRKNLMI

SEQ ID NO: 2098 - protein, 328 aa, Thermobifida fusca
MLGGPAARGPHRSARRDFGDGSSLGGTVAAPRRRVDTPLGGTGCPPGVVHGMASGPSGCPVGRDQNRSGKRDMTVHFVGAGPGAADLLTLRAVELLRTTPVCLYAGTYIDAEILAHCPDDAELVDTQHLDLDQIIAHLVDADRRGLDAVRLCSGDPSLYSALTEQTRRLDEAGVAWDVTPGVPAYAAAAALLGTELTVPEVAQTVVLTRTRARSTKMPESEALENVAKIHGTLVLHLAIRHIRVLAEQLVPEYGADCPVAVVAHATRPNELVLRGTLTDIADHVEAAGLRHTAVILVGRALASREWDVSEIVCSHLYDPARERNREAS

SEQ ID NO: 2099 - protein, 458 aa, Microbulbifer degradans 2-40
MDYLPLFFDLKAKPCLIVGGGTIATRKARLLHKAGAKLHVVAPKVSEELEKLVAASNGKVFKQEYDQTFLDDVILVISATDIDAVNSVVAADCHAIKLPVNVVDSPALCSVIMPAIIDRSPLIIGVTSGGEAPVLARRVRSMLESSIPAAYGQLAQLASKFRQRAKDVFENGDLRRRFWENILNGPIAEKVLGGNLAAAEQLIEAQLDSASVEKTGEVYLVGAGPGDPDLLTFKALRLMQQAEVVLYDRLVSEPILEMTRRDAERIYVGKKRAEHAVPQQKINQMLLELAQQGKRVLRLKGGDPFIFGRGGEEIDLLAEHKIPFQVVPGITAASGCASYSGIPLTHRDYSQSVRFITGHLQEGKENFRWSEFVDKQQTLVFYMGLAGLETICSKLIEYGKSPSTPAALIERGTLPEQRVHVSDLAGLAAKIEGLDVHAPTLLIIGDVVRCHEKLNWYK

SEQ ID NO: 2100 - protein, 262 aa, Microbulbifer degradans 2-40
MSNSKPGKVWLVGAGPGDPDLLTVKALRVIQNADLVLFDNLVSQEIRALFPKSVPAFYVGKCKDNHSIAQKDLNSLLVKKAAKGLNVVRIKGGDPFVFGRGGEELLTLIKAGVDAEVVPGITSASGCTTAAGIPLTHRGLAQGCTFVTAHAETELSVDWNALAQINHTLVFYMGVSRAEMIASNLLKAGLSAATPVAIIENGCRENQREVIGQIKDLVSLVANNNVQSPALIVVGEVVSLANDLNPELRAAVSAETLNQHVA

SEQ ID NO: 2101 - protein, 252 aa, Trichodesmium erythraeum IMS101
MNQLKFVGKVYLVGAGPGDPGLITLKGKVLLKQADVVIYDALVSASILEMINPNAEKFNAGKRRDRHSLEQTQTTQLLIEKAKTHAVVVRLKGGDPFVFGRGGEEMEDLMQVGIAVEVIPGVTSGIAAPAYAGIPLTHRNYSSSVTFVTGHEAAGKYRPEVNWEAVAQGAETIVIYMGVHNLQNIIKKLIAAGRDPETPIALIQWGTYPKQKELIGTLNNIVGQIESTGFEAPAITVIGNVVNLHQILGNRE

SEQ ID NO: 2102 - protein, 283 aa, Trichodesmium erythraeum IMS101
MHLPFHLSEDKDSYPEKLMNDTKSLTPAVYILGAGPGAPDLLTVKADKILTTADVILYADSLVPKQMLRNVRHDAEIITTANKTLEEILPLMIDRVRKGLSVVRLHSGDPSLYGAVYEQMQLLAEAGIDFEIVPGISAFQDAAAKLKVELTVPGLVQTIILTRISGKATAVPSREELGSLAAHGASLCLYLSARYVWEAQEKLMEHYSADIPVAICYRLGWPDEKIWVVPLEKMALMTEEKQLVRTTLYVISPALEKLEKVGRSGLYNPEHNHLFRGKHNRKN

SEQ ID NO: 2103 - protein, 282 aa, Brucella suis 1330
MIAKSKVALPVMEPGHVWLVGAGPGDPGLLTLHAVNALQQADVIVYDALVDDSCLSLKNATATLEYAGKRGGKPSPRQRDISLRLVELARQGKKVLRLKGGDPFVFGRGAEEALTLVEYHVPFRIVPGVTAGVGGLAYAGIAATHRDINQAVTFLTGHDATGAMPDGVDWAGIARSSPVIVMYMAMKHIGLIAGRLIEAGRSPDEPVAFVCNASLPDQTVLETTLGRAAIEVEAAGLQPPAIVVVGEVVRLRAGLDWIGAMAGKSLVSDPLGKRTQQGVQSA

SEQ ID NO: 2104 - protein, 477 aa, Brucella suis 1330
MPVSLSQTRLLADFPAFFRVSGEVVAVVGGGEEALNKARLVAQTAARLRIIAEKAEPHLAAFIESHGVEHIASPFAPELLDGAKLVFVATGDEAGDRAAAAAARARKIPVNVVDRPALCDFLTPAIVNRAPVTIAIGSQGTAPVLAQMVRARIDAAFSPRLGELAHFAESWRPLVERALPKGLARRGFWRTFFSGKVARAVESGDHEAAHRAAAELIGQGQDASGHVWLVGAGPGAEDLLTLRAQRVLMEADVIVHDALVPEGVIAMGRRDAERLPVGKRKGCHSKSQDEINRLLVKLGQEGKRVVRLKSGDPLVFGRAGEEMAALRAAGIGFEVVPGITSAFAAAADMELPLTLRGVASSLVFTTGHDMTGDVLPGWAKLAVSGATIAVYMGSTVAASVASRLIAAGLHEDTAVAVVENASRSNKRMFHGTLKDLPQLENRKELSGPVMVVIGDAVAGAAIGRAQALSLKPVPVAA

SEQ ID NO: 2105 - protein, 252 aa, Brucella suis 1330
MTVHFIGAGPGAADLITVRGLRLIENCPVCIYAGSLVPKEVVAGAPKNARLIDSSSLTLDEIIAEMEVAHAQGLDVARVHSGDPSIYGAMAEQMRRLDALGIAYDVTPGVPAFAAAAAAMKQELTIPELNQTIILTRTSMKSSAMSEGEDLATLGKSGATLVIHLSIRNLAKIESDLTPLYGADCPVVVAYRVGWPDEQILRGTLCDIAGKIEASGLRRTAMIFVGRGLDPKNFRDSALYHEAHSHAARSKV

SEQ ID NO: 2106 - protein, 464 aa, Pseudomonas syringae pv. syringae B728a
MEFLPLFHNLRGSRVLVVGGGEIALRKSRLIADAGAVLRVVAPEIEAQLSELVVQSGGEMILRGYSECDLDGCVLIIAATDDEPLNAQVSRDARLRCVPVNVVDAPALCTVIFPAIVDRSPLVIAVSSGGDAPVLARLIRAKLETWIPSSYGQLAGLAARFRNQVKGLFPNVQQRRAFWEEVFQGAIADRQLAGQGAEAERMLIAKIAGEPPPETGEVYLVGAGPGDPDLLTFRALRLMQQADVVLYDRLVAPTILDLCRRDAERVYVGKRRAEHAVPQEQINQQLVALAKQGKRVVRLKGGDPFIFGRGGEEIEELAAHGIPFQVVPGITAASGCAAYAGIPLTHRDHAQSVRFITGHLKNGTTDLPWSDLVAPAQTLVFYMGLIGLPVICEQLIRHGRSADTPAALVEQGTTVNQRVFTGTLANLPQLVAEHDVHAPTLVIIGEVVKLREKLAWFEGAQATL

SEQ ID NO: 2107 - protein, 253 aa, Pseudomonas syringae pv. syringae B728a
MSAKVWLVGAGPGDPELLTLKAVRALHEADVVLIDDLVNPAVLEHCPGARVIAVGKRGGCRSTPQAFIHRLMLRYVRQGKCVVRLKGGDPCIFGRGGEEAQWLQEHGVAVELVNGITAGLAGATQCGISLTLRGISRGVTLVTAHTQDDSTLNWQALAQGGTTLVVYMGVAKLAEIRESLLAGGMSGEMPVAMIENASLPWQRECRSTLNAMQQDAAAFQLKSPAILVIGAVAAYSNELLNQTLMDHAQLNAS

SEQ ID NO: 2108 - protein, 332 aa, Pseudomonas syringae pv. syringae B728a
MLQRCATGGLGTAPHAPFCAGVPEHWLSWRRRRLGSGAGGATGRRYRHAADRTAEKRAGHICLGNQPCAQRIISPRSFTPENSLTVYFIGAGPGDPELITVKGQRLIRSCPVIIYAGSLVPLAVLEGHQAVQVTNSAELHLEQIIDLIKRAHAQGQDVARVHSGDPSLYGAIGEQIRHLRELNIPFEIIPGVTATAACAALLGVELTLPDVSQSVILTRYADKTSMPSGEELASLASHRATMAIHLGVNNLQRIVEELMPHYGADCPIAVVHRASWPDQDWAVGTLADIEEKVQAKGFRRTALILVGRVLADDTFSESSLYRAGHAHLFRPV

SEQ ID NO: 2109 - protein, 464 aa, Pseudomonas fluorescens PfO-1
MKYLPLFHNLRGSRVLVVGGGEIALRKSRLLADAGALLRVVAPEIEAQLRELVAASGGECLLRGYAEADLDGCGLIIAATDDEALNAHVSADAHRRCVPVNVVDAPALCSVIFPAIVDRSPLIIAVSSGGDAPVLARLIRAKIETWIPSTYGHLAGLAARFRDQVKGLFPDVQQRRGFWEDVFQGPIADRQLAGQGAEAERLLQAKIDGEAMVTTGEVYLVGAGPGDPDLLTFRALRLMQQADVVLYDRLVAPAILELCRRDAERVYVGKRRADHAVPQDQINQQLVDLAKAGKRVVRLKGGDPFIFGRGGEEIEELAAHGIPFQVVPGITAASGCAAYAGIPLTHRDYAQSVRFVTGHLKDGSTDLPWSDLVAPAQTLVFYMGLVGLPIICEQLIKHGRAAETPAALIQQGTTVNQRVFTGTLADLPRLVAEHEVHAPTLVIVGEVVQLREKLAWFEGAQGQI

SEQ ID NO: 2110 - protein, 250 aa, Pseudomonas fluorescens PfO-1
MNAKVWLVGAGPGDPELLTLKAVRALREAEVVLIDDLVNEAVLEHCPAARIIAVGKRGGCRSTPQAFIHRLMLRYARQGKCVVRLKGGDPCIFGRGGEEAQWLRERGVEVELVNGITAGLAGATQCDIPLTLRGVARGVTLVTAHTQDDSHLNWRALAQGGTTLVIYMGVAKLGEIREQLLAGGMAADTPVAMIENASLPEQRECRSDLTAMEDDALGFQLKSPAILVIGAVAAAATQVGSIGWAADRLA

SEQ ID NO: 2111 - protein, 261 aa, Pseudomonas fluorescens PfO-1
MKHRPAPFLQDPTMTVYFIGAGPGDPELITVKGQRLIRRCPVIIYAGSLVPTAVLEGHCAETVVNSAELHLEQIIDLIKTAHAKGQDVARVHSGDPSLYGAIGEQIRYLRELDIPFEIIPGVTATAACAALLGAELTLPDISQSVILTRYADKTAMPAGEELDNLAQHGATMAIHLGVNHLEKIVAELLPHYGADCPIAVIHRATWPDQDWVTGTLEDIAEKVAAKGFRRTALILVGRVLGSDHFSESSLYRAGHAHLYRP

SEQ ID NO: 2112 - protein, 270 aa, Desulfovibrio desulfuricans G20
MENSVTANPADPRVWFIGAGPGDPELITVKGQRIISQADLVLYAGSLVPPQVVACARPDAVVADSAPMNLQQTHAMIRETVHSGGLVARVHTGDPALYGAIREQMALLALENIACGVVPGVTSAFAAAAAAGVSLTLPEITQSVIITRVQGRTPVPEAEQLRHLARRGTAMAIYLSAALPETITEELRAGGLPESTRIIAAYRVGWPDQRLVECTLATLTDTVQQEKLNRQTVFLVLPGNSMHSGIQHPDAASPPCSRLYDADFSHGWRK

SEQ ID NO: 2113 - protein, 465 aa, Pseudomonas aeruginosa PAO1
MDFLPLFHSLQGRLALVVGGGEVALRKARLLADAGARLRVVAPQIHIELRHLVEQGGGELLERDYQDGDQPGCALIIAATDDEPLNAEVSRAANARGIPVNVVDAPALCSVIFPAIVDRSPLVVAVSSGGDAPVLARLIRAKLETWIPSTYGQLAGLASRFRHRVKELLPDLQQRRVFWENLFQGEIAERVLAGRPAEAERLLEEHLAGGLAHIATGEVYLVGAGPGDPDLLTFRALRLMQQADVVLYDRLVAPSILELCRRDAERLYVGKRRAEHAVPQDRINRLLVELASQGKRVLRLKGGDPFIFGRGGEEIDELAAHGIPFQVVPGITAASGCAAYAGIPLTHRDHAQSVRFVTGHLKDGTTDLPWQDLVAPGQTLVFYMGLVGLPVICEQLVAHGRSAQTPAALIQQGTTAQQRVFTGTLENLPQLVAEHEVHAPTLVIVGEVVQLRDKLAWFEGAREDA

SEQ ID NO: 2114 - protein, 279 aa, Pseudomonas aeruginosa PAO1
MNTTVIPPSLLDVDFPAGSVALVGAGPGDPGLLTLRAWALLQQAEVVVYDRLVARELIALLPESCQRIYVGKRCGHHSLPQEEINELLVRLARQQRRVVRLKGGDPFIFGRGAEELERLLEAGVDCQVVPGVTAASGCSTYAGIPLTHRDLAQSCTFVTGHLQNDGRLDLDWAGLARGKQTLVFYMGLGNLAEIAARLVEHGLASDTPAALVSQGTQAGQQVTRGALAELPALARRYQLKPPTLIVVGQVVALFAERAMAHPSYLGAGSPVSREAVACA

SEQ ID NO: 2115 - protein, 250 aa, Pseudomonas aeruginosa PAO1
MTVYFIGAGPGDPDLITVKGQRLIRQCPVILYAGSLVPQALLEGHQAGQVVNTAELDLEQIVELLAQAHRRGLDVARVHSGDPSLYGAIGEQIRHLRELGIPYEIVPGVTATAACAALLGCELTLPEVSQTLILTRYAARTKMPEGESLGDLARHRATLAIHLGVAHLAKIVEELLPHYGADCPVAVIHRASWPDQEQVRGTLGDILPKVAARNFRRTALILVGEVLAAEGFADSSLYRAEHRHLYRPGE

SEQ ID NO: 2116 - protein, 253 aa, Fusobacterium nucleatum subsp. vincentii ATCC 49256
MEKVYFIGAGPGDPELITIKGQRIVKEADVIIYAGSLVPKEVIDCHKEGAEIYNSASMSLDEVIDVTVKAIKENKKVARVHTGDPAIYGAHREQMDMLDEHGIEYEVIPGVSSFLASAAALKKEFTLPNVSQTVICTRIEGRTAVPERESLKSLAKHRASMAIFLSVQMIDKVVEALATSYPMTTPVAVVQKASWADQKIVLGTLETIEQKVKEAEINKTAQILVGDFLGNEYEKSKLYDKYFSHEYRKGIKK

SEQ ID NO: 2117 - protein, 276 aa, Shewanella oneidensis MR-1
MEILSLPGQSAKGKVWLVGAGPGDVELLTLKAWRILKSADAVLYDALVSQDILDLIPKDAEKIAVGKRAGKHSAAQDDINQLLVTKAYTRKNVVRLKGGDPFIFGRGGEELQTLVDAGVEFEVVPGITAASGTAAYTGIPLTHRDYAQGVTFITGHCQLESRPMDWQGYANPNNTLVVYMGILNAGVIRAGLINAGRSPQTPVAIVSKATTQSQQRFIGQLDSLEQLAADPKLQMPALMIIGEVVGLSETLNWFQPKAEGSQSLEALNAPKVAVKI

SEQ ID NO: 2118 - protein, 256 aa, Clostridium tetani E88
MSKIASKVYFIGAGPGDVDLITVKGRDILSVADVVIYAGSLVSKEHLDFCKEDVEKHNSASMTLEDVIEVMKKAKDEGKSVVRLHTGDPSMYGAIKEQMDELDKFNIEYEVVPGVSSCFAAAAAIKREFTLPNVTQTLILTRVEGRTPVPEGEDLEKLASVGASMAIFLSISMIEKVVEKLRKGYGKNVPIAVIERATWEDQRVIIGTLDDIAGKVKEANITKCAQILVGDFIDCEYDKSLLYDKSFSHMFRKAEK

SEQ ID NO: 2119 - protein, 470 aa, Yersinia pestis CO92
MDYFPIFCQLQHKACLLVGGGEIAERKARLLLDAGALVTVNACEFTPQFHHWADQGQLSLISGEFVPELLADKWLVIAATDQLSVNALVYQSANQQRIFCNVVDDPKRTSFIMPSIIDRSPIMIAVSSGGKAPVLARLLREKLEALLPQHLGQLAGNLRQRVKQHFTVMTERRRFWEKLLTHDRLAQSLANNDHVQADQHVEQLFSAPLTDRGEVVLVGAGPGDAGLLTLKGLQQIQQADVVVYDRLVSDEVMNLVRRDAERIFVGKQSGHHCVPQEQINQILLQQAQSGKRVVRLKGGDPFIFGRGGEELEELAGYGIPFSVVPGITAASGCSAYSGIPLTHRDHAQSVRLVTGHAKKEGQLDWANLAAEKQTLVFYMGLSQAGEIQQQLIQHGMPATTQVALVENGTSRHQRVVSGELSQLALLSQQVSSPSLIIVGSVVSLREKLNWFSSRHHDDQPKVTECVAHVG

SEQ ID NO: 2120 - protein, 472 aa, Yersinia pestis CO92
MDYLPLFADLKQRPVLIVGGGEVAARKIELLHRAGAQVWVVAQTLSSELEQQYQDGRIHWLAQDFLPEQLDNVFLVIAATNDTVLNAAVFAAADQRCILANVVDDQPLCSFIFPSIVDRSPLVVAISSSGQAPVLARILREKLEALLPTRLSDMAAIAGRWRGRVKQHMASMGERRRFWEHAFSGRFASLISRGQLTEAENELQLSLEGQHRALGEVALVGAGPGDAGLLTLRGLQVMQQADVVLYDHLVSPEVLDLVRRDAERICVGKRAGAHSVTQEATNQLLVTLAQQGKRVVRLKGGDPFIFGRGGEELQVVAQAGIPFQVVPGVTAAAGATAYAGIPLTHRDHAQSVTFITGHCRPDGDDLDWQTLARGRQTLAIYMGTVKAAAISQQLIAHGRSSTTPVAVIGRGTRVDQQVLIGTLAQLESLAQQAPTPALLVIGEVVNLHHQIAWFGQQPQTESAISPSVVNLA

SEQ ID NO: 2121 - protein, 252 aa, Vibrio vulnificus CMCP6
MTLTSLSSLQNQGFVSLVGAGPGDPDLLTVKGYRVIQQAEVVVYDRLVSPEILALANEKAEMIYVGKKLDFHCVPQEEINQILVRKALEGKRVVRLKGGDSFIFGRGGEELEELAEHDVRFEVVPGITAAAGATAYAGIPLTHRDHAQSVQFITGHIQKDGKEIEWPSLAQANNTLVFYMGLKQCRYIAEKLLENGLDASTSCAIIENGTRREQRVLTGTLTQLPELATQAISPALIVVGSVTSLHDKLKWF

SEQ ID NO: 2122 - protein, 291 aa, Vibrio vulnificus CMCP6
MSMADKDTATVFPFKRPSVVASNPTAGRYGHSQLKHGEVALVGAGPGDPELLTLKALNYLQQAEVVLYDYLVSDEIMALVPNDAILVCVGKRAGHHSVPQEKTNQLLVDFAKQGYKVVRIKGGDPFVFGRGGEELEVLADAGITFQVVPGITAAAGATAYAGIPLTHRDYAQSAMFITGHLKAESDQLDWSTLARGQQTLVIYMGLMKSNYIQEQLIKHGRRAQTPIAIIERGTQLSQKVFKGQLSELADLAKKAEAPALIVIGEVVQLSQKLDWFLSGTRINNSAIANSI

SEQ ID NO: 2123 - protein, 297 aa, Vibrio vulnificus CMCP6
MDTSISTQLRDRSYSEHAISYHSSRRLQAKNRPTSTGMAASGFVYLVGAGPGDPEMLTVKAVNALQQCDLLVYDRLVSKEILALVPEHVDKIYVGKRCGEPSLKQDEINQILVSFAQLGRKIVRLKGGDPFIFGRGGEEALALVEHNIHYCVVPGITAAIGCAASCAIPLTHREVARSVTLVTGTVVTGSLPAWSAIVEAGQTLVFYMGLESARAIEQGLLGQGVRADFPVAIVTQGSTPEQKTYVTTLATLEKTAVALKGVSPALIIMGEVVKLRERLKTTLAAVAPMANASFVNE

SEQ ID NO: 2124 - protein, 253 aa, Methanocaldococcus jannaschii
MPKNINISGEIMTGKVILVGAGPGDPELITIKGLKAIKEADVVVYDDLISKELLNYAKKDAELIYVGKRKGKHSFKQEEINKILVEKAKEGKLVVRLKGGDPFVFGRGGEEILELKKHNIPYEVIPGITSAIAVPEVAGIPVTHRKVATSFTVVTGHEAEDKKEKQVDLSKLNADTIVILMGITNLENLVKELLQNPKRSKETPVAIIMEGTTKNQRVIKGTLGDIVEKAKKENARPPGVIVVGEVVNVLDSQ

SEQ ID NO: 2125 - protein, 259 aa, Methanocaldococcus jannaschii
MDNNRKVIIVGAGPGDPELITIKGKKAIEEADVIIYAGSLVNEKLLEYNKKNAEIYNSANMNLEEIIDVMVKAVNQGKKVVRLHTGDPSIYGAIKEQIDELSKYGIDVEIIPGVSSLFAATASLKVELTLPEVSQTVIITRPEGRTPMPEKEKLRDLAKHQSTMAIFLGVSMIDKVVKELIEGGYREETPVAVVYHASWDDEKIVRGTLKDIAEKVKKEGIKKTALIIVGEVLNPKYYAYSKLYDKNFEHEYRKSHKKF

SEQ ID NO: 2126 - protein, 245 aa, Methanosarcina barkeri
MVRWKGKYILWERAHGNPKLITVLGREMLEKADLVMYAGSLVNPEVLNYTHGETVDSYGLTLEETTKIIADAVDAGKFVVRLHSGDPSLYGSVIEQMEELRKHDIEVERVAGVSSIFASAAALGTQLTLNGVSDTLIITRPAGKTLEKDLIPELSAYNTTMAIFLGTQKIREIMEKVRCPKDTPVAVVFHASWEDEEIITGTVEDIADKVKDAGIKRSAMIIIGGVVDPKNYRRSYLYGVAQEPL

SEQ ID NO: 2127 - protein, 464 aa, Pseudomonas syringae pv. tomato str. DC3000
MEFLPLFHNLRGSRVLVVGGGEIALRKSRLIADAGAVLRVVAPEIETQLRELVAHSGGELILRGYSESDLDGCVLIIAATDDEPLNAQVSRDARLRCVPVNVVDAPALCTVIFPAIVDRSPLVIAVSSGGDAPVLARLIRAKLETWIPSSYGQLAGLAARFRNQVKGLLPNVQQRRAFWEEVFQGAIADRQLAGQGAEAERLLIAKIAGEPPAQTGEVYLVGAGPGDPDLLTFRALRLMQQADVVLYDRLVAPTILDLCRRDAERVYVGKRRAEHAVPQEQINQQLVALAKQGKRVVRLKGGDPFIFGRGGEEIEELAAHGIPFQVVPGITAASGCAAYAGIPLTHRDHAQSVRFITGHLKNGTTDLPWSDLVAPAQTLVFYMGLIGLPVICAELIKHGRSADTPAALVQQGTTVNQRVFTGTLANLPQLVAEHEVHAPTLVIIGEVVKLREKLAWFEGAQATL

SEQ ID NO: 2128 - protein, 253 aa, Pseudomonas syringae pv. tomato str. DC3000
MSAKVWLVGAGPGDPELLTLKAVRALHEADVVLIDDLVNTAVLEHCPQARVIAVGKRGGCRSTPQEFIHRLMLRYVRQGKCVVRLKGGDPCIFGRGGEEAQWLQERGVAVELVNGITAGLAGATQCGISLTLRGISRGVTLVTAHTQDDSSLNWQALAQGGTTLVVYMGVAKLAEIRESLLAGGMIGDMPVAMIENASLPWQRECRSTLNAMQRDAAAFELKSPAILVIGAVAAFSNELLNQTLVEQAQLQAS

SEQ ID NO: 2129 - protein, 249 aa, Pseudomonas syringae pv. tomato str. DC3000
MTVYFIGAGPGDPELITVKGQRLIRTCPVIIYAGSLVPLAVLEGHQAVQVTNSAELHLEQIIDRIKTAHAQGQDVARVHSGDPSLYGAIGEQIRHLRELNIPFEIIPGVTATAACAALLGVELTLPDISQSVILTRYADKTSMPSGEELASLASHRATMAIHLGVNNLHRIVEELTPHYGTDCPIAVVHRASWPDQEWAIGTLADIEEKVRAKGFRRTALILVGRVLAADTFGESSLYRAGHAHLFRPK

SEQ ID NO: 2130 - protein, 304 aa, Vibrio parahaemolyticus RIMD 2210633
MPASQYQWTMSKHMATNDSVTPLPVQKPRLVSDNQVSGVTRFAKQSLKPGEVALVGAGPGDPELLTIKALNCLQQADVVLYDYLVSEEIMALIPSDTILVCVGKRAGHHSVPQEKTNQLLVDFAKQGYRVVRVKGGDPFVFGRGGEELEVLADAGIRFQVVPGITAAAGATAYAGIPLTHRDYAQSAIFVTGHLKEESDEMDWSTLARGNQTLVIYMGLMKSHYIQNQLIQHGRAASTPIAIIERGTQIQQKVFTGELSQLSDLSKEAQAPSLIVVGEVVRLSQKLDWFLSSTDFNKSAIANSI

SEQ ID NO: 2131 - protein, 252 aa, Vibrio parahaemolyticus RIMD 2210633
MTTANSSLNSGFVSLVGAGPGDPDLLTVKGLKAIQAAEVVVYDRLVSKEILELAQASAEMIYVGKKLDFHCVPQDQINQILVEKAQEGKRVVRLKGGDSFIFGRGGEELEELAEYGIQYEVVPGITAAAGATAYAGIPLTHRDHAQSVQFITGHVQKDGREIEWHSLAQSNNTLVFYMGLKQSGHIMDKLITHGLDPEMSCAIIENGTRPEQRVFQGKLNELSSMAEQAVSPALIVVGSVTQLHNKLAWFGK

SEQ ID NO: 2132 - protein, 301 aa, Vibrio parahaemolyticus RIMD 2210633
MEAPYQKSWFKKGQAYQSQKRSSRFSRHDQASKLNKLLEDQSVDLDANHKGFVSIVGAGPHDPDLLTVKAVKAIMSAEVLLYDRLVNKDILELASPQADWIYVGKRCGQPSIGQEEICGLMVSLAQQGKRVVRLKGGDPFVFGRGGEEALALVKHAIPYEVIPGITAAIGCSANSLIPLTHRGVARSVTFVTGQVVTGAFEAWSQLMQSGQTLVFYMGLEKSSQIQTGLISSGLRENFPVAVITHGCSPQQQVYVTQLNQLNELSITLKGVSPALIVMGEVVKLREQLIETVQSVTEYEGI

SEQ ID NO: 2133 - protein, 483 aa, Bacillus subtilis subsp. subtilis str. 168
MIMKNGIVYFVGAGPGDPGLLTIKGKQALKEADVILYDRLANPKLLEFASPDCQFIYCGKLPNRHFMKQKEINALLVEKALNGLTVVRLKGGDPSVFGRVGEEADALHEHGIRYEMVPGITSGIAAPLYAGIPVTHRDFASSFAMITAHDKSLKGTPNLDWEGLARSVQTLVFYMGVKNLSYICQQLISYGKSPSVPVIVIQWGTWGRQRSVKGTLENIQQKVQEHQITNPAIIVIGDIVNFQTHSWFESKPLIGRHLMVVTHGEDEDPLADKLRDSGADLIEWPKWRTENMPVNEEILRKIGTFEDVFFTSRRAVCEFFRALASQKIDIRQLTAKLSAASEQAKTELEKRGFLVTAIQPDSEKRLVVGSRHAVENMQKHESCSFYITHENVIDDRFTHMIQRTISESPLHMVICPNKLSVQQLINGGEQIGILPEPSASRPPIVCIGDDSAAGIYGFTAVQEQDELLAFIHNQHAEKKLLHT

SEQ ID NO: 2134 - protein, 257 aa, Bacillus subtilis subsp. subtilis str. 168
MGKVYIVGAGPGDPDLLTIKALKAIEKADVILYDRLVNKEILQYAKEQADLIYCGKLPDFHTMKQETINRFLVKYAQKGKMVVRLKGGDPFVFGRGGEEAECLSENGIPFEIIPGITSGIAAAAYAGIPVTHRDAGSNVAFVTGHYKKEEDFEEKWKALATGIDTLVIYMGIKNVQQIERKLLENGRDGSTPAAFIHWGTTDKQKSVFCTVDTLSETVIKENITNPSLIVIGNVVNYHYKLEWFESELKKQDLSEAL

SEQ ID NO: 2135 - protein, 244 aa, Aquifex aeolicus VF5
MGKVYLIGAGPGDPELLTLKAYRILRKADVVLYDALVNREILHFARQDSLKIYVGKRDGKHSLPQEEINELLHRFALSYKIVVRLKGGDPFVFGRGGEELLYLKSRGVEVEIVPGITSAISAPSSAFIPVTHRGIASSFAVVTGHPNREIKWEDLVNIDTLVVLMGVKNREKIARELIGAGRNPDEPVAFIEKATTPEQREVFSTLKEVAQNPPEVNPPAVMVVGKVVEIGAKVLCERIIGVTL

SEQ ID NO: 2136 - protein, 244 aa, Archaeoglobus fulgidus DSM 4304
MVGKVYIVGAGPGKKDLLTLRAYELIKRADVILHDELIGEVAELLKESRAEIVDVGKRSGRHKKRQEEINKLLVEYARQGKTVVRLKGGDPCVFGRGGEEAEFLAKHGIPFEFVPGVTSAIAVPEAVGIPVTHRRYDPALVFITGRESRERLNWKALAELNATIVILMGVSRIPEIAKNLLEHGKDPETEVAIIESGFSDRERVILTTLGKMAERAEKERVKPPAIIVIGKVVELYGVLSRWLG

SEQ ID NO: 2137 - protein, 243 aa, Archaeoglobus fulgidus DSM 4304
MGGKVYIVGAGPGNFELLTLKAYRLLQEADVILYDRLVGEEIESFLKTLGKEVVYVGKERGEKGEKRQKEINRLMKKYFEEGKKIVRLKGGDPGIFGRMAEEIEFLVENRIPFEVVPGVSSVNGAPVCSGIPLTEAENAFGFLVVSGSDSGRIRELHEKGTLVILMGGCTAKDVARNLIESGVDADRDVAVIERGSMKNQRVTITKLSELVERDFNFDSPALIVVGDVVRFARVCQNHEDRKI

SEQ ID NO: 2138 - protein, 234 aa, Archaeoglobus fulgidus DSM 4304
MKVYFVGFGPGNPELLTLKAYKLLKEADLVVYPGSIVPEKFFEEFKGEKVNSHGKTLEEIVDLIERYVKRGKRVVRVQSGDPSIFGAVWEQIRELRRRGIDCEVVPGVSSVFASAASLGIELTSPSTEGVAIVRPAGKTLEKDHLEELARLPLTLVILLGVDKIGEIAEKIARVRGWDEPCAVVFHASREDEIRIKGTLKDIAEKVREKGIRRTATIIVGKVVEGYDERSHLYS

SEQ ID NO: 2139 - protein, 260 aa, Bradyrhizobium japonicum USDA 110
MTVHFIGAGPGAPDLLTLRGRDLIAACPVCLYAGSLVPEGVLAHCPPGAHIVNTAPLSLDEIIAEIAAAHADGKDIARLHSGDLSIWSAMGEQLRRLRTLDIPFTVTPGVPSFSAAAAALEVELTLPGLAQTVVLTRTPGRASAMPEGEKLAAFAATGATLAIHLSIHLLDQVIAELLPHYGADCPVAIVWRASWPDQCIVRATLATLDAAVGAEMERTALILVGKTLGAADFDESRLYAADYDRRYRPVGAEPRFPEAS

SEQ ID NO: 2140 - protein, 292 aa, Brucella melitensis 16M
MSKADEAAACVIAKSKVALPVMEPGHVWLVGAGPGDPGLLTLHAVNALQQADVIVYDALVDDSCLSLKNATATLEYAGKRGGKPSPRQRDISLRLVELARQGKKVLRLKGGDPFVFGRGAEEALTLVEYHVPFRIVPGVTAGVGGLAYAGIAATHRDINQAVTFLTGHDATGAMPDGVDWAGIARSSPVIVMYMAMKHIGLIAGRLIEAGRSPDEPVAFVCNASLPDQTVLETTLGRAAIEVEAAGLQPPAIVVVGEVVRLRAGLDWIGAMAGKSLVSDPLGKRTQQGVQSA

SEQ ID NO: 2141 - protein, 475 aa, Brucella melitensis 16M
MSLSQTRLLADFPAFFRVSGEVVAVVGGGEEALNKARLVAQTAARLRIIAEKAEPHLAAFIESHGVEHIASPFAPELLDGAKLVFVATGDEAGDRAAAAAARARKIPVNVVDRPALCDFLTPAIVNRAPVTIAIGSQGTAPVLAQMVRARIDAAFSPRLGELAHFAESWRPLVERALPKGLARRGFWRTFFSGKVARAVESGDHEAAHRAAAELIGQGQDASGHVWLVGAGPGAEDLLTLRAQRVLMEADVIVHDALVPEGVIAMGRRDAERLPVGKRKGCHSKSQGEINRLLVKLGQEGKRVVRLKSGDPLVFGRAGEEMAALRAAGIGFEVVPGITSAFAAAADMELPLTLRGVASSLVFTTGHDMTGDVLPGWAKLAVSGATIAVYMGSTVAASVASRLIAAGLHEDTAVAVVENASRSNKRMFHGTLKDLPQLENRKELSGPVMVVIGDAVAGAAIGRAQALSLKPVPVAA

SEQ ID NO: 2142 - protein, 314 aa, Brucella melitensis 16M
MPWRGGGGCAGCRRPERPSGGWENRIGPVHRRPGDGSNVSVIIGTALSRRGLSASALQEGKIVTVHFIGAGPGAADLITVRGLRLIENCPVCIYAGSLVPKEVVAGAPKNARLIDSSSLTLDEIIAEMEVAHAQGLDVARVHSGDSSIYGAMAEQMRRLDALGIAYDVTPGVPAFAAAAAAMKQELTIPELNQTIILTRTSMKSSAMPEGEDLAALGKSGATLVIHLSIRNLAKIESDLTPLYGADCPVVVAYRVGWPDEQILRGTLCDIAGKIEASGLRRTAMIFVGRGLDPKNFRDSALYHEAHSHAARSKV

SEQ ID NO: 2143 - protein, 259 aa, Bacillus cereus ATCC 14579
MMGKVYIVGAGPGDPDLITVKGLKCIEKADVILYDRLVNKELLSYAKPDADLIYCGKLPNYHTMKQETINTFLIKYAKKGKVVTRLKGGDPFVFGRGGEEAEALAKQGVPFEIIPGISAGIAAPAYAGIPVTHRDASASFAIVTGHRKEGAEEEVKWESLAKGVETLAVYMGVSNLPYICEQLMKHGKDKSTPAAIIEQGTTSMQRTVVGTLGTIVDVAKKEQIQNPSMIVIGEVVRFREKIHWFEKQTENAYQVSGVL

SEQ ID NO: 2144 - protein, 474 aa, Bacillus cereus ATCC 14579
MNGYVYLVGAGPGDEGLITKKAIECLKRADIVLYDRLLNPFFLSYTKQTCELMYCGKMPKNHIMRQEIINAHLLQFAKEGKIVVRLKGGDPSIFGRVGEEAETLAAANIPYEIVPGITSSIAASSYAGIPLTHRDYSNSVTLLTGHAKGPLTDHGKYNSSHNSDTIAYYMGIKNLPTICENLLQAGKKEDTPVAVIEWGTTGKQRVVTGTLSTIVSIVKNENISNPSMTIVGDVVTLRNQISWKERKPLHGKKVLFAAATNKKSAIKQKLQESGAEIYQIPTFKKKEYTVTSEQINKIFNVDRLVFCSADSVDILMQSCSKYHKDIRSLQAELQYMNLSIQEKLMQYGLFSKPAQFSSNSTIYLGRNINRIAVIQEKIGAGSYMMTHEYTIDHRFDEIHSRILSEFSWDSIVFEGRASIDTFLAEIKRLGFINILTLPFSYTDVPTLHYANKVGFHNVDHQLQETLMKKDMVRQ

SEQ ID NO: 2145 - protein, 274 aa, Streptomyces avermitilis MA-4680
MADAPTGKVTFVGAGPGAADLLTFRAARAIAEADVVIWAASLVQAEVLDHARAGADILDSATMSLEDVVAVYRRAHAEGLKVARIHSGDPALWGGTQEQADRCAEIGIETEIVPGVSSFSAVAALAGRELTIPEVAQSVILTRLGGGKTPMPPGEEVREFARHGTTMALFLSAARSGQLVRELLEGGYPTSTPVVVAYQATWPEELIVTCTIETLEETVKEHKLWKHTLFLVGPALGAHGTRSHLYHPGHFHGFRKADPQARAELRAARKGSPS

SEQ ID NO: 2146 - protein, 262 aa, Sulfolobus solfataricus
MIGKVVFIGSGPGDPELITIKAKKYIETADVIVYAGSLVNPEILKWSRKDAEVYNSSSLTLNEIVEIMVKKASEGKLVARLKSGDSSIYGALFEEMWALEAAGIPFEVIPGITAAIAAASVIPIELTVPKLSQTVIITRASLRVPMQGSIKDFAKMVKIGATMVIYTGIHIIDRVVNDLKEGGLTDDTPVIVVYRATWPEQKIIKGTLADIVSKVREAKIYRDSVIIVGLSADPQQIKNMVRSSVYDPKHNHSYRPWKVEED

SEQ ID NO: 2147 - protein, 246 aa, Thermoplasma acidophilum
MKSRKYYIVGAGPGDPGLITVRAVKAIAESDLVLVDSLVPDEIIESVCAGKRVLRVGHRASGGHSGIIDRISAILDSTEFSVASHLKEGDPSVFSHLYEEIRMIMDRGIEYEVIPGVSSAIAVPEAAGIVLTGRGRSESFTVVSASDASGGFNEAEIRSALNASGSVVIMMGSRYLGRIRDLLIGIRYEWPIAIIENGTRTDQRVLVYRDAWHIGDQEIRMPAIIVVGRMIMVDGVIEKDEAGIRN

SEQ ID NO: 2148 - protein, 255 aa, Thermoplasma acidophilum
MYIIGAGPGDPDLLTVKARRLIESCDVIIYAGSLVNPEILKLARPGSEIHNSAELNINQIMDIIKDAYERGLDVARIHSGDPHIYGALKDQTSYLEALGIPYEVVPGVSVLTSAAASLGIELTMDGISQAVIIARGSLRIPVPDREQIRKLAEHGSTMVIFTGIHIIDSIVKDLIDGGYSPDTPVGVVYRSTWPDEIVIKGRLSNIATLVHERRIYRTALIIVGDVVDPKFVKHSKLYDPEYVHSFRGVKNGHDR

SEQ ID NO: 2149 - protein, 255 aa, Heliobacillus mobilis
MISFIGAGPGDPELITVKGQKRLAEADVVIYAGSLVNPEILSWCRPDAEIHNSASMSLEEVLAVMKRAVGEGKGVARVHTGDPSIYGAHREQMDALDEMGIAYEIVPGVSSFLAAAAAVKKEFTLPGVSQTVIITRLAGRTPVPEKESLASLAQHRASLCIFLSTHLLSEVSQELIQGGYEEDTPVAVVYKASWPDEKTVLGTLGDIAQKVSGARISRTAMIMVGRFLEGPYDRSLLYDPTFTHGYRQGKKGTEE

SEQ ID NO: 2150 - protein, 258 aa, Geobacter metallireducens
MTIVHFIGAGPGDAELITVKGARLLREADVVVYAGSLVDRELVRTYAPDAEVCDSAAMTLEETTAVLAQAVADGKRAVRLHTGDPSIYGAIQEQMAELDRLGIAYAVVPGVTSAFAAAATLRQELTLPEVSQTVVITRLAGRTPVPEREKLTEIARIGATLVIYLSISMVEQVVAELLQGAYTPATPVAVVSRASWPDEHVVEGTLADIAGKVRDAGIGKQAIILVGDVLKARREGLKSKSLLYDKGFSHEFRKGIVT

SEQ ID NO: 2151 - protein, 457 aa, Klebsiella aerogenes
MDHLPIFCQLRQRDCLLVGGGDVAERKARLLLDAGANVTVNALDFTPQFQVWADSQMLTLVQGEFIPSLLDNCWLAIAATDDETVNQQVSEAAEARRIFCNVVDAPRQASFIMPSIIDRSPLMVAVSSGGTSPVLARLLREKLESILPLHLGQLARYAGHLRARVKQQFATVGERRRFWEKLFVNDRLAQSLANDDRQAVADTTEQLLTEPLEHRGEVVLVGAGPGDAGLLTLKGLQQIQQADVVVYDRLVSDDIMNLVRRDADRVFVGKRSGYHCVPQEEINQILLREAQKGRRVVRLKGGDPFIFGRGGEELETLCEAGIPFSVVPGITAASGCSAYSGIPLTHRDFAQGVRLVTGHLKTGGELDWANLAVEKQTLVFYMGLNQAPAIREKLIAHGMAEDMPAAIVENGTAVTQKVVSGTLGQLDILAQQMASPALIIVGRVVGLRDKLNWFSNH

SEQ ID NO: 2152 - protein, 471 aa, Klebsiella aerogenes
MDYLPLFAELKQRPVLVIGGGEIAERKIKFLLRAQAQVQVVAETLSPALADLAARQALSWRATAFSDSLVDDVFLVIAATEDEALNQRVFAAANARYRLVNVVDNQALCSFVFPSIVDRSPLLVAISSSGKAPVLSRILREKIEALLPTNLGRLAESASYWRNHLKTRLTTTEARRRFWERVFTGRFASLMVAGNSAEAEKALQDELDKPERETGEIILVGAGPGDAGLLTLRGLQAIQQADVVFHDHLVTQPVLELVRRDAELICVGKRAGEHSVPQHETNQLLVEAAKAGKTVVRLKGGDPFIFGRGAEELQAAAEAGIPFQVVPGVTAAAGATAYAGIPLTHRDYAQSAVFVTGHYKPDSAPFDWSLLAKSQQTLAIYMGTMKAAEISAQLIAHGRDSDTPVAVISRGTRDDQQTITGTLQQLEHLAKDAPMPSLLVVGEVVQLHQQLAWFQHTSSAEGFNASVVNLA

SEQ ID NO: 2153 - protein, 271 aa, Ralstonia solanacearum
MKVYFIGAGPGAADLITLRGARILGSVPMVLYAGSLVPPEMLQHCRPDAELHDTATLSLDEQEACYRRAQAEGKDVARLHSGDPAIYGATAEQMRRLEALGIDYEIVPGVSSFTAAAAVLGAELTRPAVSQSIVLTRVSGRASAVPELESVARFAEHQATMCIFLSGQRLKQTVADLLLHYPADTPVALVRRATWPDQAIHRCTLGTLLLEVSQKDWLLTTLLLVGRALSREGGVESSLYAAGFTHIFRDGTDRKAPRRRPRKAPAGKETA

SEQ ID NO: 2154 - protein, 278 aa, Pseudomonas stutzeri
MDQPLTFPAALSAAFAPGEVALVGAGPGDPGLLTMRAWSLLQQADAVVYDRLVSDGLMALLPASCSRHYVGKTSGYHSLPQPEINQLLVDLALQNKRVVRLKGGDPFIFGRGAEELEFLLQRGIDCQVVPGITAAAGCSAYAGIPLTHRDLAHSCQFITGHLQTNGELHLPWDALAQGGQTLVFYMGLASLGEISRNLISAGLPVDTPAALIGNGTRENQQVVRCTLRQLPSMADEQHLTPPTLTVIGRVVSLFADRQVEHPARLHGDPAPKAEALCN

SEQ ID NO: 2155 - protein, 464 aa, Azotobacter vinelandii
MDYLPLFHNLKGRRVLLVGGGEIALRKARLLADAGAVLRVVAPQIEAALAEQVREGGGDCLPRGYAQGDLDGCVLAIAATDDPLLNARVSRDAHEHGVPVNVVDSPELCSVIFPAIVDRSPLLVAVSSGGDAPVLARLMRARIETWIPAGYGRLAGLARRFRAQVKRLLPDVRQRRVFWEEVFQGPIAERLLSGQETEAERLLEAKLAGAAPKALGEVYLVGAGPGDPDLLTFRALRLMQQADVVLYDRLVAPAIVELCRRDAERIYVGKRRAEHALPQEQINRLLVRLAGEGKRVLRLKGGDPFIFGRGGEEIEELAAHGIPFQVVPGITAASGCAAYAGIPLTHRDHAQSVRFVTGHLKDGSFDLPWADLVAPAQTLVVYMGLVGLPVICQRLIEHGRAAATPVALIQQGTTPQQRVIVSTLAELPARVEREQVSAPTLLIVGEVVRLRDKLAWFEGRQSAD

SEQ ID NO: 2156 - protein, 245 aa, Azotobacter vinelandii
MSAKVWLIGAGPGDPELLTLKAVRALGEAEVVLIDDLVNPAVLEHCPQARVIGVGKRGGCRSTPQDFIHRLMLRYARQGKCVARLKGGDPCIFGRGSEEADWLASHGIATEIVNGITAGLAGATQCGIPLTLRGVARGVTLVTAHTQDDSSLNWQALARSGTTLVVYMGVAKLAEIRDGLLAGGMRADMPVAMIENASLPQQRECRSSLGAMQWDAAAFSLRSPAILVIGEVAAVAQAQLMARTA

SEQ ID NO: 2157 - protein, 254 aa, Mesorhizobium loti
MTVHFIGAGPGAADLITLRGARLLASCPVCLHAGSIVAPELLQHCAPGTKLIDTAPMSLDEIEAAYVDAHKSGHDVARLHSGDLSVWSAVAEQIRRLEKHDIPYTLTPGVPSFAAAAAALRLELTIPEVAQSLVLTRVSGRASKMPPGETLAGFGRTGATLAIHLAIHAIDRVVAELTPHYGGDCPVAIVFRASWPDERVLTGTLETIEAQLAADPMERTAIIFVGRSLAAEGFGESSLYDAHYQRRFRGRDGL

SEQ ID NO: 2158 - protein, 279 aa, Sinorhizobium meliloti
MTDMFAGLPELEPGSVWLVGAGPGDPGLLTLHAANALRQADVIVHDALVNGDCLKLAKASAALEFAGKRGGKPSPKQRDISLRLVELAREGKRVLRLKGGDPFVFGRGGEEALTLVEHRIPFRIVPGITAGIGGLAYAGIPVTHREVNHAVTFLTGHDSSGVVPDRINWEGIAKGSPVIVMYMAMKHIGQISANLMAAGRSPDEPVAFVCNAATPEQVVLETTLSSAEADVTASGLEPPAIVVVGEVVRLRASLDWLGALDGRALAPDPFSSRILRNPA

SEQ ID NO: 2159 - protein, 485 aa, Sinorhizobium meliloti
MSQKLSVFPAFFRVAQKSVAVFGNGDEAFAKLRLLLNTEARIVAYADRPEPAFDAFLDANNIETVREPFGAHQVEGSVLVFAATGDAALDRVVVTAARERKIPANAVDQPDYCDFLTPALVNRAPVAVAIGTEGAGPVLAQMIRAQIDQLLSPSLGIVASLAANYRDAVERLVPRGVARRVFWRRFFSGPVADQVALGDLASARREASRLLDAAGGVAGHVWLVGAGPGAEDLLTLRAQRVMMEADAIVYDALVPQAIVDMGRRDAERLSVGKRKGCHTKSQDEINQLLVKLAGEGKRVVRLKSGDPLVYGRAGEEMAALREAGISYEVVPGITSAFAAAADFELPLTLRGVASSLVFTTGHDLTGSVLPDWARLAVSGATIAVYMGRTVAASVASRLMQAGLPQDTTVAVIENASRAERRLLHGTLRDLPDLEARTELDGPVMVIIGEAVAGANFERSEPLAAGRTKYSGASKVSAKRTEQIWN

SEQ ID NO: 2160 - protein, 360 aa, Sinorhizobium meliloti
MTALATLPLFWPLNGKQAVVAGGSDAAAWKAELLAACGAEVHVYAPRASLSDVFLDLLARGPAHEHGRLIHHDQAWHVGDFRDAAIAVADCDEQSDAEAFFLAGRSAGVPVNVIDKPAFCAFQFGSIVNRSPVVVAISTDGAAPILAQAIRRRIEALLPPALKHWATVAQAIRDRVNARLKPGSARRAFWERFVDRVFLDAPEEGVETRLMAEVDRLVTRPSAIGRVTIVGAGPGDAELLTLKAVRALQAADVILFDEWIPDDVLELARREARRVPVTPSAKGRSRDIAALVGEGKRVVRLRSGNPMALAGAVEEIAALEGLGVPVEIVPGVEAAPCRSDVIQVVFRRREVSQPGLRAAH

SEQ ID NO: 2161 - protein, 252 aa, Sinorhizobium meliloti
MTVHFIGAGPGAADLITVRGRDLIGRCPVCLYAGSIVSPELLQYCPPGARIIDTAPMSLDEIEAEYVRAAEAGEDVARLHSGDLSVWSAVAEQIRRLEKNGIAYTMTPGVPAFAAAAATLGRELTIPAVAQSLVLTRVSGRASPMPNSETLAAFGATGSTLAIHLAIHALGQVVEELTPLYGADCPVAIVVKASWPDERVVRGTLGDIAARVAAEPIERTALIFVGPGLEASDFRESSLYDPTYQRRFRGRD

SEQ ID NO: 2162 - protein, 251 aa, Sinorhizobium meliloti
MSGVESGRLIGVGTGPGDPELLTVKAVRALGEADVVAYFAKAGRNGNGRAVVEGLLKPGMTELPLYYPVTTEIDKDHDAYKRQITDFYDASAEAVAAHLLAGRTVAVLSEGDPLFYGSYMHLHVRLAGRFPAEVIPGITAMSGCWSLAGLPLVQGDDVLSVLPGTMGEGELRRRLADTQAAVIMKVGRNLPKIRRALAAAGRLEAAVYVERGTMRNAAMVPLGEKPDDEAPYFSLVLVPGWKDRPGSEGRA

SEQ ID NO: 2163 - protein, 95 aa, Glycine max
  unsure (1)..(95): unsure at all Xaa locations
IRRAAFFVFGRLVSNDVLDLVGPDARLLYVGKTAGYHSRTQEEIHGLLLSFAEAGATGVRLKGGDPLLFGRGWEKEVFLLQSGQRVAMVFILLQX

SEQ ID NO: 2164 - protein, 280 aa, Pseudomonas denitrificans
MIDDLFAGLPALEKGSVWLVGAGPGDPGLLTLHAANALRQADVIVHDALVNEDCLKLARPGAVLEFAGKRGGKPSPKQRDISLRLVELARAGNRVLRLKGGDPFVFGRGGEEALTLVEHQVPFRIVPGITAGIGGLAYAGIPVTHREVNHAVTFLTGHDSSGLVPDRINWQGIASGSPVIVMYMAMKHIGAITANLIAGGRSPDEPVAFVCNAATPQQAVLETTLARAEADVAAAGLEPPAIVVVGEVVRLRAALDWIGALDGRKLAADPFANRILRNPA

SEQ ID NO: 2165 - protein, 253 aa, Pseudomonas denitrificans
MTVHFIGAGPGAADLITVRGRDLIGRCPVCLYAGSIVSPELLRYCPPGARIVDTAPMSLDEIEAEYVKAEAEGLDVARLHSGDLSVWSAVAEQIRRLEKHGIAYTMTPGVPSFAAAASALGRELTIPAVAQSLVLTRVSGRASPMPNSETLSAFGATGSTLAIHLAIHALQQVVEELTPLYGADCPVAIVVKASWPDERVVRGTLGDIAAKVAEEPIERTALIFVGPGLEASDFRESSLYDPAYQRRFRGRGE

SEQ ID NO: 2166 - protein, 245 aa, Pseudomonas denitrificans
MSGVGVGRLIGVGTGPGDPELLTVKAVKALGQADVLAYFAKAGRSGNGRAVVEGLLKPDLVELPLYYPVTTEIDKDDGAYKTQITDFYNASAEAVAAHLAAGRTVAVLSEGDPLFYGSYMHLHVRLANRFPVEVIPGITAMSGCWSLAGLPLVQGDDVLSVLPGTMAEAELGRRLADTEAAVIMKVGRNLPKIRRALAASGRLDQAVYVERGTMKNAAMTALAEKADDEAPYFSLVLVPGWKDRP

SEQ ID NO: 2167 - protein, 101 aa, Oryza sativa
  unsure (1)..(101): unsure at all Xaa locations
ARLTLKALRAIQAEDLGLYNRLVSNDQVDLVIEGARLLYEGKTVGSHSRTQEEIDELLLNLEEAGANEPRMKGGHPLLLGRSAEEMDLLQQQRLRVDFMPX

SEQ ID NO: 2168 - protein, 197 aa, Zea mays
  unsure (1)..(197): unsure at all Xaa locations
XEIIPGITSASGIAAELGIPLTHRGVATRVAGRAGHSRNGGTDPLYVAGNAADPDTTLVVYMGLSTLASLAPKLMKHGLPPDTPAVAVERGTTPQQRMVFALLKDLVDEVKSADLVSPTLIIIGKVVSLSPFWVESSEHDALKIESSYASEAXDDNTFSXILVIGQYIRNAISQIXAHRFDLVYTTFQEAWILNDGX

SEQ ID NO: 2169 - protein, 475 aa, Neisseria meningitidis
MNYFPIFANLAGRPVLVVGGGAVAARKISLLLKAGAEVRVAAKHLNAELSALAAENKILWLAEEFRAEHIRTVFLIIAASSDQALNRRVFHLAESCQKPVNVVDDRDHCSFIFPSVIDRNPVQIAVSSSGSAPVLARLLRERLEALLPPSLGDMAEISGRWRDAVKGKLKSVTERRRFWEKQFNGRFAALVKNRQNTLAERELAGQLEQSRQNDQGGSVSLVGAGPGDAGLLTLKGLQEIQQADVVLYDALVSDGILSLVRRDAERIFVGKRARGERTPQEDTNALMVRLAREGRRVVRLKGGDPFVFGRGGEELETLARHQIPFSVVPGITAAVGATAYAGIPLTHRDYAQSAVFVTGHRKADAPDIEWQTLARSRQTLVIYMGALKAALIAERLQQHGRSPDTPAAVISQGTLPAQKTATGTLANLAELAETAPNPALIVIGEVVGLHEKLAWFGENGEGENRVGQTYPALGD

SEQ ID NO: 2170 - protein, 275 aa, Novosphingobium aromaticivorans
MRHCCQCQPSGNPDMTVHFIGAGPGAPDLLTLRGRDLIAGSPVCLYAGSLIPVAVLDHCPPGARIVNTAPLELDQIMAEIAAAHAAGHDVARLHSGDLSVWSAMGEQLRRLRALDIPFTITPGVPAFAAAAAALEAELTLPALAQSLVLTRTPGRASTMPPAESLANFAVTGATLAIHLSVHNLAQVVADLTPAYGADCPVAVVWRASWPDQRIVRATLDTIEQAIAGSMERTALILVGRVLAAQDFAESSLYAPGYDRRFRPQDATSRFGGAAE

SEQ ID NO: 2171 - protein, 251 aa, Thermoplasma volcanium
MYIVGAGPGDPELLTLKAYNILRKAGVVIYAGSLVNPEILKYANPSAEIYNSAEMDINKIMDISIILIAEGKDVVRLHSGDPHLYGALMEQLSLLREKGIDFEVIPGVSVLTSAAASLGIELTMDNISQSVIIARGSLRIPVPEKQSILALSSHQSTMVIFTAIHIIEKVVEDLLKGGYPKDTPVGVVYHSTWKDEKVIRGTLEDIVQKVKDNRIYRTAIIVVGKVVNPERVYSTKLYDPSYTHSFRRGSS

SEQ ID NO: 2172 - protein, 252 aa, Thermoplasma volcanium
MKKFYIVGAGPGEPDLITVMGLEAIRESQVVFKDALVSDDLIEKYCTNKVQVNVGHRQGTSSDVGLKIILNYIKENANNFDVAVHLKSGDPGIFSRLSEEIRAVSTLGFDVIVVPGITSAIGVPTFYGIPLSVKDVSRHIAIVTASISEGKFNASSLGDALKYADVVVVLMGSRFLKQIARLSQSILGHSDMLIVENGTLPSAKISLLKDAENLDEHYCSKPSIIILGRKLNEILSLGGGFDEYRVYAGYNK

SEQ ID NO: 2173 - protein, 457 aa, Escherichia coli
MDHLPIFCQLRDRDCLIVGGGDVAEPKARLLLDAGARLTVNALAFIPQFTAWADAGMLTLVEGPFDESLLDTCWLAIAATDDDALNQRVRQAAEARRIFCNVVDAPKAASFIMPSIIDRSPLMVAVSSGGTSPVLARLLREKLESLLPLHLGQVAKYAGQLRGRVKQQFATMGERRRFWEKLFVNDRLAQSLANNDQKAITETTEQLINEPLDHRGEVVLVGAGPGDAGLLTLKGLQQIQQADVVVYDRLVSDDIMNLVRRDADRVFVGKRAGYHCVPQEEINQILLREAQKGKRVVRLKGGDPFIFGRGGEELETLCNAGIPFSVVPGITAASGCSAYSGIPLTHRDYAQSVRLITGHLKTGGELDWENLAAEKQTLVFYMGLNQAATIQQKLIEHGMPGEMPVAIVENGTAVTQRVIDGTLTQLGELAQQMNSPSLIIIGRVVGLRDKLNWFSNH

SEQ ID NO: 2174 - protein, 457 aa, Escherichia coli
  unsure (1)..(457): unsure at all Xaa locations
MDHLPIFCQLRDRDCLIVGGGDVAERKARLLLDAGARLTVNALAFIPQFTAWADAGMLTLVEGPFDESLLDTCWLAIAATDDDALNQRVXXAAEARRIFCNVVDAPKAASFIMPSIIDRSPLMVAVSSGGTSPVLARLLREKLESLLPLHLGQVAKYAGQLRGRVKQQFATMGERRRFWEKLFVNDRLAQSLANNDQKAITETTEQLINEPLDHRGEVVLVGAGPGDAGLLTLKGLQQIQQADVVVYDRLVSDDIMNLVRRDADRVFVGKRAGYHCVPQEEINQILLREAQKGKRVVRLKGGDPFIFGRGGEELETLCNAGIPFSVVPGITAASGCSAYSGIPLTHRDYAQSVRLITGHLKTGGELDWENLAAEKQTLVFYMGLNQAATIQQKLIEHGMPGEMPVAIVENGTAVTQRVIDGTLTQLGELAQQMNSPSLIIIGRVVGLRDKLNWFSNH

SEQ ID NO: 2175 - protein, 251 aa, Prochlorococcus marinus subsp. pastoris str. CCMP1378
MVRKISFIGVGPGDPDLLTIKALKKIESADVIFWADSLIPEKIINFSLKGSEKIKTSTLTLEKITSIMIERFNEGKTVIRLHDGDPCLYGAVKEQLEILRQENIETEVIPGVSAFQVAAAYHQAELTIPDITQTIILTRAGGRTGMPEKESLKDLAKHKSSLCLYLSARHIKSSQKTLLEFYPPETKVIVGYRVSWDDGWTSLIELKDMEKFTLEKELIRTTIYIVSPAINTIANRSNLYNPSYKHLFRGK

SEQ ID NO: 2176 - protein, 259 aa, Nostoc punctiforme
MNRTEKQENEYLGKVYLVGAGPGDPGLLTLKAKGLLECADVVIYDALVSPAILAMINPQAEQINAGKRRGKHSLFQEETTQLLIDKAQDRAIVVRLKGGDPFIFGRGGEEMEELVNAGISTEVVPGITSGIAAAAYAGIPLTHRLYSSSVTFVTGHEAAGKYKPKVNWNAIAHGSETIVIYMGIHNLPYIVEQLSAAGLDVETPIALVRWGTRPEQEELIGTLKTIVEQVEQTGFGAPAIAVIGQVVNMHSILSSCRPV

SEQ ID NO: 2177 - protein, 529 aa, Nostoc punctiforme
MTKIEERGKVYLVGAGPGDVAYLTVKAYNLLAAAQVLVYDALVDAQLLQCVPPNCLKLDVGKRGGKPSTTQTEINKLLVKYCQQGKQVVRLKSGDPLIFGRCTSEIEALKASGCDFELIPGISSALAAPLFAGIPLTDPVLSRCFAVLTAHEPEVLDWEALSRLETLVILMGGQHLPEIVHQLVQHGRSHLTPIAIIRWAGTPRQKIWTAQLGNILEQTTGLSLSPAVIVVGEVVGLHKYLQPEKIDCQDSTTAQTPMLNNLSASPEPLTGKTILVTRSVGQSSTFSDRLTTLGATVIEMPTLEIGPPSSWEALDDAIAHLSQFDWLILTSSNGIDYFFERLIAQGKDTRALAGVKIAVVGEKTANSLKQYSLQPDFIPPNFVADSLIENFPEKLDGKKVLFPRVESGGREILVKELTLKGAKVIEVAAYQSCCPSSIPSGAELALQNHNVNVITFASSKTVQFFYQLTEKIFSQNSDVSQLLENVCIASIGPQTSKTCHDLFGRVDVEAQEYTLDGLTQALIIWATNY

SEQ ID NO: 2178 - protein, 274 aa, Nostoc punctiforme
MGSSKSEYTENLSYKKTLYAIEPSVYIVGAGPGDPDLLTVKAQKLLAVADVILFADSLIPEQILELCRKDAEIIRTANQTLEEILPIMIDRVRSQQKSLVRLHSGDPSLYSAIHEQMHLLAEANIPFEVIPGISAFQAAAAKLKVELTVPGLVQTIILTRISGRTEVPANEELASLAAHQASLCLYLSARHVENAQAKLLEHYPAETPIAICFRIGWPDEKIKVVPLNEMAECTHKEKLIRTTLYIISPALSTAKGRSRLYHPEHSHLFRSSHN

SEQ ID NO: 2179 - protein, 288 aa, Halobacterium sp. NRC-1
MPEDATPQDAIDAASQQRQRGRDARVYDHTAGDTQAGIPFIGAGPGDPGLLTVTGKELVEDADLVVHAGSLVNSELLDEYCADAETVSSVGKDLEALIPLMRDAHEDGDTVVRLHSGDPAIYGAALEQMDALEQEGVPTYIVPGVTSAFASAATLRTQLTLNGTANHVAFTRPQGKTLDAEDDHIAEFVEMGDVTTCIYLGTHAIPDVMERLLADGHDPETPVTVVYHASWPDEDVIEGTIETIGDRVEDAGYRASALAVIGDAGAGAGYERSYLYGDWANRGSDTDQ

SEQ ID NO: 2180 - protein, 299 aa, Vibrio cholerae
MPATDQLRIKIMAQDAVTPLRKTPRLAVVEGSGYVRAARSQLQAGEVALVGAGPGDPELLTVKALSYLQQADVVLYDYLVSDEIMALIPSETILVCVGKRAGHHSVPQEKTNQLLVDFARQGYRVVRIKGGDPFMFGRGGEELEVLFEAGVKFQVVPGITAAAGATAYAGIPLTHRDYAQSALFVTGHLKAQAEDLDWSTLARGKQTLVIYMGLSNAAAIAEQLQLHGRQASTPVAIIERGTQVNQQVLIGTLQTLPSLASQAQSPALIVVGEVVALAAKLHWFGEQGATQQLDAAQSA

SEQ ID NO: 2181 - protein, 251 aa, Prochlorococcus marinus str. MIT 9313
MSRISIVGAGPGATDLLTLRAAEHLKQAEVLVWTDSLVSPDIAALAPESCERIRTSSMTLEEVLPLLVNRAQAGKRVVRLHDGDPCLYGALSEQICGLADAGIEVEVVPGLSAYQATAAALNAELTIPGLVQTIVLSRAGGRTGVPERENLQHLASLGASLCLYLSARHVEEVQATLLQHYSAETPVAIGYRVSWPDQWLSVVPLKQMATTSREHELIRTTLYVVSPALAAGRQRSKLYSPSHKHLFRQKG

SEQ ID NO: 2182 - protein, 266 aa, Mycobacterium tuberculosis CDC1551
MAPTAAGHPVVGDQAMTVYFIGAGPGAADLITVRGQRLLQRCPVCLYAGSIMPDDLLAQCPPGATIVDTGPLTLEQIVRKLADADADGRDVARLHSGDPSLYSALAEQCRELDALGIGYEIVPGVPAFAAAAAALKRELTVPGVAQTVTLTRVATLSTPIPPGEDLAALARSRATLVLHLAAAQIDAIVPRLLDGGYRPETPVAVVAFASWPQQRTLRGTLADIAARMHDAKITRTAVIVVGDVLTAEGFTDSYLYSVARHGRYAQ

SEQ ID NO: 2183 - protein, 568 aa, Mycobacterium tuberculosis CDC1551
MTIMTRGRKPRPGRIVFVGSGPGDPGLLTTRAAAVLANAALVFTDPDVPEPVVALIGTDLPPVSGPAPAEPVAGNGDAAGGGSAQEHGRAASAVVSGGPDIRPALGDPADVAKTLTAEARSGVDVVRLVAGDPLTVDAVISEVNAVARTHLHIEIVPGLAASSAVPTYAGLPLGSSHTVADVRIDPENTDWDALAAAPGPLILQATASHLAESARSLIDHQLAESTPCVVTAHGTTCQQRSVETTLQGLTDPAVLGATDPACSANGRDSQAGPLIVTIGKTVTSRAKLNWWESRALYGWTVLVPRTKDQAGEMSERLTSYGALPVEVPTIAVEPPRSPAQMERAVKGLVDGRFQWIVFTSTNAVRAVWEKFGEFGLDARAFSGVKIACVGESTADRVRAFGISPELVPSGEQSSLGLLDDFPPYDSVFDPVNRVLLPRADIATETLAEGLRERGWEIEDVTAYRTVRAAPPPATTREMIKTGGFDAVCFTSSSTVRNLVGIAGKPHARTIIACIGPKTAETAAEFGLRVDVQPDTAAIGPLVDALAEHAARLRAEGALPPPRKKSRRR

SEQ ID NO: 2184 - protein, 251 aa, Mycobacterium tuberculosis H37Rv
MTVYFIGAGPGAADLITVRGQRLLQRCPVCLYAGSIMPDDLLAQCPPGATIVDTGPLTLEQIVRKLADADADGRDVARLHSGDPSLYSALAEQCRELDALGIGYEIVPGVPAFAAAAAALKRELTVPGVAQTVTLTRVATLSTPIPPGEDLAALARSRATLVLHLAAAQIDAIVPRLLDGGYRPETPVAVVAFASWPQQRTLRGTLADIAARMHDAKITRTAVIVVGDVLTAEGFTDSYLYSVARHGRYAQ

SEQ ID NO: 2185 - protein, 565 aa, Mycobacterium tuberculosis H37Rv
MTRGRKPRPGRIVFVGSGPGDPGLLTTRAAAVLANAALVFTDPDVPEPVVALIGTDLPPVSGPAPAEPVAGNGDAAGGGSAQEHGRAASAVVSGGPDIRPALGDPADVAKTLTAEARSGVDVVRLVAGDPLTVDAVISEVNAVARTHLHIEIVPGLAASSAVPTYAGLPLGSSHTVADVRIDPENTDWDALAAAPGPLILQATASHLAESARSLIDHQLAESTPCVVTAHGTTCQQRSVETTLQGLTDPAVLGATDPACSANGRDSQAGPLIVTIGKTVTSRAKLNWWESRALYGWTVLVPRTKDQAGEMSERLTSYGALPVEVPTIAVEPPRSPAQMERAVKGLVDGRFQWIVFTSTNAVRAVWEKFGEFGLDARAFSGVKIACVGESTADRVRAFGISPELVPSGEQSSLGLLDDFPPYDSVFDPVNRVLLPRADIATETLAEGLRERGWEIEDVTAYRTVRAAPPPATTREMIKTGGFDAVCFTSSSTVRNLVGIAGKPHARTIIACIGPKTAETAAEFGLRVDVQPDTAAIGPLVDALAEHAARLRAEGALPPPRKKSRRR

SEQ ID NO: 2186 - protein, 262 aa, SYNECHOCOCCUS SP. WH 8102
MTNAEQTGTVYLVGAGPGDPELLTLKAHRLLSQCDALVYDSLVPREVLDLVPASCERRFVGKRRGHHSVPQPSTNAVLVEMAQKHSTVVRLKGGDPFLFGRGGEEAAYLAERNIPVQVVPGVTAGIAAPAYAGIPVTHRRAGSSVTFVTGHEEIDKRRPSVDWRALATASDGLVIYMGLHNLPRIAEELMAGGLAATTPVAVIQQGTVAGQRCLKATLVDVADQCRAEAFKSPSIVVVGEVIDQQVEACRPSPAAVTMPILF

SEQ ID NO: 2187 - protein, 268 aa, SYNECHOCOCCUS SP. WH 8102
MVVEAATTTASSVNQPLTHPVCFVGGGPGAADLLTLRAAERIRQADVLIWTDSLVCPQITALAPDHCERIRTSTLTLEEVIPLLIDRQRQGAKVVRLHDGDTAFYSAINEQICALNDADIPVEVVPGVSAYQAAAAGLSSELTIPGVVQTIVLGRAGGRTGVPPSEELDRLAGLGASLCLYLSARHIDDVQATLQRHYPDDTPVAIAYRVSWPDEWMSVVPLAQMAAASKERQLIRTTLYIISPALNGGQQRSRLYSPDHDHLFRQRH

SEQ ID NO: 2188 - protein, 485 aa, Bacillus halodurans
MNKQGKVYLVGAGPGDLRLMTLKGKDCLQKADVVLYDRLVNPLFLEWTKPEAELIYCGKLPDRHLLRQEAINELLIEKGRQGKVVVRLKGGDPSVFGRVGEEADVLKEAGLPYEIVPGITAGIGASTYAGVPVTHRDYGASFTVVTGHDKSPSGQPLIDWHALANGIDTIAFYMGVSNLPYITEQLIAHGRDPETCVLLIQWGTIGKQRVVEGRLNTIVSRVKEEGITNPAITLVGNIGKLRTEKSWFESQRLFGHQVLIGRTTAEEGGLAKTLMEAGAEVFEFPRWHVTSKPWEVTPGEVQEADHLVFTSPHSVHFFFESLTEQRMDIRHIRGSFFAASKKSLKIIRSFACTAALLQELPAGGKTIIFGDEENEMKQKYPFEEASYVSTHQKTLVPQSLRTCRRLLDEGRIETLVFPSAASVNAVIDGLEKCGESVGTLSQVKTVITFGPESSNAAKEAGFQVDIQLEAPSAQLLIETLEAVRV

SEQ ID NO: 2189 - protein, 457 aa, Salmonella enterica subsp. enterica serovar Typhi
MDHLPIFCQLRDRDCLIVGGGDVAERKARLLLEAGARLTVNALTFIPQFTVWVNEGMLTLVEGPFDETLLDSCWLAIAATDDDTVNQRVSEAAESRRIFCNVVDAPKAASFIMPSIIDRSPLMVAVSSGGTSPVLARLLREKLESLLPQHLGQVARYAGQLRARVKKQFATMGERRRFWEKFFVNDRLAQSLANADEKAVNATTEHLFSEPLDHRGEVVLVGAGPGDAGLLTLKGLQQIQQADIVVYDRLVSDDIMNLVRRDADRVFVGKRAGYHCVPQEEINQILLREAQKGKRVVRLKGGDPFIFGRGGEELETLCHAGIPFSVVPGITAASGCSAYSGIPLTHRDYAQSVRLVTGHLKTGGELDWENLAAEKQTLVFYMGLNQAATIQEKLIAFGMEANMPVALVENGTSVKQRVVHGVLTQLGELAQQVESPALIIVGRVVALRDKLNWFSNH

SEQ ID NO: 2190 - protein, 257 aa, Salmonella enterica subsp. enterica serovar Typhi
MSETFDPRCVWFVGAGPGDRELITLKGYRLLQQAQVVIYAGSLINTELLDYCPAQAERYDSAELHLEQIIELMAAGVKAGKTVVRLQTGDVSLYGSVREQGEELTRRGIDWQVVPGVSAFLGAAAELGVEYTVPEVSQSLIITRLEGRTPVPAREQLEAFASHQTSMAIYLSVQRIHRVAERLIAGGYPATTPVAVIYKATWPESQTVRGTLADISDKVRDAGIRKTALILVGNFLGKEYHYSRLYAADFSHEYRKA

SEQ ID NO: 2191 - protein, 501 aa, Nitrosomonas europaea
MRSLHHSGNIFNGSNDSLLVKFRCLYMDYLPVFLNIKQRDCLVVGGGEIAVRKIRLLLRAHARIHVVSPAISEELSNLLLQSPVITHTAESFRPDHLQDRALAIAATNDHEVNRAVSAAARKAGIPVNVVDNPDLCTFIMPSILDRSPIIVAVSSGGTSPILARLLRSRLEALIPSAYGRLAEYAARFRDKVRQRFIHQENRRFFWERMLQGPFAEMVFAGRDQAAQDYLSEALENSTDQFPTGEVYLVGAGPGDPDLLTFRAMRLMQQADVVIYDRLVSPAILDMVRQDATRIYVGKVRNQHTLPQTSINELLVKLAQEGKHVLRLKGGDPFIFGRGGEEIETLSQHHIPFQVVPGITAASGVASYAGIPLTHRDHAQSCVFVTGHLKDNTIQLDWPALARPNQTIVVYMGLLGVTELCRQLIAHGLQATTPAAIVQQGTTPNQRVLTGTLETLPDIIQQNPLKPPTLIIVGNVVKLHQKLAWFNSTSEPMGTSSGPGYP

SEQ ID NO: 2192 - protein, 192 aa, Ferroplasma acidarmanus
MLVKKYYDEGLDITRLHSGDPSIYGAINDEIQFFNSNGMEYEIIPGISSVFAAAASMGMELTSPGTTQSVILTRVPRRTEHFENEELDILASHKTALAIFLSASNARAVTEKLIKGGYKGDDRAVIAYRVSWPDQKIIETTINGLEHSLFENRINRQALIMVGGNISYNSDKKSYLYNPDFTHLFRKSSKKS

SEQ ID NO: 2193 - protein, 457 aa, Salmonella typhimurium LT2
MDHLPIFCQLRDRDCLIVGGGDVAERKARLLLEAGARLTVNALTFIPQFTVWANEGMLTLVEGPFDETLLDSCWLAIAATDDDTVNQRVSDAAESRRIFCNVVDAPKAASFIMPSIIDRSPLMVAVSSGGTSPVLARLLREKLESLLPQHLGQVARYAGQLRARVKKQFATMGERRRFWEKFFVNDRLAQSLANADEKAVNATTERLFSEPLDHRGEVVLVGAGPGDAGLLTLKGLQQIQQADIVVYDRLVSDDIMNLVRRDADRVFVGKRAGYHCVPQEEINQILLREAQKGKRVVRLKGGDPFIFGRGGEELETLCHAGIPFSVVPGITAASGCSAYSGIPLTHRDYAQSVRLVTGHLKTGGELDWENLAAEKQTLVFYMGLNQAATIQEKLIAFGMQADMPVALVENGTSVKQRVVHGVLTQLGELAQQVESPALIIVGRVVALRDKLNWFSNH

SEQ ID NO: 2194 - protein, 540 aa, Bacillus megaterium
MKGKLLVIGFGPGSFEHITQRAREAIQESDMIIGYKTYVELIQGLLTNQQIISTGMTEEVSRAQEAVKQAEAGKTVAVISSGDAGVYGMAGLVYEVLIEKGWKKETGVELEVIPGISAINSCASLLGAPVMHDACTISLSDHLTPWELIEKRIEAAAQADFVVAFYNPKSGRRTRQIVEAQRILLKYRSPDTPVGLVKSAYRDREEVVMTNLKDMLNHEIGMLTTVVVGNSSTFFYDDLMITPRGYQRKYTLNQTEQPLRPHQRLRKEAEPWALDQEEAVKQSASAIEAVQNTREETAASRALAEEALQAILGESTSAVVHQPIESIFEVAVSPGLANKKFTPVQMTTLAEVVGEKGTMEYTPDHQIKLQIPTAHPDMIIEKLQAASFLLSPVGDVFTIKACDFCDGEKSDAIPHTEELQKRLGGMDMPKELKLGINGCGMACYGAVQEDIGIVYRKGAFDLFLGAKTVGRNAHSGQIVAEGIAPDDIVEIVENIIHEYKEKGHPNERFHKFFKRVKNVYGFDYQDITPKIKVEPAPCGD

SEQ ID NO: 2195 - protein, 423 aa, Magnetococcus sp. MC-1
MKAGKIYLVGLGPGAEAHMTARAREAIADADVVIGYTTYIRLVQPLLSHQQVVKKGMAEELDRCEEAIVFAKQGKKVALISSGDVGIYGMAGPTYEVLFKSGWSPDSGIAVEVVPGCTALSSCASLVGAPLGHDFCSISLSDLLTPWPVIAKRLNAAACSDFVIALYNPKSGRRTEQIVAAQKILLHHRSGKTPVAIVKSAYRPRQSVVMTTLKKMVDEEIGMLSTVLIGNGETFVKEGIMITPRGYADKYVDFTKEIKEGEQAGHSLSMGLTGWHEIVREHLRLHPKQSMQITSERFDVPMGEVLKAVSEAGDRPIPGRTVERIKRKALPGLLITMKQVRIRWVAGAAEGTITLQDATWAVSESEVQLVGPGTSVALPIDSIKGIWLSRSGSGKTLFMTDRFGAVLLRVQVTAQSALRVAGP

SEQ ID NO: 2196 - protein, 497 aa, Leptospira interrogans serovar lai str. 56601
MKKGRLNIVGIGPGNDEHITPAAFHAIQEADLVIGYVTYINLVKHQLVGKQVTQTGMTEEIDRAQEAVNTAKEGKIVTLVSSGDAGVYGMAGLVFEVLRKMGWKKEESPEIKIIPGITADSSCASLIGAPIIHDTARISLSDLLTPWSVIENRLKCAAQGDFVITLYNPASGRRQRQIVKASKIIKRHRSGDTPVALIKSAYRKQQNVFLSDLDNFLNYEIGMNTTVIVGSSNTFVYEGFMITPRGYTNKYSLEDASLKEGQKKGFSLRTIEDLKSNTNLEDTSLNLNVTKIRGAFIKKSTSIVSDQELSKSPASITNTDSSKIQSQDSSAIKAIKTLDLLSKIQKESSKKSHKQLEPGKKTLAYIGRLGGAILFKTLEKFYIIGKLKNSICFEEYGFQNPGENYNKYLELKIVDMEKVLNFPFEFSMFLPNQILPEEIYEKLVIHRNSSISERLLNYAYEKSERVFLNGQEYRDISWLGIIPLEVWNLVRGILLKC

SEQ ID NO: 2197 - protein, 609 aa, Thermosynechococcus elongatus BP-1
MLPLEPFQPIGAIATTAQGLAQLQRLGDAGIPLSIWVSPQLGSAHPQVPAYERPLAAHLQKHWCHYRAWIFALACGAVVRLISPLLTHKSQDPAVCVLAEDGQWIVSLLGGHGAGGDRLCQILSATIGATPILTGASGSQGYFAVDTWGTALGWQRGAGDWNAIASQQAQGKAVQVYQTCGSSLWRTGLSSDQPLEWVSTPPLENAVWITEKVLPASVTSGVAWHPRVLWLGIGCERGTSAALIQQAIDQTLAQGGLSPLAIAGLASIDRKADEVGLCQVAKAHDWPSRWFSAQELAPVTVPTPSAIVAAEMGTPSVAEAAAVLASGGGRLIVPKQIYRQEGERGAVTIAIAQSEREWIPRQGSLSLIGTGPGSLDQLTLAARSALLAADILVGYTLYLELLAPLRRPGQMVAAYAITQERQRAEAAIELAQWGLNVAVVSSGDCGIYGMAGLVLELLAAADITDLPVEVFPGVSAVNAAAARLGAPLMHDFCAISLSDRLTPWPVIKKRLQAAAEADFVTALYNPRSRDRQQQLVDAKAIFLEYRSPQTPVAIVRAAYRPEEHITLTTLGAFEPATVDMFSLVLIGNASTRRFQDWLITPRGYLGKEP

SEQ ID NO: 2198 - protein, 624 aa, Thermobifida fusca
MSAQRPSCSPTRHGVGDDALRGRGVAVDGPLGRRSHRDRQRPHRPIPPARADRLRRAPTSRDHRRARRVHRRGRIQRSPHVPPRRHPLPGGTWPPRRLGASRVRGQRSRAGGGMSSTPGRLYGVGLGPGDPEFITRKAARLIAEADVIAYYSGTHGRSIARSIAADVIPEGVIEEKLVYPVTTGTTDHPGGYEGAITEFYDASAQRLAAHLSQGRDVVVLCEGDPLFYGSYMYLHDRLASRFPTEIVPGVTSISAASAAAACPLVRRTDVLTILPGTLPPPELARRLADTDAAAVLKLGRRTFAGVREALAQAGRLEDAVYVERASMAEQRILPVGDVASDDVPYFSLILSSGDSTPRNRRPRGRVRAPQRTPAPHHPDSPAELLVVGLGPAGEQWLTPEAAQALANVDHVVGYGPYVDRVPVRPGQQRHSSGNTVELDRARFALDLALAGERVAVVSGGDAGVFGMASAVFEAAQDPRYADVPVRVLPGLTAVQAVAARAGAPIGGDFAVLSLSDRLKPWEVIEARLEAAARADLVLAIYNPASRSRRTQVARARDVLLRHRRDNTPVVVGRDVGREGESVEVTTLGKLDPEGIDMRCLLIVGSSSTSVTAAGAVWTPRFVAE

SEQ ID NO: 2199 - protein, 250 aa, Sulfolobus solfataricus
MKMGRLYIVGIGPGSKEQRTIKAQEVLEKSNVIIGYNTYLRLISDVLDGKKEVIGARMKEEIFRANTAIEKALESNNTVALVSSGDPQVYGMAGLVYDLIARRNLDLDVEVVPGVTAALAAAARLGSPLSLDFVVISLSDLLIPREEILHKVTKAAEADFVIVFYNLINENLLIEVMDIISKHRKPNTPVGLVKSAYRNNENIIITTLSSWKEYMNEISMSTTMIIGNSLTYRYKNYMITPRGYERKYEL

SEQ ID NO: 2200 - protein, 569 aa, Thermoplasma acidophilum
MLKMAMIDEIRRMLVVSISKRGSEVASRISTVMRSRGHIVDAFCRYHVDGCDILSDPVKVFLADNLRRYDAAVLVMSLPGFYRISADLMIEKNHDVPVVVVDDAGRFAVAASAGHAGGSDELAAYIAGIIDGQAVITDGIESGGRVSVEKIARSLLATIANPECIIPVNAAIANGEHVPVIFRSKKRSMLRRLFAESSDEKHGYAIVLADEPGEDANTCYLIPDDISIGIGFNSSADAELISACLERFLEEAGLAWEDIDYVSSIKDLPDVSIIRKGTRFVKFDPADIRDIDPEMLTHVSDKARDVFGVPGVAEPCAIRSLGPGSKIFLPFRSCGRSVTLAAARRRKLFSGHISFIGVGPSDPDLMTMKARRAIVASDIVAGYQMPLDIAKSMLWNKPKVVFHWKEQQRYVDEVIDLYEKGYRIAYLFTGDSCFTESELIRRFTSKCRNFDIIPGISSVQAASSITGMAIEMAGIISFHVTGDIEDRKADLLRTISERKRAIIIPRPYDFMPKDIAKFLTDRGFGDLPAVVIERATAADERRTASFLKDLIGSDFSDISIMVVGKPVIA

SEQ ID NO: 2201 - protein, 86 aa, Arabidopsis thaliana
MGFKTLPSLPQKLMDHGLPFDTPAAAVERGTTPLLNYVFAELKDFATEIQSAGLVSPTPIIIGKVVELSPLWPHCMKESSCLVETQ

SEQ ID NO: 2202 - protein, 256 aa, Mesorhizobium loti
MNALPNANSRGKLVGVGTGPGDPELLTLKAARALAEADVVAYFAKRGNNSNARAIVEARFRPDMLELPLLYPVTTEIDKDHDDYRSQITGFYEESAQKVAEHLEAGKMVAVLSEGDPLFYGSYMHLHVRLAHRFPTEVIPGITAMSGCWSQTGVPIVQGDDVLTVLPGTMSEFELTRRLADTDAAVIMKVGRNLPKIRRALEVTGKLTRAVYVERGTMAGSVSTKLADKRDDKAPYFAIILVAGWSGRPGALGAQS

SEQ ID NO: 2203 - protein, 120 aa, Glycine max
  unsure (1)..(120): unsure at all Xaa locations
MALALRAPLFQPLPASIPAPSTAFASTARPSSSAATATAICAAASPFTEATSSSRYRRDAWSYTAQDSSSSSSAAAAAAAAASGRRDDEIALQLPELRRLLEALRASRGKGLEGERGGGX

SEQ ID NO: 2204 - protein, 146 aa, Triticum aestivum
  unsure (1)..(146): unsure at all Xaa locations
MALALRAPRFQPLPASIPATSTAFASTARPSSSAATATAICATASPFTEATSSSRYRRDAWSYTAQDSSSSSSAAAAAAAAASGRRDDEIALQLPELRRLLEALRASRGKGLEGEGGGGGPXGRVALVGTGPGDPELLTLKAVRAX

SEQ ID NO: 2205 - protein, 168 aa, Thermoplasma volcanium
MYGALMEQLSLLREKGIDFEVIPGVSVLTSAAASLGIELTMDNISQSVIIARGSLRIPVPEKQSILALSSHQSTMVIFTAIHIIEKVVEDLLKGGYPKDTPVGVVYHSTWKDEKVIRGTLEDIVQKVKDNRIYRTAIIVVGKVVNPERVYSTKLYDPSYTHSFRRGSS

SEQ ID NO: 2206 - protein, 335 aa, Halobacterium sp. NRC-1
MSTDDTTTTDDSTSNCGASTTDTDDSTSSCGGSTTDTDDSASSCGGASGSSDSSGCGASSDTDSNEQTVSATVDDFDADPGSLVAVGLGPGRPEGMTDRATAALADAEHIVGYTTYVDLLPDEITDDAEEIYDTPMCGEVSRTEEAVDRALAGNHVAIIGSGDPNVYALAGLALEITESKGATPSMLDFEVVPGVPAAQSCGARLGAPLVNDSVSISLSDHLTPMPEIESRLHAVASEEFTISIYNPWSRKRRENFQKACEILLAHRDADTPVGIVHGAGREDEEVEITTLGELESYGETDLIDMTTTVVIGNAETYVFDDRMVTPRGYETKYDY

SEQ ID NO: 2207 - protein, 243 aa, SYNECHOCOCCUS SP. WH 8102
MPAGLTLVGVGPGDPELLTLAAVRAIEQADVVATPVAREGSASMAATIASHCISTKQRLLPLLFPMVSAARPRREAWHLAADALAAEVKAGQAVVLLCEGDASLFATGSYVLLALQQRHPDCPTRVIPGITAISAAAASAGWPLALQQDQLLVMPCPETPDALTGLLETAAQHPRVLALMKLGHRWAWVRPLLERQNMLSGALFAERVGWPDQIVRSAGDIEASERPYFSLLLVRQGWPDVLP

SEQ ID NO: 2208 - protein, 121 aa, Hordeum vulgare subsp. vulgare
TKSASETTEATKKMGSEAMGKVSETVQAGQDRAVEGKDQTASFLGEKTEAVKKTATETADAAKEKSTEAAQHVQDTAAEYTKDTPVAPKENVFQKAGGNIVGAATDAKDAVMNTLGMGGDK

SEQ ID NO: 2209 - protein, 298 aa, Deinococcus radiodurans
MFERDEHHFPVKRLLLLGALVGAGAYYLSREQNRKALDAKLAELGLKDAAQDVGSSVTKGWEKTKDAAQNAGSVIADKAQDVAGEVKSAVAGATAEIKDAGKEVADTAKDAGQNVGQNVKREAADLADQAKDKAQDVKADVSKAADQAKDKAQDVAQNVQAGAQQAAANVKDKVQDVKADASKAADQAKDKAQDVAQNVKQGAQQAASDAKDKVQDVKADASRAADQAKDKAQDVAQNVKQSAQDAKTDVDAKAKSWAFDLRTDAEAGKQGGQTGSTTNNAGTAGNTGMTGNTNTRKN

SEQ ID NO: 2210 - protein, 190 aa, Picea glauca
MAALSAKMPLLSISKGSTHHGVTAMRSATAAPRVFFRTIPRAGEYGRNAAEEARETADSTAEKSKRMAEEAKERAKGATYEAKEKAKGTTYEAKEKTKSAAEEAGNKAGEMKENAREKAEGLGQRAKETTSQATEKAQNIGDQPKQKVQEAWDMAKGTGQKVKETVVGKAEDTKETVEDKTESAKRKINE

SEQ ID NO: 2211 - protein, 164 aa, Pseudotsuga menziesii
MSDQYNYTKDSASDATERSKQYGQEKTGQAQGVAQSAQQKSAEAARVTQEKAAEASRAAREKASQATGTTKEKASQATGTTKEKASQATETTKGVGQSAAEKASQAAQAAKEKAQQGKEGTGSILQQAGEKVKGGTQTAMEALKHPLGGSDQGDQGDQGRDRNQ

SEQ ID NO: 2212 - protein, 164 aa, Pseudotsuga menziesii
MSDQYNYTKDSASDATERSKQYGQEKTGQAQGVAQSAQQKSAEAARVTQEKAAEASRAAREKASQATGTTKEKASQATGTTKEEASQATETTKGVGQSAAEKASQAAQAAKEKAQQGKEGTGSILQQAGEKVKGGTQTAMEALKHPLGGSDQGDQGDQGRDRNQ

SEQ ID NO: 2213 - protein, 153 aa, Pseudotsuga menziesii
MSDQYNYTKDSASDATERSKQYGQEKTGQAQGVAQSAQQKSAEAARVTQEKAAEASRAAREKASQATGTTKEKASQATETTKGVGQSAAEKASQAAQAAKEKAQQGKEGTGSILQQAGEKVKGATQTAMEALKHPLGGSDQGDQGDQGRDRNQ

SEQ ID NO: 2214 - protein, 153 aa, Pseudotsuga menziesii
MSDQYNYTKDSASDATERSKQYGQEKTGQAQGVAQSAQQKSAEAARVTQEKAAEASRAAREKASQATGTTKEKASQATETTKGVGQSAAEKASQAAQAAKEKAQQGKEGTGSILQQAGEKVKGGTQTAMEALKHPLGGSDQGDQGDQGRDRNQ

SEQ ID NO: 2215 - protein, 474 aa, Betula pendula
MASSREFKEKRAEAAAKLAASDLEDVKREREYEEQAKMEREELSLQQQQEDRPGVIGSVLKAVHETYEHAKEAVVGKTEETAESTRESGENAAEKARKTKDSAAEKTRETKKCAAEKAKEYKDYTAEKARETTEKARETKDSAAEKARETKDSAAEKAKEYKDYTAEKTRETRESAKEKAKEAAEKAKETKDSALGKAEEYKDYAAEKAKEAKDKTVGKASEYKDYAAEKAKETKDSALGKAEEYKDYTAEKEKEVKDKTVGKAGEYKDYAAEKAKETKDYTAEKTIEGKDTTLSKLGELKESAADAARRAMGFLSGKKDEVTQKTEETKEATKEKLSEAEEEARRKMEELKVRGEENKDDADRKDREDNKVNEADRGTAATANIFSSLPSVTEAIKRKLTQPSDVVDETRAAREHGSTGRKEAGKVVVDVEETRPGYIAAKLKESDQMAGQTFNDPGRRDDEGGIRLDRQGKM

SEQ ID NO: 2216 - protein, 136 aa, Gossypium hirsutum
MASHEQSYKAGRAEGRAHEKGEQMKESMKEKAEAAKQKTMETAEAAKQKTMETAEAAKQKTRGAAETTNDKTKQTAGAARGKAEETKETSGGILQQAGEKVRNAAQGATDAVKHTFGMADADEDEHNYPATVTRKD

SEQ ID NO: 2217 - protein, 225 aa, Arabidopsis thaliana
MASNQQSYKAGETRGKAQEKTGQAMGTMRDKAEEGRDKTSQTAQTAQQKAHETAQSAKDKTSQTAQAAQQKAHETAQSAKEKTSQTAQTAQQKAHETTQAAKEKTSQAGDKAREAKDKAGSYLSETGEAIKNKAQDAAQYTKETAQGAAQYTKETAEAGRDKTGGFLSQTGEHVKQMAMGAADAVKHTFGMATEEEDKEHYPGSTTTTTATTRTTDPTHQTYQRK

SEQ ID NO: 2218 - protein, 225 aa, Arabidopsis thaliana
MASNQQSYKAGETRGKAQEKTGQAMGTMRDKAEEGRDKTSQTAQTAQQKAHETAQSAKDKTSQTAQAAQQKAHETAQSAKEKTSQTAQTAQQKAHKTMQAAKEKTSQAGDNVREGKDKAGSYLSETGEAIKNKAQDAAQYTKETAQGAAQYTKEAAEAGRDKTGGFLSQTGEHVKQMAMGAADAVKHTFGMATEEEDKEHYPGSTTTTTATTRTTDPTHQTYQRK

SEQ ID NO: 2219 - protein, 169 aa, Arabidopsis thaliana
MASHQEQSYKAGETRGKAQEKTGEAMGTMGDKTQAAKDKTQETAQSAQQKAHETAQSAKDKTSQAAQTTQERAQESKDKTGSYMSETGEAIKNKAHDAAEYTKETAEAGKEKTSGILGQTGEQVKQMAMGATDAVKHTLGLRTDEGNKEHVSSAPSTTTTTTTRETQRK

SEQ ID NO: 2220 - protein, 226 aa, Brassica napus
MASNQQSYKAGETKRKTQEKTGQAMGAMRDKAEEGKDKTSQTAQKAQQKAQETAQAAKDKTSQAAQTTQQKAQETAQAAKDKTSQAAQTTQQKAHETTQSSKEKTSQAAQTAQEKARETKDKTGSYLSETGEAVKQKAQDAAQYTKETAQNAAQYTKETAEAGKDKTGGFLSQTGEHVKQMAMGAADAVKHTFGMATEEEDREHYPGTTTCTTQSTDPTRHTYERK

SEQ ID NO: 2221 - protein, 280 aa, Brassica napus
MASNQQSYKAGETRGKTQEKTGQAMGAMRDKAEEGKDKTSQTAQKAQQKAQETAQAAKDKTSQAAQTTQQKAQETAQAAKDKTSQAAQTTQQKAQETAQAAKDKTSQAAQTTQQKAHETTQSSKEKTSQAAQTAQEKARETKDKTGSYLSETGEAVKQKAQDAAQYTKETAQNAAQYTKETAEAGKDKTGGFLSQTGEHVKQMAMGAADAVKHTFGMATEEEDREHYPGTTTCTTQSTDPTRHTYEKEVRITGTIYEPSFFCFNNVMCLCFVISVVSLCL

SEQ ID NO: 2222 - protein, 226 aa, Brassica rapa
MASNQQSYKAGETKSKTQEKTGQTMGAMRDKAEEGKNKTSQTAQTALQKAHETTQAAKDKTSQAAQTTQQKSQETAQAAKDKTSQAAQTTQQKAHETTQSAKEKTSQTAQTAQEKARETKDKTGSLLSETGEAVKQKAQDAAQYTKETAQNAAQYTKENAEAGRDKTGGFLSQTGEHVKQMAMGAADAVKHTFGMATEEEDREHYPGTTTGTTRSTDQTRHTYERK

SEQ ID NO: 2223 - protein, 177 aa, Cicer arietinum
MASHDQSYKAGETMGRTEEKTNQMIGNIEDKAQAAKEKAQQAAQTAKDKTSQTAQAAKEKTQQTAQAAKEKTQQTAQAAKDETQQTAQAAKDKTQQTTEATKEKAQDTTGRAREKGSEMGQSTKETAQSGKDNSAGFLQQTGEKVKGMAQGATDAVKQTFGMANDDKDKDHFPTNRH

SEQ ID NO: 2224 - protein, 155 aa, Cicer arietinum
MTSHDQSYRAGEAKGRTEEKTNQMIGNIEDKAQAAKEKAQQAAQTAKDKTSQTAQAAKEKTQQTAQAAKDKTQQTTQATKEKAQDTTGRAKEKGSEMGQSTKETAQSGKDNSAGFLQQTGEKAKGMAQGATDAVKQTFGMTNDDQDKDHFPTNRH

SEQ ID NO: 2225 - protein, 112 aa, Glycine max
  unsure (1)..(112): unsure at all Xaa locations
MASNQNQASYHAGETKARNEEKTGQVMGATKDKAGQTTEATKQKAGETTEATKQKAAETTEAAKQKASETAEATKQKAAEAKDKTAQTAQAAXEKTYETAQSAQERAAQGKD

SEQ ID NO: 2226 - protein, 124 aa, Glycine max
  unsure (1)..(124): unsure at all Xaa locations
MASNQNQASYVAGETKARTEEKTGQMXXDKAGQATEATKQKAGETAEATKQKAGEAKDKTAQTAQAAKDRAAESKDQTGSFLGEKTEAAKQKAAEATEAAKQKTSETAQYAQERSSDAAQYTHS

SEQ ID NO: 2227 - protein, 140 aa, Glycine max
MASHRQSYEAGQTKGRTEEKTNQTMGNIGEKAQAAKEKTQEMAQAAKEKTQQTAQAAKDKTCDTSQAAKEKAQQNTGAAQQKTSEMGQSTKESAQSGKDNTQGFLQQTGEKVKGAAQGATEAVKQTLGLGEHDQDNRRNY

SEQ ID NO: 2228 - protein, 163 aa, Daucus carota
MASHQDQSYKAGEPKGHAQEKTGQMADTMKDKAQAAKDKASEMAGSARDRTVESKDQTGSYVSDKAGAVKDKTCETAQAAKEKTGGAMQATKEKASEMGESAKETAVAGKEKTGGLMSSAAEQVKGMAQGATEAVKNTFGMAGADEEEKTTTTRVTRSSARTE

SEQ ID NO: 2229 - protein, 159 aa, Daucus carota
MASHQDTSYKAGEAKGHAQEKTGQMADTIKDKAQAAKDKASELAGTARDRTAESKDQTGSYVSDKASAARDKSCETGQAAKEKTGGVVEATKEKASQMGESAKETAQAGKEKTGGVISSAAEQVKGMAQGATEAVKNTFGMGGGNEEKSTTTTRTTRSD

SEQ ID NO: 2230 - protein, 288 aa, Riccia fluitans
MASKQYEQSYDTTAQKTEEAKNAAAGTAEQTKQSAAETSDKTKQLGAEKTEQANRAASEAAGTVQEKAQVARDTGAEKAEQAKNYGAEKTEQAKSAASDMAGTLQEKAQATRDVGAEKTEQAKQYGAEKTEQAKGAASETAGTAQDKAQTVWEQAKQTAADATQYVQEKATQAWESTKQTTSDTTTTAGNKAVEAKDYAVDTAVQGKDFAVDKAVQGKDYAVDKALQGKDYTGEKAGQAGQYTTDRAVQGKDFTVAKTAEAVKGVVLGVKDAIVGETGANKPGPTSKH

SEQ ID NO: 2231 - protein, 213 aa, Hordeum vulgare
MASNQNQGSYHAGETKARTEEKTGQMMGATKQKAGQTTEATKQKAGETAEATKQKTGETAEAAKQKAAEAKDKTAQTAQAAKDKTYETAQAAKERAAQGKDQTGSALGEKTEAAKQKAAETTEAAKQKAAEATEAAKQKASDTAQYTKESAVAGKDKTGSVLQQAGETVVNAVVGAKDAVANTLGMGGDNTSATKDATTGATVKDTTTTTRNH

SEQ ID NO: 2232 - protein, 177 aa, Hordeum vulgare
MSSWLQEKSGEVVETTQVKAGEATKMASETGQSIQDRAVEAKDQTGSFLGEKSEAVTKSASETTEAAKKMGGEAMGKVSETVQAGQDRAVEGKDQTASFLGEKTEAVKKTATETADAAKEKSTEAAQHVQDTAAEYTKDTPVAPKENVFQKAGGNIVGAATDAKDAVMNTLGMGGDK

SEQ ID NO: 2233 - protein, 200 aa, Oryza sativa
MASHQDQASYRAGETKAHTEEKAGQVMGASKDKASEAKDRASEAAGHAAGKGQDTKEATKEKAQAAKERASETAQAAKDKTSSTSQAARDKAAESKDQTGGFLGEKTEQAKQKAAETAGAAKQKTAETAQYTKDSAIAGKDKTGSVLQQASEQVKSTVVGAKDAVMSTLGMTEDEAGTDDGANKDTSATAAATETTARDH

SEQ ID NO: 2234 - protein, 200 aa, Oryza sativa; identical to SEQ ID NO: 2233

SEQ ID NO: 2235 - protein, 200 aa, Oryza sativa
MASHQDQASYRAGETKAHTEEKAGQVMGASKDKASEAKDRASEAAGHAAGKGQDTKEATKDKAQAAKDRASETAQAAKDKTSSTSQAARDKAAESKDQTGGFLGEKTEQAKQKAAETAGAAKQKTPETAQYTKDSAIAGKDKTGSVLQQASEQVKSTVVGAKDAVMSTLGMTEDEAGTDDGANKDTSATAAATETTARDH

SEQ ID NO: 2236 - protein, 200 aa, Oryza sativa
MASHQDQASYRAGETKAHTEEKAVQVMGASKDKASEAKDRASEAAVHAAGKGQDTKEATKEKAQAAKERASETAQAAKDKTSGTAQAARDKAAESKDQTGGFLGEKTEQAKQKAAETAGAAKQKTAETAQYTKDSAIAGKDKTGSVLQQASEQVKSTVVGAKDAVMSTLGMTEDKAGTDDGANKDTSATAAATETTARDH

SEQ ID NO: 2237 - protein, 205 aa, Triticum aestivum
  unsure (1)..(205): unsure at all Xaa locations
XLASPGQASYQAGETKARTEEKTGQAMGATKDTAQHAKETTKQKASXXSDTGSYLGQKTEEAKHKAGQTTESTKQKAGQTTEAAKQKAAETTEATKQKAGETTEATKQKTAETTEATKQKAAEAMEATKQKAAEAGQYAKETVVSGKDKSAGVIQQATEQVKSAAAGAKDAVMNTLGMGGDNXXSKQSDTNTDSSKDSSTITRDH

SEQ ID NO: 2238 - protein, 230 aa, Triticum aestivum
  unsure (1)..(230): unsure at all Xaa locations
MASNQNQASYHAGETKARTEEKTGQVMGATKDKAGQTTDATKQKAGETTEAAKQKAGETAEATKQKAAEAKDKTAQTAQAAKEKTYETAQSAKERAAQGKDQTASTLGEKTEAAKQKAAETTEAARQKAAEATEAAKQKASETAQYTKESAVAGKDKTGSVLQQAGETVVNAVVGAKDAVANTLGMGGDNTNTAKDTTTEKITRDHXLICFLYSFGRSRAFYIIVGFPLV

SEQ ID NO: 2239 - protein, 219 aa, Triticum aestivum
  unsure (1)..(219): unsure at all Xaa locations
MASNQNQASYHAGETKARTEEKTGQMMGATKDKAGQTTEATKQKAGETAEATKQKTGQATEATKQKAGETADATKQKAAEAKDKTAQTAQAAKEKTYETAQSAKERAAQGKDQTASTLGEKTEAAKQKAAETTEAARQKAAEATEAAKQKASETAQYTKESAVAGKDKTGSVLQQAGETVVNAVVGAKDAVSNTLGMGGDNKSNTAKDTTXTKKITRDH

SEQ ID NO: 2240 - protein, 1167 aa, Neurospora crassa
MARSGKKSPAPPPAYAPAYAPPPAYEAVPTSAVVSKNKNNKNKSAKVKDDYASEGVQDNDPFLLPGSDFVLLTIITMLSAVVRLFRIYQPDSVVFDEVHFGGFASKYIKGKFFMDVHPPLAKLMITLFGWLAGFDGSFDFKEIGKDYVEPGVPYVAMRMFPAICGILLAPTMFLTLKAAGCRSTTAFMGACLIIFENGLLTQARLILLDSPLMIGTALTALGFTAFTNQQELGPGKAFTPSWWFWLVVTGLGLGITASIKWVGLFTIAWVGSLTLIQLWVVLGDHKHVSPRAFAKHFMARAFCLIVIPLTFYMAMFGIHFMCLTNPGDGDGFMSSEFQSTLNSKGMQDVPADVLMGSRVTIRHVNTQGGYLHSHPLMYPTGSKQQQITLYPHKDDNNIWLLENQTQPLGIDGQPINGTGAWDHLPETPYIKDGAILRLYHLPTHRRLHSHDVRPPVTEADWQNEVSAYGYEGFDGDANDFFRVEIVKKKSKSGVAQERLRTIDTKFKLVHIMTGCVLFSHKVKLPTWASEQQEVTCAKGGSLPNSLWYIEFNDHPQLGADAEKVNYRNPGFFGKFWELQKVMWKTNAGLVESHAWDSRPEAWPILRRGINFWGRQHRQVYLMGNPIIWWSATAAVVIYVLFKGIAILRWQRSCNDYANPIFKRFDYEVGTSVLGWALHYFPFYLMQRQLFLHHYFPALYFAIIAFCQVFDFVTARISLVKDKVIFNRLGAVLFLTLSMVVFWLFSPLAYGNPWTKAECNRVKLFSTWDFDCNTFLDSYDNYYGITPTSQTPSQTPVQGTLERPAVANAPPQAQKPIVNQEQQAAKQEPSANPVGQRVISRQEKIEYRDQDGNLLNAEQVEALKGKVEFKTKYETRTRVIDANGNEIQLGGSGMPKVVRAPKASQPVAPPHPDVQGVDQETPKIPAAEEVVPQAEMSVDGEKEAEEKVAKPASESNEATVSQDIEQSDDVRAAQEKIQKMVERIQKVANNVDNLKNNVAEKAGDKVDQVEEKAEQAVEKVQEVAEPVEEKAEQVVEKVQEVAEPAKEKAEQVVEKVQEVAEPAKEKAEQVVEKVQEVAEPAKEKAEEAAEKLAEKVEEATEQSKEKIESVADNVKEEVTEKAEQVQEKAQEAGEKAQEVVLEKIDQVKEMAEEVGEKAEAKTEAKDEL

SEQ ID NO: 2241 - protein, 273 aa, Neurospora crassa
MSAFTIATRRVATQIPRAAAVSTPRAAFSSSVTLQKSISETVKDTLNTVNRAVSDKALDGMDIGSNVASKLKETADTLTNASSPSDLASRVKDAASNAASDAADAIPKDVKGKASELAGEAKGKASELSGKAKGAANEATSGNVSELAGEAKGKASELAGEAKGKASELAGKAKGAANEATSGNLSGAASELTGEAKGKASELAGKAKGAANEAAGGDVQGKAQELKHEASGKASELAGKAKGAVSEGQGKAKGMAQETEKMAKEAGKQSEFS

SEQ ID NO: 2242 - protein, 130 aa, Sporobolus stapfianus
DTKETTKQKASETGSFLGQKTDQAKHKAGETTESTKQKAGETTEAAKQKTAETTEAAKQKTAETTEVAKQKTAEAIEVTKQKASEASEYAKDSAVSGMVKTGIVIQQVTEQVMSAVLIAKDAVVITLLDG

SEQ ID NO: 2243 - protein, 166 aa, Encephalitozoon cuniculi
MAEVSKKRCEHNSDSQCEGCKANDKACEARDKTKETAGSAKDKTKETAGSAKDKTKETAESAKDKTKETAGSAKDKTKETAESAKDKTKETAGSAKDKTKETAESAKDKTKETAGNVRDNVENKDKNEVYENIKEGGSKAWNKTKEVANSMKDGIKDLANKDEQKK

SEQ ID NO: 2244 - protein, 223 aa, Morus bombycis
MACKQRLRFGRFFYVSAVVMVIIAASFASTCGGSGVGHTTEEGRDFEEVKERAQQTQNKAAETAKEANEASETWTDWAKEKISEGLGFNKDADAKDAPKKASDTVSDTAKKSEEVAAETGEYSADKARSATERAAETVSGAKEKAYDTAKSAKEKAYETAQKAKEKVYDSTGTAKEVKDKEKADEGYDAAKHKGEETLESAKDKTQHLKDKVAGGGRGRDEEL

SEQ ID NO: 2245 - protein, 227 aa, Morus bombycis
MACKQRLRFGRFFYVSAVVMVIIAASFASTCGGSGVGHVPSTTEEGRDFEEVKERAQQTQNKAAETAKEANEASETWTDWAKEKISEGLGFNKDADAKDAPKKASDTVSDTAKKSEEVASETGEYSADKARSATERAAAETISGAKEKAYDTAKSAEEKAYETAQKAKEKVYDSTGTAKEVKDKEKADEGYDAAKHKGEETLESAKDKTQHLKDKVAGGGRGRDEEL

SEQ ID NO: 2246 - protein, 143 aa, Aphelenchus avenae
MSSQQNQNRQGEQQEQGYMEAAKEKVVNAWESTKETLSSTAQAAAEKTAEFRDSAGETIRDLTGQAQEKGQEFKERAGEKAEETKQRAGEKMDETKQRAGEMRENAGQKMEEYKQQGKGKAEELRDTAAEKLHQAGEKVKGRD

SEQ ID NO: 2247 - protein, 181 aa, Drosophila melanogaster
MDEGKKKAAEAAAAAKEAAASAAQAAKTKAAGAAGSAKEAAGAAASAAKDKAGAAAASAKEKAAGAAVAVQQSASSAAIAAREKAANAAEFTKEKATAAAAAATEAATSAASTVREKAAAAAVAVRAKASATAIAVRDSVTAVAVAAQGAAAAAKDKVATAAASAAAAAKSKVTRQSQDEV

SEQ ID NO: 2248 - protein, 1545 aa, Streptomyces coelicolor A3(2)
MRLRRPRRPSDGPPGRSGARRLRVASAPLIPLTVIGAVVAGLIGPEPPSDGPLPGTSAVADSYDGFDADAAEQLRQDQCLMAGALRLGGPEMGGIAQTALNQTPEQLHVAADQEYWNDTPLALAYVKDRELIDQESATLDPRVQAWQDTLSGLSTPGGFKSVTDFSWPPGSGGGADFFDQVGYSTWLGEQWWKEEARFYEDPSAKADEATVKAVTDLGTPLYGDAVYDPSMSSEEWALAVEQEHAFDELLTGDLFSGMREDDARMFLSVGGFPSSAPEPGSLAFRLAVEDLKTRFAACTWTNPVDPGKVLGQEVATASVEWQREVAEQAIPRNQIIDANRDATKALATGAKALGEMLGQSWTADHLARWQDYWSPGGAGWIGDSPMIVHIHAASDKCLEVAGNSKADGAVVQMYTCNGGANQKWRVDGDSLVNVNSGKCLDVNRDGTADGTRIQQWTCKQNGAQGWEFTPNRTTQLRNTGSGKCLDLHTYANSQDAWLWQCNGTDPQKFDIVASGHNGTDALDYPTSGQFTQATKGITNARAKAAEQLGVIRRQAQIAGMAAADSEESLNTAYGIADSMGAPRGRALLVGQQKDQVTKASSAALNAMIKAGETALSATKASAGDSASIAARAVTQAAGTQAAFRTAAARAAKEQAKAAADAAAVQASNAKAARDTAKAKLTETQNAEADAKAAAATAHAKRLAAEKEEATAKAEKETAAQKQAEAAEHKTKAQQRATEAKDAKERAETADTTATEKRKGAEAARDKAKALRDDAWDAEQKANAARAKADAKEAYAQASASEDNAQEARKAANDADAAADDAETAAVAARSEADKATKAAADADAAATRAEAAAKRSRADSDAAQAAKLTADAAVRTATSAAADAIKASKTAATAARTAVELADDAEQHAADAKKEADAAKAEAVTALAGANESTGYAYTTAQAAVDAGNSAAQVAAPANDAIQLGSPYVTTDSAAGLAVLTGQSSKTIAEQQQAVAEAHAQNAEESAAQAQSVANAASGDSKAAYTLAAEALGYAADARNSAKEALGYSAEAASYATQAAQSLTRTIAYDTQATKDAAAADSAAGRAEGHAEDARDSADAAALDAEAARSAADTAEQAAEDARDAADHAATEAAAAEEAAKDAQKYAESAQQAAEQAEKEANAEQIDKGTVVDQTGAPIGDVFYVVDHIEKIGEPEVVKQSDGCEGWIDELFYNGDCTLTTKLRYKEVFDLYLCTAEDLDASQYMCPSGATLYLGEYTSDELSTEVTHTITIAEYQKGVDPVDILFGSWIKCAQKIAPGGASGSWGGCAWAGVDVASLFAGKIIRPIADAVKAVDAAARTGIGFADAYKALRTLGLPTDAAFRIGVKGLDGFVKTCTRTRGKLTARASTAVGGCPVGLVAYNSEEMSHWAYRYRTESEYFEGDHNVAVAKVPGWNDPRTGDFIIANSKFSGHSETEILGKLEAKGFTPGQITALYTERQPCPACASVLTGSLKEGTPVTWSVPYHPDYAKESRSLLDSYVRQANGQQRARPTTTQRLTEGNEAHD

SEQ ID NO: 2249 - protein, 96 aa, Fusobacterium nucleatum subsp. nucleatum ATCC 25586
MGAFDDLTGKAEELVGAVTDKAKELKDETVAKAEELKDKTVEKAEELKNKVVDKAKELKEGAEGKASELKDKAAEKAEELKDKITDGADSLINKLK

SEQ ID NO: 2250 - protein, 179 aa, Haemophilus somnus 129PT
MKKALLTALVLGTSLTVTGCFDKDNNVSQQAESTKESVSTAIAETKEAMSKKVTEVKEMATEKVEVAKEAMSEQVTEVKEMATEKVEAAKEAMSEQVTEIKETAAEKVEAAKEAMSEQVTEIKETAAEKVEAAKEAMSEQVTEVKEMAAEKVEAAKEAMSEKVMEVKEMATEIKSAVEK

SEQ ID NO: 2251 - protein, 96 aa, Fusobacterium nucleatum subsp. vincentii ATCC 49256
MGTFDDLTGILDEVKDTVADKAKELKDEAVTKVGELKDKATEKAGELKDKVVDKAKELKEGAESKTSELKDKAAEKAEELKDKISEGADSLINKIK

SEQ ID NO: 2252 - protein, 195 aa, Enterococcus faecalis V583
MAKKGGFFLGAVIGGTAAAVAALLLAPKSGKELRDDLSNQTDDLKNKAQDYTDYAVQKGTELTEIAKQKAGVLSDQASDLAGSVKEKTKDSLDKAQGVSGDMLDNFKKQTGDLSDQFKKAADDAQDHAEDLGEIAEDAAEDIYIDVKDSAAAAKETVSAGVDEAKETTKDVPEKAAEAKEDVKDAAKDVKKEFKG

SEQ ID NO: 2253 - protein, 302 aa, Gossypium hirsutum
MASSWFFIVFLVLTVASVRCTTVDHMPSTDEDARDYSKLKTKTEEATDEHHSRTQQAKDELKSKADHAANEVKSNTQQAKDRASEVGKEAKEYTESWTEWAKEKISEGLGFKQDDDPKGSVEKAFDSVADTATKTKDKLQDMASGAGEYSAGKAKDMKDTAYKKTDDVKNAAKGKSSEMRQATTEKARELADSAKENANTAYIAAKEKVRDMADRTSEMTNEAQERGARKAEEAKEVVAEKAEGAAEETKKKNEERGESLKWAKEKAKQGYDAAKSKAEETIESAKDTIASGYESRSRNHKN

SEQ ID NO: 2254 - protein, 338 aa, Gossypium hirsutum
MASSWFFIVFLVLTVASVRCTTVDHMPSTDEDARDYSKLKTKTEEATDEHHSRTQQAKDELKSKADHAANEVKSNTQQAKDRASEVGKEAKEYTESWTEWAKEKISEGLGFKQDDDPKGSVEKAFDSVADTATKTKDKLQDMASGAGEYSAGKAKDMKDTAYKKTDDVKNAAKGKSSEMRQATTEKARELADSAKENANTAYIAAKEKVRDMADRTSEMTNEAQERAARKAEEAKEVAAEKAKDAAEETKKKNEETGESLKWAKEKAKQGYDATTEKAKETARQGYDAAKSKAGETVESAKDTIASGYESAKQKSQELKDNYVNGGGQGRGRERDEEL

SEQ ID NO: 2255 - protein, 301 aa, Gossypium hirsutum
MASSWFFIVFLVLTVASVRCTTVDHMPSTDEDARDYSKLKTKTEEATDEHHSRTQQAKDELKSKADHAANEVKSNTQQAKDRASEVGKEAKEYTESWTEWAKEKISEGLGFKQDDDPKGSVEKAFDSVADTATKTKDKLQDMASGAGEYSAGKAKDMKDTAYKTDDVKNAAKGKSSEMRQATTEKARELADSAKENANTAYIAAKEKVRDMADRTSEMTNEAQERGARKAEEAKEVVAEKAEGAAEETKKKNEERGESLKWAKEKAKQGYDAAKSKAEETIESAKDTIASGYESRSRNHKN

SEQ ID NO: 2256 - protein, 448 aa, Arabidopsis thaliana
MASDKQKAERAEVAARLAAEDLHDINKSGGADVTMYKVTERTTEHPPEQDRPGVIGSVFRAVQGTYEHARDAVVGKTHEAAESTKEGAQIASEKAVGAKDATVEKAKETADYTAEKVGEYKDYTVDKAKEAKDTTAEKAKETANYTADKAVEAKDKTAEKIGEYKDYAVDKAVEAKDKTAEKAKETSNYTADKAKEAKDKTAEKVGEYKDYTVDKAVEARDYTAEKAIEAKDKTAEKTGEYKDYTVEKATEGKDVTVSKLGELKDSAVETAKRAMGFLSGKTEEAKGKAVETKDTAKENMEKAGEVTRQKMEEMRLEGKELKEEAGAKAQEASQKTRESTESGAQKAEETKDSPAVRGNEAKGTIFGALGNVTEAIKSKLTMPSDIVEETRAAREHGGTGRTVVEVKVEDSKPGKVATSLKASDQMTGQTFNDVGRMDDDARKDKGKL

SEQ ID NO: 2257 - protein, 448 aa, Arabidopsis thaliana
MASDKQKAERAEVAARLAAEDLHDINKSGGADVTMYKVTERTTEHPPEQDRPGVIGSVFRAVQGTYEHARDAVVGKTHEAAESTKEGAQIASEKAVGAKDATVEKAKETADYTAEKVGEYKDYTVDKAKEAKDTTAEKAKETANYTADKAVEAKDKTAEKIGEYKDYAVDKAVEAKDKTAEKAKETANYTADKAKEAKDKTAEKVGEYKDYTVDKAVEARDYTAEKAIEAKDKTAEKTGEYKDYTVEKATEGKDVTVSKLGELKDSAVETAKRAMGFLSGKTEEAKGKAVETKDTAKENMEKAGEVTRQKMEEMRLEGKELKEEAGAKAQEASQKTRESTESGAQKAEETKDSAAVRGNEAKGTIFGALGNVTEAIKSKLTMPSDIVEETRAAREHGGTGRTVVEVKVEDSKPGKVATSLKASDQMTGQTFNDVGRMDDDARKDKGKL

SEQ ID NO: 2258 - protein, 479 aa, Arabidopsis thaliana
MASGQREAERSAKAERAEAAASLAAEDLKDINKGDVTYKLTERTTTTEPERPGLIGSVMKAVQGTKDAVIGKSHDTAESTREGADIASEKAAGMRDTTGEVRDSTAQKTKETADYTADKAREAKDKTADKTKETADYAAEKAREAKDRTADKTKETAEYTAEKAREAKDKTADKLGEYKDYTAEKAKEAKDTTAEKLGEYKDYTVDKAKEAKDKTAEKAKETAEYTSDKARETKDKTAEKVGEYKDYTAEKAKETADKAREAKDKTAEKVGEYRDYTAEKATETKDAGVSKIGELKDSAVDTAKRAMGFLSGKTEETKQKAVETKDTAKEKMDEAGEEARRKMEEMRLEGKKLDEDASRKTQQSTESAADKAHETKDSVAQRGEEGKGSIMGALGNMTGAIKSKLTGATTPSDEETRASAHGDESTGKTVVAVDVKDTRPGYVATVLKEADQMTGQTFNDVGEIDDEEKVRIVVGEKKL

SEQ ID NO: 2259 - protein, 318 aa, Phaseolus vulgaris
MASGQEFKGDRAEAAAKLAAKDIGDINRQNERDENFDLHSETNFRQARAEAAAKLAAKDLEDVNRMRDHTHSTTTFKEQRYDENRPGVIGSMFRAAKEAVVGKPHTVETSLSGNDSNRERVTKEQGNDSNRERVTKEQGGSKMGEYADYSTQKAKERKDERMQKAGEYTDFPTQKAKESKDYAERIKEAKDATLQKAAEYKDYTAEKAKEEKDSATGKLGELKDSAADAAKRAMGFFTGTRDETKVSGTAEDNKRRIEEVRVQDKDYGTGHGGEKLVIKMEESRPGAVADAMKAAERALGGVMEEEGTLRVERHREKM

SEQ ID NO: 2260 - protein, 551 aa, Pisum sativum
MASEQLSRRENITTERKIQNAEDSVPQRTTHFELRETHELGPNFQSLPRNENQAYLDRGARAPLSANVSESYLDRARVPLNANIPEHRVREKEDFGGVRDMGKFQMESKGGNKSLAEDRETLDTRSRMVTGTPHIKEASGKGQVVEERERARERAMEEEEKRLTMEEISKYRNQAQQSALEALSAAQEKYERAKQATNETLRNTTQAAQEKGEAAQAKDATFEKTQQGYEMTGDTVSNSARTASEKAAQAKNTTLGKTQQGYEATRDTVSNAARTAAEYATPAAEKARCVAVQAKDVTLETGKTAAEKAKCAAEIAAKVAVDLKEKATVAGWTASHYATQLTVDGTRAAANAVEGAVGYVAPKASELAAKSVETVKGLAASAGETAKEFTARKKEESWREYEAKRASQLQEGEEILPSTGGIGKVLPSGERTQAQGTNLQEKVQGKGSDILGAVTETVSDIGSSMIKPIDNANTKVKEHGGTTITPKGQDAGGVLDAIGETIAEIAHTTKVIVVGEDDEVEKSMQKNIGSDSHSLDRAKHEGYRAPKNNVS

SEQ ID NO: 2261 - protein, 400 aa, Oryza sativa (japonica cultivar-group)
MAIVSRSRRLAVTLLLLLFAVVAAAAVATKAEAGTEDAASKEDESWTGWAKEKITEGLGLKHHVADVDEEEDAARKAGHAAKSAQHTASEAGRQTSKKAGDAKEAAEATASGASSKAEQAKEKTKEAAKGAAGEATRRAEQAKHKTKEAAEAAGERGAEVHEQSKQGKAKVEETAKEKAGEGYDAAKDKAGKAQETLRQSTDAAKDKAGKAQETLRQSTDAARDKAGKAQETLRQSTDAAAEKAGAAKDSAWERTSSAKDAAAEKAGSAKDAAWEKTSSAKDAAAEKAGAAKDAAREKAEAAGEKARQSKEAAKGKAGAAKDAAWEKAEAAKDAAWETAEAAREKANEGYEKVKEKAKEKVEEVKERVTGADDAADHGKEKKHHHRHVDGKQKPRTVDEL

SEQ ID NO: 2262 - protein, 555 aa, Daucus carota
MASRKDERAAKEERAQAAAELAAKELRDVNQDRERGIKVVEHKEEVSGGPGVIGSILKSVQGTLGQAKEVVVGKAHDTAEVSRENTDYAYDKGREGGDVAAQKAEEAKEKAKMAKDTTMGKAGEYKDYTAQKAEEAKEKAAQKAEETKEKAGEYKNYTAQKAGEAKDTTLGKAGEYKDYAAQKAAEAKDTTAQKAAEAKEKTGEYKDYAAQKAAEAKVLAAQKAAEAKDTTGKDGEYKDYAAQKAAEAKDATMQKTGEYKDYAAQKTAETKDATMEKAKEYKEYAAQKAAEAKDATMQKTGEYKDYSAQKAAETKDATMEKTKEYKDYTAQKAAETKDATMEKAKEAKDTTVQKTGEYKDYAAEKAKEGKDVTVEKAKEGKDTTVGKMTELKDSAADAARKAMDMFLGKKEEVKGKAGETAEAAKEKYEDTEFAARKKMEELKLQEEGVKDEAKQRAEADRETAGDRGSAAKGTIFGAMGSVKDAIVGKLTMPSDVVKDKQQQEAVIKVDETRPGAVAEALKAADQMHGQAFNDVGKMGDEEVIVERKETRQGKM

SEQ ID NO: 2263 - protein, 201 aa, Craterostigma plantagineum
MEAMSFAARSTVLSISKSFPKNNSPTYLTLRPKFSRVRFTTVASQSQGRQQVSENAEDAKKKFSETTDSLKHKTSEATDSASHKANGAARETNDKAKETYNAASGKAGELKDKTQEGAENVREKAMDAGNDAMEKTRNAGERVADGVSNVGQNVKENVMGAGEKVKEFAEDVKDTVMGKSEEVKNQAEHETKKRSTSTNYF

SEQ ID NO: 2264 - protein, 296 aa, Dictyostelium discoideum
KRLNETEISNDAKKLKTDIADTSSHLAQNTKEATVHALNATAAAITGGMNMVSETLQPVIEKTKEMGTNAAHAVGEGIETLKAKTGEMMGTAKEVGDKCAHWTTEQTQAFCDKCTELAKNAKLMANDAKETTEKKVEEGKEKAGELTEDAKKKAAELNDEAKKKAEHLAEDTKKATAETKEKLDETAKKCEHWTAEQKENICNKCSELAKDANKTKDQLAANAEKTAENTKEKLDETAKKCEHWTAEQKENICSKCSELTKDTKEAADHASEAVKDAADNLNDKVQKKGRGRPKKH

SEQ ID NO: 2265 - protein, 347 aa, Oryza sativa
  unsure (1)..(347): unsure at all Xaa locations
MASRQDRREARAEADARRAAEEIARARDERVMQAEVDARXRPRTRSPAPAPTAAPPRWAPTPPTTPPAAXGILESVQEGAKSFVSAVGRTFGGARDTAAEKTSQTADATRDKLGEYKDYTADKARETNDSVARKTNETADASRDKLGEYKDYTADKTRETKDAVAQKASDASEATKNKLGEYKDALARKTRDAKDPTAQKATEFKDGVKATAQETRDATADTARKAKDAPKDTTQTAADKARETAATHDDATDKXARAGPARGAGERDGGDQGEXLTVSPAAPLGRRGGGEERAVKERAAXXKAASVYFEEKDRLTRERAAERVDKCVEKCVEGGAGIFIKPFRLPL

SEQ ID NO: 2266 - protein, 388 aa, Triticum aestivum
  unsure (1)..(388): unsure at all Xaa locations
XTCVLQHYNQHYSTSTSEQVPEKFNHSARPXSSRQDQREARAEADARRAADEIARARDXXRLMQAEMDARRAADEIARARADREHGALGGGAYAEHPSGGGGGILGSMQXGAKSLASADGRTFGGAKDTAADKTYQAADATGNKLGEYKDYTAEKAKETNDSVAHKTSETAEATRNKLGEAKDCTVEKATEAKDTVAQKTNETAEATKNKAGRAKDSTMQKAHQTKDAAAEKARQAKDVTQQKAGEYTDATKGTAQEARDRSMATSRPTMPIGVSKGPVCSGRXGNMTGAIKEKLTVGSGXAAARRRRDGLRLGSEGARGEGARGGEGGVRVLRGEGPAGQGARGGAGGQVRXEVRGRVRRPLLLCFTKKKKKKLIDTVDSRGGPVPX

SEQ ID NO: 2267 - protein, 233 aa, Zea mays
  unsure (1)..(233): unsure at all Xaa locations
GTLGSAGKTICETNTSAFARETETTESLTDRYGIEAEHAXGARDKTSQTAHTAGDKLGEYRDYTADKAREANDSVSRKTGETAEATRNKLGEYKDSAVEKARETKDAVAQKTSETAEATKNKLGEYKDAAAGKAREAADTTAGKAREAKDATMQKAQETRDATADKAREARDVTRQKAGEYTDASREAAQEARDRSRATAQTAADKARETASTHDTDREQGQDYHVCWGRWGT

SEQ ID NO: 2268 - protein, 733 aa, Caenorhabditis elegans
MSFMDKVKDTANSAYESVENTAVGAKDGVVGAFNTVGEKIGGAYDSTKQYASDKVSAAGDYASEAGKKVGDAEDSMIQGAYDAKDSAKESASNAGNKISNAFTSLKDSITGDNAHKTGEALNDNYESVKESASEAADRLKEPAQNTADNAKDLANQTGEEMSDAFESVKQLTSDTAENAKENAHDAADTAKSYKDKAGEKASGILDSFKAHASDAKDSVENKASDAYNSAKDKAGDAWDSTKDAAGDAKDKTKSFTEKVGDKISGAYDSVKEKASDVADSFKAHSTDSKDNVENKAADAYNTAKDKASDAWDKTKDKAGEAKDKMGDAWDTTKDKAGDAWDTTKDKAGDGKGKAGDAWDTTKDKASDAWDTTKDKAGEAKDKMGEAWDHTKDKAGEAKDKASDAADDAQGKSKSMTEKIGDSISGAWESTKDTAVSAKDKTAEAAGKVGDSISGAYDTVKEKASDIADSFKAHSTDSKDNVENKAADAYNSAKDKASDAWDKTKDKAGDAKDKAADAWDTTKDKAGDAWDSTKDHAADAKDKASDAAGDAKDKSKSLTEKAGDAISGAYDSVKEKASDIADSFKAHSTNSKDNVENKASDAYNSAKDKASDAWDKTKDKAGEAKDKAGDAWDNTKDKAGNAWDSTKDKASDAWDTTKDKASDAKESAGDAADSAKDKSKSITETIGDKISGAYDSVKEKASDVADSFKAHSSDAQDTVEVSHHKYFNVFSSFE

SEQ ID NO: 2269 - protein, 470 aa, Caenorhabditis elegans
MWDSAKHQTSDAGDSAEKHFDDAVDAAKDAYDSAKDKTSDTLDSVKKEGQEASDSTKSLTSDAGDAILGAYDAAKEKASDAWESTKEMVSEAYEQAEKHADDGADSAKDYVEDAKDKASDVWDSAKDKTSDVFDSLKEHGEDASDSAKDLANDAEDAIKDTYDSAKEKASDAFDSAKEHGEDAQESAKEYFEQAKEKASDALDSAQKHGDDAKESAQGYFEQAKDKSSEIWDSAKKHGEEASDSAKDYFEQAKDKASDAVESAKKQGEETSDAAKEHADHAKGKIADAWDATKDKADDVKDTAGETFENIHHSATTAVDEARENAAAAKDNASESAESTKYSIVDTAKGIAHSAEEKLEGAASVVGDAVQYVNDSATSAVSTVADSVSSAVHTVGEKLHDAEEAASNYMHGAHKSASEAAHDTKEAVTSKAAEVENLKTGTLPSPKSGNTDTLRSTRSEGTPNKRRCTIL

SEQ ID NO: 2270 - protein, 497 aa, Caenorhabditis elegans
MWDSAKHQTSDAGDSAEKHFDDAVDAAKDAYDSAKDKTSDTLDSVKKEGQEASDSTKSLTSDAGDAILGAYDAAKEKASDAWESTKEMVSEAYEQAEKHADDGADSAKDYVEDAKDKASDVWDSAKDKTSDVFDSLKEHGEDASDSAKDLANDAEDAIKDTYDSAKEKASDAFDSAKEHGEDAQESAKEYFEQAKEKASDALDSAQKHGDDAKESAQGYFEQAKDKSSEIWDSAKKHGEEASDSAKDYFEQAKDKASDAVESAKKQGEETSDAAKEHADHAKGKIADAWDATKDKADDVKDTAGETFENIHHSATTAVDEARENAAAAKDNASESAESTKYSIVDTAKGIAHSAEEKLEGAASVVGDAVQYVNDSATSAVSTVADSVSSAVHTVGEKLHDAEEAASNYMHGAHKSASEAAHDTKEAVTSKAAEVEKSAADAAKNTADEAKKTAEHVEQKVDENLKTGTLPSPKSGNTDTLRSTRSEGTPNKRRCTIL

SEQ ID NO: 2271 - protein, 229 aa, Pasteurella multocida
MKKSVLAALVLGASLSVTGCFDKESKAGQEVEKAKASVVETKEAVVNAANEVKNSAVEAAKEAKETVATKVEEVKETTAAKVEEVKAATAAKVEEMKETTAAKVEEMKEASAAKMEEVKAATATKMEEMKAAVADAKNDVAEKAAEVKDAAAAKAEEAKAAVAEKSAEMKDAAAAKVEDAKVASSEAKEMVTEKATEMKDAMKAEVNKAADAVSEKTEEVKEVIVPKAQ

SEQ ID NO: 2272 - protein, 468 aa, Prunus persica
MAHFGSTPEPTKTDEYGNPVHHTTTGTGRTDEFGNPVQHGVADTGYGTGAGYGTHTKPGVVEHHGRPAVLHSKDDQYSRDTQTTTGGYGGDGYTGGEHQEKKGLLGQLQDKLPGGNKDGQYSHDTQTTTGAYGGAGYTGGEHHEKKGIIGQVKDKLPGGQKDDQYCRDTHPTTGAYGGAGYTGGEDHEKKGIIGQVKDKLPGGQKDDQYCRDTHPTTGAYGGAGYTGGEHQEKKGIIGQVKDKLPGGQKDDQYSHDTHPTTGAYGGGGYTGDDTREKKGIIDQVKDKLPGGQKDDHYSHDTHPTTGAFGGAGYTRDDTREKKGIIDQVKDKLPGGRQDDHYSHETHPTTGAYGGAGYTGDDTREKKGVVEKVKEKLPGGQNVHPTTGPYGGGGAAGIGETRERKGVGEKVEEKLPGGHKDDQYLHDTHPTKPTSAARGGVGHTGGEPQLHEKKGLIEKIKDKLPGHNN

SEQ ID NO: 2273 - protein, 330 aa, Medicago sativa
MSQYQQGGDQTGRVDEYGNPLSQGQVDQYGNPISGGGMTGATGHGHHQQHHGVDTGYGAHTGSGGAHTGGVGGYGGTDIDGTGYGTGTGTGTTGYGATGGGTGHDNRGVVDKIKEKIPGTGTGHGTTGVGHQQHGDTYGTGTGTGYGTTGVGHQQHGDTYGTGTGNWNWNEVGHGTTGYGATDVGHGHQQHGENRGVVDKIKEKISGTGTGTGTGTGHGTTGYGAGGVGHGHQQHGEKGVVDKIKEKIPGTEQNTYGTGTGTGTGHGTTTGYGSTGQEYGREGHHGHDEQHLGEKKGIMEKIKGEAVLVLDHVLDMDKLNHNIYGCMHLI

SEQ ID NO: 2274 - protein, 232 aa, Pisum sativum
MSQYQNQYGAQTGMTDEYGNPVNQVDQYGNPISGGGGLTGEAGRQHYGTTGGATGQGHGHGQQHRGVDQTTGYGTHTGGVGGYGTKPEYGSTNTGSGYGTGTGYGGSGTNPDYGSTNTGSGYGTGTGYGGSGTTEYVREEHHGDKKGVMDKIKEKIPGTEQSRTNTDGTGYGSTGQGYVREQQHGTGYGSTGQGYVREQQDVHHGDEQHGEKKGIMEKIKEKLPGTGACTGH

SEQ ID NO: 2275 - protein, 232 aa, Pisum sativum
MSQYQNQYGAQTRKTDEYGNPMNQVDQYGNPISGGGGLTGEAGRQHYGTTGGATDHGHGQQHRGVDQTTGYGTHTGGVGGYGTKPEYGSTNTGSGYGTGTGYGGSGTTEYVREEHHGDKKGVMDKIKEKIPGTEQSRTHTDGTGYGSTGYGASGGGIGNTGQEYVREELTVHPGDKKHGSAGQEYVKEERRGIGNTGQEYVREEHRVDHGEKKGIMDKIKEKLPGTGGCTGH

SEQ ID NO: 2276 - protein, 255 aa, Pisum sativum
MSQYQNQYGAQTRKTDEYGNPVNQVDQYGNPISGGGGLTGEAGRQHYGTTGGATDHGHGHGQQHRGVDQTTGYGTHTGGVGGYGTKPEYGSTNTGSGYGTGTGYGGSGTTEYVREEHHGDKKGVMDKIKEKIPGTEQSRTNTDGTGYGSTGYGASGGGIGNTGQEYVREERHVHPGDKKHGSAGQEYVREEHHVHPGDKKHGSAGQEYVKEERRGIGNTGQEYVREEHRVDHGEKKGIMDKIKEKLPGTGGCTGH

SEQ ID NO: 2277 - protein, 197 aa, Pisum sativum
MSQYQNQYGAQTGMTDEYGNPVNQVDQYGNPISGGGFTGEAGRQHFGTTGGATDHGHGHGQQHRGVDQTTGYGTHTGGVGGYGTNPEYGNTNTGSGYGTGTGYGGSGTNEYVREDHHGDKKGVMDKIKEKIPGTEQSRTNTDGAGYGSTGYGASGGGIGNTGQEYVREEHRVDHGEKKGIMDKIKEKLPGTGGCTGH

SEQ ID NO: 2278 - protein, 198 aa, Pisum sativum
MSQYQNQYGAQTGMTDEYGNPVNQVDQYGNPVSGGGFTGEAGRQHFGTTGGVTGQGHGHGQQHRGVDQTTGYGTHTGGVGGYGTKPEYGSTNTGSGYGTGTGYGGSGSNEYVREEHHGDKKGVMDKIKEKIPGTEQSRTNTDGTGYGSTGQGYVREQQRVDHGDEQRVDHGDEQHGEKKGIMDKIKEKLPGTGACTGH

SEQ ID NO: 2279 - protein, 256 aa, Vigna unguiculata
MASYQKQYEDQGRKIDEYGNVVQETDEYGNPVHAASVTYITSTTGGLGDDSNKQHDTSNVYGADTRRQHGTIGDTGRQHGTTGGFTGDTGRQYGTTGGFTGDTGRQHGTTGGFTGDTGRQHGTTGGFTGDTGRQHGTTGGFTGDTGRQHGTTGGFTGGDTGLGGPYVGANTADTGTGPRSGTTGGSAYGSGGAGGGYGSGAGAGGAGYGMNTGGAHSDERYGREYREHDQSRGDHDKKGIVDKIKEKLPGGHSDNK

SEQ ID NO: 2280 - protein, 259 aa, Vigna unguiculata
MASYQKQYEDQGCKIDEYGNVVQETDEYGNPVHAASVTYITSTTGGLGDDTNKQHDTSNVYGADTRRQHGTIGDTGRQHGTTGGFTGDTGRQYGTTGGFTGDTGRQHGTTGGFTGDTGKQHGTTGGFTGDTGRQHGTTGGFTGDTGRQHGTTGDTGRQHGTTGGFTGGDTGLGGPYVGANTADTGTGPRSGTTGGSAYGSGGYGSGAGAGYGMNTGGAHSDERYGREYREHDQSRGDHDKKGIVDKIKEKLPGGHSDNK

SEQ ID NO: 2281 - protein, 240 aa, Helianthus tuberosus
ANYGGDKQYGRETRHTGDYENPIHSTGGQYDQDVRQTDEYGNPVRRTDEYGNPVHTATGGTMGDYGSTGLGQGTGGIGTGGYGTTGHQGLGTGVGHTTGTGTDYTPGGRSTGQTGYQGLGTESEFGGTTGTFQNQPSATPIGGTGLSSGTGAGFGGTGTGTGTGILHRSGSGSSSSSEDDGQGGRRKKKGVMQKIKEKLPGGHSQEEQYQSQTTTTTGYGETHEKKGMMEKIKEKLPGHH

SEQ ID NO: 2282 - protein, 240 aa, Helianthus petiolaris
ANYGGDKQYGRETRHTDEYGNPIHSTGGHQTDEYGNPVRRTDEYGNPVHSTTGGTMGDYGSTGLGQGTGGIGTGGYGTSGHQGLGTGVGHTTGGTGTDYASGGRSTGQTGYQGLGTESEFGGTTGTFQNQPSATPMGGTGLGGGTGAGFGGTGSGTGTGILHRSGSSSSSSSEDDGQGGRRKKKGVMQKIKEKLPGGHSQEGQYQSQTTTTTTAGGAGYGETHEKKGMMEKIKEKLPGHH

SEQ ID NO: 2283 - protein, 237 aa, Helianthus petiolaris
ANYGGDKQYGRETRHTDEYGNPIHSTGGHQTDEYGNPVRRTDEYGNPVHSTTGGTMGDYGSTGLGQGTGGIGTGGYGTSGYQGLGTGLGHTTGGTGTDYASGGRSTGQTGYQGLGTESEFGGTTGTFQNQPSATPMGGTGLGGGTGAGFGGTGTGTGTGTGILHRSGSSSSSSSEDDGQGGRRKKKGVMQKTKEKLPGGHSQEGQYQSQTTTTTTAGGTHEKKGMMEKIKEKLPGHH

SEQ ID NO: 2284 - protein, 99 aa, Zea mays
  unsure (1)..(99): unsure at all Xaa locations
XFRRGYDGDTNKQHDATGVYPGIDIGRDHGTTGVYGLNTDRHHGTSGVNPGIDTHNQQHGTTVGYAGYTGRQHGNTGGLYYGTDTADTGTGPXSGNTVA

SEQ ID NO: 2285 - protein, 195 aa, Cicer pinnatifidum
MSQYNQGQYVDQTRTVDEYGNPIVQVDQYGNPINQSGVGMTGEAGRTFENPGLTGHDNSKSHTTSYGTHTGSGGGTGDGYGTYNTRGGGDGGTYNTRGGSGMTGEVGKIFGTTDDTGNHHGVDQTTTDYGTHNTGSYGTHTGGYGNTNTGSGYGNTKVGQEFGREEPRHHGGEQQHGEKKGIMDKIKEKLPGTGH

SEQ ID NO: 2286 - protein, 220 aa, Helianthus ciliaris
QYGRETRHTGDYENPIHSTGGQYDQDVRQTDEYGNPVRITDEYGNPVHSATGGTMGDYGSTGLGQGTGGLGTGVGHTTGGTGTDYTSGGRSTGQTGYQGLGTESEFGGTTGTFQNQPSATPIGGTGLSSGTGAGFGGIGTGTGTGILHRSGSGSSSSSEDDGQGGRRKKKGVMQKIKEKLPGGHSQEEQYQSQTTTTGYGETHEKKGMMEKIKEKLPGHH

SEQ ID NO: 2287 - protein, 246 aa, Helianthus debilis
ANYGGDKQYGRETRQTGDYENPIHSTGGQYEQDVRQTDEYGNPVRRTDEYGNPVHSTTGGTMGDYGSTGLGRGTGGIGTGGYGTTGHQGLGTGVGHTTGGTGTDYTSGGRSTGQTGYQGLGTESEFGGTTGTFQNQPSATPIGGTGLGGGTGAGFGGTGTGTGTGILHRSGSSSSSSSEDDGQGGRRKKKGVMQKIKEKLPGGHSQEGQYQSQTTTTTTAGGAGYGETHEKKGMMEKIKEKLPGHH

SEQ ID NO: 2288 - protein, 244 aa, Helianthus debilis
ANYGGDKQYGRETRQTGDYENPIHSTGGQYEQDVRQTDEYGNPVRRTDEYGNPVHSTTGGTMGDYGSTGLGRGTGGIGTGGYGTTGHQGLGTGVGHTTGGTGTDYTSGGRSTGQTGYQGLGTESEFGGTTGTFQNQPSATPIGGTGLGGGTGAGFGGTGTGTGTGILHRSGSSSSSSSEDDGQGGRRKKKGVMQKIKEKLPGGHSQEGQYRSQTTTTAGGAGYGETHEKKGMMEKIKEKLPGHH

SEQ ID NO: 2289 - protein, 240 aa, Helianthus hirsutus
ANYGGDKQYGRETRHTGDYENPIHSTGGQYDQDVRQTDEYGNPVRRTDEYGNPVHTATGGTMGDYGSTGLGQGTGGIGTGGYGATGHQGLGTGVGHTTGTGTDYTSGGRSTGQTGYQGLGTESEFGGTTGTFQNQPSATPIGGTGLSSGTGAGLGGTGTGTGTGILHRSGSGSSSSSEDDGQGGRRKKKGVMQKIKEKLPGGHSQEEQYQSQTTTTTGYGETHEKKGMMEKIKEKLPGHH

SEQ ID NO: 2290 - protein, 228 aa, Helianthus maximiliani
ANYGGDKQYGRETRHTGDYENPIHSTGGQYEQDVRQTDEYGNPVRRTDEYGNPVHSATGGTMGDYGSTGLGQGTGGIGTGGYGTTGGTGTDYTSGGHSTGQTGYQGLGTESGFGGTTGTFQNQPSATPMGGTGLGSGTGAGFGGTGTGTGTGILHRSGSGSPSSSEDDRQGGRRKKKGVMQKIKEKLPGGRSQEEQYQSQTTTTTGYGETHEKKGMMEKIKEKLPGHH

SEQ ID NO: 2291 - protein, 241 aa, Helianthus mollis
ANYGGDKQYGRETRHTGDYENPIHSTGGQYEQDVRQTDEYGNPVRRTDEYGNPVHSATGGTMGDYGSTGLGQGTGGIGTGGYGTTGHQGLGTGVGHTTGGTGTDYTSGGHSTGQTGYQGLGTESGFGGTTGTFQNQPSATPMGGTGLGSGTGAGFGGTGTGTGTGILHRSGSGSSSSSEDDRQGGRRKKKGVMQKIKEKLPGGHSQEEQYQSQTTTTTGYGETHEKKGMMEKIKEKLPGHH

SEQ ID NO: 2292 - protein, 246 aa, Helianthus neglectus
ANYGGDKQYGRETRQTGDYENPIHSTGGQYEQDVRQTDEYGNSVRRTDEYGNPVHSTTGGTMGDYGSTGLGRGTGGIGTGGYGTTGHQGLGTGIGHTTGGTGTDYTSGGRSTGQTGYQGLGTESEFGGTTGTFQNQPSATPIGGTGLGGGTGAGFGGTGTGTRTGILHRSGSSSSSSSEDDGQGGRRKKKGVMQKIKEKLPGGHSQEGQYQSQTTTTTTAGGAGYGETHEKKGMMEKIKEKLPGHH

SEQ ID NO: 2293 - protein, 246 aa, Helianthus praecox
ANYGGDKQYGRETRQTGDYDNPIHSTGGQYEQDVRQTDEYGNPVRRTDEYGNPVHSTTGGTMGDYGSTGLGRGTAGIGTGGYGTTGHQGLGTGVGHTTGGIGTDYISGGRSTGQTGYQGLGTESEFGGTTGTFQNQPSATPIGGTGLGGGTGAGFGGTGTGTGTGILHRSGSSSSSSSEDDGQGGRRKKKGVMQKIKEKLPGGHSQEGQHQSQTTTTTTAGGAGYGETHEKKGMMEKIKEKLPGHH

SEQ ID NO: 2294 - protein, 246 aa, Helianthus praecox
ANYGGDKQYGRETRQTGDYENPIHSTGGQYEQDVRQTDEYGNPVRRTDEYGNPVHSTTGGTMGDYGSTGLGRGTGGIGTGGYGTTGHQGLGTGIGHTTGGTGTDYTSGGRSTGQTGYQGLGTESEFGGTTGTFQNQPSATPIGGTGLGGGTGAGFGGTGTGTGTGILHRSGSSSSSSSEDDGQGGRRKKKGVMQKIKEKLPGGHSQEGQYQSQTTTTTTAGGAGYGETHEKKGMMEKIKEKLPGHH

SEQ ID NO: 2295 - protein, 246 aa, Helianthus praecox
ANYGGDKQYGRETRQTGDYDNPIHSTGGQYEQDVRQTDEYGNPVRRTDEYANPVHSTTGGTMGDYGSTGLGRGTGGIGTGGYGTTGHQGLGTGVGHTTGGTETDYISGGRSTGQTGYQGLGTESEFGGTTGTFQNQPSATPIGGTGLGGGTGAGFGGTGTGTGTGILHRSGSSSSSSSEDDGQGGRRKKKGVMQKIKEKLPGGHSQEGQYQSQTTTTTTAGGAGYGETHEKKGMMEKIKEKLPGHH

SEQ ID NO: 2296 - protein, 133 aa, Boea crassifolia
MEPYGNHQIGDQLRKTDEYGNPVHHTPGGEYGGPHVGAEHHHGAPISIPPTTDVPHHRRSGSSSSSSSEDDGQGGRRKKGIKDKVKEKLPGGHKDNQPHHEAGYGGGYGAQPEPEKKGMMDKIKEKLPGGHRN

SEQ ID NO: 2297 - protein, 191 aa, Hordeum vulgare subsp. vulgare
MEYQGQQQHGQATNRVDEYGNPVAGHGVGTGMGEHGGVGTGMGAHGGVGTGAAAGGHFQPTRKEHKAGGILQRSGSSSSSSSEDDGMGGRRKKGIKDKIKEKLPGGHGDQQHAAGTYGQQGIGMAGTGGTYGQQGHTGMTGTGATGTMATGGTYGQPGHTGMTGTGTHGTDGTGEKKGIMDKIKEKLPGQH

SEQ ID NO: 2298 - protein, 181 aa, Hordeum vulgare subsp. vulgare
MEYQGQQQHGQATNRVDEYGNPVAGHGGGTGMGAHGGVGTGAAAGGHFQPTRKEHKAGGILQRSGSSSSSSSEDDGMGGRRKKGIKDKIKEKLPGGHGDQQHAAGTYGQQGIGMAGTGGTYGQQGHTGMTGTGATGTMATGGTYGQPGHTGMTGTGTHGTDGTGEKKGIMDKIKEKLPGQH

SEQ ID NO: 2299 - protein, 155 aa, Hordeum vulgare subsp. vulgare
MEHGHATNRVDEYGNPVAGHGVGTGMGTGAAAGGHFQPTREEHKAGGILQRSGSSSSSSSEDDGMGGRRKKGLKDKIKEKLPGGHGDQQQTGGTYGQHGHTGMTGTGEHGATATGGTYGQQGHTGMTGTGAHGTDGTGEKKGIMDKIKEKLPGQH

SEQ ID NO: 2300 - protein, 155 aa, Hordeum vulgare subsp. vulgare
MEHGHATNRVDEYGNPVAGHGVGTGMGTGAAAGGHFQPTREEHKAGGILQRSGSSSSSSSEDDGMGGRRKKGLKDKIKEKLPGGHGDQQQTGGTYGQHGHTGMTGTGEHGATATGGTYGQQGHTGMTGTGAHSTDGTGEKKGIMDKIKEKLPGQH

SEQ ID NO: 2301 - protein, 566 aa, Cornus sericea
MAQYGNPTEGLYKQPTDVYGNPISRTHESGNPVQRTADAQYGNPTEGVYKQPTDVYGNSISRTHESGNPVQKTADAQYGNPTEGVYKQPTDAHGNPISRTHESGNPVQKTADAQYGNPTEGVYKQPTDAHGNPVSRTHESGNPVQKTADAQYGNPTEGVDKHPADAHGNPAFRTRESGNPVQKTADAQYGNPTEGVYKHPTDAHGNPVSRTHDFGNPVQKTADAQYGNPTEGVDKHPADAHGNTAFRTRESGNPVQKTADAQYGNPTEGVDKHPTDAHKNSISRTHDFGNPVQKTVDAQYGNPTEGVYKHPTDAHRNSISRTHNSGNPIQKTADAEYGNPTEGVHKHPTDAHENPLSRTHESDNPIQKTAGAQNRNPTEGVHKHPTDAHRNPVSRTHESGNPIQKTADAQYRNPTEGVHKHPTDAHGNPVSRTHEYGNPIRKIADGQGVHPTGGTTEGYITTSGTSTGIGNGGAIGGQQHGGVLQRSGSGSSSSEDDGQGGRRKKKGLTDKKKEKLSGGRKPAQASHPTATTTTTTGHDIYKGGQQNQEKKGVMEKIKEKLPGQHN

SEQ ID NO: 2302 - protein, 440 aa, Cornus sericea
MAQYGDQYGNPVRPTEKVYRSPTDAYGNSFPPTDEYSNPIHQTDAYGNSNRKTDEYGNLVHPLEKVYGSPTDAYGNPLPPTDKYGNPLHQTDAYGKPIRKTGEYGDPTDAYGNPLPSTDKYGNPIHQSIRRTDEYGDPVHPIEKVYRSPTDAYGNPLPTTDKYGNPIRKTDEYGDPVHPIEKVYGSPTDAYGNPLCRTDKYGNPIHQTDTHGNPIRKTDKYGDPIHPIEKVYGSPTDAYMNPLPQTDKYGNSIHQTDAHGNPIRKTDKYGNPVHPTQEAYRSPTDAYGNPLPPTDEYGNPIHQTDAYGKPIRKTNEYGNPVHHTVPMGDYGISGATGAYGTGTGVTGVGGQHHGGILHHSDCFSSSSSEDDGYGGRRTKGLTDKIKDKLRGGKKTEQLHTTATSTTTGYGYEGEEHRYYKKKGVMEKIMDKLPGQESQHY

SEQ ID NO: 2303 - protein, 400 aa, Cornus sericea
MAQYGDQYGNPVRPTEEVYGSPTDAYGNSLPPTDKYGNRIHQTDAHGAHGKPIHKTDKYGNPIHPTEEVYRSPTDANGNPLTPSDKYGNPIHQTDAHRKPIRKTDKYGNPVHPTEEVYQSPTDANGNPLPPSDKYGNPIHQTDAHGKLIRKTDKYGNPVHPTEEVYGSPTDAYGNPLPPTDKYGNPNRKTDEYGNLVHPIEKVYGSQTDAYGNLLLPTDKYGNPIHQTNAHGNQNRKIDEYGNPVHPIEKVYGNPTDTYGNPLPPTDKYGNPIHHTDAHGNPIGKTDKYGNSVRPTEEVYRSPTDANGNPLPPIDEYGNPIHQTDVYGKPIRKTDEYGNPVHHSGILHRSGCFSSSSSEDDGYGGRRKKRLRDKIKEKLRGGKETEQLHTTATSTPTGYG

SEQ ID NO: 2304 - protein, 109 aa, Pinus sylvestris
GHGHEGQFAREEAEQQKHTGKLHRSNSSSSSSSSDEEEEGRKKKEGGRKKKGSKDKTKEKLPGDGKQYPGEHEKQYSRQHGGEEEKKAGMLDKIKAKLPGQHNKNDGEQ

SEQ ID NO: 2305 - protein, 135 aa, Gossypium hirsutum
MAHFQNQYSAPEVTQTDAYGNPTRRTDEYGNPIPTQETGRGILGIGGHHHGGHHGLHRTGSSSSSSSSSEDEGTGKKKKGLKQRLKEKIPGNKEHQSQATSTTTPGQGATYHQQHHEKKGVMDKIKEKLPGHHNP

SEQ ID NO: 2306 - protein, 145 aa, Gossypium hirsutum
MAHFQNQYSAPEVTQTDAYGNPTRRTDEYGNPIPTQETGRGILGIGGHHHGGHHGLHRTGSSSSSSSSSEDEGTGKKKKGLKERLKEKIPGNKEHQSQATSTTTPGQGPTYHQQHREERSDGQDQGEAPWSPQPLISCLWSAISY

SEQ ID NO: 2307 - protein, 145 aa, Gossypium hirsutum
MAHFQNQYSAPEVTQTDAYGNPTRRTDEYGNPIPTQETGRGILGIGGHHHGGHHGLHRTGSSSSSSSSSEDEGTGKKKKGLKERLKEKIPGNKEHQSQATSTTTPGQGPTYHQHHREERSDGQDQGEAPWSPQPLISCLWSAISY

SEQ ID NO: 2308 - protein, 186 aa, Arabidopsis thaliana
MASYQNRPGGQATDEYGNPIQQQYDEYGNPMGGGGYGTGGGGGATGGQGYGTGGQGYGSGGQGYGTGGQGYGTGTGTEGFGTGGGARHHGQEQLHKESGGGLGGMLHRSGSGSSSSSEDDGQGGRRKKGITQKIKEKLPGHHDQSGQAQAMGGMGSGYDAGGYGGEHHEKKGMMDKIKEKLPGGGR

SEQ ID NO: 2309 - protein, 186 aa, Arabidopsis thaliana
MASYQNRPGGQATDEYGNPIQQQYDEYGNPMGGGGYGTGGGGGATGGQGYGTGGQGYGSGGQGYGTGGQGYGTGTGTEGFGTGGGARHHGQEQLHKESGGGLGGMLHRSGSGSSSSSEDDGQGGRRKKGITQKIKEKLPGHHDQCGQAQAMGGMGSGYDAGGYGGEHHEKKGMMDKIKEKLPGGGR

SEQ ID NO: 2310 - protein, 128 aa, Arabidopsis thaliana
MESYQNQSGAQQTHQQLDQFGNPFPATTGAYGTAGGAPAVAEGGGLSGMLHRSGSSSSSSSEDDGLGGRRRKKKGITEKIKEKLPGHHDSNKTSSLGSTTTAYDTGTVHHEKKGMMEKIKEKLPGGHH

SEQ ID NO: 2311 - protein, 127 aa, Arabidopsis thaliana
MESYQNQSGAQQTHQQLDQFGNPFPATTGAYGTAGAPAVAEGGGLSGMLHRSGSSSSSSSEDDGLGGRRRKKKGITEKIKEKLPGHHDSNKTSSLGSTTTAYDTGTVHHEKKGMMEKIKEKLPGGHH

SEQ ID NO: 2312 - protein, 185 aa, Arabidopsis thaliana
MADLRDEKGNPIHLTDTQGNPIVDLTDEHGNPMYLTGVVSSTPQHKESTTSDIAEHPTSTVGETHPAAAPAGAGAATAATATGVSAGTGATTTGQQHHGSLEEHLRRSGSSSSSSSEDDGQGGRRKKSIKEKIKEKFGSGKHKDEQTPATATTTGPATTDQPHEKKGILEKIKDKLPGHHNHNHP

SEQ ID NO: 2313 - protein, 185 aa, Arabidopsis thaliana
MADLRDEKGNPIHLTDTQGNPIVDLTDEHGNPMYLTGVVSSTPQHKESTTSDIAEHPTSTVGETHPAAAPTGAGAATAATATGVSAGTGATTTGQQHHGSLEEHLRRSGSSSSSSSEDDGQGGRRKKSIKEKIKEKFSSGKHKDEQTPTTATTTGPATTDQPHEKKGILEKIKDKLPGHHNHNHP

SEQ ID NO: 2314 - protein, 127 aa, Arabidopsis thaliana
MESYQNQSGAQQTHQQLDQFGNPFPATTGAYGTAGGAPAVAEGGGLSGMLHRSGSSSSSSSDDGLGGRRRKKKGITEKIKEKLPGHHDSNKTSSLGSTTTAYDTGTVHHEKKGMMEKIKEKLPGGHH

SEQ ID NO: 2315 - protein, 184 aa, Raphanus sativus
MADLKDERGNPIHLTDAYGNPVQLSDEFGNPMHITGVASSAPQYKDSVTGNIAEYPTEAPPAGVAAGTGAAATTAAGVTTSETTTGQEHHGSLGEHLRRSGSSSSSSSEDDGQGGRRKKSIKDKIKDKLGGGKHKDEQTPTTATTTGPTTTTTTTGAAADQHHEKKGILEKIKEKLPGHHNHHP

SEQ ID NO: 2316 - protein, 202 aa, Prunus dulcis
  unsure (1)..(202): unsure at all Xaa locations
MASYEKQYGATPTDEYGNPIRRTDEYGNPLGHHTTTTGTTAATTGAGGYXPHDFAATTAAGQGQGVHGHDYDRKEHHGVTGAVLHRSGSSSSSSSEDDGLGGSRKKKGLKEKIKKKLPGGTKTDTTYGGTGTTGQHHQEKGTMDKIKEKLPGTGGHRADDPYPSQTHTTATTTPYGGTAYTEEHQEKKGIMDKIKEKLPGQH

SEQ ID NO: 2317 - protein, 457 aa, Prunus persica
KTDEYGNPVHHTTTGTGRTDEFGNPVQHGVADTGYGTGAGYGIHTKPGVVEHHGVPAVLHSKDDQYSRDTQTTTGGYGGDGYTGGEHQEKKGLLGQLQDKLPGGNKDGQYSHDTQTTTGAYGGAGYTGGEHHEKKGVIGQVKDKLPGGQKDDQYCRDTHPTTGAYGGAGYTGGEDHEKKGIIGQVKDKLPGGQKDDQYCRDTHPTTGAYGGAGYTGGEHQEKKGIIGQVKDKLPGGQKDDQYCHDTHPTTGAYGGAGYTGGDTREKKGIIGQVKDKLPGGQKDDHYSHDTHPTTGAYGGAGYTGDDTREKKGIIDQVKDKLPGGQKDDHYSHETHPTTGAYGGAGYTGDDTREKKGVVEKVKEKLPGGQNVHPTTGPYGGGGAAGIGETRERKGVGEKVKEKLPGGHKDDQYLHDTHPTKPTSAAHGGVGHTGGEPQLHEKKGLIEKIKDKLPGHNN

SEQ ID NO: 2318 - protein, 268 aa, Prunus persica
NSAREDDQYCRDTHPTTGAYGRAGYTGGEHQEKKGIIGQVKDKLPGGQKDDQYSHDTHKTTGAYGGAGYTGDDTREKKGIIDQVKDKLPGGQKDDHYSHDTHPTTGAFGGAGYTRDDTREKKGIIDQVKDKLPGGRQDDHYSHETHPTTGAYGGAGYTGDDTREKKGVVEKVKEKLPGGQNVHPTTGPYGGGGAAGIGETRERKGVGEKVEEKLPGGHKDDQYLHDTHPTKPTSAARGGVGHTGGEPQLHEKKGLIEKIKDKLPGRNN

SEQ ID NO: 2319 - protein, 150 aa, Glycine max
MEFQGQHDNPANRVDEYGNPFPLAGGVGGGHAAPGTGGQLQARRGEHKTGGILHRSGSSSSTSSSEDDGMGGRRKKGMKEKIKEKLPGGHKDNQQHMATGTGTGGAYGPGTGTGGAYGQQGHAGMAGAGTGTGEKKGIMDKIKEKLPGQH

SEQ ID NO: 2320 - protein, 127 aa, Betula pubescens
IRVDQYGNTVRTDEYGNPIRTDEYGNPIHHTAGTTAGYGAGGFDTTTPQGMRHDVTGTRGVSGKLHRSSEDDGHGGRRKKKGLAEKIKEKIPGVGNKDHRSNTSATTTQAYDEGELRQHEKKGVMEK

SEQ ID NO: 2321 - protein, 228 aa, Oryza sativa (japonica cultivar-group)
MAEHATGVYGHPYPRVDQYGNPVPPVDQYGNPVPDEPAPRDTAAGYVAPPDPAVSTGDYGLAGAEAPHPHESAVMSGAAAAAVAPGGEAYTRDGGGVVPPAGEKTFAYEGTVSAAGVTGASGQLQPTTREEGHTTLGETLRRSGKSSSSSSSSSEDDGQGGRRKKKSIKEKIKEKLPGSHKQEEQKQAGHTAPAAGTGTGTGTHAAGKHEKKGIVEKIKEKLPGHGHH

SEQ ID NO: 2322 - protein, 306 aa, Daucus carota
MADLRDEKGNPIQLTDQHGNPVQLTDEYGNPVHITGVATTGATTGHHDHGVGGASHGGVGSTGLGGVAGAAGLAGATAAAATHGGSHGGTGTHGVGPTGVGAAHGGTGTTTGLGTGTGTTGQTHGMGPTGIGGTHGVGSTGIGGAHGGTGVLGQTHGMGPTGTGAAHGGLGTGQSGLGSSYATHGGLGTGIGTGSAPASAGSHSHAPEKKTALGEQLHRSNSSSSSSEDDGQGGRRKKGFTTKIKEKLGGGKHKKDEHTTVATTKTTTAAHPGGAAVAVEHHEHEKKSMLDKIKDKLPGHHSPTSH

SEQ ID NO: 2323 - protein, 130 aa, Lycopersicon esculentum
MAQYGNQDQMRKTDEYGNHVQETGVYQGTGTGGMMGGTGTGGMMGGTGGEYGTQGMGTGTHHHEGQQQLRRSDSSSSSEDDGEGGRRKKGLKEKIMEKMPGQHEGEYGQTTGEEKKGMMDKIKDKIPGMH

SEQ ID NO: 2324 - protein, 157 aa, Solanum commersonii
MAHYENQYSAGQALQKDEYGNPVRQTDEYGNPIQQTGGTMGEYGTTGTGYGTQAGHTTGVLGGDQRQHGTLGGMLHRSGSSSSSSSSEDDGHGGRRKKKGIKDKVKEKLPGGHRDDLAHSTATTTTTGYGMDGTHEKKGIMEKIKEKLPGHHGPGHH

SEQ ID NO: 2325 - protein, 134 aa, Solanum commersonii
DEYGNPVRQTDEYGNPIQQTGGTMGEYGTTGTGYGTQAGHTTGVLGGDQRQHGTLGGMLHRSGSSSSSSSVSEDDRHGGRRKKKGIKDKVKEKLPGGHRDHLAHSTATTTTTGYGMDGTHEKKGIMEKIKEKLP

SEQ ID NO: 2326 - protein, 134 aa, Solanum tuberosum
DEYGNPVRQTDEYGNPIQQTGGTMGEYGTTGTGYGTQAGHTTGVLGGEQRQHGTLGGMLHRSGSSSSSSSVSEDDGHGGRRKKKGIKDKIKEKLPGGHRDDLAHSTATTTTTGYGMEGTHEKKGIMEKIKEKLP

SEQ ID NO: 2327 - protein, 120 aa, Solanum tuberosum
VRQTDEYGNPIQQTGGTMGEYGTTGTGYGTQAGHTTGVLGGEQRQHGTLGGMLHRSGSSSSSSSSEDDGHGGRRKKKGIKDKIKEKLPGGHRDDLAHSTATTTTTGYGMEGTHEKKGIME

SEQ ID NO: 2328 - protein, 155 aa, Craterostigma plantagineum
MAQFGGEKYGGRHTDEYGNPIQQGAGAHRGGGIMGGGQQAGQHGTTGVLGHGTAGQHGTTGGGLGHGTAGTGGALGGQHRRSGSSSSSSSSESDGEGGRRKKGMKDKMKEKLPGGHGTTTDQQQYGTAATHGQAQQHEKKGIMDKIKEKLPGGQH

SEQ ID NO: 2329 - protein, 117 aa, Craterostigma plantagineum
MAHSLGEQYDLGKPTEEHHESHPPAHQAPHAGGELGAGQKTSQLARSNSSSSSSSEDDGQGGRRKKPIKEKVKEKLPGGAGGKQTGECGTTTTTAAGGHEEKKGVMEKIKEKLPGQH

SEQ ID NO: 2330 - protein, 151 aa, Lemna gibba
MAEMRDEPTSSATPSAPRRWARASRPADTARGQARPRRIRCGAAGRRIRCGQQAGGYGAGQQAGGYGAGQQAGQQELRRSGSSSSSSSEDDGMGGRRKKKGIMEKIKDKMPGQKSEQHHHEPGYAHQRPTHVEPEKKGIMEKIKEKLPGHN

SEQ ID NO: 2331 - protein, 161 aa, Hordeum vulgare
MEHGHATNRVDEYGNPVAGHGVGTGMGAHGGVGTGAAAGGHFQPTREEHKAGGILQRSGSSSSSSSEDDGMGGRRKKGLKDKIKEKLPGGHGDQQQTGGTYGQHGHTGMTGTGEHGATATGGTYGQQGHTGMTGTGAHGTDGTGEKKGIMDKIKEKLPGQH

SEQ ID NO: 2332 - protein, 154 aa, Oryza sativa
MEHQGQHGHVTSRVDEYGNPVGTGAGHGQMGTAGMGTHGTTGTGGGQFQPMREEHKTGGVLQRSGSSSSSSSEDDGMGGRRKKGIKEKIKEKLPGGNKGEQQHAMGGTGGAYGQQGHGTGMTTGTTGAHGTTTTDTGEKKGIMDKIKEKLPGQH

SEQ ID NO: 2333 - protein, 275 aa, Oryza sativa
MEECTPHYLARGGVHVSHTLSAPTRADCTVERMTLVTTVMKHNDTVEESWWSTVASNHQNTEGRRSAAAMRTATRQRDAKREEDVGDHAGVGGGEGDVRPDADATSPGKVTRLISLLALVLMMEHQGQHGHVTSRVDEYGNPVGTGAGHGQMGTAGMGTHGTTGGGGQFQPMREEHKTGGVLQRSGSSSSSSSEDDGMGGRRKKGIKEKIKEKLPGGNKGEQQHAMGGTGGAYGQQGHGTGMTTGTTGAHGTTTTDTGEKKGIMDKIKEKLPGQH

SEQ ID NO: 2334 - protein, 163 aa, Oryza sativa
MEHQGQHGHVTSRVDEYGNPVGTGAGHAQMGTAGMGTHGTAGTGRQFQPMREEHKTGGVLQRSGSSSSSSSEDDGMGGRRKKGIKEKIKEKLPGGNKGEQQHAMGGTGTGTGTGTGTGGAYGQQGHGTGMTTGTTGAHGTTTTDTGEKKGIMDKIKEKLPGQH

SEQ ID NO: 2335 - protein, 163 aa, Oryza sativa; identical to SEQ ID NO: 2334

SEQ ID NO: 2336 - protein, 164 aa, Oryza sativa
MENYQGQHGYGADRVDVYGNPVGAGQYGGGATAPGGGHGAMGMGGHAGAGAGGQFQPAREDRKTGGILHRSGSSSSSSSSEDDGMGGRRKKGIKEKIKEKLPGGNKGNNQQQQQMMGNTGGAYGQQGHAGMTGAGTGVHGAEYGNAGEKKGFMDKIKEKLPGQH

SEQ ID NO: 2337 - protein, 164 aa, Oryza sativa
MENYQGQHGYGADRVDVYGNPVAGQYGGGATAPGGGHGVMGMGGHHAGAGGQFQPVKEEHKTGGILHRSGSSSSSSSSEDDGMGGRRKKGIKEKIKEKLPGGNKGNNQQQQQMMGNTGGAYGQQGHAGMTGAGTGTGVHGAEYGNTGEKKGFMDKIKEKLPGQH

SEQ ID NO: 2338 - protein, 164 aa, Oryza sativa
MENYQGQHGYGADRVDVYRNPVAGQYGGGATAPGGGHGVMGMGGHHAGAGGQFQPVKEEHKTGGILHRSGSSSSSSSSEDDGMGGRRKKGIKEKIKEKLPGGNKANNHQQQQMMGNTGGAYGQQGHAGMTGAGTGTGVHGAEYGNTGEKKGFMDKIKEKLPGQH

SEQ ID NO: 2339 - protein, 165 aa, Oryza sativa
MEHQGQHGHVTSRVDEYGNPVGTGAGHGQMGTAGMGTHGTAGTGGGQFQPMREEHKTGGVLQRSGSSSSSSSEDDGMGRTTKKRDLGEDLGETPRRATRANSSMPWGGTGTGTGTGTGTGGAYGQQGHGTGMTTGTTGAHGTTTTDTGEKKGIMDKIKEKLPGQH

SEQ ID NO: 2340 - protein, 165 aa, Oryza sativa; identical to SEQ ID NO: 2339

SEQ ID NO: 2341 - protein, 151 aa, Oryza sativa
MEYQGQHGGHASSRADEHGNPAVTTGNAPTGMGAGHIQEPAREDKKTDGVLRRSGSSSSSSSSEDDGMGGRRKKGIKEKIKEKLPGGNKGNNQQQQQEHTTTTTGGAYGPQGHDTKIATGARGGTAATTADAGGEKKGIVDKIKEKLPGQH

SEQ ID NO: 2342 - protein, 262 aa, Oryza sativa
MKSHTLLITRTSYYLSITSVVSHPFQRIRMLTVYVRGAALIDMHPLADHARSALFSFTPTWITMCRAVLVSDMIRLQYFIPRRSSINTQQNLAVIGIHSVPIRSSRLGIARMEYQGQHGGHASSRADEHGNPAVTTGNAPTGMGAGHIQEPAREDKKTDGVLRRSGSSSSSSSSEDDGMGGRRKKGIKEKIKEKLPGGNKGNNQQQQQEHTTTTTGGAYGPQGHDTKIATGAHGGTAATTADAGGEKKGIVDKIKEKLPGQH

SEQ ID NO: 2343 - protein, 106 aa, Sorghum bicolor
AGMGGGQFQPAREEHKTGGILHRSGSSSSSSSEDDGMGGRRKKGIKEKIKEKLPGGHKDNQHATATGGGAAYGQQEHTGAGTYGTEGTGEKKGIMDKIKEKLPGQH

SEQ ID NO: 2344 - protein, 154 aa, Sorghum bicolor
MEYGQQGQHGHGTTGLDQYGNPVAARNRGMRTGTGHGAMLGLSTACSLAWVEHGQFQPAREGAKDRMHLHRSGSSSSSSSETDGMGGRRKKGIGEKIKEKLPGAHKDNQHATAPAAAAYGQQGHTGVRTYGTEGTASEKKGIMDKIKEKLPGQH

SEQ ID NO: 2345 - protein, 152 aa, Triticum aestivum
MEYGQQGQHGHGTTGRVDQYGNPVGAGTGGMGTGTGGMGQLGEHGGAGMGGGQFQPAREEHKTGGILHRSGSSSSSSSEDDGMGGRRKKGIKEKIKEKLPGGHKDNQHATATGGGAAYGQQEHTGAGTYGTEGTGEKKGIMDKIKEKLPGQH

SEQ ID NO: 2346 - protein, 158 aa, Triticum aestivum
MEYQGQQQHGQAATNRVAEYGNPVAGHGAGTGMGAHGGVGTGAGAAARGHFQPTREEHKAGGILQRSGSSSSSSSSEDDGMGGRKKNGIKDKIKEKLPGGHGDQQQTAGTYGQQGHTGTAGTGGTYGQPGHTGMAGTDSTGEKKGIMDKIKEKLPGQH

SEQ ID NO: 2347 - protein, 162 aa, Triticum aestivum
MEHGQATNRVDEYGNPVAGHGVGTGMGAHGGVGTGAAAGGHFQPTREEHKAGGILQRSGSSSSSSSSEDDGMGGRRKKGIKDKIKEKLPGGHGDQQQTAGTYGQQGHTGMTGTGAHGTTATGGTYGQQGDTGMTGTGTHGTDGAGEKKGIMDKIKEKLPGQH

SEQ ID NO: 2348 - protein, 160 aa, Triticum aestivum
MEHGQATIRVDEYGNPVAGHGVGTGMGAHGGSGTGAATGGHFQPTREEHKAGGILQRSGSSSSSSSEDDGMGGRRKKGIKDKIKEKLPGGHGDQQHADGTYGQQGTGMAGTGAHGSAATGGTYGQPGHTGMTGTGTHVTDGAGEKKGIMDKIKEKLPGQH

SEQ ID NO: 2349 - protein, 152 aa, Triticum aestivum
MEYQGHQQHGQATNRVDEYGNPVAGHGVGTGAAAGGHFQPSGEEHKAGGILQRSGSSSSSSSSEDDGMGGRRKKGIKDKIKEKLPGGHGDQQQTTDNTYGQQGHTAGMAGTGGTYGQPGHTGMAGTGTHGTDGTGEKKGVMDKIKEKLPGQH

SEQ ID NO: 2350 - protein, 158 aa, Triticum turgidum subsp. durum
MEYQGQQQHGQAATNRFAEYGNLVAGHGAGTGMAAHGGVGTGAVAAAGGHFQPTREEHKAGGILQRSGSSSSSSSSEDDGMGGRKKKGIKDKIKEKLPGGHGDQQQTAGTYGQQGHTGTAGTGGTYGQPGHTGMAGTDSTGEKKGIMDKIKEKLPGQH

SEQ ID NO: 2351 - protein, 150 aa, Triticum turgidum subsp. durum
MEFQGQHDNPANRVDEYGNPFPLAGGVGGGHAAPGTGGQLQARRGEHKTGGILHRSGSSSSSSSSEDDGMGGRRKKGMKEKIKEKLPGGHKDNQQHMATGTGTGGAYGPGTGTGGAYGQQGHAGMAGAGTGTGEKKGIMDKIKEKLPGQH

SEQ ID NO: 2352 - protein, 93 aa, Triticum turgidum subsp. durum
MEHQGHGTGEKKGIMENIKEKLPGGQGDHQQTAGTHGQHGHTGMTGTEMHDTTATGGTHGQQGLTGTTGTGTHGTGEKKSLMDKVKEKLPGQH

SEQ ID NO: 2353 - protein, 156 aa, Thinopyrum elongatum
MEYQGQQQHDQATTNRVDEYGNPVAGHGVGTGMGAHGGVGTGAAAGGHFQPTREEHKAGGILQRSGSSSSSSSSEDDGMGGRRKKGIKDKIKEKLPGGHGDQQQTAGTYGQQGHTGMAGTGGNYGQPGHTGMAGTDGTGEKKGIMDKIKEKLPGQH

SEQ ID NO: 2354 - protein, 131 aa, Elaeis guineensis
MADPIRRTDEYGNPIPEHQGHGGAVTGGTYGTTTTPHEGVLHGEGGRQQQVHPGKEEHPGGRHHRSGSSSSSSSSEDDGQGGRRKKGLKEKIKEKLPGGGHKSEEHGQTDEGQHEKKGMMEKIKEKLPGHH

SEQ ID NO: 2355 - protein, 81 aa, Sporobolus stapfianus
MDRQGQYGHGTTGRVDEYGNPVAGHGTGTGGMGMGTHGTGGMGMGTHGTGTGMGGQFQPTREEHKYGGILHRSISSSSSSS

SEQ ID NO: 2356 - protein, 246 aa, Helianthus niveus
ANYGGDKQYGRETRQTGDYENPIHSTGGQYEQDVRQTDEYGNPVRRTDEYGNPVHSTTGGTMGDYGSTGLGQGTGGIGTGGYGTTGHQGLGTGVGHTTGGTGTDYTSGGRFTGQTGYQGLGTESEFGGTTGTFQNQPSATPMGGTGLGSGTGAGFGGTGTGTGTGILHRSGSSSSSSSEDDGQGGRRKKKGVMQKIKEKLPGGHSQEGQYQSQTTTTTTAGGAGYGETHEKKGMMEKIKEKLPGHH

SEQ ID NO: 2357 - protein, 155 aa, Aster tripolium
MGSGGGYEKGKHGGIQNPLRSTDHEMGNKGTNIHSTTGGHGIGSTGTTMGSGGGQGYEEGKHGATGGILHRSGSGSSSSSEDDGEGGRRKKKGVIGKIKEKLPGGQQGSDEQSRLQAPATHVGAGGGGHGYQGEEVPEMMGLMNKIKDKLPGGNH

SEQ ID NO: 2358 - protein, 130 aa, Vitis riparia
MAYQQDPCANPTRQTGKTGGQTDQYGNPVHQTEALGAYGAGTGTGMHGGEHQQQPHQQPGVLHRSGSSSSEDDGQGGRRKKGMKEKIKERIPGMGRKDEQKQTSATSTPGQGQQQKGMMEKIKEKLPGAH

SEQ ID NO: 2359 - protein, 252 aa, Boea crassifolia
MADYQHHELKSEEPYAPTPVKIEEIDQPVEASDRGLFDFIGKKKDEEEEKKCDEGKFASEFDDKVQICDEKKEEPKFEVYEDPKLEVSEEPKEEEKKHESLLEKLHRSNSSSSSSSDEEEVEEGGEKKKKKKGLKDKVKEKITGDKKEEAAETKCEETSVPVEKYDEIHTLEPEEKKGFLDKIKEKLPGGKKTEEVYAPPPPKEDVAEYSTAPEAEGKEKKGFLDKIKEKLPGYHPKAEEEKEKEKREEACH

SEQ ID NO: 2360 - protein, 225 aa, Populus euramericana
MAEGNKSHEYETKVGEESGAVETKDRGLFDFLGKKEEEKPQEEVIATDFEEKLQVSEPETKVEEEHKKKEEEEKKPTLFEKLHRSGSSSSSSSSDEEEGDDEEKKKKKKEKRSLKEKMKISGEKGEEKEHEDTSVPVEVVHTETPHEPEDKKGFLDKIKEKLPGHKKADEVPPPAPEHVSPEAAVSHEGDAKEKKGLLEKIKEKIPGYHPKTEEEKEKEKESASQ

SEQ ID NO: 2361 - protein, 245 aa, Picea glauca
MAEQAPEHQDRGMFGLFGKKKEEEGRQDDQISQTPATHTHNEAQTEAASYYPTSPHEVKHGPGHGHEGQLTPEEAEQQKHKGLVGKLHRTHSSSSSSSSDEEEEGGKKKEVGRKKKGAKDKTKEKLPSGGHHSSDHCGGEEKKKAGMVDKIKEKLPGHQEKLPAGGEHSSDQCGTKEEKKTGLLDKIKDKLPGHQEKLPGGGQHSSDQYGGKQEKKMGLLDKIKEKLPGHENKNDGEEEEKKHPH

SEQ ID NO: 2362 - protein, 222 aa, Pinus sylvestris
MRRLRMRLASYYPACSSAWSRTRPMVTRGNFTPEEAEEKKHTGLIGKLHRTHSSSSSSSSDEEEEGEKKKEKERKKKEAKDKTNKKLPGDGQHSSDQSGIEEEKKVSLVDKFKEKLPAQPNKGEGEEKVEVEKKAGVKEKLPVQPNKGEREEKAEVEKKVGLLDKIKEKLPGHSNQKGRGREKKKKKQKWRKRRVLIDKIKEKLPGHHTKKEGEEEEKKQNY

SEQ ID NO: 2363 - protein, 535 aa, Spinacia oleracea
MADERNTYGGPAPSMETTDRGMFDFMKKNNKGEDHKPSEADVIASGGIGKLPVSEPAHYDHDDKEHVGLLEKKHIGLVEQFHRSDHASDERHHDEEQNKGGVFGKIKEKLPGQHDSDTTTHTQQLYPASDHNYNTHHVHQDDEKKDNILDKIKDKLPGKHEDKKQDYHQHQEEEKKGGALDKIKDKLPGQGNAGHTQQLYPAPDHNYNTHHVHQDEENKDSVLDKIKDKLPGQHEDKKNDYHHHQEEEKKDSVLDKIKDKMSGQHEDKKNDYHHHQEEEKKGGVLDKIKDKLPGQHDADTARHTQQLYPAADHNYNTHHVHQDEENKDSVLDKIKDKLPGQHDDKAAYSQHDHHKHHQEEENKGGVLDKIKDKLPGVYMVVKHDGDIVEHTQQLYPAPDHNYNTHYVHEDEKKKDSVLDKIKDKLPGQHEEKAAAYSEPSYDSHPTPAKHHDYFPQEEEKKGGVMDKIKDKLSGQHKDKADEHELVAPLVTVEPHSEGDKEKKGFLEKIKDKIPGLHSKNDAEEKKTHEEKKEGY

SEQ ID NO: 2364 - protein, 265 aa, Arabidopsis thaliana
MAEEYKNNVKEHETPTVATEESPATTTEVTDRGLFDFLGKKEEEVKPQETTTLESEFDHKAQISEPELAAEHEEVKENKITLLEELQEKTEEDEENKPSVIEKLHRSNSSSSSSSDEEGEEKKEKKKKIVEGEEDKKGLVEKIKEKLPGHHDKTAEDDVPVSTTIPVPVSESVVEHDHPEEEKKGLVEKIKEKLPGHHDEKAEDSPAVTSTPLVVTEHPVEPTTELPVEHPEEKKGILEKIKEKLPGYHAKTTEEEVKKEKESDD

SEQ ID NO: 2365 - protein, 294 aa, Arabidopsis thaliana
NHLKATTQVLKFSHIFYLLYKLLIKSRLTMAEEYKNNVPEHETPTVATEESPATTTEVTDRGLFDFLGKKEEEVKPQETTTLESEFDHKAQISEPELAAEHEEVKENKITLLEELQEKTEEDEENKPSVIEKLHRSNSSSSSSSDEEGEEKKEKKKKIVEGEEDKKGLVEKIKEKLPGHHDKTAEDDVPVSTTIPVPVSESVVEHDHPEEEKKGLVEKIKEKLPGHHDEKAEDSPAVTSTPLVVTEHPVEPTTELPVEHPEEKKGILEKIKEKLPGYHAKTTEEEVKKEKESDD

SEQ ID NO: 2366 - protein, 265 aa, Arabidopsis thaliana
MAEEYKNNVPEHETPTVATEESPATTTEVTDRGLFDFLGKKEEEVKPQETTTLESEFDHKAQISEPELAAEHEEVKENKITLLEELQEKTEEDEENKPSVIEKLHRSNSSSSSSSDEEGEEKKEKKKKIVEGEEDKKGLVEKIKEKLPGHHDKTAEDDVPVSTTIPVPVSESVVEHDHPEEEKKGLVEKIKEKLPGHHDEKAEDSPAVTSTPLVVTEHPVEPTTELPVEHPEEKKGILEKIKEKLPGYHAKTTEEEVKKEKESDD

SEQ ID NO: 2367 - protein, 260 aa, Arabidopsis thaliana
MAEEYKNTVPEQETPKVATEESSAPEIKERGMFDFLKKKEEVKPQETTTLASEFEHKTQISEPESFVAKHEEEEHKPTLLEQLHQKHEEEEENKPSLLDKLHRSNSSSSSSSDEEGEDDEKKKKEKKKKIVEGDHVKTVEEENQGVMDRIKEKFPLGEKPGGDDVPVVTTMPAPHSVEDHKPEEEEKKGFMDKIKEKLPGHSKKPEDSQVVNTTPLVETATPIADIPEEKKGFMDKIKEKLPGYHAKTTGEEEKKEKVSG

SEQ ID NO: 2368 - protein, 260 aa, Arabidopsis thaliana
MAEEYKNTVPEQETPKVATEESSAPEIKERGMFDFLKKKEEVKPQETTTLASEFEHKTQISEPESFVAKHEEEEHKPTLLEQLHQKHEEEEENKPSLLDKLHRSNSSSSSSSDEEGEDGEKKKKEKKKKIVEGDHVKTVEEENQGVMDRIKEKFPLGEKPGGDDVPVVTTMPAPHSVEDHKPEEEEKKGFMDKIKEKLPGHSKKPEDSQVVNTTPLVETATPIADIPEEKKGFMDKIKEKLPGYHAKTTGEEEKKEKVSD

SEQ ID NO: 2369 - protein, 205 aa, Arabidopsis thaliana
GKTQISEPESFVAKHEEEEHKPTLLEQLHQKHEEEEENKPSLLDKLHRSNSSSSSSSDEEGEDGEKKKKEKKKKIVEGDHVKTVEEENEGVMDRIKEKFPLGEKPGGDDVPVVTTMPAPHSVEDHKPEEEEKKGFMDKIKEKLPGHSKKPEDSQVVNTTPLVETATPIADIPEEKKGFMDKIKEKLPGYHAKTTGEEEKKEKVSD

SEQ ID NO: 2370 - protein, 185 aa, Arabidopsis thaliana
MAEEIKNVPEQEVPKVATEESSAEVTDRGLFDFLGKKKDETKPEETPIASEFEQKVHISEPEPEVKHESLLEKLHRSDSSSSSSSEEEGSDGEKRKKKKEKKKPTTEVEVKEEEKKGFMEKLKEKLPGHKKPEDGSAVAAAPVVVPPPVEEAHPVEKKGILEKIKEKLPGYHPKTPVEEEKKDKE

SEQ ID NO: 2371 - protein, 185 aa, Arabidopsis thaliana [sequence omitted]

SEQ ID NO: 2372 - protein, 183 aa, Arabidopsis thaliana
MAEEYKNTVPEHETPKVATEESSAPEIKERGMFDFLKKKEEVKPQETTTLASEFEHKTQISEPESFVAKHEEEEHKPTLLEQLHQKHEEEEENKPSLLDKLHRSNSSSSSSSDEEGEDGEKKKKEKKKKIVEGDHVKTVEEENQGVMDRIKEKFPLGEKPGGDDVPVVTTMPAPHSVEDHKPE

SEQ ID NO: 2373 - protein, 199 aa, Brassica oleracea
MAEETKNVHEHEAPKVATEESSTATGEVTDRGLFDFLGKKKDETKPEETIDSEFEQKVHISEPVPEVKHEEEKEEKKHSLLEKLHRSDSSSSSSSEEEGEDGVKRKKKKDKKKVTATEGEVKTEEEKKGFMDKLKEKLPGHGKKPEEKPEDASPAPVVAPPVEEAHPAEKKGILEKIKEKLPGYHSKTVEEEKKDKDDH

SEQ ID NO: 2374 - protein, 234 aa, Citrus x paradisi
MAEEIKKQQKSHEYEPSVGTEGAVETKDRGMLDFLGKKEEEKPQHHDQEVIATEFEKVHVSEPQPKVEEHRKEEKEEEKKPGFLDKLHRSTSSSSSSSDEEEGDDEEKKKKKKEKKGLKEKLKEKISGEKEEDTTVPVEKLDDVHAPHHQEEAHPEEKKGFLNKIKEKLPGQQKKPGDHQVPSPPAAEHPTSVEAPEAEAKEKKGILEKLKEKLPGYHPKSEDEKDKDKETAAH

SEQ ID NO: 2375 - protein, 211 aa, Glycine max
MADETQNKYESSEVEVQDRGVFDFLGKKKDEEDKPHPQEEVIATEFQKVTVSDQGENKHSLLEKLHRSDSSSSSSSEEEGEDGEKRKKKKKEKKGLKEKIEEKIEGDHHHHKDEDTSVPVEKVEVVETAHAEEKKGLLDKIKEKLPGHKKTEEATATTPPPPPPVASLEHGEGAHHEGEAKEKKGILEKIKEKLPGYHSKTEEEKEKKKKR

SEQ ID NO: 2376 - protein, 110 aa, Glycine max
  unsure (1)..(110): unsure at all Xaa locations
MEDERSTQSYQGGEAAEQVEVTDRGLLGNLLGKKKAEEDKEKEEELVTGMEKVSVEEPEVKKEEHEDGEKKETLFSKLHRSSSSSSSSSDEEEEEVIDDNGEVIKKKKKX

SEQ ID NO: 2377 - protein, 214 aa, Glycine max
MADETQNKYESSEVEVQDRGVFDFLGKKKDEEDKPHPQEEVIATEFQKVTVSDQGENKHSLLEKLHRSDSSSSSSSEEEGEDGEKRKKKKKEKKGLKEKIEEKIEGDHHHHKDEDTSVPVEKVEVVETAHAEEKKGFLDKIKEKLPGHKKTEEATATTPPPPPPVASLEHGEGAHHEGEAKEKKGILEKIKEKLPGYHSKTEEEKEKEKESGAH

SEQ ID NO: 2378 - protein, 208 aa, Glycine max
MADETQNKYESSEVEVQDRGVFDFLGKKKDEEDKPHPQEEVIATEFQKVTVSDQGENKHSLLEKLHRSDSSSSSSSEEEGEDGEKRKKKKKDNKAQRKIEEKIEGDHHHHKDEDTSVPVEKVEVVETAHAEEKKGFLDKIKEKLPGHKKTEEATATTPPPPPPPVASSHHEGEAKEKKGILEKIKEKLPGYHSKTEEEKEKEKESGAH

SEQ ID NO: 2379 - protein, 193 aa, Glycine max
  unsure (1)..(193): unsure at all Xaa locations
MADETQNKYESSEVEVQDRGVFDFLGKKKDEEDKPHPQEEVIATEFQKVTVSDQGENKHSLLEKLHRSDSSSSSSSEEEXXKIEGDHHHHKDEDTSVPVEKVEVVETAHAEEKKGFLDKIKEKLPGPKKTEEAPATTPPPPPPVASLEHGEGAHHEGEAKEKKGLLEKIKKKLSGYPSKKKEEKEKEKESGAP

SEQ ID NO: 2380 - protein, 214 aa, Betula pubescens
LGKKQEEKPQEEVLVDEFEKVKVSDQSHPKVGKYYEEDYEVEELKKKDKHGLLEKLRRSGSSSSSSSDEEEGEGEEKKKKRKEKKEKKGTLKEKLAGEKEEEKYEKQHEEKYEKPYEEKYEKPYEEKYEKPYEEKYEKHEDTTVPVHVEKYEEAEATQFPAEPVHVEKYEEAEVAYIPEKPAGVPVHEAKYEEEVAHIPAEPAHPEEKKGFLEK

SEQ ID NO: 2381 - protein, 202 aa, Phaseolus vulgaris
MAEETQNKYETAESSEVEVQDRGVFDFLGKKKEEEKPQEEVIVTEFEKITVSEEKKEEEGEKKHSLLEKLHRSDSSSSSSSEEEGEDGEKKKKKKKEKKEKKKIEEKIEGYHKEDTSVPVEKVEVVESEEKKGFLEKIKEKLPGHKKSEEAAAPPPPPPAATSSEHEGEAKEKKGILEKIKEKLPGYHSKTEEEKEKESGGH

SEQ ID NO: 2382 - protein, 216 aa, Pisum sativum
MAEENQNKYEETTSATNSETEIKDRGVFDFLGGKKKDEEHKPAQDEAIAHEFGHKVTLYEAPSETKVEEEGEKKHTSLLEKLHRSDSSSSSSSEEEGEDGEKRKKKKEKKKKEDTSVPVEKVEVVEGTTGTEEEKGFLDKIKEKLPGGHKKTEEVTTPPPVVAAHVPTETTATTTIHEGEKKGILEKIKEKLPGYHAKTATDGEDKDHHKDETTSH

SEQ ID NO: 2383 - protein, 258 aa, Daucus carota
MASDDSVPQHSVEKTTEYESSDRGLFDFMKKEEKDETKVIATEFEEKVQVSEPEPKYEDCKVVEEEEEKAAKPSLLEKLHRSGSSSSSSSSDEEVEEGGEKKKKKEKKGLKEKIEEKIHHKEEDTSVPVEVVTEPEKKKGFMEKIKEKLPGGGKKVEEETVAPPPPPAAAPVDCAVEGDPAKKGILEKIKEKIPGYHPKTSTEEEKKDNDCASAKLIIRCLDRMFDYYYYASFSCGVGLILCFDPLLWGPLISFGTSG

SEQ ID NO: 2384 - protein, 209 aa, Solanum tuberosum
MADQYEQNKPSVEETVGANVEATDRGLFDFIGKKKEEKPSHAHEEEAISSEFCEKVKVSEEEHKEEEKKEEKKLHRSSSSSSSSSDEEEEIGEDGQIIKKKKKKGLKEKIKEKISGDHKEEVKTEDTSVPVEKYEETEEKKGFLDKIKEKLPGGGHKKTEEVAAPPPPPPAAVEHEAEGKEKKGFLDKIKEKLPGYHSKTEEEKEKEKN

SEQ ID NO: 2385 - protein, 290 aa, Oryza sativa
MEDERNTESHQGGEAAEQVEVKDRGLFDNLLGRKKDDQPEEKKHEEELVTGMEKVSVEEPKKEEHHAEGEKKESLLSKLHRSSSSSSSSSDEEEEVIDDNGEVVKRKKKKGLKEKIKEKLPGHKDHAGEHAPPPAATGFPAPAPPASVVTAAPTPAPAPVVTHGDHHHDTAVPVEKIEGDHAKTEATLPRAPEEEKKGFLDKIKEKLPGGHKKPEDATAVPPPAASPAAPATTPAPAHPPPATEEVSSPDGKEKKGILGKIMEKLPGYHKGSGEEDKTAAAATGEHKSSA

SEQ ID NO: 2386 - protein, 275 aa, Oryza sativa
MEDERNTESHQGGEAAEQVEVKDRGLFDNLLGRKKDDQPEEKKHEEELVTGMEKVSVEEPKKEEHHAEGEKKESLLSKLHRSSSSSSSQSSDEEEEVIDDNGEVVKRKKKKGLKEKIKEKLPGHKDHAGEHAPPPAATGFPAPAPPASVVTHHDTAVPVEKIEGDHAKTEATLPRAPEEEKKGFLDKIKEKLPGGHKKPEDATAVPPPAASPAAPATTPAPAHPPPATEEVSSPDGKEKKGILGKIMEKLPGYHKGSGEEDKTAAAVTGEHKSSA

SEQ ID NO: 2387 - protein, 154 aa, Oryza sativa
MEDERNTESHQGGEAASVVTAAPTPAPAPVVTHGDHHHDTAVPVEKIEGDHAKTEATLPRAPEEEKKGFLDKIKEKLPGGHKKPEDATAVPPPAASPAAPATTPAPAHPPPATEEVSSPDGKEKKGILGKIMEKLPGYHKGSGEEDKTAAAATG

SEQ ID NO: 2388 - protein, 137 aa, Oryza sativa
MATPAPVVTHGDHHHDTAVPVEKIEGDHAKTEATLPRAPEEEKKGFLDKIKEKLPGGHKKPEDATAVPPPAASPAAPATTPAPAHPPPATEEVSSPDGKEKKGILGKIMEKLPGYHKGSGEEDKTAAAATGEHKSSA

SEQ ID NO: 2389 - protein, 165 aa, Lavatera thuringiaca
MAEEHNKKIAECTVETQDRGTFDLSGNKKEDEKPQVQADVIANYVDKVKDEETKADKEHKEDEKSSSDKEEVESGEMKKEGDCEKKGVMEKIKEKLPGQHKKDEEVVTAPPPPAAVSSESIVVEHHEEESKEKKGIMEKIKEKLPGYHSKTEDEKEKETSTAANH

SEQ ID NO: 2390 - protein, 83 aa, Saccharomycetales
TRTNKWTEREGKANPKYFSHTGNYGQSPNHIKKQGSGKGNWGKPGDEIDDLIDSGEIPPVFKKDRRGSNLQSHEQKFENVQKE

SEQ ID NO: 2391 - protein, 1864 aa, Burkholderia fungorum
MAMGQKSGRLIRCARSEFRVRLRPVDRLRSAASGPPVARSGLYPDGRSAGRADRTAGNDHAAGHRTDAAARTARLQKRRRDAPESELSAAAGAARARTRDAGRSVGQARRQRLQADQDHRAARLRARLGSLAKRPVRGRSEKRRHRQLRRDPRLSVGRSRLARRSARQTVARGARRHARARRANRHSAGEGLVDHRRGQRRRAAQLLGRARAVFQGARRRARPRPRAHASGRARRRRAGPRTGLLRSCAGLVRHGFHRRPLSFRRSRTSRAELEKCMRLSALALSLRLALSLTAVCCVATVSPDALAQASKDPLNVLIDQGKYWQSHQRGDLAEQAWQKVLRIDPKQPDALFGMGMVLADRKDGAGAQQYLARLKAVAPNYPNLDELGRRLGESSLRDQSVNDARRLAQSGQSASAVQEYQRALTGKPATPELQLEYYQALSATPQGWDQARRGLEQLARDNPDDPRYALAYAQHLTYRDVTRRDGIARLQKLAGDSTVGASAKKSWRQALLWLDARPSDAALYQAYLQTATDDAAVKARFDSMVQQDSTARARAQENAAVDARGRAIADGFAALDRNDVATARAKFSSVLATSPNDTDALGGMGIAALKQERFAEARNDLERASRNGNPARWKTALDSATYWTYTSDAIGARSNGEFAKAKSLFERAIALNPSDVTAQVLLGEMLLANGDPVGAEQAYRMALRRQADNPDAVRGLVGALAAQGRGDEALQFANQLNAEQQSKAGGINRLRGEAQAAQARAAEARGDLGSARSLFEDALLNTPDDPWLRLDLARIYVRQGAVANARSMMDGLLAAHPDMTDALYASALLSAETQDWSTGLAQLDRIPLAQRTDAMTTLQHRLWVHQQADLATRMARSGQTQQALATLHAAEPVAGNSPELIGVIAAAYQQAGDPNRALGLVRAAMNAAPGNTDLLLQYAGILSATQQEAELGMVMRRLASMQLTPQQRTDFGNLNLGIVIKQCDAVRQRGDLAGAYDVIAPWLAAMPDNPDLQAALGRLYSTAGDDRNAVASYRVALQRKPDDLSLLQATISAAAGAKQFSYAESLATQALNAAPGDPGVLATVGRMYRAEGKLSLASTFLQRSLVAANTPLMANAPRNPASNVPRGWEVAMRRIGATPLPGTNPFEGKTATVTPTDADNAALAGGSYNAARASLPYSQSSLPTQTVPNYPPPTQPAPYVAPYTAPAQPYAPNRAPAALPYNAPRQGADSGGYGQEAYGSSQSGAPLQPYPGQGQPPMQPQAQMPPMQQAPQYNPAYPQQAPYPQAQAPYPQQAQYGAPDGYAATPWPMSPAAREAQTNAGSMQQQPYGAPGASTKRPAGRKQSASKNSRNAPAYAQAPYGQQQGYPQQQQAYYGQPAYAQQQQQGYPQQPYQPYQPYPPQQQGYENQGSYQGYYAQQQPYIPQPPTGYAQPYYPAQPGANGGGNTYAPSNVASAQTLGVAEELAQVNREQSSSISGGIVFRNRSGEDGLSNLTDIEAPIQGRIRAGNGHVVVTATPVTLDAGSAAGNVSTLARFGSGLSNSTSETAAIAGNNTYGSQTASGVGLSVGYEGRQLSGDIGVTPIGFRETNIVGGAQYNGGITDKVSYSLAIARRAVTDSLLSYAGARDAGSGLEWGGVTSNGGLGSLAWDDGTSGLYVNAAFQYFDGTNVPGNTAVKGGGGVYTRLLKDADQTLTVGVNTTLMRYDKNLSYFTYGQGGYFSPQQYVILNLPVEWTGRNGAFTYDVKGSIGVQHYRQDSSNYFPLNDGSNRQSSAAANAGFVGTGVDSGAVYPGQSKTGVSYSLSAVGEYQLAPQLAFGATASLGNAYEYREWLAAVYVRYSFSKQTGLQPFPPAPLTSPYLSLSN

SEQ ID NO: 2392 - protein, 98 aa, Arabidopsis thaliana
MSQYNQPPVGVPPPQGYPPEGYPKDAYPPQGYPPQGYPQQGYPPQGYPQQGYPQQGYPPPYAPQYPPPPQHQQQQSSPGFLEGCLAALCCCCLLDACF

SEQ ID NO: 2393 - protein, 101 aa, Arabidopsis thaliana
MSQQPPAVGVPPSHAYPAEGPPKDAYPPPGQPYPQQGYPPPQGYPQQGYPPQGYPPQGYPEQGYPQQGYPPQQQQQQKHSPGMLEGCIAALCCCCVLDACF

SEQ ID NO: 2394 - protein, 82 aa, Arabidopsis thaliana
MYHQEQHPVGAPPPQGYPPKDGYPPAGYPPAGYPPPGYAQGYPAQGYPPPQYSQAPQQKQNAGMLEGCLAALCCCCLLDACF

SEQ ID NO: 2395 - protein, 82 aa, Arabidopsis thaliana
MYHQEQHPVGAPPPQGYPPKDGYPPAGYPPAGYPPPGYAQGYPAQGYPPPQYSQAPQQKQNAGMLEGCLAALCCFCLLDACF

SEQ ID NO: 2396 - protein, 104 aa, Glycine max
TSRSTRVRTLLYVFLTMSQYNQPPVGVPPPQGYPPEGYPKDAYPPQGYPPQGYPPQGYPQQGYPPPYAPQYPPPQHQQQQKGSPGFLEGCLAALCCCCLLDACF

SEQ ID NO: 2397 - protein, 113 aa, Glycine max
NRKKKTPLPLPFTMSYYNQQQPPVGVPPPQGYPPEGYGKEGYPPPGYPPAGYPPPYPPQQGYPPPPYPAQGYPPPYAPQYAQPPPRQQNSTGPGCLGCLAALCCCCLLDACFK

SEQ ID NO: 2398 - protein, 130 aa, Glycine max
SEFRRRKVPFLYACACCSYTHRPIESESGSIILILNFFSWIGYPPEGYGKEGYPPPGYPPAGYPPAGYPPPGYPPQQGYPPPPYPAQGYPPPYAPQYAQPPPRQQNSTGPGCLEGCLAALCCCCLLDACF

SEQ ID NO: 2399 - protein, 140 aa, Glycine max
RARRLPPSLPVSFPASLSSSSPAAPAEAKHGDSTAAMSYYGQQQPPVGVPPQQGYPGKEEYPPAGYPPAGYPPPGQGQGYPPQGYPPQQGGYPPQQGGYPPQQGYPQQGYPQQGYPPQYAQQPPRQQQSSGPSFMEGCLA

SEQ ID NO: 2400 - protein, 150 aa, Triticum aestivum
TQTPASQTRPSRARPARREAPAGGRESPKPQRLKQSPAAPAPIAARNQRETPEPEEEEEMSYYNQQPPVGAPPPQGYGDKGGYPPPGYPPAGYPPPAQGYPPAGYPQQGYPPQYAQQPPPHQQQQQSSGPSFMEGCLAALCCCCLLDACF

SEQ ID NO: 2401 - protein, 203 aa, Ajellomyces capsulatus
MSGPYDNQNNPNYYGQGGYPPQQGYGQAPPDQYNQGQYPPQQGYGQPAYGQQHPPQQHGNEQQGYYGQHQQQQPYDPNQQGYPQQPHQQPQYDNQGVAQQHQQQAGAPGGAQDGERGLGGALTGGLAGGFMGHQANHGILGTIGGAILGSIAEDKLKDNKKHKHSNSGGHHSHGGSHHGGSQYGGGGSSNFLGSAAGSLFGKK

SEQ ID NO: 2402 - protein, 129 aa, Candida albicans
MSKDEYFGKPSGPPPNYNNQPQSQQPQQSYVPQSQPNYSQQTQDRGMFSGGGGGHGHYQQQQGYNAYGPPPPQGGYYQQQPGGGGGYYQQQQQQQPMYVQQQPRSGGNDSCLMGCLAALCVCCTLDMLF

SEQ ID NO: 2403 - protein, 86 aa, Sporobolus stapfianus
MSYYGQQPPVGVPPQQGYPGKDGYPPQGYPPAGYPPQQGYPPQGYPQQGYPPPYAQAAAQQQQSGPSFMEGCLAALCCCCLLDACF

SEQ ID NO: 2404 - protein, 108 aa, Saccharomyces pastorianus
MSDTGRKGFGDKASEALKPDSQKSYAEQGKEFITDKADKVAGKVESNDNKGVFQGVHDSAQQGKDNADSQGESFADQARDYMGAAKSKLNDAVEYVSGRAHEEDPTKK

SEQ ID NO: 2405 - protein, 112 aa, Glycine max
MSDALRQSTTDKAASSLKPDSQKSGLEQAGDSIKGAADNVAGSVQPSGEKSATQKASDTVSGSNENASKQGQSVLDSASETVGNAAQSAQDALEEVNASYHEDLTPLSHQPT

SEQ ID NO: 2406 - protein, 106 aa, Glycine max
  unsure (1)..(106): unsure at all Xaa locations
MSDSMRKGLGEQASEKITPDSQKSTTEKASESLTGAGDRIAGAVQPEGQKSTGQKLGDATRSGGDEGQGVMKQAQDALGNAGQSISDTLSGATGQKKXSTLFSFAW

SEQ ID NO: 2407 - protein, 116 aa, Glycine max
  unsure (1)..(116): unsure at all Xaa locations
MSDIGRQSLGDKAGAALKPDSQKTYLEQAGDAIKGKADSAASTGQPESQKSYTQQAGDALSGNQNENKGSLLDSAKDALGMNNNNRAXVDRYRSGAXVGXSEGRRKKTFSSLYYYE

SEQ ID NO: 2408 - protein, 81 aa, Glycine max
  unsure (1)..(81): unsure at all Xaa locations
MSDIGRQSLGDKAGAALKPDSEKSYVEQATDYVKGTLDSVASAVQPQQEKSTTQKVGDALTGDNKNKDIAXMSLGDTTRLD

SEQ ID NO: 2409 - protein, 111 aa, Glycine max
  unsure (1)..(111): unsure at all Xaa locations
MSDMGRQSLGDKAGAALKPDSQKTYLEQATDAVKGKADSAASTGQPDSQKSWTQSAGDAISGNQNENSGSILDSAKNALGXERQEGLIDRRPTNDDPHRSTMVACILVPTY

SEQ ID NO: 2410 - protein, 143 aa, Zea mays
  unsure (1)..(143): unsure at all Xaa locations
MSDLGRKGLGDQVQEKVTPDSQKSTLDQAKEGVTGAYDRAAGAVQPEQDKSATQKLGDSTRSGKDEASGQGQGILASAQETLGNAAQSVQDTLGGKKXTASLRHDXRLRPSYSRFSPSALHYEYPIRTSVEEVSVSLYPRTYQ

SEQ ID NO: 2411 - protein, 126 aa, Zea mays
  unsure (1)..(126): unsure at all Xaa locations
MSDSMRKGLGEQASEKITPDSQKSTTEKASESLTGAGDRIAGAVQPEGQKSTGQKLGDATRSGGDDASNQGQGVMKQAQDMASNAGQSISDTLSGATGQKKXSTPLLVRLVATMPSSSSLLYGMKT

SEQ ID NO: 2412 - protein, 114 aa, Zea mays
  unsure (1)..(114): unsure at all Xaa locations
MSDNLRKGLGEQASEKITPDSQKSTTSKIGENVSGAADKAASAVQPEGQKSTTQKVGDATRGGSDNAQNQGEGVLKQAQDGLSNAAAGVQNALXRWQAVDYFGSAVAVRLSLAA

SEQ ID NO: 2413 - protein, 116 aa, Zea mays
  unsure (1)..(116): unsure at all Xaa locations
MSDSMRKGLGEQASEKLQPDSTKSNTEKASETLSGAGDRIAGAVQPEGQKSAGQKLGDATRSGHDDASNKSEGVMKQAQDSLSNAGQAISDTLSGGQKKXTASLPRPRSSRHDPGE

SEQ ID NO: 2414 - protein, 110 aa, Zea mays
  unsure (1)..(110): unsure at all Xaa locations
MSDLGRKGLGEQAKEKVTPDSQKSTLDKAGESVSGLGDKAASAVQPEGQKSTTQKLGDSTRSGGDKAQNQGSGILDSAQQGLSNAGQAVTDTFNSATGNKKXTASFMTSL

SEQ ID NO: 2415 - protein, 115 aa, Zea mays
  unsure (1)..(115): unsure at all Xaa locations
MSDALRQSTTDKAASSLKPDSQKSGLEQAGDKVKGAADNLAGSAQPSGEKSATQKASDTVSGSNENASKQGQSVLDSASETVGNAAQSAQDALGLXARSKHFSHEDLTPLSHQPT

SEQ ID NO: 2416 - protein, 89 aa, Zea mays
MSDAGRKDFSTKAKEEITPDSSKSTQEKVKESFTDTTDRLARGVQSDDSKSSTQEAFDKTQRSYDNHAHGGATGSIGDKIKDTLGLGNN

SEQ ID NO: 2417 - protein, 532 aa, Adiantum capillus-veneris
MSEQGCYTDCWGAIWWIWESGIKAMAGLEGEIQTRRLRGREIPVLPPVTRSAAASAANVGYNENTRKTKVSTKRAAADDTSSRVASNVPVQHAKKRAALANLTNQSNSAITRNSSLPSKSHASAVNGKTRAAAGQVKEVQQVAQQVVEPLQEVGREPNTGRSSLANSSITFDNDENACPERATSSVGMKSRTLDVLQLVGNENKTVASLERKTQHSLYISKDTKPRARQGGLFEDCKDDNEEGGWSSKNYMDIDNHKDPQMCSAYAAEIYHHLRMAELKRRPSLNFMDTVQQDINASMRGILVDWLVEVAEEYKLVPDTLYLTISYIDRFLSGNLVTRQRLQLLGVASMLIASKYEEICAPQVDEFCYITDNTYNREEVLEMERSVLNHLHFELTGPTTKSFLRRFVRAAQAGQKSPTLQLEFLGNYLAELTLLEYGFLHFLPSMIAGAAVLVARVTLNPTWRPWNSTLQHYSGYKASELKECAKAILELQKNTKNCTLPAIREKYRQHKFKCVATLHPPASIPAEYFDDIE

SEQ ID NO: 2418 - protein, 478 aa, Emericella nidulans
MNENDENGPSTRLTRAKAAALTTDAPAANGALKKPLQTKKAATGANGTQRKRAALGDVSNVGKADNGETKDAKKATSKTGLTSKATMQSGGVQKLSRSNLSRTAVGAKDNNVKKPATEAKRPGSGSGMGSAMKRTSSQKSLQEKTIQQEEPPRKKVDIEKVVEKQAEAVSVKGDVKAGAQTEELEKPQDFVADLDTEDLDDPLMAAEYVVEIFDYLRELEMETLPNPDYIDHQPDLEWKMRGILVDWLIEVHTRFRLLPETLFLAVNIIDRFLSAEVVALDRLQLVGVAAMFIASKYEEVLSPHVANFSHVADETFSDKEILDAERHILATLEYNMSYPNPMNFLRRISKADNYDIQTRTLGKYLMEISLLDHRFLGYPQSQIGAAAMYLARLILDRGPWDATLAHYAGYTEEEIDEVFRLMVDYLHRPVCHEAFFKKYASKKFLKASIMTRQWAKKYHHLYIDSALTEPYNSIKDNE

SEQ ID NO: 2419 - protein, 360 aa, Physcomitrella patens
MSPSVDCLASLYCAEDVSGTAWNESEMCGAADRVFESQPAVFMDFPVEDDEAIATLLMKEAQFMPEADYLERYQSRKLSLEARLAAIEWILKVHSFYNYSPLTVALAVNYMDRFLSRYYFPEGKEWMLQLLSVACISLAAKMEESDVPILLDFQVEQEEHIFEAHTIQRMELLVLSTLEWRMSGVTPFSYVDYFFHKLGVSDLLLRALLSRVSEIILKSIRVTTSLQYLPSVVAAASIICALEEVTTIRTGDLLRTFNELLVNVESVKDCYIDMRQSEIGPYCVRMGLKRKILHASEPQSPVGVLEAADVSSPSGTVLGFSSRESSPDVTDSPPSTNSQRKRRKLCLHNESCLHVESASL

SEQ ID NO: 2420 - protein, 372 aa, Chenopodium rubrum
MAPSFDLLCAEDNSSIFDEVDDNYYGVVDDDVLQICNLQQQHGNLRNFDDFTLILLIIIKEHNFEALISGFFVANHECLASLFDNERQHFLGLDYLKRFRNGDLDLGARNLVIDWIHKVQSHYNFGPLCVYLSVNYLDRFLSAYELPGKAWMMQLLGVACLSLAAKVDETDVPLILDLQVSESKFVFEAKTIQRMELLVLSTLKWRMQSVTPFSFIDYFLYKLSGDKMPSKSLIFQAIQLILSTIKGIDLMEFRPSEIAAAVAISVTQQTQIVEFTDKAFSFLTDHVEKERLMKCVEIMHDLRMSSRSNGALASTSVPQSPIGVLDASACLSYKSDDTSTTPSGSCGNSAHSSPASAPPPKRRKLDRTSQIS

SEQ ID NO: 2421 - protein, 349 aa, Chenopodium rubrum
SKTHFKMTTLETEQEQQPFSQNSPLFLDCLYCEEKYWDYDYHDEDDFGSLNSSKLHDCSLICCEDDEEIQLNALVSKEEKINFDEGDLGGNQLVMETRREALEWMIRVNYHHNFSVITLVLGVNYFDRFMLSFGFQKEMPWMTHLAAVACLSLASKVEETHVPLLLDFQVEHEQIFEAKVVQRMELLVLQHSNGKMNAVTPLSYFGHLIRKLKLKPHFHCKILTRCENIIVSVILDPRFLCYVPSVLAAASMVQTLKEIGLWSILEHQNDIMNTLKLDKVKVEDCYNFIQEVSSNEKARKRKWYNNISSANRNPNNVLELVVSSESSNNDLPSETLPKKCRTMGPPCFG

SEQ ID NO: 2422 - protein, 352 aa, Lagenaria siceraria
MVPPYALDSLYCSEDHWENDDEEEERGFHEQPYSNLTTESSSPILAVAEQDLFWENDELISLFSREKPNELFKTIQIDPSLAAARRSAVGWMLKVNAHYSFSALTAVLAVDYLDRFLSCFHFQRDKPWMSQLAAVACISLAAKVEETQVPLLLDLQVEDSRYLFEAKTIKKMELLVLSTLQWRMNPVTPFSFVDYISRRLGFKEHICWEILWQCERTILSVILESDFMSFLPSVMATATMLHVFKAMEEPTLSVEYDSQLLNILGIDKGNVEECCKLISNASRRNGNQFKKRKIGSIPGSPNGVMDVSFSSDSSNDSWSVASSVSSSPEPLTKKNRANGSMSGDCETFRTLS

SEQ ID NO: 2423 - protein, 380 aa, Lagenaria siceraria
MKKMALHSNKHRTQRLHNSLFFFDFLHCTEQQHLQTEHPIFLNNGGTNDFPLFQQTTTHFLVYEDEELNHLLSKEKDQNLQTGAVLKTLVQTDNALSLARTEAIDWLLKVNAFYGFSSLTALLAINYLDRILSGPYFQRDKPWMLQLAAVTCISLAAKVEEIRVPLLLDLQVEDSKYIFEAKTIQRMELLVLTALQWKMHPVAPVSFLGIITKGLGMKNQYIQREFLRRCERILLSLVSDSRSVGILPSIMAVSAMVSVVEEMGNCNPLEEFQDQLLNALKINKGRVKECCKVIMEAKIKGSGKRKHVEEEAEAEAESESSEAETEGEAEAEAGSPNGVMEANFSCESSNDSWEMGTIVSEYTHFSSSSSSSSKRIRPTR

SEQ ID NO: 2424 - protein, 361 aa, Arabidopsis thaliana
MAENLACGETSESWIIDNDDDDINYGGGFTNEIDYNHQLFAKDDNFGGNGSIPMMGSSSSSLSEDRIKEMLVREIEFCPGTDYVKRLLSGDLDLSVRNQALDWILKVCAHYHFGHLCICLSMNYLDRFLTSYELPKDKDWAAQLLAVSCLSLASKMEETDVPHIVDLQVEDPKFVFEAKTIKRMELLVVTTLNWRLQALTPFSFIDYFVDKISGHVSENLIYRSSRFILNTTKAIEFLDFRPSEIAAAAAVSVSISGETECIDEEKALSSLIYVKQERVKRCLNLMRSLTGEENVRGTSLSQEQARVAVRAVPASPVGVLEATCLSYRSEERTVESCTNSSQSSPDNNNNNNNSNKRRRKQ

SEQ ID NO: 2425 - protein, 383 aa, Arabidopsis thaliana
MAENLACGETASHGSLTTTMMISTMAADFTNEIDYNHQLFAKDDNFGGNGSIPMMGSSSSSLSEDRIKEMLVREIEFCPGTDYVKRLLSGDLDLSVRNQALDWILKVCAHYHFGHLCICLSMNYLDRFLTSYELPKDKDWAAQLLAVSCLSLASKMEETDVPHIVDLQVEDPKFVFEAKTIKRMELLVVTTLNWRLQALTPFSFIDYFVDKISGHVSENLIYRSSRFILNTTKAIEFLDFRPSEIAAAAAVSVSISGETECIDEEKALSSLIYVKQERVKRCLNLMRSLTGEENVRGTSLSQEQARVAVRAVPASPVGVLEATCLSYRSEERTVESCTNSSQSSPDNNNNNNNSKQEEEKTMRENKRVIHCLLQPKTTSTHDI

SEQ ID NO: 2426 - protein, 308 aa, Arabidopsis thaliana
MAEENLELSLLCTESNVDDEGMIVDETPIEISIPQMGFSQSESEEIIMEMVEKEKQHLPSDDYIKRLRSGDLDLNVGRRDALNWIWKACEVHQFGPLCFCLAMNYLDRFLSVHDLPSGKGWILQLLAVACLSLAAKIEETEVPMLIDLQVGDPQFVFEAKSVQRMELLVLNRLKWRLRAITPCSYIRYFLRKMSKCDQEPSNTLISRSLQVIASTTKGIDFLEFRPSEVAAAVALSVSGELQRVHFDNSSFSPLFSLLQKERVKKIGEMIESDGSDLFSQTPNGVLEVSACCFSFKTHDSSSSYTHLS

SEQ ID NO: 2427 - protein, 308 aa, Arabidopsis thaliana
MAEENLELSLLCTESNVDDEGMIVDETPIEISIPQMGFSQSESEEIIMEMVEKEKQHLPSDDYIKRLRSGDLDLNVGRRDALNWIWKACEVHQFGPLCFCLAMNYLDRFLSVHDLPSGKGWILQLLAVACLSLAAKIEETEVPMLIDLQVGDPQFVFEAKSVQRMELLVLNKLKWRLRAITPCSYIRYFLRKMSKCDQEPSNTLISRSLQVIASTTKGIDFLEFRPSEVAAAVALSVSGELQRVHFDNSSFSPLFSLLQKERVKKIGEMIESDGSDLCSQTPNGVLEVSACCFSFKTHDSSSSYTHLS

SEQ ID NO: 2428 - protein, 308 aa, Arabidopsis thaliana
MAEENLELSLLCTESNVDDEGMIVDETPIEISIPQMGFSQSESEEIIMEMVEKEKQHLPSDDYIKRLRSGDLDLNVGRRDALNWIWKACEVHQFGPLCFCLAMNYLDRFLSVHDLPSGKGWILQLLAVACLSLAAKIEETEVPMLIDLQVGDPQFVFEAKSVQRMELLVLNKLKWRLRAITPCSYIRYFLRKMSKCDQEPSNTLISRSLQVIASTTKGIDFLEFRPSEAAAAVALSVSGELQRVHFDNSSFSPLFSLLQKERVKKIGEMIESDGSDLCSQTPNGVLEVSACCFSFKTHDSSSSYTHLS

SEQ ID NO: 2429 - protein, 260 aa, Arabidopsis thaliana
MAEFMEPNLVSNFDDEKSNSVDTRSIFQMGFPLESEEIVREMIEKERQHSPRDDYLKRLRNGDLDFNVRIQALGWIWKACEELQFGPLCICLAMNYLDRFLSVHDLPSGKAWTVQLLAVACLSLAAKIEETNVPELMQLQVGAPMFVFEAKSVQRMELLVLNVLRWRLRAVTPCSYVRYFLSKINGYDQEPHSRLVTRSLQVIASTTKGIDFLEFRASEIAAAVALSVSGEHFDKFSFSSSFSSLEKVREVTKSLLHLQK

SEQ ID NO: 2430 - protein, 425 aa, Brassica napus
MSKTTNQNRRPSFTSSTESSMRKRHGPSSSSSAVKPISNTAVMVAKKRAPLGNITNQRKDSRIFPNSSSADSAHCPNKSAKLKLAAPTQPVCVNACETKSTCEEEVVPIERKAFSNLCITPSSDTTTNVMSETENKEEKFMNIDNKDDADPQLYATFACDIYNHLRAAEAKKQPAVDYMETVQKDVNSTMRGILVDWLVEVSEEYRLVPETLYLTVNYIDRYLSGNVISRQKLQLLGVACMMIAAKYEEVCAPQVEEFCYITDNTYLKDEVLDMESAVLNYLKFEMSAPTVKCFLRRLFSGCPRVHEAPCMQLECMASYIAELSLLEYTMLSHPPSLVAASAIFLAKYTLDPTRRPWNSTLRHYTQYEAMELRGCVMDLQRLCSNAHVSTLPAVRDKYSQHKYKFVAKKFCPSIIPPDFFKNSLY

SEQ ID NO: 2431 - protein, 487 aa, Silene latifolia
MSTQAHRNRLLGTENGNGGGGVKVVNNPKLTKKRPPLSNLTNHPRPSLVPSAITKSTKAKRDSSTGVRSTSFPAENPSATLNSKPSAVVPLKTAFTRSNVLVSCKASLPNGKGEQSHITRHPASCTMDTTPTPEDAQSVSMDESMSTCDSLKSPEVEYMDENDVAALCSIERKTSKNLYISDDMETTGSFCKREIVSAMEIDKVVDVDDNHMDPQFCSTIACDIYKHLRESETQKRPSTDFMEQTQKDINASMRAILVDWLVEVAEEYRLVPDTLYLTVNYIDRYLSGNAMNRQRLQLLGVACMMIAAKYEEICAPQVEEFCYITDNTYFKEEVLQMESGVLNFLKFEMTAPTTKNFLRRFVRAAQVMNEVPAFQLECLANYVAELSLLEYSMLKYAPSLIAASSVFLAKYMLTSSRPWNATLRHYTLYEASDLEECVKALHQLCLNSHISSLPAIREKYSHHKYKSVAKKHCPSSIPAEYFQNSSC

SEQ ID NO: 2432 - protein, 359 aa, Glycine max
  unsure (1)..(359): unsure at all Xaa locations
MAHNSDSATSNLLLLCSENSSTCFDDDGLECDAADGSNSRISHHEGGGGSELLLACFVAQSEEAVRAMVEREKEHLPRDDYLMRLRSGGLDLDLLGVRKEALDWIWKAHSYLGFGPLSFCLAVNYLDRFLSVFELPRGVSWTVQLLAVACLSIAAKMEEIKVPQSVDLQVGELKFLFEARTIQKMELLVLSTLRWKMCAITPCSFIDYFLGKITCEQHPAKSSISISVHLILGIIRGIDFLEFWPSEIAAAVAASVLKESQVIEIDKAITDLLVVEKGRVLKCVELIRDLSLINVAASLGSKVPYLPQSPIGVLXXAGCLSYKSDELTVGSCPNSSHNISNPNPTKRSKHGPSNGTSNS

SEQ ID NO: 2433 - protein, 306 aa, Glycine max
  unsure (1)..(306): unsure at all Xaa locations
XSLSLSAFYPKNDESLVMMVEKECQHWSGLRYLNKFQTGDLDFGARMEAIDWIHKVRSHFGFGPLCGYLSINYLDRFLFAYELPKGRVWTMQLLAVACLSLAAKLDETEVPLSLDLQVGESKFLFEAKTIQRMELLVLSTLKWRMQAITPFTFLDYFLCKINDDQSPLRSSIMRSIQLISSTARGIDFLEFKPSEIAAAVAMYVMGETQTVDTGKAISVLIQHVEKERLLKCVQMIQELSCNSGSAKDSSASVTCLPQSPIGVLDAXXCFNYKSDDTNASSCVNSSHNSPVAKRRKLNKTCGAEQL

SEQ ID NO: 2434 - protein, 452 aa, Medicago sativa subsp. falcata
MKEVAPGTQDQKQPLRANSKRALSDVTYLPHKKRAILQDVTNNCGENTKRSCLNPTEIQAKKRKVAKPAQPNVSNEVPSAAELPPFIADSKPVSSMEMRLRSSEDFRCLDDLEDNAPFRMSSNQCGTNNNLLQSQTSRISARPSSSQKKASQIVAAKKANISELLDVSKHPDVADIDADFEDPQLCSHYAADIYDHLRVAELSRRPYPNFMETVQQDITPSMRAILVDWLVEVSEGYKLQANTLYLAVYLIDWFLSKNCIEKERLQLLGITCMLIASKYEEINAPRIEDFCFITDNTYTKEEVVKLESLVLKSSSYQLFAPTTKTFLRRFLRAAQASYKRPSIELEYLTNYLAELTLLNYGFLNFLPSMIAASAVFLARWTLDQSSHPWNPTLEHYASYKASDLKATVLALQDLQLNSNDDCPLTAIRKKYTQDKLNCVAALSSPKLLETLF

SEQ ID NO: 2435 - protein, 386 aa, Medicago sativa
MAIHHHHHNHQQLQQHTSSLFDALYCDEEEKWEDDDEGEVVDEGAQSDVTTTNYDILDSTSLLPLLLLEQNLFNEDEELNTLFSKEITQQETYYEDLKNVINFDSLSQPRREAVEWMLKVNAHYGFSALTATLAVNYLDRFLLSFHFQKEKPWMIQLVAVTCISLAAKVEETQVPLLLDLQVQDTKYVFEAKTIQRMELLILSTLKWKMHPVTTHSFLDHIIRRLGLKTNLHWEFLRRCENLLLSVLLDSRFVGCVPSVLATATMLHVIDQIEQSDDNGVDYKNQLLNVLKISKEKVDECYNAILHLTNANNYGHKRKYEEIPGSPSGVIDAVFSSDGSNDSWTVGASSYSTSEPVFKKTKNQGQNMNLSPINRVIVGILATATSP

SEQ ID NO: 2436 - protein, 378 aa, Medicago sativa
MAIHHHHQQHTCSLFDALYCDEEKWEDDEGEVVDEGEQSDVTTTNYDILDSTSLLPLLLLEQNLFNEDEELNTLFSKEKIQQETYYEDLKNVINFDSLSQPRREAVEWMLKVNAHYGFSALTATLAVNYLDRFLLSFHFQKEKPWMIQLVAVTCISLAAKVEETQVPLLLDLQVQDTKYVFEAKTIQRMELLILSTLKWKMHPVTTHSFLDHIIRRLGLKTNLHWEFLRRCENLLLSVLLDSRFVGCVPSVLATATMLHVIDQIEQSDDHGVDYKNQLLNVLKTSKEKVDECYNAILHLTNANNYGHKRKYEEIPGSPSGVIDAVFSSDGSNDSWTVGASSYSTSEPVFKKTKNQGQNMNLSPINRVIVGILATATSP

SEQ ID NO: 2437 - protein, 222 aa, Medicago sativa
MAIHHHHHNHQQLQQHTSSLFDALYCDEEEKWEDDEGEVVDEGEQSDVTTTNYDILDSTSLLPLLLLEQNLFNEDEELNTLFSKEITQQETYYEDLKNVINFDSLSQPRREAVEWMLKVNAHYGFSALTATLAVNYLDRFLLSFHFQKEKPWMIQLVAVTCISLAAKVEETQVPLLLDLQVQDTKYVFEAKTIQRMELLILSTLKWKMHPVTTHSFLDPGNS

SEQ ID NO: 2438 - protein, 384 aa, Pisum sativum
MAIHHHHHHHQQLHHNSLLDALYCDEEKLEEEQEDVSSQQSDVTTNNDNNILDSTSLFPLLLLEQNLFSQDEELTTLFSKEKTQQETYYEDLKNVVDFVSLSQPRREAVQWMLKVNAHYAFSPLTATLAVTYFDRFLLTFHFQKDKPWMIQLVAVTCISLAAKVEETQVPLLLDLQVQDTKYVFEAKTIQRMELLILSTLKWKMHPVTPHSFLDHIITRLGLKTNLHWEFLRRCENLLLSVLLDSRFVGCVPSVLATATMLHVIDQIEESDDNGVDYKNQLLSILKINKEKVDECYNAIVEVTNENNYGHKRKYEQIPGSPSGVIDAVFSSDGSNDSWKVGSSSYSTSEPVFKKTKTQGQNRNLSPLNRVIVGILATASATTSP

SEQ ID NO: 2439 - protein, 356 aa, Oryza sativa (japonica cultivar-group); identical to SEQ ID NO: 348

SEQ ID NO: 2440 - protein, 382 aa, Daucus carota
MRFTRVYTEVFNMTDHSLLCTETNNLCFDDLEARDDQDPRIDCENVVGNESEALICAVPLQRDEDFVFVFESKVNFCPEVIFSTDRSGELDLCVRKEALDWIYKAHAHYNFGALSVCLAVNYLDRFLSLYELPSGKKWTVQLLAVACLSLAAKMEEVNVPLTVDLQVADPKFVFEAKTIKRMELLVLSTLKWRMQACTPCSFIDYFLRKINNADALPSGSLIDRSIQFILKTMKGIDFLEFRPSEISAAVAICVTREAQTLDINKAMSNIIPVEKDRVFKCIEMIQDLTLVTETSNVASGRTRAQVPQSPVGVLDAACLSYKSDERTVGSCPNSSLHTETSPHTKRRKLIEIMKCGFYSITQFQIFSEWEFWCGCLCKRPPL

SEQ ID NO: 2441 - protein, 359 aa, Lycopersicon esculentum
MVFPLDSQLQNPISALLDGLYCEEDRFLDDDLGEWSSLDVGNENVKKTLPLLECDMFWEHDELATLLSKENEFHLGFQSLISDGSLMGARKEALDWMLRVIAYYGFTATTAVLAVNYFDRFVSGWCFQKDKPWMSQLAAVACLSIAAKVEETQVPLLLDLQVADSRFVFEAKTIQRMELLVLSTLKWKMNLVTPLSFIDHIMRRFGFMSNLHMDFLKKCERLILDIITDSRLLHYPPSVIATASMFYVINDIEPSNAMEYQNQLMSVLKVRKDIFEECHDLILELMDTACYKLCQSLKRKHHSVPGSPSGVIDAYFSSESSNESWSVASSISSSPEPQYKRNKTQDQRMTLAPLGSNLH

SEQ ID NO: 2442 - protein, 364 aa, Lycopersicon esculentum
MAIENNDQSFFLDVLYCEEEEEKWGDLLEDEEGVIINPLLLSSEGTTKTNSLLLLPLLLLEQDLFWEDEELLSLFVKEKETRCCFESFGSDPFLCSARVDVVEWILKVNAHYDFSALTAILAINYLDRFLSSLQFQKDKPWMTQLAAVTCLSLAAKVEETQVPLLLDFQVEDAKYVFEAKTIQRMELLVLSSLKWRMNPVTPLSFLDHIIRRLGLKNNVHWEFLRRCESLLLSVMIDCRFVRYMPSVLATAIMLHVIHQIEPCNAIDYQNQLLGVLKISKENVNNCYELISEVSSKPITSHKRKYDENPSSPSGVIDPIYTSESSNDSWDLDLPSFKKSKVQEQQMKMSSSLSRVFVEAVGSPH

SEQ ID NO: 2443 - protein, 336 aa, Lycopersicon esculentum
MSHHYQEQEQLEAQKIPFLLDSLYCEENNILTEVSIETESFSSHDLLWEEEELTSLFSKETEYEISYNVLEKNQSFISSRRESVEWILKTTAYYSFSAQTGFLAVNYFDRFLLFSFNQSLNHKPWMNQLVAVTCLSLAAKVEETDVPLLLDLQVEESGFLFESKTIQRMEMLILSTLKWKMNPVTPFSFLDFITRRLGLKHCLSLEFLRRCEKVLLYTITDDRFIGYLPSAMASATMLHVLDRLKPCIGEKYQDQLLGILGIVKEKVEGCYRLIQEVACNIDFGSNKRKFGTLPGSPTGVMDMSFSSDYSNDSWSVATSVTSSPEPLSKKIRESNE

SEQ ID NO: 2444 - protein, 354 aa, Nicotiana tabacum
MAADNIYDFVASNLLCTETKSLCFDDVDSLTISQQNIETKSKDLSFNNGIRSEPLIDLPSLSEECLSFMVQREMEFLPKDDYVERLRSGDLDLSVRKEALDWILKAHMHYGFGELSFCLSINYLDRFLSLYELPRSKTWTVQLLAVACLSLAAKMEEINVPLTVDLQVGDPKFVFEGKTIQRMELLVLSTLKWRMQAYTPYTFIDYFMRKMNGDQIPSRPLISGSMQLILSIIRSIDFLEFRSSEIAASVAMSVSGEIQAKDIDKAMPCFFIHLDKGRVQKCVELIQDLTTATITTAAAASLVPQSPIGVLEAAACLSYKSGDERTVGSCTTSSHTKRRKLDTSSLEHGTSEKL

SEQ ID NO: 2445 - protein, 308 aa, Helianthus annuus
MAILSRYSSSNTLFCIEEQVHEDEDELTHQDSSAIHPLDLQDLCWEHEELVSLFTKEEEQQKQTPWPSSCTLSFRKEAVDWILKVKGCHGFTPLTAILAINYLDRFLSSLHFQKANTPWMIHLVAVTCLSLAAKIQETHVPLLLDLQLEESKFLFEAKNIQKTELLVMSTLKWRMNLVTPISFLDHIVRRLGLSNHLHWDFFKKCEAMILYLVADSRFVCYKPSVLATATMLCVVEEIDPTNSIGYKSQLLDLLKTTKDHINECYKLVMDLSYDNHNKGKRDENERTIYPVSPAGFIGFMCHESSNDS

SEQ ID NO: 2446 - protein, 371 aa, Populus alba
MSFLQQQETHNQSPALALDGLYCEEDGFGEDYSCGLDDETSQVYDQNVKKEQNLSSVLLEQDLFWEDSELLSLISKEKETHVVFDSVGSRDGSLMVVRREAVEWFLRVKAHYGFSALTGVLAVNYFDRFISSSRFRRDKPWMGQLAAVACLSLAAKVEETQVPLLLDLQVEDAKYVFEAKTIKRMELWVLSTLHWRMNPVTSISFFDHIIRRLGLKTHMHWEFLWRCERLLLSVISDSRFMSYLPSILATATMLHVIKEVEPRNQLQYQTQLMAVLKTNEDEVNECYRLILEQPGSQNQRHKRKYLSTPSSPNGVIDASFSSENSNDSWAVASSISSSSSVPQFKRSRAQVQQMRLPSLNRMCVDVLSSPH

SEQ ID NO: 2447 - protein, 289 aa, Populus alba
EENWAEEVREDWFQDELEGESYCSNNSNKLNTFPILLEQDLSWEDEELSSLFAKEEQNQLCKDLETNPSLARARCEAVEWILKVNEHYSFTALTAVLAVNYLDRFLFSVHLQKEKPWMAQLAAVSCLSLAAKVEETQVPLLLDFQVEDSKYVFEAKTIQRMEILVLSTLKWKMNPVTPISFLDYITRRLGLEHYLCLEFLKRCERMVLSILADSRSMPYVPSVMAAATMLYVIDNIKPSLAAEYQSQLLSILGIDKDKVEDCSKFLMEFALREHFKLLSNKRKFCSLPG

SEQ ID NO: 2448 - protein, 379 aa, Oryza sativa
  unsure (1)..(379): unsure at all Xaa locations
LIWVFFASALPTSSSARRTAAACLAWAALAAAAARWRRSWGAAAVAALISLASVVVLCSPSTPGSHEFVALLVEKEMDHQPQRGYLEKLELGGLECSWRKDAIDWICKVHSYYNFGPLSLYLAVNYLDRFLSSFNLPHDAWMQQLLSVSCLSLATKMEETVVPLPMDLQVFDAEYVFEARHIKRMELIVMKTLKWRLQAVTPFSFIGYFLDKFNEGKPPSYTLASWCSDLTVGTLKDSRFLSFRPSEIAAAVVLAVLAENQFLVFNSALGESEIPVNKEMVMRCYELMVEKALVKKIRNSNASSSVPHSPITVLDAACFSFRSDDTTLGSSQSNSNNKDYNSQDSAPASKRRRLNTTPIXXLYIHNLALLCNCSFSEQL

SEQ ID NO: 2449 - protein, 174 aa, Triticum aestivum
  unsure (1)..(174): unsure at all Xaa locations
XGYVERLGHGGFESSWRKDAMDWICKVHSYYNFGPLTLCLSVNYMDRFLSSFDLPHDKSWMQQLMSVACLSLAVKMEETVAPLPVDLQVCDEYYAFEPRNIKRMELIVMETLKWRMHSVTPFSFLCYFLDKFNEGKPPSYMLVSRCAELIVATVKDYRFLSFRPSEIAAAVVLX

SEQ ID NO: 2450 - protein, 309 aa, Triticum aestivum
  unsure (1)..(309): unsure at all Xaa locations
FFGVQTFRDCWKCYTNSRSPPLDWIWKVIEHFNFAPLTAVLSVNYLDRFFSVYPLPEGKAWVTQLLAVACLSLASKMEETYVPLPVDLQVVEATSAFEGRTIKRMELLVLSTLKWRMQAVTACSFIDYFLRKFNDHDAPSMLAFSRSTDLILSTAKGADFLVFRPSEIAASVALAAFGERNTSVVERATTTCKYINKERVLRCYELIQDKIAMGTIVLKSAGSSMFSVPQSPIGVLDAAACLSQQSDDTAVGSPATCYQASSASKRRRIGRXPVSCRAVLQVCCSPFWPFCCFKHLNSVWSLENYSVVK

SEQ ID NO: 2451 - protein, 376 aa, Populus tremula x Populus tremuloides
MASMYNPETSAVQDQQQNPTLLYDALYCSEENWVEEVREDWFQDELEGESYCSNNSNKLNTFPILLEQDLSWEDEELSSLFAKEEQNQLCKDLETNPSLARARCEAVEWILKVNEHYSFTALTAVLAVNYLDRFLFSVHLQKEKPWMAQLAAVSCLSLAAKVEETQVPLLLDFQVEDSKYVFEAKTIQRMEILVLSTLKWKMNPVTPISFLDYITRRLGLEHYLCLEFLKRCERMVLSILADSRSMPYVPSVMAAATMLYVIDNIEPSLAAEYQSQLLSILGIDKDKVEDCSKFLMEFALRDHFKLLSNKRKFCSLPGSPSGVVDVSFSSDSSNDSWSVASSVSSSPKPLSKKSRALQSLNNATTSDFSQHSSPVP

SEQ ID NO: 2452 - protein, 380 aa, Saccharomyces cerevisiae
MNCIPSPISERKIQINNEDCIGKENAFHTIPRESSINLTPHSTNEKKVLSEVNSNKIDSLQLPRGKLQRDSTHLEKTRKRQLSNDSTDPIEPKTVKKIKCHQWKNLDSIEMDDPFMVAEYTDSIFSHLYEKEIQMLPTHNYLMDTQSPYHLKSSMRALLIDWLVEVHEKFHCLPETLFLAINLLDRFLSQNVVKLNKLQLLCITCLFIACKFEEVKLPKITNLAYVTDGAATVEGIRKAELFVLSSLGYNISLPNPLNFIRRISKADNYCIETRNMAKFIMEYSICCNKFIHLKPSYLAAMSMYIARKIKNENSKWDETFIHYSGGIDIESDPAFKDFISELVEDIAVPDTNLDSLRLKYKKPKHGMVYFKVFDWCKQKR

SEQ ID NO: 2453 - protein, 380 aa, Saccharomyces cerevisiae
MNCIPSPISERKIQINNEDCIGKENAFHTIPRESSINLTPHSTNEKKVLSEVNSNKIDSLQLPRGKLQRDSTHLEKSRKRQLSNDSTDPIESKTVKKIKCHQWKNLDSMEMDDPFMVAEYTDSIFSHLYEKEIQMLPTHNYLMDTQSPYHLKSSMRALLIDWLVEVHEKFHCLPETLFLAINLLDRFLSQNVVKLNKLQLLCITCLFIACKFEEVKLPKITNFAYVTDGAATVEGIRKAELFVLSSLGYNISLPNPLNFIRRISKADNYCIETRNMAKFIMEYSICCNKFIHLKPSYLAAMSMYIARKIKNENSKWDETFIHYSGGIDIESDPAFKDFISELVEDIAVPDTNLDSLRLKYKKPKHGMVYFKVFDWCKQKR

SEQ ID NO: 2454 - protein, 380 aa, Saccharomyces cerevisiae
MNCIPSPISERKIQINNEDCIGKENAFHTIPRESSINLTPHSTNEKKVLSEVNSNKIDSLQLPRGKLQRDSTHLEKTRKRQLSNDSTDPIEPKTVKKIKCHQWKNLDSIEMDDPFMVAEYTDSIFSHLYEKEIQMLPTHNYLMDTQSPYHLKSSMRALLIDWLVEVHEKFHCLPETLFLAINLLDRFLSQNVVKLNKLQLLCITCLFIACKFEEVKLPKITNFAYVTDGAATVEGIRKAELFVLSSLGYNISLPNPLNFIRRISKADNYCIETRNMAKFIMEYSICCNKFIHLKPSYLAAMSMYIARKIKNENSKWDETFIHYSGGIDIESDPAFKDFISELVEDIAVPDTNLDSLRLKYKKPKHGMVYFKVFDWCKQKR

SEQ ID NO: 2455 - protein, 376 aa, Helobdella robusta
GTRVTAANSRSFKSNNNASSISNSSSIGRSHYDIYDDDDDDDDNDIPSTFNDLDISFEGRRMSSTTIFEHHQQQQQKQHIPTEVAARQHRRSLINQQIALLDVYSLPEYRDDILTYGKEAEQRYMAKANYMERQSDINHSMRSILVDWLVEVADEYKLKRETFFLAVNYIDRFLSMMSVIRCRLQLLGAAAMFIAAKYEEIYPPDVAEFVYITDDTYTMKQVLQMEQAILKTLNFLVAAPTPNYFCCDLLDRLGAYKKGPNGVCDDGGRWNSLAMYMLETTTVFGDCFLKFSPSMISTSCVALSHYLINMTGCMSELSRITSYTVFSLSECLNSIFTTLHNSPNVPQQALRVKYNSEKYHFVASLELPETLPLDLL

SEQ ID NO: 2456 - protein, 491 aa, Drosophila melanogaster
MASFQIHQDMSNKENPGIKIPAGVKNTKQPLAVIGGKAEKNALAPRANFAVLNGNNNVPRPAGKVQVFRDVRNLNVDENVEYGAKKSNVVPVVEQFKTFSVYEDNNDTQVAPSGKSLASLVDKENHDVKFGAGQKELVDYDLDSTPMSVTDVQSPMSVDRSILGVIQSSDISVGTETGVSPTGRVKELPPRNDRQRFLEVVQYQMDILEYFRESEKKHRPKPRYMRRQKDISHNMRSILIDWLVEVSEEYKLDTETLYLSVFYLDRFLSQMAVVRSKLQLVGTAAMYIAAKYEEIYPPEVGEFVFLTDDSYTKAQVLRMEQVILKILSFDLCTPTAYVFINTYAVLCDMPEKLKYMTLYISELSLMEGETYLQYLPSLMSSASVALARHILGMEMWTPRLEEITTYKLEDLKTVVLHLCHTHKTAKELNTQAMREKYNRDTYKKVAMMESVEMSKDDFDQLCEAYNCKQKEDEHQQPDINTKSNVNLFYKF

SEQ ID NO: 2457 - protein, 302 aa, Strongylocentrotus purpuratus
MDNLLCFEQEYFDHAKSPMSYVDQVLLRDKNLDNLLAVEEQYVLSADYFGNHFQRELRPSMRKLVVDWMFEVCEEQQREEDVFPLSVNYLDRFLSIERISRDKFQLLGATCMFLASKLLETIPLTSEKLIIYTDNSITLEQLLKFEQLVLTKLKWDLMAITPNAFLEHIFHRLPVDKEQAALLRKHAQTFIVLCATDYNFAMQPPSLIAASGVAAAANGLRMHIPKVIDLLHRITKIETDYLILVRDRMENLLSKNLVPGSPTKTAGHTTVQKTRSMDESDKPCTPTGVDEVEIITMPSGLC

SEQ ID NO: 2458 - protein, 288 aa, Sus scrofa
MELLCCEVDPVRRAVPDANLLHDDRVLQNLLTIEERYLPQCSYFKCVQKDIQPYMRRMVATWMLEVCEEQKCEEEVFPLAINYLDRFLAGVPTPKTHLQLLGAVCMFLASKLKETIPLTAEKLCIYTDNSIKPQELLEWELVVLGKLKWNLAAVTPHDFIEHILRKLPQPNEKLSLIRKHAQTFIALCATDFKFAMYPPSMIATGSVGAAICGLQQDEDVSSLTGDALVDLLARITNTDVDCLKACQEQIEVVLLNSLQQYRQDQDGSKSEDELDQASTPTDVRDIDL

SEQ ID NO: 2459 - protein, 429 aa, Cricetulus longicaudatus
MALRVTRNTKLNTENKAKVSMTGAKRVPVAIAAASKPGLRPRTALGDIGNKVSEQAQARVPLKKELKTSVTGKVSAKIPPPKPQEKVPVSEPEVELAEPEPEPEPVMEEKLSPEPILVDNPSPSPMETSGCAPAEEYLCQAFSDVILAVSDVDADDGADPNLCSEYVKDIYAYLRQLEEEQSVRPRYLLGREVTGNMRAILIDWLIQVQMKFRLLQETMYMTVSIIDRFMQDNCVPKKMLQLVGVTAMFIASKYEEMYPPEIGDFAFVTNNTYTKHQIRQMEMKILRVLNFSLGRPLPLHFLRRASKIGEVDVEQHTLAKYLMELTMLDYDMVHFAPSQIAAGAFCLALKILDNGEWTPTLQHYLSYTEESLLPVMQHLAKNVVMVNRGLTKHMTIKNKYATSKHAKISTLAQLNCTLVQNLSKAVSKA

SEQ ID NO: 2460 - protein, 411 aa, Cricetulus longicaudatus
MPRERKERDAQDHGGIREEGGPDSSVRSRKRKANVAVFLQDPDEEIARVDKTVKSQDSSQPWDDNSACVDPCAFTPTPNKEEDDELEYPKTAFQPRKIRPPRASPLPVLNWGNREEVWRIMLNKEKIYLRDEHFLQRHPLLQARMRAVLLDWLMEVCEVYKLHRETFHLAQDFFDRYMASQQNILKTLLQLIGISALFIASKLEEIYPPKLHQFAYVTDGACSGDEILQMELMMMKALKWRLSPMTIVSWLNVYVQVAYVNDTSEVLLPQYPQQVFVQIAELLDLCVLDVGCLEFPYGVLAASALYHFSSMELMQKVSGYQWCDIEKCVKWMVPFAMAFREVGSSKLKHFRGVPMENAHNIQTHANSLDLLDKAQAKKAILSEQNRIPPPPSGVLTPPPSSKKQNSEEETE

SEQ ID NO: 2461 - protein, 397 aa, Mesocricetus auratus
MALLRRPTVSSDLKNIDTGVNPKAKSHVTIRRAVLEEIGNKVRSRAAPVAKKPQNTKIPVQPTKVTHVNKQPKPTASVKPVQMETLAPKDPPAPEDVSMKEENLCQAFSDALLCKIEDIDNEDWENPQLCSDYVKDIYQYLRQLEVLQSINPHFLDGRDINGRMRAILVDWLVQVHSKFRLLQETLYMCIAIMDRFLQAQPVCRKKLQLVGITALLLASKYEEMFSPNIEDFVYITDNAYTSSQIREMETLILKELKFELGRPLPLHFLRRASKAGEVDVEQHTLAKYLMELTLIDYDMVHYHPSQVAAAASCLSQKVLGQGKWNLKQQYYTGYMETEVLEVMQHMAKNVVKVNENLTKFIAVKNKYASSRLLKISTIPQLNSKTIKDLASPLMGRL

SEQ ID NO: 2462 - protein, 429 aa, Mesocricetus auratus
MALRVTRNTKLNTENKAKVSMAGAKAVPVTLAAASKPGLRPRTALGDIGNKVSEQAQARLPLKKELKTSVTGKVSAKIPPPKPLEKVPPVSEPEVELAETHEPEPVMDEKLSPEPILVDNPSPSPMETSGCAPAEEYLCQAFSDVILAVSDVDADDGADPNLCSEYVKDIYAYLRQLEEEQSVRPKYLLGREVTGNMRAILIDWLIQVQMKFRLLQETMYMTVSIIDRFMQDNCVPKKMLQLVGVTAMFIASKYEEMYPPEIGDFAFVTNNTYTKHQIRQMEMKILRVLNFSLGRPLPLHFLRRTSKIGEVDVEQHTLAKYLMELTLLDYDMVDFAPSQIAAGAFCLALKILDNGEWTPTLQHYLSYTEESLLPVMQHLAKNVVMVNHGLTKHMTIKNKYATSKHAKISTLAQLNCTLVQNLSKAVAKA

SEQ ID NO: 2463 - protein, 398 aa, Mus musculus
MALLRRPTVSSDLKNIDTEVIPKAKSHVTIRRAVLEEIGNKVRNRTTQVAKKPQNTKVPALPTKVTNVNKQPKPTASVKPVQMEALAPKDRPPAPEDVSMKEESLCQAFSDALLCKIEDIDNEDRENPQLCSDYVKDIYQYLRQLEVLQSINPHFLDGRDINGRMRAILVDWLVQVHSKFRLLQETLYMCIAIMDRFLQAQLVCRKKLQLVGITALLLASKYEEMFSPNIEDFVYITDNAYTSSQIREMETLILKELKFELGRPLPLHFLRRASKAGEVDVEQHTLAKYLMELTLVDYDMVHYHPSQVAAAASCLSQKVLGQGKWNLKQQYYTGYMESEVLEVMQHMAKNVVKVNDNRTKFIAVKNKYASSRLLKISTIPQLNSKIIKDLASPLLGSP

SEQ ID NO: 2464 - protein, 398 aa, Mus musculus
MALLRRPTVSSDLKNIDTEVIPKAKSHVTIRRAVLEEIGNKVRNRTTQVAKKPQNTKVPALSTKVTNVNKQPKPTASVKPVQMEALAPKDRPPAPEDVSMKEESLCQAFSDALLCKIEDIDNEDRENPQLCSDYVKDIYQYLRQLEVLQSINPHFLDGRDINGRMRAILVDWLVQVHSKFRLLQETLYMCIGIMDRFLQAQLVCRKKLQVVGITALLLASKYEEMFSPNIEDFVYITDNAYTSSQIREMETLILKELKFELGRPLPLHFLRRASKAGEVDVEQHTLAKYLMELTLVDYDMVHYHPSQVAAAASCLSQKVLGQGKWNLKQQYYTGYMESEVLEVMQHMAKNVVKVNDNRTKFIAVKNKYASSRLLKIKHDPQLNSKIIKDLVSPLLGSP

SEQ ID NO: 2465 - protein, 398 aa, Mus musculus
MALLRRPTVSSDLKNIDTEVIPKAKSHVTIRRAVLEEIGNKVRNRTTQVAKKPQNTKVPALPNKVTNVNKQPKPTASVKPVQMEALLPRIVLPPPEDVSMKEESLCQAFSDALLCKIEDIDNEDRENPQLCSDYVKDIYQYLRQLEVLQSINPHFLDGRDINGRMRAILVDWLVQVHSKFRLLQETLYMCIAIMDRFLQAQLVCRKKLQLVGITALLLAPKYEEMFSPNIEDFVYITDNAYTSSQIREMETLILKELKFELGRPLPLHFLRRASKAGEVDVEQHTLAKYLMELTLVDYDMVHYHPSQVAAAASCLSQKVLGQGKWNLKQQYYTGYMESEVLEVMQHMAKNVVKVNDNRTKFIAVKNKYASSRLLKISTIPQLNSKIIKDLASPLLGSP

SEQ ID NO: 2466 - protein, 430 aa, Mus musculus
MALRVTRNTKINAENKAKVSMAGAKRVPVTVTAASKPGLRPRTALGDIGNKVSEELQARVPLKREAKTLGTGKGTVKALPKPVEKVPVCEPEVELAEPEPEPELEHVREEKLSPEPILVDNPSPSPMETSGCAPAEEYLCQAFSDVILAVSDVDADDGADPNLCSEYVKDIYAYLRQLEEEQSVRPKYLQGREVTGNMRAILIDWLIQVQMKFRLLQETMYMTVSIIDRFMQNSCVPKKMLQLVGVTAMFIASKYEEMYPPEIGDFAFVTNNTYTKHQIRQMEMKILRVLNFSLGRPLPLHFLRRASKVGEVDVEQHTLAKYLMELSMLDYDMVHFAPSQIAAGAFCLALKILDNGEWTPTLQHYLSYSEDSLLPVMQHLAKNVVMVNCGLTKHMTVKNKYAASKHAKISTLAQLNCTLVQNLSKAVTKA

SEQ ID NO: 2467 - protein, 366 aa, Rattus norvegicus
MALLRRPTVSSDLKNIDTGVNPKAKSHVTVRRAVLEEIGNKVRARPAQVAKKPQNTKVPVQPTKAINASKQPKPTASVKPVQMETLAPKDPLPAPEDVSMKEESLCQAFSDALLCKIEDIDNEDGENPQLCSDYVKDIYQYLRQLEALQSINPHFLDGRDINGRMRAILVDWLVQVHSKFRLLQETLYMCIAIMDRFLQAQPVCRKKLQLVGITALLLASKYEEMFSPNIEDFVYITDNAYTSSQIREMETLILKELKFELGRPLPLHFLRRASKAGEVDVEQHTLAKYLMELTLVDYDMVHYHPSQVAAAASCLSQKVLGQGKWNLKQQYYTGYMESEILEVMQHMAKNVVKVNENLTKFIAVKN

SEQ ID NO: 2468 - protein, 423 aa, Rattus norvegicus
MALRVTRNTKINTENKAKVSMAGAKRVPVAVAASKPLLRSRTALGDIGNKVSEQSRIPLKKETKKLGSGTVTVKALPKPVDKVPVCEPEVELDEPEPEPVMEVKHSPEPILVDTPSPSPMETSGCAPAEEYLCQAFSDVILAVSDVDADDGGDPNLCSEYVKDIYAYLRQLEEEQSVRPKYLLGREVTGNMRAILIDWLIQVQMKFRLLQETMYMTVSIIDRFMQDSCVPKKMLQLVGVTAMFIASKYEEMYPPEIGDFAFVTNNTYTKHQIRQMEMKILRVLNFSLGRPLPLHFLRRASKIGEVDVEQHTLAKYLMELSMLDYDMVHFAPSQIAAGAFCLALKILDNGEWTPTLQHYLSHTEESLLPVMQHLAKNIVMVNRGLTKHMTIKNKYATSKHAKISTLAQLNCTLVQNLSKAVTKA

SEQ ID NO: 2469 - protein, 295 aa, Rattus rattus
MEHQLLCCEVETIRRAYPDTNLLNRPGLRAMLKTEETCAPSVSYFKCVQREIVPSMRKIVATWMLEVCEEQKCEEEVFPLAMNYLDRFLSLEPLKKSRLQLLGATCMFVASKMKETIPLTAEKLCIYTDNSIRPEELLQMELLLVNKLKWNLAAMTPHDFIEHFLSKMPEADENKQIIRKHAQTFVALCATDVKFISNPPSMVAAGSVVAAMQGLNLGSPNNFLSCYRTTHFLSRVIKCDPDCLRACQEQIEALLESSLRQAQQNIDPKATEEEGEVEEEAGLACTPTDVRDVDI

SEQ ID NO: 2470 - protein, 397 aa, Carassius auratus gibelio
MALRVSRNTRLASSENQSALPGKAAVANKPGLRPRAALGEIGNNPQTRQALRKKEVKVAPKVEVVAEKAPVVQQPKKESPKVQHDVPIVSEPSSPVPMETSGCASDDLCQAFSDVLLDIKDVDADDYDNPMLCSEYVKDIYLYLHQLEITQAVKPKYLEGKEITGNMRAILIDWLVQVQIKFRLLQETMYMTVAIIDRFLQDHPVPKKQLQLVGVTAMFIASKYEEMYPPEIADFAFVTDRAYTTGQIREMEMKILRVLDFSFGRPLPLQFLRRASKIGDVTAEHHTLAKYFLELTMVDYEMVHFPPSQVASAAYALTLKVFNCGDWTPTLQHYMGYTEDALVPVMQHIAKNVVRLNEGLSKHLAVKNKYSSQKQMRIASISQLKSSLIKDLAKQIS

SEQ ID NO: 2471 - protein, 60 aa, Blepharisma intermedium
MRAILIDWIIEVHLKFKLLPETLYLAVNLIDRYLEIVNISTSILQLIGVSALLIASKYEE

SEQ ID NO: 2472 - protein, 388 aa, Oryzias curvinotus
MSSVEVVAQQQQLLAAEHPRRMGKGAAADPRRAALGELTNLNAVAATNGKVGPSKKPSKASCVQKPKPPQLVAPMIQTGAAASAPVSAKPCVKEEQLCQAFSEVLLAVQDVDEQDADQPQLCSQYVKDIYKYLHVLEEQQPVRANYMQGYEVTERMRALLVDWLVQVHSRFQLLQETLYLTVAILDPFLQVHPVSRRKLQLVGVTAMLVACKYEKMYAPEVGDFSYITDNAFTKSQIVEMEQVILRSLSFQLGRPLPLHFLRRASKVAGADVEKHTLAKYLMELTLLDYHMVHYRPSEVAAAALCLSQLLLDGLPWSLTQQQYSTYEEQHLKPIMQHIAKNVVLVNEGRTKFLAVKKKYSSSKLMKISLIPQLNSSTVKALAESLLNP

SEQ ID NO: 2473 - protein, 401 aa, Oryzias curvinotus
MALRVTRNRLASTRAELGGKTCSVAGPTQKPRAALGEIGNVAVINKDVTKKNVKTEVAKKTKIPAKAEKIEQPKAAVVPVKPAPEVQVPVQADPASPTPMETSGCEPADLCQAFSDVILNTAIRDVDADDYDNPMLCSEYVKDIYKYLRQLEVEQSVKPNYLEGQEVTGNMRAILIDWLVQVSLKFRLLPETMYMTVGIIDRFLQDHPVPKKQLQLVGVTAMFLASKYEEMYPPEISDFAFVTDRAYTTAQIRDMEMTVLRVLKFQLGRPLPLQFLRRASKIYEVTADQHTLAKYLLELSMVDYDMAHFPPSMVASAALALTLKVLDAGEWDVTLQHYMGYTAETLTPVMAHIAKNVVKVNNGQTKHMAIKGKYSTSKQMRIATISQLKSSAVKDLATQIS

SEQ ID NO: 2474 - protein, 386 aa, Oryzias luzonensis
MSSVEVVAQQLLAAEHPRRMGKGAAADPRRAALGELTNLNAVAATNGKVGPSKKPSKASCAQKPKPTELVAPMIQTGAAASAPVSAKPCVKEEQLCQAFSEVLLAVQDVDEQDADQPQLCSQYVKDIYKYLHVLEEQQPVRANYMQGYEVTERMRALLVDWLVQVHSRFQLLQETLYLTVAILDRFLQVHPVSRRKLQLVGVTAMLVACKYEEMYTPEVADFSYITDNAFTKSQIVEMEQVILRSLSFQLGRPLPLHFLRRATKVAGADVEKHTLAKYLMELTLLDYHMVHYRPSEVAAAALCLSQLLLDGLPWSLTQQQYSTYEEQHLKPIMRHIAKNVVLVNEGRTKFLAVKKKYSSSKLMKISLIPQLNSSTVKAMAESLHNP

SEQ ID NO: 2475 - protein, 401 aa, Oryzias luzonensis
MALRVTRNRLASARAELGGKTCSVAGPTQKPRAALGEIGNVAVINKDVTKKNVKTEVAKKTKVPAKAEKIEQPKAAVVPVKPAPEVQVPAQPEPASPTPMETSGCEPADLCQAFSDVILNTAIRDVDADDYNNPLLCSEYVKDIYKYLRQLEVEQSVKPNYLEGQEVTGNMRALLIDWLVQVSLKFRLLQETMYMTVGIIDRFLQDHPVPKKQLQLVGVTAMFLASKYEEMYPPEISDFAYVTDKAYTTAQIRDMEMTILRVLKFQLGRPLPLQFLRRASKIYEVTAEQHTLAKYLLELSMVDYAMDHFPPSMVASAALALTLKVLDAGEWDVTLQHYMAYTADTLTPVMAHIAKNVVKVNNGQTKHMTIKGKYFTSKQMRIATIFQLKSSVVKDLATQIS

SEQ ID NO: 2476 - protein, 382 aa, Oryzias javanicus
MSSVEAVTQQQLLAAENPVRMGKGAADPRRAALGEITNRNAAAAANRKMGPSKKQPKPSCAQKPQPVVHTSAGDPAPISADMSMKVEQDLSQAFSEVLMLAVQDVDEQDADQPQLCSQYVKDIYKYLHTLEEQQAIRPNYMQGYSVTEHMRALLVDWLVQVHSRFQLLQETLYLTVAILDRFLQVHPVSRRKLQLVGVTAMLVACKYEEMYPPEVGDFAYITDDAFTKFQIVEMEQVILRSLGFQLGRPLPLHFLRRASKVADADVEKHTLAKYLLELTLLDYHMVHYRPSEAAAAALCLSQLLLDGLPWSLEQQHYSTYDEQHLKPIMQLMAKNVVQVTEGRTKFLAVKKKYSSSKLMKISLIPQLNSSTIKVMAEALQNP

SEQ ID NO: 2477 - protein, 401 aa, Oryzias javanicus
MALRVTRNRLASTRAEQGGKTCSVSGPTLKPRAALGEIGNVAANKDVTKKNVKMEAAKKTRITAKAEKIEQPKATVVPVKPEPKVQVPAQPEPASPTPMETSGCEPADLCQAFSDVILNTAIRDVDADDYDNPMLCSEYVKDIYKYLRQLEVEQSVKPNYLQGQEVTGNMRAILIDWLVQVNLKFRLLQETMYMTVGIIDRFLQDHPVPKKQLQLVGVTAMFLASKYEEMYPPEISDFAYVTDRAYTTAQIRDMEMTILRVLKFQLGRPLPLQFLRRASKIYEVTAEQHTLAKYLLELSIVDYDMAHFPPSTVASAALGLTLKVLDAGEWDVTLQHYMDYTAHTLTPVMAHIAKNVVKVNDGLTKHMAIKGKYSTSKQMRVATIAQLKSSLVKDLAKQLSQ

SEQ ID NO: 2478 - protein, 63 aa, Pleurochrysis carterae
MRGILVDWLVEVHLKFKLMIETLYLTVNLIDRYLEKEKITRNKLQLVGVTAMFLASKYEEIYP

SEQ ID NO: 2479 - protein, 63 aa, Strombidinopsis acuminata
MRGILADWLVEVHYKFKMVPETLYLTVNLIDRYLSLKTVRKDRLQLLGVTSMLIACKYEEIYP

SEQ ID NO: 2480 - protein, 63 aa, Strombidinopsis acuminata
MRGILADWLIKVHTKLKLLPETLFLTINLVDRYLERVQVDRDRLQLVGIAAILTATKYEEIYP

SEQ ID NO: 2481 - protein, 120 aa, Beta vulgaris
VSEEYKLVPDTLYLTVNLIDRFLSGNYLEKQKLQLLGVTCMLIASKYEEVSAPQVEDFCYITANTYAREEVLNMERKVLNFLCFQLSVPTIKTFLRRYVHAAQATEDSLVDLEFLAKYLV

SEQ ID NO: 2482 - protein, 130 aa, Sphoeroides annulatus
RFEDGLLVACKYEEMYAPEVGDFAYITDNAFTKSQILEMEQVVLRSLNFQLGRPLPLHFLRRASKVASSDVERHTLAKYLMELTLLDYHMVHYRPSEIAAASLCLSQLLLEGLPWSQTQQHYSTYDEAHL

SEQ ID NO: 2483 - protein, 517 aa, Anopheles gambiae str. PEST
NSCVYFCSAFLCRVVCATFTSLIVEETSLNLLKMSRIMRIDENQVAGNLHEGGMKKVVAARRPVLGELGNKVLRNASQDLLGKGVEKGAALKNANPTLKNIKPRVDTRWRKADTAAAAVVVPKKVVTRSDSQKVAVEPKPSANADAVKVHVQLNKGNEVKHVALKREDSQLSLRTLAKQNRKAQPKSAPSSGTSSSDEHEIVSISKKPEKVEAHSQKLLENIENIDANDGWNPMLVAEYVNDIYNYLNELESRPGYALCENFLDGHKEITHKMRTILIDWINEVHYQFKLDIDTYHMTVSLIDRYLQTMKTVPKKKLQLVGVTAMFIASKYEELFPPEIQDFVYITDDTYQKYQILEMEKEMVRTLDFNLGKPLPTHFLRRFSKAAKASDVNHVLAKYLIELASVDYSTAHYKPSEIAAAALYISLYLFPLTCNGGNGTSAIIWTKTLEHYTHYNVKYLAPIVQRLANVIKAVPKMMDKKVKYPWLKYSSSKFQCISTHPKLKGSEIEELLNNELRC

SEQ ID NO: 2484 - protein, 517 aa, Anopheles gambiae str. PEST
NSCVYFCSAFLCRVVCATFTSLIVEETSLNLLKMSRIMRIDENQVAGNLHEGGMKKVVAARRPVLGELGNKVLRNASQDLLGKGVEKGAALKNANPTLKNIKPRVDTRWRKADTAAAAVVVPKKVVTRSDSQKVAVEPKPSANADAVKVHVQLNKGNEVKHVALKREDSQLSLRTLAKQNRKAQPKSAPSSGTSSSDEHEIVSISKKPEKVEAHSQKLLENIENIDANDGWNPMLVAEYVNDIYNYLNELESRPGYALCENFLDGHKEITHKMRTILIDWINEVHYQFKLDIDTYHMTVSLIDRYLQTMKTVPKKKLQLVGVTAMFIASKYEELFPPEIQDFVYITDDTYQKYQILEMEKEMVRTLDFNLGKPLPTHFLRRFSKAAKASDVNHVLAKYLIELASVDYSTAHYKPSEIAAAALYISLYLFPLTSNGGNGTSAIIWTKTLEHYTHYNVKYLAPIVQRLANVIKAVPKMMEKKQKSCWLKYSSSKFLKISTHSKLKGTEMDTLAEGKLIF

SEQ ID NO: 2485 - protein, 565 aa, Anopheles gambiae str. PEST
MTRAAMRKQQAVDVNQKTQQDRPISVMKGKENVPSSSDTVSGNVAGVSVATGAEIATNDSASNGEQKKSQQAANACLAKHAEVVVKPKRGRMSSEFEASDNSLYVTAVDNFEDGSAASAGTGPDCVDPLGPDCVDPLGPEIAPRNEPAPPAAKPLAARADVKPKQRGRGSSEFEDSGTLYMTAVDNLDDGATISNKGKAVAAAGRVATTGASLAAPDKKTKARVEDENGPWKMLITENVALTRAATAEIGVPRKQPPASVEDYDLCYWNDIYQVSEYAQDIFDYLQEREPAYDIPDYMVRQKHLTKRMRALLVDWMIEIQETFELNHETLYLAVKILDTYLSRVTIGHEVLQLVGIAGMLIASKYDERLPPTVDDFVYFCDGAYDRNDLLKMERTVFRTIEFDLGFPLSYRFLRRYARVNRIPMMTLTLARYILETGLMDYNTVLVRDSKLACGALFIARRMLDQPGWNETLEYYSSYKVEQFTDAIVLLNNGMSSRQYSFDTVHKKYSHELFFEVAKRPVITSMEKLFATSSVMYKAAPTALPVAADATTKENVAPIPAAVSNK

SEQ ID NO: 2486 - protein, 501 aa, Anopheles gambiae str. PEST
STIFLLRKVKKQRIVSWLTVRKVFRIVLKMAAFRIHEDLEKENRVLAPVGGKKNAILASNNGAGGLPAGKNVILHSIGIQHQQQRTMFSVLSNVQSNVANMEKTVKEGKVKNLRPGGAVLLPKSGKVSDENAVEAKQNIQVKAVKKSSVPNEPFKGFEIYDESKENVKEMCVPKKDDAILEKRAPLQELKHAELLETPMSVGENFSPMSIDKSTSIIVEEGPIPRNDRERFFEVEEYQEDILLYLKEAEKRNRPKPGYMLKQTDITHSMRTILVDWLVEVSEEYKLQGETLALAVSYIDRFLSFMSVVRAKLQLVGTAAMFIAAKYEEIYPPDVSEFVYITDDTYTKTQVLRMEQLILKVLSFDLTVPTSLYLCELSLLEADPFLTYMPSKIAAGALALARRTLDLPMWSKMLENNTGYKLVDMRDIILDLNKTHVDAVTMQQQAIQEKYKSKTYHEVASLPATEITKESFDKICATLCNSSAATLLLSNTDSELLKEMGR

SEQ ID NO: 2487 - protein, 441 aa, Anopheles gambiae str. PEST
RVCPLPSLSWTDTHEMWDLMCRKDDLAWLAREPNMFDDHPGLQPRMRSILIDWLNEVCEVYKLHRETYFLAVDYIDRYLSLKKELKKNHLQLLGITALFIAAKAEEIYPPKIGEFAYVTDGACTDEDILREELLILSALDWKINPVTVIGWLGLYMQINVTSRDVDVPVRSLKRKSNSTAHNTASTPSPKKRKITDENADVNNIQQAAVTVGLQQQPLQQQQKVSSSSTSTANKTDDAFVYPQFSGMEFAHTAQLIDLCSLDVGFANFKYSVIAAAALSHTFDRKTATFVSGLPWEEIAPCAKWMEPFFLVICDENASCPLTFLESNDPIKHSHGLKHICPNLVSDSSHIIQTHTTSLDMLDLVSIKIEQMESCTRMGQLEASPAPIGIIESEDGILTPPASNRKSLETLGGVSGTAVSKVASEAIASIIADASSGTWSHS

SEQ ID NO: 2488 - protein, 204 aa, Anopheles gambiae str. PEST
RFADPDRHMITDDRVLPNLIRLERYTIPPCNYFVAVQQDIKPAMRKIVTTWMLEVCDEQKCEEQTFPLAVNFFDRFLCALAIDRYHLQLLGCCTLLLASKIRQCQPLTVDVLSAYTDHAVSPDQIRNWELLLISKLEWNINAVTAYDYVDHILERVKWGSDDARLREHAHTLIHVCNTETIFMQVEPSLLAVSCIASATRGLNV

SEQ ID NO: 2489 - protein, 341 aa, Giardia lamblia ATCC 50803
MPLDDESQSVHTFEQPVDNVEEMPQALINFRHANPDKETDILDIDLIDKDDIQACAEYVREIYEYLLQSEGKYMLGSDFLSNQIDFDAEDRTLLVDWISRCHTRFNLANESFFHCIAIFDSYLSRVVVPKASNRLVGICCLFIAAKYEQSYIPSLRHFVEALTQVDPEFLVNCKCEGNRSGPCYRCSREAIIDTEESILHTLDFQLAMPTILTFLRRYARISEMKNRDRYIAFYISELSCLTTSIFKFKPSEIAAGCIAMSRRLTRKPTWDETLEKYSGYTESDTKKVMAEISTIMKKYACNPKARYIRRKYSQEDRFYGVSLMIETVVTQALTLNTKEAK

SEQ ID NO: 2490 - protein, 58 aa, Skeletonema costatum
MRGILADWLVEVHLKFKLVPETLYLVVNLIDRYLAKKEVTRSKLQLVGVTALFIATKY

SEQ ID NO: 2491 - protein, 63 aa, Alexandrium tamarense
MRGILADWLVEVAEEYKLCADTLYLSVNYIDRFLSIHPVQRSNLQLVGIACMWIASKYEEIYP

SEQ ID NO: 2492 - protein, 281 aa, Euglena gracilis
MDLDYEGQAPTTSLLLLFPPHLVPEYIGTISNNLRSAEVNHRPSKTFLEEVQVDITRLMRAILVDWMNEVTEEFRLKMETLCLAVNYVDRYLSRVPVPRHQLQLVGVASLLIASKMEEIMHPQIDEFVYITDSTYNREQVLRMELSILNALRYDMTVVTPRDFVGIYLKVAQASPEVCMLADYLLELILQEYAFLHWEPSMIAASAVVLALFGFRLPCWSDDLRRITQYQPNELNACLKEMHRVFQNAPHNNLQAVREKYSHGRFMHISMVAQLPPSPPVF

SEQ ID NO: 2493 - protein, 163 aa, Dunaliella tertiolecta
ASAQQPLNQQAPPPPTSFASQLQHTLGQQQFCDPTLIDRGLQHADKRRRDWIDVDALNEDDTQACSAYAVPIFEHLREAELVRRPNALYPEAFQTDVNAKMRAILVDWLVEVAEEYKLCADTLYLSVNYIDRFLSIHPVQRSNLQLVGIACMWIASKYEEIYP

SEQ ID NO: 2494 - protein, 380 aa, Picea abies
NNVNPIKEVQDSPKEPNPITEQISVHADCKQTVEKPNENEIVVSANKAAVASLKQQSTLQSPRISRQPKTSLNQGNPVPLAKLHEDAGRSSSLDFVNIDSEYKDPQMCTAYVTDIYANMRVVELKRRPLPNFMETIQRDINANMRSVLIDWLVEVSEEYKLVPDTLYLTISYIDRFLSANVVNRQRLQLLGVSCMLVASKYEEICAPPVEEFCYITDNTYKKEEVLDMEINVLNRLQYDLTNTKPLRPFSGVSFEQLKHPVRFQACIWEFMGNYLAELTLVEYDFLKYLPSLIAAAAVFLARMTLDPMVHPWNSTLQHYTGYKVSDMRDCICAIHDLQLNRKGCTLAAIRDKYNQPKFKCVANLFPPPVISPQFFIDNEV

SEQ ID NO: 2495 - protein, 227 aa, Picea mariana
AILIDWLIEVHLKFELMPETLYLTVNIIDRYLSIEIVTRKNLQLVGITAMLLACKYEEIWAPEINDFVCISAKEYASEQLVAMEHTILNQLKFNLTVPTPYVFLVRFLKAAGSDKEMENLAFFLVDLSLLHYIMIKYSPSMLAAAAVYTAQCTLKKSSPWSKTLILHTGYSEADLKECAHFMVNFHLNAGGSKLRVVHKKYSDPFFGCVAFLSPANLPVDDSCSSSN

SEQ ID NO: 2496 - protein, 434 aa, Medicago sativa subsp. X varia
MVNTSEENNSNAVMPRKFQGGMNQVGHGGGRIVGQNRRALGGINQNFVHGRPYPCVVHKRVLSEKHEICEKKQADLGHRPITRRFAAKIAGSQQSYAEKTKNSNPLNLNEFGNSIAIDDELKSPEDQPEPMTLEHTEPMHSDPLEMEEVEMEDIEGEMILDIDSCDANNSLAVVEYIEDLHAYYRKIEYLGCVSPTYMDEQLDLNERMRAILVDWLIEVHDKFDLMQETLFLTVNLIDRFLAKQNVVRKKLQLVGLVAMLLACKYEEVSVPVVSDLIHIADRAYTRKDILEMEKLMLNTLQYNMSLPTAYVFMRRFLKAAQADKKLELVAFFLVDLSLVEYEMLKFPPSLVAAAAVYTAQCTVSGFKHWNKTCEWHTNYSEDQLLECSMLMVGFHQKAGAGKLTGVHRKYGSAKFSFTAKCEPACFLLENKNQP

SEQ ID NO: 2497 - protein, 428 aa, Medicago sativa subsp. X varia
MKFSEEKNVSNNPTNFEGGLDSRKVGQNRRALGVINQNLVVEGRPYPCVVNKRALSERNDVCEKKQADPVHRPITRRFAAKIASTKTSNAEGTTKRSNLAKSSSNGFGDFIFVDDEHKPVEDQPVPMALEQTEPMHSESDQMEEVEMEDIMEEPVMDIDTPDANDPLAVAEYIEDLYSYYRKVESTSCVSPNYMAQQFDINERMRAILVDWLIEVHDKFDLMHETLFLTVNLIDRFLEKQSVVRKKLQLVGLVAMLLACKYEEVSVPVVGDLILISDRAYTRKEVLEMEKVMVNALKFNISVPTAYVFMRRFLKAAQADRKLELLAFFLIELSLVEYAMLKFSPSQLAAAAVYTAQCTMYGVKQWSKTCEWHTNYSEDQLLECSSLMVDFHKKAGTGKLTGAHRKYCTSKFSYTAKCEPASFLLENEL

SEQ ID NO: 2498 - protein, 431 aa, Arabidopsis thaliana
MGGSDENRHGVIGPMNRQQGGLRGGKVIPTNGQTRRALSNINKNIIGAPVYPCAVKRPFTEKNGICNKKIPPVPVHRPVTRKFAAQLAENNLQIHKEETKKPDLISNEALDRIITDVEEGDFNEPMFVQHTEAMLEEIDKMEGIEMQDSNDIDAEVEESVMDIDSCDKNNPLSVVEYINDIYCFYKKNECRSCVPPNYMENQHDINERMRGILFDWLIEVHYKFELMEETLYLTINLIDRFLAVHQHIARKKLQLVGVTAMLLACKYEEVSVPVVDDLILISDKAYTRTEILDMEKLMANTLQFNFCLPTPYVFMRRFLKAAQSDKKLELLSFFMIELCLVEYEMLQYTPSQLAASAIYTAQSTLKGYEDWSKTSEFHSGYTEEALLECSRKMVGLHHKAGTGKLTGVHRKYNTSKFGYAARIEPAGFLLL

SEQ ID NO: 2499 - protein, 418 aa, Arabidopsis thaliana
MILPMLGGLRGGKVIPTNGQTRRALSNINKNIIGAPVYPCAVKRPFTEKNGICNKKIPPVPVHRPVTRKFAAQLAENNLQIHKEETKKPDLISNEALDRIITDVEEGDFNEPMFVQHTEAMLEEIDKMEGIEMQDSNDIDAEVEESVMDIDSCDKNNPLSVVEYINDIYCFYKKNECRSCVPPNYMENQHDINERMRGILFDWLIEVHYKFELMEETLYLTINLIDRFLAVHQHIARKKLQLVGVTAMLLACKYEEVSVPVVDDLILISDKAYTRTEILDMEKLMANTLQFNFCLPTPYVFMRRFLKAAQSDKKLELLSFFMIELCLVEYEMLQYTPSQLAASAIYTAQSTLKGYEDWSKTSEFHSGYTEEALLECSRKMVGLHHKAGTGKLTGVHRKYNTSKFGYAARIEPAGFLLL

SEQ ID NO: 2500 - protein, 429 aa, Arabidopsis thaliana
MVRSDENSLGLIGSMSLQGGGVVGKIKTTATTGPTRRALSTINKNITEAPSYPYAVNKRSVSERDGICNKPPVHRPVTRKFAAQLADHKPHIRDEETKKPDSVSSEEPETIIIDVDESDKEGGDSNEPMFVQHTEAMLEEIEQMEKEIEMEDADKEEEPVIDIDACDKNNPLAAVEYIHDMHTFYKNFEKLSCVPPNYMDNQQDLNERMRGILIDWLIEVHYKFELMEETLYLTINVIDRFLAVHQIVRKKLQLVGVTALLLACKYEEVSVPVVDDLILISDKAYSRREVLDMEKLMANTLQFNFSLPTPYVFMKRFLKAAQSDKKLEILSFFMIELCLVEYEMLEYLPSKLAASAIYTAQCTLKGFEEWSKTCEFHTGYNEKQLLACARKMVAFHHKAGTGKLTGVHRKYNTSKFCHAARTEPAGFLI

SEQ ID NO: 2501 - protein, 460 aa, Arabidopsis thaliana
MVRSDENSLGLIGSMSLQGTLNRSILLLKIKTFVLFDFSPKLILNLLDVGGGVVGKIKTTATTGPTRRALSTINKNITEAPSYPYAVNKRSVSERDGICNKPPVHRPVTRKFAAQLADHKPHIRDEETKKPDSVSSEEPETIIIDVDESDKEGGDSNEPMFVQHTEAMLEEIEQMEKEIEMEDADKEEEPVIDIDACDKNNPLAAVEYIHDMHTFYKNFEKLSCVPPNYMDNQQDLNERMRGILIDWLIEVHYKFELMEETLYLTINVIDRFLAVHQIVRKKLQLVGVTALLLACKYEEVSVPVVDDLILISDKAYSRREVLDMEKLMANTLQFNFSLPTPYVFMKRFLKAAQSDKKLEILSFFMIELCLVEYEMLEYLPSKLAASAIYTAQCTLKGFEEWSKTCEFHTGYNEKQLLACARKMVAFHHKAGTGKLTGVHRKYNTSKFCHAARTEPAGFLI

SEQ ID NO: 2502 - protein, 485 aa, Arabidopsis thaliana
MGGSDENRHGVIGPMNRQQGGLRGGKVIPTNGQTRRALSNINKNIIGAPVYPCAVKRPFTEKNGICNKKIPPVPVHRPVTRKFAAQLAENNLQIHKEETKKPDLISNEALDRIITDVEEGDFNEPMFVQHTEAMLEEIDKMEGIEMQDSNDIDAEVEESVMDIDSCDKNNPLSVVEYINDIYCFYKKNEVTFSVLFLYHYDHSSFKIETFSIILQCRSCVPPNYMENQHDINERMRGILFDWLIEVHYKFELMEETLYLTINLIDRFLAVHQHIARKKLQLVGVTAMLLACKYEEVSVPVVDDLILISDKAYTRTEILDMVKSFTKSCPDYNHGCSALYVDDHYCVLQEKLMANTLQFNFCLPTPYVFMRRFLKAAQSDKKLELLSFFMIELCLVEYEMLQYTPSQLAASAIYTAQSTLKGYEDWSKTSEFHSGYTEEALLECSRKMVGLHHKAGTGKLTGVHRKYNTSKFGYAARIEPAGFLLL

SEQ ID NO: 2503 - protein, 429 aa, Arabidopsis thaliana
MVNSCENKIFVKPTSTTILQDETRSRKFGQEMKREKRRVLRVINQNLAGARVYPCVVNKRGSLLSNKQEEEEGCQKKKFDSLRPSVTRSGVEEETNKKLKPSVPSANDFGDCIFIDEEEATLDLPMPMSLEKPYIEADPMEEVEMEDVTVEEPIVDIDVLDSKNSLAAVEYVQDLYAFYRTMERFSCVPVDYMMQQIDLNEKMRAILIDWLIEVHDKFDLINETLFLTVNLIDRFLSKQNVMRKKLQLVGLVALLLACKYEEVSVPVVEDLVLISDKAYTRNDVLEMEKTMLSTLQFNISLPTQYPFLKRFLKAAQADKKCEVLASFLIELALVEYEMLRFPPSLLAATSVYTAQCTLDGSRKWNSTCEFHCHYSEDQLMECSRKLVSLHQRAATGNLTGVYRKYSTSKFGYIAKCEAAHFLVSESHHS

SEQ ID NO: 2504 - protein, 429 aa, Arabidopsis thaliana
MVNSCENKIFVKPTSTTILQDETRSRKFGQEMKREKRRVLRVINQNLAGARVYPCVVNKKGSLLSNKQEEEEGCQKKKFDSLRPSVTRSGVEEETNKKLKPSVPSANDFGDCIFIDEEEATLDLPMPMSLEKPYIEADPMEEVEMEDVTVEEPIVDIDVLDSKNSLAAVEYVQDLYAFYRTMERFSCVPVDYMMQQIDLNEKMRAILIDWLIEVHDKFDLMNETLFLTVNLIDRFLSKQNVMRKKLQLVGLVALLLACKYEEVSVPVVEDLVLISDKAYTRNDVLEMEKTMLSTLQFNISLPTQYPFLKRFLKAAQADKKCEVLASFLIELALVEYEMLRFPPSLLAATSVYTAQCTLDGSRKWNSTCEFHCHYSEDQLMECSRKLVSLHQRAATGNLTGVYRKYSTSKFGYIAKCEAAHFLVSESHHS

SEQ ID NO: 2505 - protein, 429 aa, Arabidopsis thaliana
MVNPEENNRNLVVKPITEILQDDDKRSRKFGVEMKRQNRRALGVINHNLVGAKAYPCVVNKRRGLSQRKQESCDKKKLDSLHPSISRSQEETKKLKPSGNEFGDCIFIDEEEEKNEEVTLDQPMPMSLEEPYIEFDPMEEEVEMEDMEEEQEEPVLDIDEYDANNSLAAVEYVQDLYDFYRKTERFSCVPLDYMAQQFDISDKMRAILIDWLIEVHDKFELMNETLFLTVNLIDRFLSKQAVARKKLQLVGLVALLLACKYEEVSVPIVEDLVVISDKAYTRTDVLEMEKIMLSTLQFNMSLPTQYPFLKRFLKAAQSDKKLEILASFLIELALVDYEMVRYPPSLLAATAVYTAQCTIHGFSEWNSTCEFHCHYSENQLLECCRRMVRLHQKAGTDKLTGVHRKYSSSKFGYIATKYEAAHFLVSDSH

SEQ ID NO: 2506 - protein, 429 aa, Arabidopsis thaliana
MVNPEENNRNLVVKPITEILQDDDKRSRKFGVEMKRQNRRALGVINHNLVGAKAYPCVVNKRRGLSQRKQESCDKKKLDSLHPSISRSQEETKKLKPSGNEFGDCIFIDEEEEKNEEVTLDQPMPMSLEEPYIEFDPMEEEVEMEDMEEEQEEPVLDIDGYDANNSLAAVEYVQDLYDFYRKTERFSCVPLDYMAQQFDISDKMRAILIDWLIEVHDKFELMNETLFLTVNLIDRFLSKQAVARKKLQLVGLVALLLACKYEEVSVPIVEDLVVISDKAYTRTDVLEMEKIMLSTLQFNMSLPTQYPFLKRFLKAAQSDKKLEILASFLIELALVDYEMVRYPPSLLAATAVYTAQCTIHGFSEWNSTCEFHCHYSENQLLERCRRMVRLHQKAGTDKLTGVHRKYSSSKFGYIATKYEAAHFLVSDSH

SEQ ID NO: 2507 - protein, 64 aa, Isochrysis galbana
MRGILADWLIEVHHKFKLHIETLYGSVDLIDRYLSKCAPITRSKLQLVGVAAMFIASKYEEIYP

SEQ ID NO: 2508 - protein, 63 aa, Brassica rapa
MRGILVDWLVEVAEEYTLVPDTLYLTVYLIDWFLNGNYVERNRLQLLGVTCMLIASKYEEIYP

SEQ ID NO: 2509 - protein, 433 aa, Glycine max
MKISDENSSKPINPTSFQGGIECVGNRKMGQNRRALSVINQDLVAEGRPYPCVVNKRALAEKHNVCEKKQADPGHRPITRRFAAQIASTQKNRAEGTKKSNLGNSNSNGFGEHIFVDEEHKSTTDDQPVPMSLEKTEPMHSESDQMEEVEMEDIIEEETVLDIDTCDANNPLAVVDYIEDLYAHYRKLEGTSCVSSDYMAQQSDINERMRAILIDWLIEVHDKFDLLHETLFLTVNLIDRFLAKQTVARKKLQLVGLVAMLLACKYEEVSVPVVGDLILISDKAYTRKEVLEMEKLMVNTLQFNMSVPTAYVFMKRFLKAAQADRKLELLAFFLVELSLVEYEMLKFPPSLLAAAAVYTAQCTIYGFKQWSKTCEWHSNYSEDQLLECSTLMAAFHQKAGNGKLTGVHRKYCSSKFSYTAKCEPARFLLENPL

SEQ ID NO: 2510 - protein, 206 aa, Glycine max
  unsure (1)..(206): unsure at all Xaa locations
ERQAVIRKKLQLVGVTAMLIACKYEEVTVPTVEDFILITDKAYTRNEVLDMEKLMMNILQFKLSVPTPYMFMRRFLKAAHSDKKLELLSFFLVELCLVECKMLKFSPSLLAAAAIYTAQCSLYQFKQWTKTTEWYTDYSEEKLLECSRLMVTFHQKAGSGKLTGVYRKYNTWKYGCAAKIEPALFLLDNXGNASKLLVSNALLWLF

SEQ ID NO: 2511 - protein, 428 aa, Medicago sativa
MKFSEENNVSNNPTNFEGGLDSRKVGQNRRALGVINQNLVVEGRPYPCVVNKRALSERNDVCEKKQADPVHRPITRRFAAKIANTKTTNAEGTTKRSNLAKSSSNGFGDFIFVDDEHKPVEDQPVPMALEQTEPMHSESDRMEEVEMEDIMEEPVMDIDTPDANDPLAVAEYIEDLYSYYRKVESTSCVSPNYMAQQFDINERMRAILVDWLIEVHDKFDLMHETLFLTVNLIDRFLEKQSVVRKKLQLVGLVAMLLACKYEEVSVPVVGDLILISDRAYTRKEVLEMEKVMVNALKFNISVPTAYVFMRRFLKAAQADRKLELLAFFLIELSLVEYAMLKFSPSQLAAAAVYTAQCTMYGVKQWSKTCEWHTNYSEDQLLECSSLMVDFHKKAGTGKLTGAHRKYCTSKFSYTAKCEPASFLLENEL

SEQ ID NO: 2512 - protein, 328 aa, Medicago sativa
NSNEFGNFIAIDDELKLPEDQPEPMTLEHTEPMHSDPLEMEEVEMEDIEGEMILDIDSCDANNSLAVVEYIEDLHAYYRKIEYLGCVSPTYMDEQLDLNERMRAILVDWLIEVHDKFDLMQETLFLTVNLIDRFLAKQNVVRKKLQLVGLVAMLLACKYEEVSVPVVSDLIHIADRAYTRKDILEMEKLMLNTLQYNMSLPTAYVFMRRFLKAAQADKKLELVAFFLVDLSLVEYEMLKFPPSLVAAAAVYTAQCTVSGFKHWNKTCEWHTNYSEDQLLECSMLMVGFHQKAGAGKLTGVHRKYGSAKFSFTAKCEPACFLLENKNQP

SEQ ID NO: 2513 - protein, 257 aa, Pisum sativum
VSEYIDDIYHYYWVTEAHSQALSNYMSIQTEITPHMRGVLVNWLIEVHFKLDLMPETLYLTVTLLDQYLSQVTVKRSDMQLVGLTALLLASKYEDFWHPRVKDLISISAETYTRDQMLGMEKLILRKLKFRLNAPTPYVFMVRFIKAAQSNMKLEHMAFFLIDLCLVEYETLAFKPSLLCASTLYLARCTLQITPSWTPLLQKHARYDVSQIRDCADMMLKFHKAAGKGKLTVAYEKYSRKELSAVAGVKPLDRLPH

SEQ ID NO: 2514 - protein, 235 aa, Pisum sativum
SKMRAILIDWLVDVHTKFELSPEALYLTINIIDRFLAISLVSRRELQLVGISAMLMASKYEEIWPPEVNDFVCLSDRAYTHEQILIMEKTILGKLEWTLTVPTPFVFLVRFLKAASVSLPSSDLALENMAHFLSELGMMHYATLMYSPSMMAAAAVYAARCTLNKSPVWDETLTMHTGYSEEELMGCARLLVSFHSASGSGKLKGVYKKYADPQKGAVAVLPPAKNLVSSAAVGS

SEQ ID NO: 2515 - protein, 417 aa, Sphaerechinus granularis
MMAHTTRNSNMNSLGLKKLQSFDNENAGARLGAKSMAVQKPAQRAALGNISNMMRTTQVAGKKVVKKDVRTKTMVKSKATSSLQSVAKLPVSVDNVKPDICRSPLPQVVDKMEVDSVESAIEAFSQQLIDLQVEDIDKDDGDNPQLCSEYAKEIYLYMRSLEKQMQVPASYLDREGQLTGRMRHILVDWLVQVHLRFHLLQETLFLTVQLIDRFLVDHTVSKGKLQLVGVTAMFIASKYEEMYPPEINDFVYITDQAYTKTQIRQMEVVMLKGLGYSLGKPLCLHFLRRNSKAAMVDPQKHTLAKFLMEITLPEYNMVQYDPSEIAAAAIYMSMTLLGSEGDSWGAKMTHYSMYNEDHIKPIVKKMAKAVIRNDAMTEKYHAVKTKYRSSRFMNISALPELESDLIKSLAEESEERM

SEQ ID NO: 2516 - protein, 388 aa, Sphaerechinus granularis
MMAHTTRNSNMNSLGLKKLQSFDNENAGARLGAKSMAVQKPAQRAALGNISNMMRTTQVAGKKVVKKDVRTKTMVKSKATSSLQSVASLPVSVDNVKPDICRSPLPQVVDKMEVDSVESAIEAFSQQLIDLQVEDIDKDDGDNPQLCSEYAKEIYLYMRSLEKQMQVPASYLDREGQLTGRMRHILVDWLVQVHLRFHLLQETLFLTVQLIDRFLVDHTVSKGKLQLVGVTAMFIASKYEEMYPPEINDFVYITDQAYTKTQIRQMEVVMLKGLGYSLGKPLCLHFLRRNSKAAMVDPQKHTLAKFLMEITLPEYNMVQYDPSEIAAAAIYMSMTLLGSEGDSWGAKMTHYSMYNEDHIKPIVKKMAKAVIRNDAMTEKYHVSLHTMK

SEQ ID NO: 2517 - protein, 462 aa, Sphaerechinus granularis
MAFSIGSSNAGNDMTNMAQGVQQFGGRKTKRDDIASRNGPQACKRAALGTITNTSSTRVQPARAAKQFRVSGENPFPVFQDENAHSRIPQGKPFGIPSAAAAPAFSIHVDPTSTYVQPQTASTSIKSTDKENEHILLDTALSLPVPPQAQRIPLRSSGPDVEDNNVSLNEESLTSSEYSPMLLDTSLDAKCISPQTVVAERDLSLGEPEYSEEIYQYLKTAELKHRPKHGYMRKQPDITNNMRCILIDWLVEVSEEYRLHNETLYLAAAFIDRFLSQMSVLRAKLQLVGTASMFVASKYEEIYPPDVKEFIYITDDTYSIKQVLRMEHLILKVLSFDLAAPTINCFLPRFLKAAQANSKTEHLTQYLAELTLQKYDFIKYVPSMIAASRVCLANHTLNNEGWTPTMAHYTDYQLADIYVCTDLHQLFIKAPTMDQQAVREKYKSQKYSGASSTPVPTSLPTL

SEQ ID NO: 2518 - protein, 63 aa, Prorocentrum minimum
MRGILVDWLVEVAEEYKLCADTLYLSVNYIDRFLSIHPVQRSNLQLVGIACMWIASKYEEIYP

SEQ ID NO: 2519 - protein, 63 aa, Prorocentrum minimum
MRGILTDWLVEVAEEYKLCADTLYLSVNYIDRFLSIHPVQRSNLQLVGIACMWIASKYEEIYP

SEQ ID NO: 2520 - protein, 470 aa, Oryza sativa (japonica cultivar-group); identical to SEQ ID NO: 378

SEQ ID NO: 2521 - protein, 432 aa, Daucus carota
MASKAVITQRHKEAEGKQKNVQAERRNRRVLGDIGNVVKAVDAGKPKNPIKTNRPMTRSLCAQLVAKGLPVVGGKDPKDIQLIDGVVGRKDASVLEAAAVKKKDTDQRTTVTLSCEEEIKPKSSGRKSRPDYSEKTEKAFTSILSARSKAACGLINKPQNEIIANIDASDVDDELAAVEYVDDIYKYYKLTEGDGQVHDYMPSQTDINSKMRSILIDWLVEVHRKFELMPESLYLTINIVDRYLSMKIVPRRELQLVGVGSMLIACKYEEIWAPEVNDFIAISDNAYNREQVLLMEKSILAKLEWYLTVPTPYVFLVRYIKSSVPSDPEMENMTFFLAELGLTHYTTVMTYCPSVIAASAVYAARCTLKKSPFWTETLKHYTGYSEDQLRDCAKLLVSYHAALSESKLKAVYKKFARPEKGVVALVPPLKLI

SEQ ID NO: 2522 - protein, 434 aa, Lycopersicon esculentum
MAITDENKHPLIKESSVRVKDRAEMATRKVVGVETRSNRRVLGAINQNLVGGQGYPCVVNKRGLSDGNGFCDKNLPVHGHRPITRKYAAQIASSQKHSSEENKKPKIAAESFSVWEDDMEAANDKPVPMSLEQTEKVSKGKDQMTYIQEVEMEDIFEEAVIDIDGDDAKNHLAAVEYVGDLFANYRTMEVNSCASPYYMAQQADINERMRSILIDWLIEVHHKFELREETLFLTVNLIDRFLEKQGIVRKKLQLVGLVAMLLACKYEEVCAPLVEDLVLISDKAYTRKEVLEMESMMLNTLQFNMSVPTAYVFMRRYLKAAQCDRKLELLSFMLVELCLVEYEMLKFPPSFIAAAAIYTAQTTLYGVQQWSKTCEVHTTYSEDQLLECSRSIVGYHQKAATGKLTGVHRKYSISKFGYAAKCEPAHFLVQQTQE

SEQ ID NO: 2523 - protein, 60 aa, Colpoda sp.
MRAILIDCIISVHFKFHLQPETLFLTVNLIDRYLERSQIAKENLPLVGVTALFIASKYEE

SEQ ID NO: 2524 - protein, 191 aa, Populus alba
RLVPDTVYLTVNYIDRYPSGNVMNRQRLQLLGVACMMIAAKYEEICAPQVEEFCYITDNTYFRDEVLEMESTVLNYLKFEMTAPTAKCFLRRFVRAAQGIIEAPSMQLECLANYIAELPLLEYSMLCYAPSLVAASAIFLAKYILLPSKRPWNSTLQHYTLYEPVDLSDCVKDPHRLCCGDHNSTLPAIRE

SEQ ID NO: 2525 - protein, 211 aa, Populus alba
AQAAAALENKKQVCVNVEKVPAAGVDGVDAVGRKVAVKKPAQKKVTVKPKPEEVVVISPDSEEVVKQEKPVKKKKEGEGSKKNKPTLTSVLTARSKAACGIANKLKEQIIDIDAADVNNDLAGVEYVEDIYKFYKLVENESRPNNYMDMQPEINEKMRAILVDWLVDVHQKFQLSPETFYLTINIIDRFLSVKTVPRRELQLVGIGATLMA

SEQ ID NO: 2526 - protein, 63 aa, Aureococcus anophagefferens
MRGILVDWLVEVHLKFKMLQPTIYLTVQIIDRYLSAKQIDRNQLQLLGVAALFIASKYEEIYP

SEQ ID NO: 2527 - protein, 296 aa, Leishmania mexicana mexicana
RILLSNQTNLVREPYQKPAAQPPTPLTNESRFVSEYGSEILTYFLEVERVVYSERMYMSRQSEVTDRMRKILIDWLIDVVTEFKLHPETFFLAVDIIDRFLFFYSIPRTKLQLVGVTAILVAAKHEEIWPPTVNDCVAVTANTYTSREVIDMEFDVVTTLRFKFTVPTTYPITCRLLESCHMAPAVRHATFLFLESAAHCYPLLQFLPSRIAAGAVLLGAFLIRYNRSKGVISLQGLWEIEVSPFAQGIGFEELQPVTEQLLPFTQRLCSGSSRLQAVRRKYSSSEYDCVASLEFP

SEQ ID NO: 2528 - protein, 436 aa, Dictyostelium discoideum
MSTINNPLNIKTRSHSSMGGGMIMDENKVPKSSIGMDKKIGGTTGLKSHRGALSDLTNNTHQTTGMATKTVQLSNNNIIMPQPTNTRNNIITRSKSIIDNGASLRNSALISGVLPNANGPVNKVQKRDIQSMEMMNNIPQQPVMIDDVDNDTNMIQEEQMVIDITEVPENIDIYDSHDPQCVGEYVNEIFAYYREKEQIDKIDKDYIKNQYHINERMRAILVDWMMAVHVRFKLLSETFFLSVNIVDRYLAKVMIPVTKLQLVGITAILLACKYEEIYSPQIKDFVHTSDDACTHAEVIDMERQILSTLQFHMSVATPLHFLRRFSKAAGSDSRTHSLSKYLSELSMVEYRMVQFVPSMIAAASIYVARRMTMKSGPYWNVTLEYYTCYKESEILQCAQELKEVRKRADTSNLKATRKKYLSSKLMEVAAIPVVEF

SEQ ID NO: 2529 - protein, 385 aa, Triticum aestivum
MENMRSENHRGAAMEGVKLASEAAANTNRRALRDIKNILGAPHQPQAVSKRGLQEKPAAAGANGHRPVTRKFAAILQQTQPANAPLAPIGSERQKRNADTAFNAPSDMECSKASDDDLDEMMTNELKEIDMEDTEEEVPDIDSCDVGNSLAVVEYVDEIYSFYRRTEELSCVSPTYMAHQSDINEKMRGILVDWLIEVHYKLELLGETLFLTVNIIDRYLARENVARKKLQLVGVTAMLLASKYEEVSVPVVEDLILICDRAYSREDILDMERTIVDRLEFNMSVPTPYCFMRRFLKAAGSDKKLELLSLFLIELSLVDYKMLKFQPSMLAAAAIYTAQCTLNGCVSWSKCCELHTKYSEEQLMDCTTMMVELHRGAARGKLTGV

SEQ ID NO: 2530 - protein, 471 aa, Triticum aestivum
IPIRPSLSYAPPARLAPLLPRRRELLPRQPGTGGRRRLPLPPPPPPAPAPQRGVPLPSPLQCRTSENHRGAAMEGVKLASEAAANTNRRALRDIKNILGAPHQPHAVSKRGLQEKPAAAGANGHRPVTRKFAAILQQTQPANAPLAPIGSERQKRNADTAFNAPSDMECSKASDDDLDEMMTNELKEIDMEDTEEEVPDIDSCDVGNSLAVVEYVDEIYSFYRRTEELSCVSPTYMAHQSDINEKMRGILVDWLIEVHYKLELLGETLFLTVNIIDRYLARENVARKKLQLVGVTAMLLAAGFQVGGGPRAGRRGPVPHRPPPRQDILDMERKIVDRLEFNMSVPTPYCFMRRFLKAAGSDKKLELLSFFLIELSLVDYKMLKFQPSMLAAAAIFTAQCTLNGCMSWNKCCELHTKYSEEQLMDCSTMIVELHQGAARGKLTGVHRKYSTFKYGCAAKSEPAAFLLDARKA

SEQ ID NO: 2531 - protein, 424 aa, Zea mays
MENLRSQNCHQGVAMEGVKFAPEKANTNRRALSDIKNIIGGPHQHLAVSKRALSEKPAAAAAANAKDQAGFVGHRPVTRKFAATLATQPTVALLDPIGSERLKRNADTAFHTPADMESTKMTDDSPLPMVSEMDEMMSPELKEIEMEDIEEAAPDIDSGDAGNSLAVADYVDEIYRFYRKTEGASCVPTNYMSSQTDINEKMRGILIDWLIEVHYKLELLEETLFLTVNIIDRFLARENVVRKKLQLAGVTAMLLACKYEEVSVPVVEDLILICDRAYTRADILEMERRIVNTLNFNMSVPTPYCFMRRFLKAAQSEKKLELLSFFMIELSLVEYEMLQFCPSMLAAAAIYTAQCTINGFKSWNKCCELHTRYSEEHLMVCSRMMVELHQRAAHGKLTGVHRKYNTSRYSYAAKSEPATFLLDA

SEQ ID NO: 2532 - protein, 424 aa, Zea mays; identical to SEQ ID NO: 2531

SEQ ID NO: 2533 - protein, 424 aa, Zea mays; identical to SEQ ID NO: 2531

SEQ ID NO: 2534 - protein, 434 aa, Dreissena polymorpha
MNTRAASANLAGRMALQQINSDNIDQIPGKAQLLQRPQTSHLMQRNTLSDIGNQVSAITISDASKKGPIKKEIVQVNPRQQKALTKTKATTSLKALAEKKETKKEHDEFHFVEPSFPSRIPVPTATVHPLPSAHVPMDTSDAGKDAFSKALLNVQGIDANGRGNPQLVSEYVNDIYEYMRILEKKYPIADSYLEKQEISGKMRAILIDWLCQVHHRFHLLQETLYLTVGIIDRFLQESPVTKNKLQLVGVTSMLIASKYEEMYAPEVADFVYITDNAYTKKEILEMEQTILRTLNFSFGKPLCLHFLRRNSKAGQVDASKHTLAKYLMELTIVEYDMVQYLPSQIAAAALCLSMKLLGDCKWTETLAHYSSYTEEELVPTMRKLASLVMKQEDSKLKLTAIRTKYSSSKFMKISTIPALKSPLVQELAGASDCS

SEQ ID NO: 2535 - protein, 459 aa, Pneumocystis carinii
MNAARRVTRQTATFNLNDENKLHGQISRVKQVSTQGLEGVNKPWTAATRKRAALGDVSNVHNKENQTAKTKTQPLSTKARVVTKTGVQSHQSKESVHTVPTGELRGEETTRKRRTSKVLTEQKVIIEVEQTQASKKVRTDGLLNGSVQEHPASQDWDDLDADDAHDPLMVSEYVEEIMGYMRELEVLTLPLPDYMDRQKELQWKMRGILVDWLIEVHAKFRLLPETLFLSVNIIDRFLSLRVCSLPKLQLVGITALFIAAKYEEVMCPSIQNFMYMADGGYTNEEILKAEQYVLQVLGYDMSYPNPINFLRRVSKADNYDIQTRTVAKYLMEISLLDHRFLPFVPSNIAASGIYLARIMVTGGNWNANLIHYSGYKESDLVPCSKMMLDYLSRSVIKHEAFFKKYASKKFMKASLFVRDWVKKHYDLEANVRLNTISFDYDNHESNEIHQDLEEEEGSL

SEQ ID NO: 2536 - protein, 459 aa, Pneumocystis carinii
MNAARRVTRQTATFNLNDENKLHGQISRVKQVSTQGLEGVNKPWTAATRKRAALGDVSNVHNKENQTAKTKTQPLSTKARVVTKTGVQSHQSKESVHTVPTGELRGEETTRKRRTSKVLTEQEVIIEVEQTQASKKVRTDGLLNGSVQEHPASQDWDDLDADDAHDPLMVSEYVEEIMGYMRELEVLTLPLPDYMDRQKELQWKMRGILVDWLIEVHAKFRLLPETLFLSVNIIDRFLSLRVCSLPKLQLVGITALFIAAKYEEVMCPSIQNFMYMADGGYTNEEILKAEQYVLQVLGYDMSYPNPINFLRRVSKADNYDIQTRTVAKYLMEISLLDHRFLPFVPSNIAASGIYLARIMVTGGNWNANLIHYSGYKESDLVPCSKMMLDYLSRSVIKHEAFFKKYASKKFMKASLFVRDWVKKHYDLEANVRLNTISFDYDNHESNEIHQDLEEEEGSL

SEQ ID NO: 2537 - protein, 482 aa, Schizosaccharomyces pombe
MTTRRLTRQHLLANTLGNNDENHPSNHIARAKSSLHSSENSLVNGKKATVSSTNVPKKRHALDDVSNFHNKEGVPLASKNTNVRHTTASVSTRRALEEKSIIPATDDEPASKKRRQPSVFNSSVPSLPQHLSTKSHSVSTHGVDAFHKDQATIPKKLKKDVDERVVSKDIPKLHRDSVESPESQDWDDLDAEDWADPLMVSEYVVDIFEYLNELEIETMPSPTYMDRQKELAWKMRGILTDWLIEVHSRFRLLPETLFLAVNIIDRFLSLRVCSLNKLQLVGIAALFIASKYEEVMCPSVQNFVYMADGGYDEEEILQAERYILRVLEFNLAYPNPMNFLRRISKADFYDIQTRTVAKYLVEIGLLDHKLLPYPPSQQCAAAMYLAREMLGRGPWNRNLVHYSGYEEYQLISVVKKMINYLQKPVQHEAFFKKYASKKFMKASLFVRDWIKKNSIPLGDDADEDYTFHKQKRIQHDMKHEEW

SEQ ID NO: 2538 - protein, 482 aa, Schizosaccharomyces pombe
MTTRRLTRQHLLANTLGNNDENHPSNHIARAKSSLHSSENSLVNGKKATVSSTNVPKKRHALDDVSNFHNKEGVPLASKNTNVRHTTASVSTRRALEEKSIIPATDDEPASKKRRQPSVFNSSVPSLPQHLSTKSHSVSTHGVDAFHKDQATIPKKLKKDVDERVVSKDIPKLHRDSVESPESQDWDDLDAEDWADPLMVSEYVVDIFEYLNELEIETMPSPTYMDRQKELAWKMRGILTDWLIEVHSRFRLLPETLFLAVNIIDRFLSLRVCSLNKLQLVGIAALFIASKYEEVMCPSVQNFVYMADGGYDEEEILQAERYILRVLEFNLAYPNPMNFLRRISKADFYDIQTRTVAKYLVEIGLLDHKLLPYPPSQQCAAAMYLAREMLGRGPWNRNLVHYSGYEEYQLISVVKKMINYLQKPVQHEAFFKKYASKKFMKASLFVRDWIKKNSIPLGDDADEDYTFHKQKRIQHDMKDEEW

SEQ ID NO: 2539 - protein, 411 aa, Schizosaccharomyces pombe
MALYSISKPVGSKINKHSYQDENTLVGKQALSKGTEKTKLSTNFEINLPRRTVLSDVSNVGKNNADEKDTKKAKRSFDESNLSTNEEADKPVESKFVKKLKVYSKNADPSVETLQKDRVSNVDDHLSSNPLMAEEYAPEIFEYIRKLDLKCLPNPKYMDQQKELTWKMREILNEWLVEIHSNFLLMPETLYLAVNIIDRFLSRRSCSLSKFQLTGITALLIASKYEEVMVPSIQNFVYMTDGAFTVEDVCVAERYMLNVLNFDLSYPSPLNFLRKISQAEGYDAQTRTLGKYLTEIYLFDHDLLRYPMSKIAAAAMYLSRRLLRRGPWTPKLVESSGGYEEHELKEIAYIMLHYHNKPLEHKAFFQKYSLKRFLKASIFVHQLVRNDTSVNRTDDDDLQSEPSSSLTNDGH

SEQ ID NO: 2540 - protein, 411 aa, Schizosaccharomyces pombe
MALYSISKPVGSKINKHSYQDENTLVGKQALSKGTEKTKLSTNFEINLPRRTVLSDVSNVGKNNADEKDTKKAKRSFDESNLSTNEEADKPVESKFVKKLKVYSKNADPSVETLQKDRVSNVDDHLSSNPLMAEEYAPEIFEYIRKLDLKCLPNPKYMDQQKELTWKMREILNEWLVEIHSNFCLMPETLYLAVNIIDRFLSRRSCSLSKFQLTGITALLIASKYEEVMCPSIQNFVYMTDGAFTVEDVCVAERYMLNVLNFDLSYPSPLNFLRKISQAEGYDAQTRTLGKYLTEIYLFDHDLLRYPMSKIAAAAMYLSRRLLRRGPWTPKLVESSGGYEEHELKEIAYIMLHYHNKPLEHKAFFQKYSSKRFLKASIFVHQLVRQRYSVNRTDDDDLQSEPSSSLTNDGH

SEQ ID NO: 2541 - protein, 394 aa, Schizosaccharomyces pombe
MKTHLLANKLYQKGLRRQNYLQICKLICHARTVLSDVSNVGKNNADEKDTKKAKRSFDESNLSTNEEADKPVESKFVKKLKVYSKNADPSVETLQKDRALMLMNHLSSNPLMAEEYAPEIFEYIRKLDLKCLPNPKYMDQQKELTWKMREILNEWLVEIHSNFCLMPETLYLAVNIIDRFLSRRSCSLSKFQLTGITALLIASKYEEVMCPSIQNFVYMTDGAFTVEDVCVAERYMLNVLNFDLSYPSPLNFLRKISQAEGYDAQTRTLGKYLTEIYLFDHDLLRYPMSKIAAAMYLSRRLLRRGPWTAKLVESSGGYEEHELKEIAYIMLHYHNKPLEHKAFFQKYSSKRFLKASIFVHQLVRQRYSVNRTDDDDLQSEPSSSLTNDGQRTLL

SEQ ID NO: 2542 - protein, 415 aa, Schizosaccharomyces pombe
MDVSTQTRHATYFQDENQLQKDHIYVKKKSHIKLNTGVRAPFKAVDNINQQDEPTLIEGNNESSISSSTGDTFEEDFAYQDKVEIEERSIRSTPKSIGDDDLENREGSFDAPEGILTHGKHRLPTIPEWTKEDLAALSEAAARLQANPSPEDIETDPSMVPDYDPEIFHYMQSLERKLAPPPNYMSVQQEIDWVTRHMLVDWIVQVQIHFRLLPETLFLAVNLIDRFLSIKVVSLQKVQLVGLSALLIACKYEEIHPPSIYNFAHVVQGIFTVDEIIRAERYMLMLLDFDISWPGPMSFLRRISRADSYDHDIRMLAKYLQEVTLMDEIFIGAHISFIAATAYYLSMQMLGHLDWTPCHVYYSGYTARQLKPCAIIIMECLVDAPNHHNAIYRKYSENRMKRVSAFAHNWVLSVI

SEQ ID NO: 2543 - protein, 427 aa, Saccharomyces cerevisiae
MHHNSQSLSSGHIRSPEDENVAPIGNLKHRTGSLSHISSAHPRVALSDVTNIVATNSSNNSISKPKVAPIKERLDSAAIIEEERLDANSVAQRKEADHNDLLTDREQEEPVEDDGESEEDEEEDQEPLLLQHYASDTLVWEHAFRTYYRTTLDPNDDDVYDVVMVAELSNEIFEYMRKLEDLYKPNPYYMDKQPELRWSFRSTLIDWIVQVHEKFQLLPETLYLCINIIDRYLCKEVVPVNKFQLVGAASLFIAAKYEEINCPTIKDFVYMSENCYSRNDLLDAERTILNGLEFELGWPGPMSFLRRISKADDYEHDTRTLAKYLLESTIMDHRLVSAQPSWLAAGAYFLSKIILGQNQWSLAHVYYSNYTQEQILPLATIILENCRYASKRHNAIWRKYSSRRYLHSSQIVAKWIALAEHRVERSN

SEQ ID NO: 2544 - protein, 427 aa, Saccharomyces cerevisiae
MHHNSQSLSSGHIRSPEDENVAPIGNLKHRTGSLSHISSAHPRVALSRVTNIVATNSSNNSISKPKVAPIKERLDSAAIIEEERLDANSVAQRKEADHNDLLTDREQEEPVEDDGESEEDEEEDQEPLLLQHYASDTLVWEHAFRTYYRTTLDPNDDDVYDVVMVAELSNEIFEYMRKLEDLYKPNPYYMDKQPELRWSFRSTLIDWIVQVHEKFQLLPETLYLCINIIDRYLCKEVVPVNKFQLVGAASLFIAAKYEEINCPTIKDFVYMSENCYSRNDLLDAERTILNGLEFELGWPGPMSFLRRISKADDYEHDTRTLAKYLLESTIMDHRLVSAQPSWLAAGAYFLSKIILGQNQWSLAHVYYSNYTQEQILPLATIILENCRYASKRHNAIWRKYSSRRYLHSSQIVAKWIALAEHRVERSN

SEQ ID NO: 2545 - protein, 460 aa, Saccharomyces cerevisiae
MMLEGYTVQPPQSTLIGDIEIQDENANQEVKNVLYQGVQKGIKRLEKRQRRVALGDVTSQKANKIHNAIHNKFHQTKNNFEIENIRSSALVKEQQRDVRHEDSDYFLIDSSEGSSTDDEQVNEDAIDDLLSRRVNDQQIQADEVYEDFDGEMQDVIEEDVDSQIEPLSPINNDEIQTELDRAFEKYFRSVPNPLDDDTHDVVMVVEYASDIFYYLRELEVKYRPNPYYMQNQVELTWPFRRTMIDWLVQLHFRFQLLPETLYLTINIVDRFLSKKTVTLNRFQLVGVSALFIAAKFEEINCPTLDDLVYMLENTYTRDDIIRAEQYMIDTLEFEIGWPGPMPFLRRISKADDYDFEPRTLAKYLLETTIVEPKLVAAAPSWLAAGAYFLSRTILGSNDWSLKHVFYSGYTSSQIIPLASLILENCKNASRRHHSIWKKYFDQKHYRCSQIVEEWIVSTEA

SEQ ID NO: 2546 - protein, 491 aa, Saccharomyces cerevisiae
MSNPIENTENSQNTSSSRFLRNVQRLALNNVTNTTFQKSNANNPALTNFKSTLNSVKKEGSRIPQFTRESVSRSTAAQEEKRTLKENGIQLPKNNLLDDKENQDPSSQQFGALTSIKEGRAELPANISLQESSSAKEIIQHDPLKGVGSSTEVVHNSVENEKLHPARSQLQVRNTESETDSGKKRPISTIVEQELPKKFKVCDENGKEEYEWEDLDAEDVNDPFMVSEYVNDIFEYLHQLEVITLPKKEDLYQHRNIHQNRDILVNWLVKIHNKFGLLPETLYLAINIMDRFLGKELVQLDKLQLVGTSCLFIASKYEEVYSPSIKHFASETDGACTEDEIKEGEKFILKTLKFNLNYPNPMNFLRRISKADDYDIQSRTLAKFLLEISLVDFRFIGILPSLCAAAAMFMSRKMLGKGKWDGNLIHYSGGYTKEELAPVCHMIMDYLVSPIVHDEFHRKYQSRRFMKASIISVQWALKVRKNGYDIMTLHE

SEQ ID NO: 2547 - protein, 435 aa, Saccharomyces cerevisiae
MGENHDHEQSIKRNSMIYNENERQLCNSNLKILQNKRALSKNDSSSKQQVQDSKPRRALTDVPVNNNPLSQNKRIVAGSKAAKVRREENIRPIVSAVQKRQIYNDRTAAEQEEEEEEEGEDDDAASIVNKKRRIDAEGVSEIVGWQDLDYVEKDDTAMVAEYSAEIFAFLYRRELETLPSHNYLLDKTSKYYLRPSMRTILVDWLVEVHEKFQCYPETLFLSINLMDRFLAKNKVTMNKLQLLAVTSLFIAAKFEEVNLPKLAEYAYITDGAASKNDIKNAEMFMLTSLEFNIGWPNPLNFLRRISKADDYDPVNRNIGKFILEYAYCCHQFIHLPPSTVSAMAMYIARRMTNRNKNELWNGTLQHYSGGIDPIHDEAFQSLCIDLVKDIASSKTHLDSLILKYKKPRYGSVYFQTFKWCTSEMHSNFQNLFNLK

SEQ ID NO: 2548 - protein, 471 aa, Saccharomyces cerevisiae
MSRSLLVENSRTINSNEEKGVNESQYILQKRNVPRTILGNVTNNANILQEISMNRKIGMKNFSKLNNFFPLKDDVSRADDFTSSFNDSRQGVKQEVLNNKENIPEYGYSEQEKQQCSNDDSFHTNSTALSCNRLIYSENKSISTQMEWQKKIMREDSKKKRPISTLVEQDDQKKFKLHELTTEEEVLEEYEWDDLDEEDCDDPLMVSEEVNDIFDYLHHLEIITLPNKANLYKHKNIKQNRDILVNWIIKIHNKFGLLPETLYLAINIMDRFLCEEVVQLNRLQLVGTSCLFIASKYEEIYSPSIKHFAYETDGACSVEDIKEGERFILEKLDFQISFANPMNFLRRISKADDYDIQSRTLAKFLMEISIVDFKFIGILPSLCASAAMFLSRKMLGKGTWDGNLIHYSGGYTKAKLYPVCQLLMDYLVGSTIHDEFLKKYQSRRFLKASIISIEWALKVRKNGYDIMTLHE

SEQ ID NO: 2549 - protein, 515 aa, Neurospora crassa
MPNLRTRNPRSLANENDENSTATTTRMTRAKAATLHVDELSMPAKTMQTKKTTISTTTAATAARTVGKRNALGDVSNVTKVEVAGTKKAIAKPGLVSKAAQPSGIQKKTTTATSRTATTARRALSNKEPNKTVGPSAGAGTIPAKRKPPPSTSKLAPIKESAPVENEPARKKIHVEEPEKKKVSRTEAKENDAPSKAVKPMAEPPAPVVRDVVPVQSVYPPGVKDLDTEDLEDPLMVAEYATEIFEYLRDLECKSVPNPQYMSHQDDLEWKTRGILIDWLIEVHTRFHLLPETLFLAVNIIDRFLSEKVVQLDRLQLVGITAMFVASKYEEVLSPHIANFRHVADDGFTEAEILSAERFILSTLNYDLSYPNPMNFLRRISKADNYDIQSRTLGKYLMEISLLDHRFMPYRPSHVAAAAMYLARLILGRGEWDKTIAYYAGYTEEEIEPVFHLMVDYLARPVIHEAFFKKYGSKKFLKASILTRQWAKKNAVLYGVVDAEIPLDKLKDRPVDQLP

SEQ ID NO: 2550 - protein, 507 aa, Candida albicans
MRSYKSSITDENELTKQRLRAKSIANLSSNHATAGQTSTSSQHREALTDLTSQENKNHPRVKLTQTNTNHHRNSSSSSNKIQIYQQIEQKKTDIHQFKKPRLEKVLLNDDDDETDDEFDDEEDKENRYHDLELNDDDSKHQLISEAFETIDDRGISEGENDTAQEARERLEEETQSHTQDMRSIYGVHVPMQPMWNNAIINELKYVIQKYSRNTLDENDEDTYDTTMVAEYSPEIFNYLHELENKFTPDPNYMDFQDDLKWEMRAVLIDWVVQVHARFNLFSETLYLTVNYIDRFLSKRRVSLSRFQLVGAVALFIAAKYEEINCPTVQEIAYMADNAYSIDEFLKAERFMIDVLEFDLGWPGPMSFLRRISKADDYDYETRTLAKYFLEITIMDSKFVASPPSWLAAGAHYISRILLGRGEWTELHVFYSGYTEKQLQPLADVLLENCRHAEINHKAIFEKYKERRYRKSSLFVQEYFRHIMSRVDLKTSFQQCGTLHFIQSSQNH

SEQ ID NO: 2551 - protein, 492 aa, Candida albicans
MPQVTKTNNENEFRLTRSKVQHQESISTIKNTTISNSQHKQQTQQQISSPPQVSVTSSEGVSHVNTRQYLGDVSNQYITNAKPTNKRKPLGGDNAPLQKQQHRPSRPIPIASDNNNNGSTSSSSNSSNNNNNDANRLASLAVPSRLPQKRQATESSTNLVEKLRVPQPEVGERSQSYHKKSRLIDYEWQDLDEEDNDDQLMVSEYVNEIFSYYYELETRMLPDPQYLFKQTLLKPRMRSILVDWLVEMHLKFKLLPESLFLAVNVMDRFMSVEVVQIDKLQLLATAALFTAAKNEEVFSPLVKNYAYFTDGSYTPEEVVQAEKYMLTILNFDLNYPNPMNFLRRISKADDYDVQSRTLGKYLLEITIVDYKFIGMRPSLCCALAMYLARLILGKLPVWNGNLIHYSGGYRISDMRECIELMFQYLIAPIEHDEFFKKYAMRKFMRASTLCRNWAKKFQASGRDLFDERLSTHRLTLEDDDEEEEIVVAEAEE

SEQ ID NO: 2552 - protein, 492 aa, Candida albicans
MPQVTKTNNENEFRLTRSKVQHQESISTIKNTTISNSQHKQQTQQQISSPPQVSVTSSEGVSHVNTRQYLGDVSNQYITNAKPTNKRKPLGGDNAPLQKQQHRPSRPIPIASDNNNNGSTSSSSNSSNNNNNDANRLASLAVPSRLPQKRQATESSTNLVEKLRVPQPEVGERSQSYHKKSRLIDYEWQDLDEEDNDDQLMVSEYVNEIFSYYYELETRMLPDPQYLFKQTLLKPRMRSILVDWLVEMHLKFKLLPESLFLAVNVMDRFMSVEVVQIDKLQLLATAALFTAAKNEEVFSPSVKNYAYFTDGSYTPEEVVQAEKYMLTILNFDLNYPNPMNFLRRISKADDYDVQSRTLGKYLLEITIVDYKFIGMRPSLCCASAMYLARLILGKLPVWNGNLIHYSGGYRISDMRECIELMFQYLIAPIEHDEFFKKYAMRKFMRASTLCRNWAKKFQASGRDLFDERLSTHRLTLEDDDEEEEIVVAEAEE

SEQ ID NO: 2553 - protein, 698 aa, Candida albicans
MTSLQQQQQQQRVKYGPPHHIKRRPYHPILESLEFQTNQHLIQEYSLDIVNTLSQLESLTLVNPAMIDLQPEIQWFMRPFLLDFLIELHSSFKLQPTTLFLCLNIIDRYCAKRIVFKRHYQLVGCTALWIASKYEDKKLRVPTLKELTIMCRNAYDEEMFVQMEMHILSTLDWSIGHPTLEDCLQLAIDLNNLSNNTTNDIENKSVRPNRKSSISSAVTAVARFLCELSLYDKYFLSVPPSLIAITANLLSCSMLQIPHASITLKNLIEQEIINPQQKKQKKAFSSNSSRTTTASYTHQNQLDVRHSSFDEDIDLDSGDEGDDDEDYIDEFYETNNYDDTNATTFDESINKSTTINDENQPPQIHTPFLSGLDEDSILSIKKICLMLIIQLSKVTEVLSKKYENLGVIQVINNFHSNYKFIIQSIYENQELLLNTINDSTNNNEIDYKLIQSSEILLQFPKFDEYLTEDEDENVSTDDEANSQPQGYDGSGSDGNNQLFTPKSPNAFSSNSSLTLNNHPQSMVPVTPPSATSQYSLFSNKNNRTHESTSGLNSTCNTPTHISISSFAPPQPPPGSILKPKLTSINSTNSLKIKKLTSNSNSSNINIHHGHHNTKQEKRYSHISIGSNSSSKYDGFSPIKSISTNGSLITNNGSFTNIVNNTNSSSPLMNQQQQYYHQQQHQQQVTQSSLYQHHHQYHQ

SEQ ID NO: 2554 - protein, 698 aa, Candida albicans
MTSLQQQQQQQRVKYGPPHHIKRRPYHPILESLEFQTNQHLIQEYSLDIVNTLSQLESLTLVNPAMIDLQPEIQWFMRPFLLDFLIELHSSFKLQPTTLFLCLNIIDRYCAKRIVFKRHYQLVGCTALWIASKYEDKKSRVPTLKELTIMCRNAYDEEMFVQMEMHILSTLDWSIGHPTLEDCLQLAIDSNNLSNNTTNDIENKSVRPNRKSSISSAVTAVARFLCELSLYDKYFLSVPPSLIAITANLLSCSMLQIPHASITLKNLIEQEIINPQQKKQKKAFSSNSSRTTTASYTHQNQSDVRHSSFDEDIDLDSGDEGDDDEDYIDEFYETNNYDDTNATTFDESINKSTTINDENQPPQIHTPFLSGLDEDSILSIKKICLMLIIQLSKVTEVLSKKYENLGVIQVINNFHSNYKFIIQSIYENQELLLNTINDSTNNNEIDYKLIQSSEILLQFPKFDEYLTEDEDENVSTDDEANSQPQGYDGSGSDGNNQLFTPKSPNAFSSNSSLTLNNHPQSMVPVTPPSATSQYSLFSNKNNRTHESTSGLNSTCNTPTHISISSFAPPQPPPGSILKPKLTSINSTNSLKIKKLTSNSNSSNINIHHGHHNTKQEKRYSHISIGSNSSSKYDGFSPIKSISTNGSLITNNGSFTNIVNNTNSSSPLMNQQQQYYHQQQHQQQVTQSSLYQHHHQYHQ

SEQ ID NO: 2555 - protein, 646 aa, Candida albicans
MTSLQQQQQQQRVKYGPPHHIKRRPYHPILESLEFQTNQHLIQEYSLDIVNTLSQLESLTLVNPAMIDLQPEIQWFMRPFLLDFLIELHSSFKLQPTTLFLCLNIIDRYCAKRIVFKRHYQLVGCTALWIASKYEDKKSRVPTLKELTIMCRNAYDEEMFVQMEMHILSTLDWSIGHPTLEDCLQLAIDSNNLSNNTTNDIENKSVRPNRKSSISSAVTAVARFLCELSLYDKYFLSVPPSLIAITANLLSCSMLQIPHASITLKNLIEQEIINPQQKKQKKAFSSNSSRTTTASYTHQNQSDVRHSSFDEDIDLDSGDEGDDDEDYIDEFYETNNYDDTNATTFDESINKSTTINDENQPPQIHTPFLSGLDEDSILSIKKICLMLIIQLSKVTEVLSKKYENLGVIQVINNFHSNYKFIIQSIYENQELLLNTINDSTNNNEIDYKLIQSSEILLQFPKFDEYLTEDEDENVSTDDEANSQPQGYDGSGSDGNNQLFTPKSPNAFSSNSSLTLNNHPQSMVPVTPPSATSQYSLFSNKNNRTHESTSGLNSTCNTPTHISISSFAPPQPPPGSILKPKLTSINSTNSLKIKKLTSNSNSSNINIHHGHHNTKQEKRYSHISIGSNSSSKYDGFSPIKSISTNGS

SEQ ID NO: 2556 - protein, 465 aa, Candida albicans
MFPNSPDAFHQVRMMQSLIKASNFKLQSMEFRCHSNNVCEYQMEMLHHLLSVEAKTLPSLSLIEQQPEIKLGMRPLLLDFLMEVITILNLSRSTFPLTVNLIDRYCSTRIVKKQHYQLLGLTSLWISCKNLDSKFKVPTLNDLRKICVDSYYKELFVEMEKHILKSLEWVVNAPTFDAFIDLYSNLLISNSSNFEVANIIKKSSHKIKLFSNYIGELFQFYPNIYYDYTSSQIALIAILITVLTLKIPVDLISLLNFYNGLVKTEMFKSNVEQGAEDQFEEILSVDSFKSLFNKSFFKNLIKIIDNPPSSLKIKYFAENGKYSVLMKQLVTTASNTLKCILDPVPTTPKANSFVKHQQQQHHYHPRPPMSINTSMIPLTPVSNSTSPNRFSPDQIFSENESTPGIAFGTMTPDSQSTSPGEKRSYECIDELEIGTSTIAGYTLKNHDTLKRSKSANYGTLFYLQQ

SEQ ID NO: 2557 - protein, 465 aa, Candida albicans
MFPNSPDAFHQVRMMQSSIKASNFKLQSMEFRCHSNNVCEYQMEMLHHLLSVEAKTLPSLSLIEQQPEIKLGMRPLLLDFLMEVITILNLSRSTFPLTVNLIDRYCSTRIVKKQHYQLLGLTSLWISCKNLDSKFKVPTLNDLRKICVDSYYKELFVEMEKHILKSLEWVVNAPTFDAFIDLYSNLLISNSSNFEVANIIKKSSHKIKLFSNYIGELFQFYPNIYYDYTSSQIALIAILITVLTLKIPVDLISLLNFYNGLVKTEMFKSNVEQGAEDQFEEILSVDSFKSLFNKSFFKNLIKIIDNPPSSLKIKYFAENGKYSVLMKQLVTTASNTLKCILDPVPTTPKANSFVKHQQQQHHYHPRPPMSINTSMIPLTPVSNSTSPNRFSPDQIFSENESTPGIAFGTMTPDSQSTSPGEKRSYECIDELEIGTSTIAGYTLKNHDTLKRSKSANYGTLFYLQQ

SEQ ID NO: 2558 - protein, 347 aa, Guillardia theta
MKLLLYDDLKTLFNYKIKKKNNTIVHFLYLLYENVHESLNINNTRNFLWCFMIKFSVEIKKRIKFDYKSCHINFYSFFDNLLEAGNVLNFEKLILNILFNFRKIQFLYIPFTNVMKVQTEINKNMRKILIDWIIDVHHKFKLLSKTLFLTINIIDRFLCLKKIGKQKLQLLGITSMFIASKYEEIYAPEIRDFIYICDNAYSKEDIIKMEQLICFVLRFKFNLPSPQSFLSLWMKILCLKLDSIFFSNKCLELCLIEINTLRYNFEIISLSCIFLSLKFSGNISLKILMNIFRIDSKKNFSLVKSCGLIGSLLLLYQSSYCGQNHLHFKYSSNKHKEFMSRRFHIYF

SEQ ID NO: 2559 - protein, 309 aa, Leishmania donovani
MAVPPRMRIPLSNQTNLVREPYQKPAAQPPTPLTNESRFVSEYGSEILTYFLEVERVVYSERMYMSRQSEVTDRMRKILIDWLIDVVTEFKLHPETFFLAVDIIDRFLFFYSIPRTKLQLVGVTAILVAAKHEEIWPPTVNDCVAVTANTYTSREVIDMEFDVVTTLRFKFTVPTTYPITCRLLESCHMAPAVRHATFLFLESAAHCYPLLQFLPSRIAAGAVLLGAFLIHYNRSKGVISLQGLWEIEVSPFAQGIGFEELQPVTEQLLPFTQRLCSGSSRLQAVRRKYSSSEYDCVASLEFPFISASA

SEQ ID NO: 2560 - protein, 426 aa, Trypanosoma brucei
MNPTALREVSNLSTGSGDVKQRLAQRRSANLESCRYPYSSSAVRHGSDSLLSLRSSLYSPVGTAGKESSVSPHADRLRENNPVYCSDVIKDITTMYMESEKEAIYGQVLPSPRYLTYQPEINEKMRMILVDWLIDVHLKFKLHPETLYLTVSIVDRYLSSVNTRRTTGRYIPRSKLQLVGITAILLAAKYEEIWPPEVKECVYICANTYTRDEVIRMEREMCTELSFRFTVPTPFPFIVRLLDVVEGLERQQQTQQLSHQLQQIQSQSQSQSQQTQMQASQSQPQSLSRSRSQSRSQPRSDEECTAYVVQLRHTAFFFLDHGMLDYKCLQFSPSQQAKAALFLALVTLHMKEQGSSYVLNNDIIWTRQLQYYSKAQVRDFKACARTMLDFVSYVSTTRYQSVRRKYSSSKYGEVAKLTMPSEVPDF

SEQ ID NO: 2561 - protein, 426 aa, Trypanosoma brucei
MNPTALREVSNLSTGSGDVKQRLAQRRSANLESCRYPYSSSAVRHGSGSLLSLRSSLYSPVGTAGKESSVSPHADRLRENNPVYCSDVIKDITTMYMESEKEAIYGQVLPSPRYLTYQPEINEKMRMILVDWLIDVHLKFKLHPETLYLTVSIVDRYLSSVNTRRTTGRYIPRSKLQLVGITAILLAAKYEEIWPPEVKECVYICANTYTRDEVIRMEREMCTELSFRFTVPTPFPFIVRLLDVVEGLERQQQTQQLSHQLQQIQSQSQSQSQQTQMQASQSQPQSLSRSRSQSRSQPRSDEECTAYVVQLRHTAFFFLDHGMLDYKCLQFSPSQQAKAALFLALVTLHMKEQGSSYVLNNDIIWTRQLQYYSKAQVRDFKACARTMLDFVSYVSTTRYQSVRRKYSSSKYGEVAKLTMPSEVPDF

SEQ ID NO: 2562 - protein, 436 aa, Trypanosoma brucei
MNPTALREVSNLSTGSGDVKQRLAQRRSANLESCRYPYSSSAVRHGSGSLLSLRSSLYSPVGTAGKESSVSPHADRLRENNPVYCSDVIKDITTMYMESEKEAIYGQVLPSPRYLTYQPEINEKMRMILVDWLIDVHLKFKLHPETLYLTVSIVDRYLSSVNTRRTTGRYIPRSKLQLVGITAILLAAKYEEIWPPEVKECVYICANTYTRDEVIRMEREMCTELSFRFTVPTPFPFIVRLLDVVEGLERQQQTQQLSHQLQQIQSQSQSQSQQTQMQASQSQPQSLSRSRSQSRSQPRSDEECTAYVLQLRHTAFFFLDHGMLDYKCLQFSPSQQAKAALFLALVTLHMKEQGSSYVLNNDIIWTRQLQYYSKAQVRDFKACARTMLDFVSYVSTTRYQSVRRKYSSSKYGEVAKLTMPSKYLTFDWFTSLHSAV

SEQ ID NO: 2563 - protein, 328 aa, Trypanosoma brucei
MLCRGFEFALQDLKDWLRLALLLRETDTLHFLRECTKKLGPYARQRVEDALILHGSDIDSVCQVVMDIPVPTDETTTFGGPYYNLTLNDLIAMGDEDTHSVHVVNAQHTMPSHVREGLVEWMLLVNVELNLQLETFFLAVSILDRYLLRATIQPDREYLTAYAILLLASKVEEKCLFPLRDSVRLCGKTYKVGVLIATTNRIFEVLDCNVVYATLSNVGFGFLWQQEPAACEKQYSFLTYILTTLAIRTQYRQYRLSALAAAAVYVSRLRFNIPTGRPCDEVVVLLPVIKDAISCNISARSGGVYDLFKRSCFHEASRFPLPDLLYGL

SEQ ID NO: 2564 - protein, 469 aa, Trypanosoma brucei
MSYNTSSSSDSLLCEIDVNIQQQLDNSNFFLPVPKHLWNVQSKKDKHRCQGGGTSPKNTAQSNQPSTEMTCVMLQKSMRNALCNLELMYTNDTERLKQRLSEEFHRLRESAAERTRQLIDLSTKAQPLSYRVLFVLNLRRWMLCRGFEFALQDLKDWLRLALLLRETDTLHFLRECTKKLGPYARQRVEDALILHGSDIDSVCQVVMDIPVPTDETTTFGGPYYNLTLNDLIAMGDEDTHSVHVVNAQHTMPSHVREGLVEWMLLVNVELNLQLETFFLAVSILDRYLLRATIQPDREYLTAYAILLLASKVEEKCLFPLRDSVRLCGKTYKVGVLIATTNRIFEVLDCNVVYATLSNVGFGFLWQQEPAACEKQYSFLTYILTTLAIRTQYRQYRLSALAAAAVYVSRLRFNIPTGRPCDEVVVLLPVIKDAISCNISARSGGVYDLFKRSCFHEASRFPLPDLLYGL

SEQ ID NO: 2565 - protein, 190 aa, Stizostedion vitreum
WMLEVCEEQKCGEEVFPLAMNYLDRFLAVVPTKKCNLQLLGAVCMFLASKLKETRPLTAEKLCIYTDNSIRPQELLEWELVVLGKLKWNLAAVTPNDFIEHIVRRLPLPEDKLALIRKHVQTFIALCATDFRFAMYPPSMIATGSVGAAICGLQLDSADQSQWGDSLTDLLAKITNTEVDVLKECQEQIE

SEQ ID NO: 2566 - protein, 336 aa, Paramecium tetraurelia
MIHEQYRFFGKELVNSSGEFQKENTDRNKPKHLTVLPRYLKLNLWQEEKENKMEVENNTQQLCSFDQQMIKDPQYTSLYNKEIYTYLLTQEEKYLVSNNYMNEQQQPDLNARMRAILLDWLIDVHLKFKLRDETLYVTTYLIDRFLNFKTTTRQQLQLVGVASLFIACKYEEIYPPDLKDFVYITDNAYTKQDVLEMEGQILQTLDFSITQPSSYCFLQRFGRIAGLDTKNLSLAQYLLELSIVDIKFMNYKPSFLSAAAIYLVHKIRKTPQSWSEEMQKMTGYNEQELRYCAKEMCLVLQSSDKSNLQAVRKKFAQPKYQEVSRIRVERQIKQQK

SEQ ID NO: 2567 - protein, 324 aa, Paramecium tetraurelia
MIIENQRCFGKEIANSSVHQSKEIGMIVEKHKEPFSIIPKVFTTSLDDKENKLFRRESEKIPIEIEIDKSKEHLNPQKVELYSDEILQHLLMEENKYTINQYMTPEQQPDINLKMRAILVDWLVDVHAKFKLKDETLYITISLIDRYLSLAQVTRMKLQLVGVAALFIACKYEEIYPPALKDFVYITDNAYVKSDVLEMEGLMLQALNFNICNPTAYQFLQKYSTDLDPKNKALAQYILELALVEYKFIIYKPSLIAQSVIFLVNKIRTPTHKTQNENQLKPCAKELCTLLQTADLNSLQAVRKKFNATKFFEVSRIKVEKTNN

SEQ ID NO: 2568 - protein, 324 aa, Paramecium tetraurelia
MIIENQRCFGKEIANSTLHQSKEIGIIVEKHKKPFSIIPKVFAMSLDDKENKLFRRESEKFQIEIETEKSKDVKNPQNVELYSNEILQHLLIEENKYTINQYMTPEQQPDINIKMRAILVDWLIDVHAKFELKDETLYITISLIDRYLALAQVTRMRLQLVGVAALFIACKYEEIYPPALKDFVYITDNAYVKSDVLEMEGLMLQALNFNICNPTAYQFLQKYSTNLDPKDKALAQYILELALVEYKFIIYKPSQIVQSVIFLVNKIRTPTYKTPNENQLKPCAKELCTLLQTADLSSLQAVRKKFNASKFFEVSRIKVEKTNK

SEQ ID NO: 2569 - protein, 231 aa, Paramecium tetraurelia
AAAYTINQYMTPEQQPDINIKMRAILVDWLIDVHAKFELKDETLYITISLIDRYLALAQVTRMRLQLVGVAALFIACKYEEIYPPALKDFVYITDNAYVKSDVLEMEGLMLQALNFNICNPTAYQFLQKYSTNLDPKDKALAQYILELALVEYKFIIYKPSQIVQSVIFLVNKIRTPTYKTPNENQLKPCAKELCTLLQTADLSSLQAVRKKFNASKFFEVSRIKVEKTNK

SEQ ID NO: 2570 - protein, 60 aa, Tetrahymena thermophila
MRAILIDWIVEIHRKCKLLPETLFITVNLIDRFLDRATCTRDNLQLVGVTALFIASKYEE

SEQ ID NO: 2571 - protein, 444 aa, Stylonychia lemnae
MSFGSQKSLISSSLDLYQLAQYFIARLEPILHNTLLIGIINPRLRRIRDHCSKGRRLKNSRSSKRFFEPTSPVDIPDAKDPQKCAEYACDIFDFLIQTETENIANPGYMEKQEDINEKMRAILIDWLVEVHLKFKLVPESLYLTVNLIDRYLEKIASKQTETLISRSYSYAIARNQRDISHVDRSIRYTKEEILSMEREMLQALDFNIQITSSYRFLERFSKVAKTDPLIFNLSRYLLELALVNYKLLKYSPSNLASSALFLSLKMTKHPSAMDSLRLRVLLVIMLQIVTVATAASCVHVAEANAGAILVDYCVEIVIEMMKDVVMVATATTLGSSLILDTSLNLGKANFFFTATVSLTIVLIVFRRVLFDVPDCLFLVVCVFYHTSVHGGGVVNTVQGNISQYGTTAPIILAAAAIKPLPAVTNRDGGRFECQCSRLITFNFE

SEQ ID NO: 2572 - protein, 300 aa, Encephalitozoon cuniculi
MVVSFRKSEPLKNVTNKIGRRAEKTVLPLTKMEEIVYKQQRVGEASQIVMVDKYSDDVFEYFSTIDKPFVYINDGVSWKMRSLLVDWIIDIHDKLGLCHDTLFLAINFIDRFLSMRSIPSSKLQLVGISALMIACKYEEVVCPALQTLVLLTEKTLTGEDVRKAEKYMLHTLNYDLQYVSPLNFLRKCSKANNYEICSRTVGKYLLELMTLYEEFLRFKGSVRAAAAMYLARKITSQDQCKNLFIMYSGHTKDDIKECFNALVHTISESIPFENIQNKYNTPKFLHAASFVKEYAEKNFK

SEQ ID NO: 2573 - protein, 392 aa, Chlorohydra viridissima
MAGVQRRILISRNEENLLNKGIGTKNVLGGKTTSTRTALSNISNIQRRPQLGGKVKKEDVGALEEKAPTNKSLGRMISQTNLLNEVQMKKNIQNLEDMAEVDLPINSMIDSFTDLEVDDIDLEDLGNPTLCAEYVKDIYKYMNKLEQRLVPGDYMPNQTEINFKMRSILVDWLIQVQSRFNLLQETLYLTIYILDRFLNKQNVKRAELQLVGVTAMLLASKYEEMYAPEIGDFVYITDNAYSKEKIRQMEQKMLKACEYDFSNPLCLHFLRRNSKAGAVDAQKHTLAKYLMELTLVEYEFITKLPSEVAAAALYLSMKLIDDSNWTPTLVHYSGYTEDAILPTVSKLSVLTLSMDNSKYQAVKNKYAASKFLRISRIPQLKGHVLNKFAERI

SEQ ID NO: 2574 - protein, 420 aa, Chlorohydra viridissima
LFFQKKYFLDKQLNQNAIQIYQDNLTNQNNNIGKKAKLEDEKHAHNKSITSKYKRVPLASISNVQGSRIQPTRAAKEKLKPPQNISDSQLVNDSLKSSNSIQAHNTKNDLHKENLYNESALDTFKESPMVFSPFLSDSSCKKYSSLNGIQDIDSKLHEVFELPEYAQDIHNYLKKSEAKYRPKSNYMRKQTDINSSMRAILIDWLVEVSEEYKLIPQTLYLSVSYIDRFLSHMSVLRGKLQLVGAACMLVAAKFEEIYPPEVAEFVYITDDTYTAKQVLRMEHLILKTLAFDLSVPTCRDFLSRYLFAANAKPESQLKYLAEYLSELTLINCDISVKYAPSMIAASSICVANHMLNSIPWTPTLEFYSGYNIQDLRSCLNEIHLLHLAASTNPQQAIQQKYKSPKFGCVSSLVPLEMPCF

SEQ ID NO: 2575 - protein, 361 aa, Hydra vulgaris
SSRTVLSNISNIQRRPQVVGKIKKEDGVALEEKAPLNKGLGRMVSQSNLISDVQLKTTKIIPAYQDIADVEVPINAMINSFTELEVDDIDLEDLGNPTLCAEYLKDIYKYMNKLERRLEPSDYMAHQAEINFKMRSILVDWLIQVQSRFNLLQETLYLTIYIIDRYLSKQNVKRAELQLEGVTAMLIASKYEEMYAPEIGDFVYITDNAYSKEKIRQMEQKMLKTCEYDFSNPLCLHFLRRNSKAGAVDAQKHTLAKYLMELTLVEYEFITKLPSEIAAAALYLALKLIDDSNWTPTLAHYSGYTEDEILSTVSKLSILTLSMDNSKYQAVKNKYSASKFLRISLIPQLKGHILSKFAERN

SEQ ID NO: 2576 - protein, 518 aa, Caenorhabditis briggsae
MAGRKSSRTTGEPVKKAERKSAILSPHDELRERLLETSLDVKENIPERSSSTRNESVGSQRSDCSESRKRRSTEKGPVAKRPSTEKKGNGSRDDSFSSVFSEDRETESSVGSTSSRTRGQPLPAMPEEEESLDGSSDHNAESEESRETPQSDEHDGFEEDGDVEDDVSSDVNDEEDEYDEYEEDEETEDEFDLPLQNDDFAVTKRLMNDRHMIDAPSLLSYGKCEGIGSPTKVWSLMVKRDDIPRATRQLLRNHPDMTINMRRVLVDWMMECCDVEKLHRETFHLAVDYADRFLESTREEVISENFQLVGTAALFIAAKYEEIYPPKCADLAALTDGAFSCDDICRMESIVAKDLKWSFGPITSVQWLSTYLQLLGTGKKNNDHFEEGNMYIPELLRSEYLRMVRILDYLLSDIDSFNFSYRTIAAAVLFVNYDPRSAVEKATGFIYEQLRNVIDYVTPICRAYDRFTQEHVPKDIIPDYAPAEDAHNIQVHIKHYEVDPYVEKERERRHRRGPNRRL

SEQ ID NO: 2577 - protein, 385 aa, Caenorhabditis elegans
MMLRSQAKNVDLTSQADSRHQQKRKQAEQLDALKNPSEPAAKKQHSKGLTELRAHISGFKIDSAKRDPLGKSRTSRRDVENLPPQKSRYVDPCPHYDYDLEEAGNPDSISDYAQGIFDYYRHREVHFRVRKYLHKHPEVDVKTRAILIDWMVEIQETFELNHETLYNAVKLTDMYLCKTKNVDKNTIQKLACVAIFIAAKYDERSPPLVDDLIYLSGDRFSRDELLAMERELFATVGYDLGSPLSYRYLRRFGRVCRVDMKTLTMGRFILETSLMVYEYAMVSQSRLAAAAFVLAMRMLDKNNEYEWNPVLEKYSGFTGEEVMPLVEHMNHILHFSKDKWAQLTSVRQKYSHEVFFHVASIPMLPDTLKVVDSHTYAPVPMLSYP

SEQ ID NO: 2578 - protein, 383 aa, Caenorhabditis elegans
MLRSQAKNVDLTSQDSRHQQKRKQAEQLDALKNPSEPAAKKQHSKGLTELRAHISGFKIDSAKRDPLGKSRTSRRDVENLPPQKSRYVDPCPHYDYDLEEAGNPDSISDYAQGIFDYYRHREVHFRVRKYLHKHPEVDVKTRAILIDWMVEIQETFELNHETLYNAVKLTDMYLCKTKNVDKNTIQKLACVAIFIAAKYDERSPPLVDDLIYLSGDRFSRDELLAMERELFATVGYDLGSPLSYRYLRRFGRVCRVDMKTLTMGRFILETSLMVYEYAMVSQSRLAAAAFVLAMRMLDKNNEYEWNPVLEKYSGFTGEEVMPLVEHMNHILHFSKDKWAQLTSVRQKYSHEVFFHVASIPMLPDTLKVVDSHTYAPVPMLSYP

SEQ ID NO: 2579 - protein, 384 aa, Caenorhabditis elegans
MLRSQAKNVDLTSQADSRHQQKRKQAEQLDALKNPSEPAAKKQHSKGLTELRAHISGFKIDSAKRDPLGKSRTSRRDVENLPPQKSRYVDPCPHYDYDLEEAGNPDSISDYAQGIFDYYRHREVHFRVRKYLHKHPEVDVKTRAILIDWMVEIQETFELNHETLYNAVKLTDMYLCKTKNVDKNTIQKLACVAIFIAAKYDERSPPLVDDLIYLSGDRFSRDELLAMERELFATVGYDLGSPLSYRYLRRFGRVCRVDMKTLTMGRFILETSLMVYEYAMVSQSRLAAAAFVLAMRMLDKNNEYEWNPVLEKYSGFTGEEVMPLVEHMNHILHFSKDKWAQLTSVRQKYSHEVFFHVASIPMLPDTLKVVDSHTYAPVPMLSYP

SEQ ID NO: 2580 - protein, 485 aa, Caenorhabditis elegans
MRSALSLKPSNGNAAKSQAVNNKNVIKNAPLGGKLTRQIGTSNLLQQALPSKKIDESPIIKIDAKDSFKVFEDQEPEKENSSENVDATEKDSNVIPAEDNNMIHELERKMEEKSRAEKLKFKFMQTRDNSDITSRFSEPPSEFSVLCDDDDCDKVSVASSTFTTSVRATFSSFHFDENQRKKEFGKEEAVKKIQKKAAKEARDDSMFSSEEFFPDIIKYMLHRQTKNRASHECFDIQSQVNEEMRTILIDWFSDVVKEYNFQKETFHLAVSLVDRALSMFNIDKMRFQLVGTTSMMIAVKYEEIFPPEIEDFALITDNTYRVPDILLMERFLLGKFDFVVAMPTSSWFGTCFAKRMNFTKKMRNTVHYLLELSLIDVHFLRYRPSDIAAAACCFANLQADVESWPQKMVDDTGISTEDFVDVLRDLHRMYLNASTADFKSIFYNYSETAQMEVALLPAPTDKLRSMFPSIFVTAPKSSNDSSSPQ

SEQ ID NO: 2581 - protein, 409 aa, Caenorhabditis elegans
MRSALSLKPSNGNAAKSQAVNNKNVIKNAPLGGKLTRQIGTSNLLQQALPSKKIDESPIIKIDAKDSFKVFEDQEPEKENSSENVDATEKDSNVIPAEDNNMIHELERKMEEKSRAEKLKFKFMQTRDNSDITSRFSEPPSEFSVLCDDDDCDKVSVASSTFTTSVRATFSSFHFDENQRKKEFGKEEAVKKIQKKAAKEARDDSMFSSEEFFPDIIKYMLHRQTKNRASHECFDIQSQVNEEMRTILIDWFSDVVKEYNFQKETFHLAVSLVDRALSMFNIDKMRFQLVGTTSMMIAVKYEEIFPPEIEDFALITDNTYRVPDILLMERFLLGKFDFVVAMPTSSWFGTCFAKRMNFTKKMRNTVHYLLELSLIDVHFLRYRPSDIAAAACCFANLQADVESWPQKNG

SEQ ID NO: 2582 - protein, 317 aa, Caenorhabditis elegans
MLRVTTSIRKTTKNAVGPRTNLEEVLNCIAMAEDIYNYLVHHEKKYVLDDSFINGGNVNSKMRRILVDWLIQVHLRFHLTPETLHLTIFVLDRIIVKNIVSKAEFQLLGVAALFVASKFEDIYLPDILEYEMITDNTFSKKQIMAMEQTILNALNFDLSCPSSLVFLRCISKTLTENDVNPIDKEAFYYVHNISKCLGELALLDSVMSTVPRSHVASASMIITLNVITVDGINPKTAASMIRKQLGASKQDIYDAIALLAQVAYKNFRHQKLCAIREKYQSSKFGRVSYLMTDEILEKIHRMGRNVEASEAETSEME

SEQ ID NO: 2583 - protein, 339 aa, Caenorhabditis elegans
MLRATTSIRKITKNLEKRSSVKNQHENGSSTPVNTEGLAVGPRTKLEEEFNCMAEDIYNYLVHHEKKYVLDDSFINGGNVNSKMRRILVDWLVQVHLRFHLTPETLHLTIFVLDRIIVKNIVSKAEFQLLGVAALFVASKFEDIYLPDILEYELITENTFSKKQILAMEQTILNALNFDLSCPSSLVFLRYISKTLTENDVNPIDKETFYYVHNISKCLGELALLDSVMSTVPRSHVASASMIITLNIISVDGINPKTAASMIRKQFGASKQDIYDAISLLAQVAYKNFRHQKLCAIREKYQSSKFGRVSYLMTDEILEKIHRMGRNLEASEAETSEME

SEQ ID NO: 2584 - protein, 361 aa, Caenorhabditis elegans
MLRATNNRRTSNNVEKDSLQMAKHGNGPLKPVNAQGLQTKREAREILALKPSNPAPVETAQKSQRINLQDAETKCLAMADDIYKYLVHHEKKYLLEECFMEGGEPTPKMRRILVDWLVQVHVRFHLTPETLHLTVFILDRMLQKKVTSKADLQLLGISAMFVASKFEEVYLPDIHDYEFITENTYSKKQILAMEQTILNSLNFDLSCPSSLVFLRCLSRILSENDASPIDNQAFCYTYNISKCLGELALLDSVMASTPRSHIASASMIIALEVHPVDGIEAENAVSVICKQLGASKKVIEDAVALLAEVSYKNFKQGKLVAIKNKYQSSKLAQVSNLMTDDVLEKINRMGQNAKVDASEME

SEQ ID NO: 2585 - protein, 331 aa, Caenorhabditis elegans
MLRVTTSIRKTTKNAVGPRTNLEEVLNCIAMAEDIYNYLVHHEKKYVLDDSFINGGNVNSKMRRILVDWLIQVHLRFHLTPETLHLTIFVLDRIIVKNIVSKAEFQLLGVAALFVASKFEDIYLPDILEYEMITDNTFSKKQIMAMEQTILNALNFDLSCPSSLVFLRCISKTLTENDVNPIDKEAFYYVHNISKCLGELALLDSVMSTVPRSHVASASMIITLNVITVDGINPKTAASMIRKQLGASKQDIYDAIALLAQVAYKNFRHQKLCAIRVIYFYKMFTQFCFQEKYQSSKFGRVSYLMTDEILEKIHRMGRNVEASEAETSEME

SEQ ID NO: 2586 - protein, 524 aa, Caenorhabditis elegans
MAGRKSSRTAERVPTTQKPERKSAILSPHDELRERLLETAIDMKENIPQRNTRNSSVGSQKSDCSETRKRRSTKEGPAAKRHSGEKHRNGSREDSLEYISEYSDDREVGSSSSQSSRTRGQPLPAMPEEEEVFDKSSSSDNLAESEESHEMVRLEERQDIEEEIEDDFDDEEEDVVNDKEEYEEIESEDEDDYPVQNEGFAVTKRLMNDEHMVTAPTFLSTAKCDGIGSPTKVWSLMVKRDEIPRATRFLLGNHPDMDDEKRRILIDWMMEVCESEKLHRETFHLAVDYVDRYLESSNVECSTDNFQLVGTAALFIAAKYEEIYPPKCIDFAHLTDSAFTCDNIRTMEVLIVKYIGWSLGPITSIQWLSTYLQLLGTGKKNKSDHYEEQNMYVPELLRSEYLEMCKILDFLLFEIDSFTFSYRTIAAAVLFVNYEPTCAVEKATGFMQAQLEKVIEYVEPVCRAFAKQRQLLDDVIPKHESIKSDDSHNIQVYVKRSSMEPIVKSERERIQHLKARRLHPQRLF

SEQ ID NO: 2587 - protein, 570 aa, Caenorhabditis elegans
MAGRKSSRTAERVPTTQKPERKSAILSPHDELRERLLETAIDMKENIPQRNTRNSSVGSQKSDCSETRKRRSTKNTVLCPLCMSNTCLPSESHCSSGGIAQWQSIRLQIERSLVQLREGPAAKRHSGEKHRNGSREDSLEYISEYSDDREVGSSSSQSSRTRGQPLPAMPEEEEVFDKSSSSDNLAESEESHEMVRLEERQDIEEEIEDDFDDEEEDVVNDKEEYEEIESEDEDDYPVQNEGFAVTKRLMNDEHMVTAPTFLSTAKCDGIGSPTKVWSLMVKRDEIPRATRFLLGNHPDMDDEKRRILIDWMMEVCESEKLHRETFHLAVDYVDRYLESSNVECSTDNFQLVGTAALFIAAKYEEIYPPKCIDFAHLTDSAFTCDNIRTMEVLIVKYIGWSLGPITSIQWLSTYLQLLGTGKKNKSDHYEEQNMYVPELLRSEYLEMCKILDFLLFEIDSFTFSYRTIAAAVLFVNYEPTCAVEKATGFMQAQLEKVIEYVEPVCRAFAKQRQLLDDVIPKHESIKSDDSHNIQVYVKRSSMEPIVVEKRTREDSAFKSSPSSSATTFLK

SEQ ID NO: 2588 - protein, 521 aa, Caenorhabditis elegans
MAGRKSSRTAERVPTTQKPERKSAILSPHDELRERLLETAIDMKENIPQRNTRNSSVGSQKSDCSETRKRRSTKEGPAAKRHSGEKHRNGSREDSLEYISDDREVGSSSSQSSRTRGQPLPAMPEEEEVFDKSSSSDNLAESEESHEMVRLEERQDIEEEIEDDFDDEEEDVVNDKEEYEEIESEDEDDYPVQNEGFAVTKRLMNDEHMVTAPTFLSTAKCDGIGSPTKVWSLMVKRDEIPRATRFLLGNHPDMDDEKRRILIDWMMEVCESEKLHRETFHLAVDYVDRYLESSNVECSTDNFQLVGTAALFIAAKYEEIYPPKCIDFAHLTDSAFTCDNIRTMEVLIVKYIGWSLGPITSIQWLSTYLQLLGTGKKNKSDHYEEQNMYVPELLRSEYLEMCKILDFLLFEIDSFTFSYRTIAAAVLFVNYEPTCAVEKATGFMQAQLEKVIEYVEPVCRAFAKQRQLLDDVIPKHESIKSDDSHNIQVYVKRSSMEPIVKSERERIQHLKARRLHPQRLF

SEQ ID NO: 2589 - protein, 89 aa, Ascaris lumbricoides
YMSKQSDINAEMRHILIDWLADVVVEYDLQLETLHLTVSLIDRTLSVVDCPRLKLQLIGAAAVMVAAKYEEIYPPPLKEYVYITDDTYS

SEQ ID NO: 2590 - protein, 65 aa, Platynereis dumerilii
MRAILVDWLIEVCEVYRLHRETFYLAVDFVDRYLSQTKNIQKQVLQLIGISALFIAAKYEEIYPP

SEQ ID NO: 2591 - protein, 510 aa, Helobdella triserialis
MEMANKKKRLALEDVSNEYDTQKNIGGNKRAKCPSIVQPSLKLPNKLVKPIKTTTTTTTVAVRPKKREAVILGTKKPAVEKQQSATKRRKSCNVDNLVNPIERLTVNLGYKVDESNVAAGVAVATAAAGVAVATAATRRKATAARKTSTTSTAATKTAASNQQQQQQQHPSTKPFNEPIHAEIDSLISSSSPLADHNNDEGDVEIVCVQSSAQLQDIQEQQQHQQQQHQQQQQQQQAWVDVDVGTSIYYLPNYVNDIFDYYRDREVKFRIPDYMFQQTDLTPSMRAILVDWLVEVQQSFELNHETLYMAVKLIDIFSSKVTIKRNKLQLIGAVALNLACKFEERCPPMLDDFVYVCTCLPPTEFLKMEDLVFQAVGFDIGLPLSYTFLRRFATCVGANLKTLTLSRFLLESSLMDYQFVVCLDSILACACLFIAMCMNQDGSWDDTIYHYTQYRPVDFEEVVYKLNDMICNPPEPSLTTILSKYSHPVFLEVAKIDKLTNEQLRAVVHSL

SEQ ID NO: 2592 - protein, 408 aa, Patella vulgata
MTTVTRSSSANLGASQKLAVKKGDAMMSSKGISNRSNRSALGDIGNKVSNMTIDPTKKALGLPVIKKEIIQKSKFTRSKTTVSESDILLQEKESACCSRAYTIFKDAIEPIVSTVDLMDISEDKPDAFSKVLLTVEDIDANDKDNPQLVSDYVNDIYHYMRHLEETFAVKANFLEGQEVTGKMRSILIDWLCQVHHRFHLLQETLYLTVSIIDRFLQVHPISRNKLQLVGVTSMLLASKYEEMYAPEVADFVYITDNAYTKADIRTMEQTILKTLDFSFGKPLCLHFLRRNSKAGQVDATKHTLAKYLMELTIIEYDMVHCNPSIIAAAALCLSMKVLDDSQWSETLAHYSNYSEKEIYPVMQKLAQLVVKAETSKLTAVKIKYSSSRFMKISSIPELKSNAITDLVL

SEQ ID NO: 2593 - protein, 428 aa, Spisula solidissima
MTTRAASANLANARMMHNMEEAGHMANLKGRPHTSHASQRNTLGDIGNQVSAITISDVPRKDPIIKKEIVHLSSHQHKILTKSKATTSLKSLAEESHIPKKQEAFTFLEPVAAMPKPTTVPTATVLPQPTVPVPMDISENVPESFSRVLLNVQNIDANDKENPQLVSEYVNDIYDYMRDLEGKYPIRHNYLENQEITGKMRAILIDWLCQVHHRFHLLQETLYLTVAIIDRLLQESPVPRNKLQLVGVTSMLIASKYEEMYAPEVADFVYITDNAYTKKEILEMEQHILKKLNFSFGRPLCLHFLRRDSKAGQVDANKHTLAKYLMELTITEYDMVQYLPSKIAAAALCLSMKLLDSTHWTETLTHYSSYCEKDLVSTMQKLASLVIKAENSKLTAVHTKYSSSKFMKISKLAALKSPLVKELAAASV

SEQ ID NO: 2594 - protein, 525 aa, Bombyx mori
MEIQLRRHRSAQIQDQENLYAGVRGKGNGAVPTKRLGLTVRGALGDLNTNVQVQREALGKVAVTTAEFEKKATLNRGVVRSNYSHVTSKVDTGLAVKNVIQPSSRPPLRREESTAGLTARAVTRTRVALKDNQNKPNEIKESINIYIQTKKCQDTKKTKLPMLKENKELRTSKSHLKDGTDSLRKTKLALKDPIESLGKLKLAETYPEKGMGLIDKAKVEKQAEFFETVFDITPPLPEDIEDIDAGDNNSPLLMSMYIKDIYKYLTELEEKYSIEPDHLKKQTVITGKMRATLIDWLVEVQRQFSLVLETFHLTVGIIDRYLQVVPNVQRNQLQLVGVTAMFIASKYEEIYAPDVGDFVYVTDNAYTKSDVFRCERDIMCKLGFCLARPIPLSFLRRFVKAARGTSRNHHLAKYFVDLCLVEYTMAHYRPSELAAAAICLSLHLLSSKTLSEVWTSTLSYYSGYDLDHIDPIIRKIAKIVINIENSKYKAVYNKYLDTTLAKVSSLPQLKSEAIYELAKISSPSP

SEQ ID NO: 2595 - protein, 63 aa, Pfiesteria piscicida
MRGILVDWLVEVHLKYKLKAETLYLTVNLIDRYLEVQQVVHGELQLVGVTAMLIASKYEEIYP

SEQ ID NO: 2596 - protein, 394 aa, Rana dybowskii
MATRRAAISREVDNAVGAMRSKAQLNSRRAALGEIGNKVTVRAVKQPAKTSNATSKTTRPVAKVSNVSVKPKAVAVTVIEAPSQAKEASPVPMDVSMKEEEELCQAFSEVLNHVVDIDAEDGGNPQLCSEYVVDIYNYLREREVQQSIKQRYLDGMEINERMRAILVDWLIQVNSRFQFLQETLYMGIAIMDRFLQVQPISRGKLQLVGVTSLLLASKYEEMYSPEVADFAYITDNAYTTSQIREMEMIILRELKFDLGRPLPLHFLRRASKACSADAEQHTLAKYLMELTLVDYEMVHFHPSEIAAAALCLAQKVLGVGSWGSTQHHYTGYTEEDLTPIIKHIAKNVTKVNQNRTKHVAVRNKYASSKLMKISTHPQLMSLVITELAASLTSQ

SEQ ID NO: 2597 - protein, 399 aa, Rana dybowskii
MSLRITRNMLSNAENNVKSGVVGKIAAKPVLRSRAALGDIGNKAETKMPLKKELKPAVKLVKKVKPAEKVPEPKKVKEEAVCIKPQPVPIEVPSSPSPMETSGCHPDELCQAFSDVLIQVKDVDIDDDGNPMLCSEYVKDIYCYLRSLEEALAVRPHYLQGQEVTGNMRAILVDWLVQVQMKFRLLQETMFMTVGIIDRFLQDNPVPKNQLQLVGVSAMFLAAKYEEMYPPEIGDFTFVTDHTYTKAQIREMEMKILRALNFSMGRPLPLHFLRRASKIGEVTAEQHSLAKYLIELVMVDYEMVHYPPSQIAAAASCLSMKVLNSGDWTPTLQHYTLYAEDSLLPIMQHMAKNVVKVNKGLTKQLTVKNKYGSSKQMKISTIPQLRSEVLASLARAVMP

SEQ ID NO: 2598 - protein, 530 aa, Drosophila melanogaster
MVGTTLKMRGDENASENFKQVQLKKLTVPSMEATTKRAALGDLQNRGISRPIAAKDAAQKDSKDLKLTDALRNAKARVDSHWKKQPLGSTNGNGNGAVPPKVNEGGVSAFLRSNSVRNRVPTKTTVEPTKVTVKSSSSENVNEPTLKREDSNLSKKSLTKLRAALAKPVMGVSGIRREPVAVSRKEAETKKELPETKKDSLEVKKDATRMPLIRGNSAVTTTTSTMPTTMSLSSKRLAGIEDIDANDKENLVLVSEYVNDIYDYLYQVELEQPIHKDHLAGQKEVSHKMRAVLIDWINEVHLQFHLAAETFQLAVAIIDRYLQVVKDTKRTYLQLVGVTALFIATKYEELFPPAIGDFVFITDDTYTARQIRQMELQIFKAINCNLSRPLPIHFLRRYSKAAGAEDEHHTMSKYFIELASVDYEMATYRPSEIAAASLFLSLHLLNGNHRAGTGFNDRHWTPTLTFYSRYSAAHLRPITRLIAKLARDAPQAKLKAIYNKYQGSKFQKIALRTEPTGALMDSIVGQSQRK

SEQ ID NO: 2599 - protein, 500 aa, Drosophila melanogaster
MEATTKRAALGDLQNRGISRPIAAKDAAQKDSKDLKLTDALRNAKARVDSHWKKQPLGSTNGNGNGAVPPKVNEGGVSAFLRSNSVRNRVPTKTTVEPTKVTVKSSSSENVNEPTLKREDSNLSKKSLTKLRAALAKPVMGVSGIRREPVAVSRKEAETKKELPETKKDSLEVKKDATRMPLIRGNSAVTTTTSTMPTTMSLSSKRLAGIEDIDANDKENLVLVSEYVNDIYDYLYQVELEQPIHKDHLAGQKEVSHKMRAVLIDWINEVHLQFHLAAETFQLAVAIIDRYLQVVKDTKRTYLQLVGVTALFIATKYEELFPPAIGDFVFITDDTYTARQIRQMELQIFKAIDCNLSRPLPIHFLRRYSKAAGAEDEHHTMSKYFIELASVDYEMATYRPSEIAAASLFLSLHLLNGNHRAGTGFNDRHWTPTLTFYSRYSAAHLRPITRLIAKLARDAPQAKLKAIYNKYQGSKFQKIALRTELTGALMDSIVGQSQRK

SEQ ID NO: 2600 - protein, 530 aa, Drosophila melanogaster
MVGTTLKMRGDENASENFKQVQLKKLTVPSMEATTKRAALGDLQNRGISRPIAAKDAAQKDSKDLKLTDALRNAKARVDSHWKKQPLGSTNGNGNGAVPPKVNEGGVSAFLRSNSVRNRVPTKTTVEPTKVTVKSSSSENVNEPTLKREDSNLSKKSLTKLRAALAKPVMGVSGIRREPVAVSRKEAETKKELPETKKDSLEVKKDATRMPLIRGNSAVTTTTSTMPTTMSLSSKRLAGIEDIDANDKENLVLVSEYVNDIYDYLYQVELEQPIHKDHLAGQKEVSHKMRAVLIDWINEVHLQFHLAAETFQLAVAIIDRYLQVVKDTKRTYLQLVGVTALFIATKYEELFPPAIGDFVFITDDTYTARQIRQMELQIFKAIDCNLSRPLPIHFLRRYSKAAGAEDEHHTMSKYFIELASVDYEMATYRPSEIAAASLFLSLHLLNGNHRAGTGFNDRHWTPTLTFYSRYSAAHLRPITRLIAKLARDAPQAKLKAIYNKYQGSKFQKIALRTELTGALMDSIVGQSQRK

SEQ ID NO: 2601 - protein, 524 aa, Drosophila melanogaster
MAALEKNASENFKQVQLKKLTVPSMEATTKRAALGDLQNRGISRPIAAKDAAQKDSKDLKLTDALRNAKARVDSHWKKQPLGSTNGNGNGAVPPKVNEGGVSAFLRSNSVRNRVPTKTTVEPTKVTVKSSSSENVNEPTLKREDSNLSKKSLTKLRAALAKPVMGVSGIRREPVAVSRKEAETKKELPETKKDSLEVKKDATRMPLIRGNSAVTTTTSTMPTTMSLSSKRLAGIEDIDANDKENLVLVSEYVNDIYDYLYQVELEQPIHKDHLAGQKEVSHKMRAVLIDWINEVHLQFHLAAETFQLAVAIIDRYLQVVKDTKRTYLQLVGVTALFIATKYEELFPPAIGDFVFITDDTYTARQIRQMELQIFKAIDCNLSRPLPIHFLRRYSKAAGAEDEHHTMSKYFIELASVDYEMATYRPSEIAAASLFLSLHLLNGNHRAGTGFNDRHWTPTLTFYSRYSAAHLRPITRLIAKLARDAPQAKLKAIYNKYQGSKFQKIALRTELTGALMDSIVGQSQRK

SEQ ID NO: 2602 - protein, 530 aa, Drosophila melanogaster
MVGTTLKMRGDENASENFKQVQLKKLTVPSMEATTKRAALGDLQNRGISRPIAAKDAAQKDSKDLKLTDALRNAKARVDSHWKKQPLGSTNGNGNGAVPPKVNEGGVSAFLRSNSVRNRVPTKTTVEPTKVTVKSSSSENVNEPTLKREDSNLSKKSLTKLGAALAKPVMGVSGIRREPVAVSRKEAETKKELPETKKDSLEVKKDATRMPLIRGNSAVTTTTSTMPTTMSLSSKRLAGIEDIDANDKENLVLVSEYVNDIYDYLYQVELEQPIHKDHLAGQKEVSHKMRAVLIDWINEVHLQFHLAAETFQLAVAIIDRYLQVVKDTKRTYLQLVGVTALFIATKYEELFPPAIGDFVFITDDTYTARQIRQMELQIFKAIDCNLSRPLPIHFLRRYSKAAGAEDEHHTMSKYFIELASVDYEMATYRPSEIAAASLFLSLHLLNGNHRAGTGFNDRHWTPTLTFYSRYSAAHLRPITRLIAKLARDAPQAKLKAIYNKYQGSKFQKIALRTELTGALMDSIVGQSQRK

SEQ ID NO: 2603 - protein, 491 aa, Drosophila melanogaster
MASFQIHQDMSNKENPGIKIPAGVKNTKQPLAVIGGKAEKNALAPRANFAVLNGNNNVPRPAGKVQVFRDVRNLNVDENVEYGAKKSNVVPVVEQFKTFSVYEDNNDTQVAPSGKSLASLVDKENHDVKFGAGQKELVDYDLDSTPMSVTDVQSPMSVDRSILGVIQSSDISVGTETGASPTGRVKELPPRNDRQRFLEVVQYQMDILEYFRESEKKHRPKPLYMRRQKDISHNMRSILIDWLVEVSEEYKLDTETLYLSVFYLDRFLSQMAVVRSKLQLVGTAAMYIAAKYEEIYPPEVGEFVFLTDDSYTKAQVLRMEQVILKILSFDLCTPTAYVFINTYAVLCDMPEKLKYMTLYISELSLMEGETYLQYLPSLMSSASVALARHILGMEMWTPRLEEITTYKLEDLKTVVLHLCHTHKTAKELNTQAMREKYNRDTYKKVAMMESVEMSKDDFDQLCEAYNCKQKEDEHQQPDINTKSNVNLFYKF

SEQ ID NO: 2604 - protein, 491 aa, Drosophila melanogaster
MASFQIHQDMSNKENPGIKIPAGVKNTKQPLAVIGGKAEKNALAPRANFAVLNGNNNVPRPAGKVQVFRDVRNLNVDENVEYGAKKSNVVPVVEQFKTFSVYEDNNDTQVAPSGKSLASLVDKENHDVKFGAGQKELVDYDLDSTPISVTDVQSPMSVDRSILGVIQSSDISVGTETGASPTGRVKELPPRNDRQRFLEMVQYQMDILEYFRESEKKHRPKPLYMRRQKDISHNMRSILIDWLVEVSEEYKLDTETLYLSVFYLDRFLSQMAVVRSKLQLVGTAAMYIAAKYEEIYPPEVGEFVFLTDDSYTKAQVLRMEQVILKILSFDLCTPTAYVFINTYAVLCDMPEKLKYMTLYISELSLMEGETYLQYLPSLMSSASVALARHILGMEMWTPRLEEITTYKLEDLKTVVLHLCHTHKTAKELNTQAMREKYNRDTYKKVAMMESVEMSKDDFDQLCEAYNCKQKEDEQQQPDINTKSNVNLFYKF

SEQ ID NO: 2605 - protein, 491 aa, Drosophila melanogaster
MASFQIHQDMSNKENPGIKIPAGVKNTKQPLAVIGGKAEKNALAPRANFAVLNGNNNVPRPAGKVQVFRDVRNLNVDENVEYGAKKSNVVPVVEQFKTFSVYEDNNDTQVAPSGKSLASLVDKENHDVKFGAGQKELVDYDLDSTPMSVTDVQSPMSVDRSILGVIQSSDISVGTETGVSPTGRVKELPPRNDRQRFLEVVQYQMDILEYFRESEKKHRPKPLYMRRQKDISHNMRSILIDWLVEVSEEYKLDTETLYLSVFYLDRFLSQMAVVRSKLQLVGTAAMYIAAKYEEIYPPEVGEFVFLTDDSYTKAQVLRMEQVILKILSFDLCTPTAYVFINTYAVLCDMPEKLKYMTLYISELSLMEGETYLQYLPSLMSSASVALARHILGMEMWTPRLEEITTYKLEDLKTVVLHLCHTHKTAKELNTQAMREKYNRDTYKKVAMMESVEMSKDDFDQLCEAYNCKQKEDEHQQPDINTKSNVNLFYKF

SEQ ID NO: 2606 - protein, 345 aa, Drosophila melanogaster
MSVTDVQSPMSVDRSILGVIQSSDISVGTETGVSPTGRVKELPPRNDRQRFLEVVQYQMDILEYFRESEKKHRAKPLYMRRQKDISHNMRSILIDWLVEVSEEYKLDTETLYLSVFYLDRFLSQMAVVRSKLQLVGTAAMYIAAKYEEIYPPEVGEFVFLTDDSYTKAQVLRMEQVILKILSFDLCTPTAYVFINTYAVLCDMPEKLKYMTLYISELSLMEGETYLQYLPSLMSSASVALARHILGMEMWTPRLEEITTYKLEDLKTVVLHLCHTHKTAKELNTQAMREKYNRDTYKKVAMMESVEMSKDDFDQLCEAYNCKQKEDEHQQPDINTKSNVNLFYKF

SEQ ID NO: 2607 - protein, 345 aa, Drosophila melanogaster
MSVTDVQSPMSVDRSILGVIQSSDISVGTETGVSPTGRVKELPPRNDRQRFLEVVQYQMDILEYFRESEKKHRPKPLYMRRQKDISHNMRSILIDWLVEVSEEYKLDTETLYLSVFYLDRFLSQMAVVRSKLQLVGTAAMYIAAKYEEIYPPEVGEFVFLTDDSYTKAQVLRMEQVILKILSFDLCTPTAYVFINTYAVLCDMPEKLKYMTLYISELSLMEGETYLQYLPSLMSSASVALARHILGMEMWTPRLEEITTYKLEDLKTVVLHLCHTHKTAKELNTQAMREKYNRDTYKKVAMMESVEMSKDDFDQLCEAYNCKQKEDEHQQPDINTKSNVNLFYKF

SEQ ID NO: 2608 - protein, 575 aa, Drosophila melanogaster
MAPTKATTRAAITSGHHQLQQAVNPILGALGAATRKGLTRRAAATGNIDPNVENMQTRAKRKADHSPIKNDKIKRSALGNLTNNVKIMTLHPAQDEEQSGVGKKPTAQQLQALMDAKKQENLSVNVFGASKMTTRASSKVEDSVENCHKVLDKLEEALARPKPRPKAVPAAKKTVLGEVQLPAMPNPMQIPVLLPPTHNLAAPQVAAVKPVRRISNDFNKTEDSLYMSALEDVSSCDSMRLPGNFEAARRRSAKLQQKTEQQPQPLLLTLPETAPSQVVPIPPVPEEVEDFDRKNWDDPFQVSHYAMDIFNYLKVREAEFPIADYMPRQIHLTTWMRTLLVDWMVEVQETFELNHETLYLAVKIVDLYLCREVINKEKLQLLGAAAFFIACKYDERQPPLIEDFLYICDGAYNHDELVRMERETLRVIKYDLGIPLSYRFLRRYARCAKVPMPTLTLARYILELSLMDYANISFSDSQMASAALFMALRMHGGPGQLDKQTWTSTLIYYTGYQLADFAEIVTALNAGLHRKPRATIKTIRNKYSHKIFHEVAKVPLLTNQELFQGNLDLNESNLS

SEQ ID NO: 2609 - protein, 575 aa, Drosophila melanogaster
MAPTKATTRAAITSGHHQLQQAVNPILGALGAATRKGLTRRAAATGNIDPNVENMQTRAKRKADHSPIKNDKIKRSALGNLTNNVKIMTLHPAQDEEQSGVGKKPTAQQLQALMDAKKQENLSVNVFGASKMTTRASSKVEDSVENCHKVLDKLEEALARPKPRPKAVPAAKKTVLGEVQLPAMPNPMQIPVLLPPTHNLAAPQVAAVKPVRRISNDFNKTEDSLYMSALEDVSSCDSMRLSGNFEAARRRSAKLQQKTEQQPQPLLLTLPETAPSQVVPIPPVPEEVEDFDRKNWDDPFQVSHYAMDIFNYLKVREAEFPIADYMPRQIHLTTWMRTLLVDWMVEVQETFELNHETLYLAVKIVDLYLCREVINKEKLQLLGAAAFFIACKYDERQPPLIEDFLYICDGAYNHDELVRMERETLRVIKYDLGIPLSYRFLRRYARCAKVPMPTLTLARYILELSLMDYANISFSDSQMASAALFMALRMHGGPGQLDKQTWTSTLIYYTGYQLADFAEIVTALNAGLHRKPRATIKTIRNKYSHKIFHEVAKVPLLTNQELFQSNLDLNESNLS

SEQ ID NO: 2610 - protein, 575 aa, Drosophila melanogaster
MAPTKATTRAAITSGHHQLQQAVNPILGALGAATRKGLTRRAAATGNIDPNVENMQTRAKRKADHSPIKNDKIKRSALGNLTNNVKIMTLHPAQDEEQSGVGKKPTAQQLQALMDAKKQENLSVNVFGASKMTTRASSKVEDSVENCHKVLDKLEEALARPKPRPKAVPAAKKTVLGEVQLPAMPNPMQIPVLLPPTHNLAAPQVAAVKPVRRISNDFNKTEDSLYMSALEDVSSCDSMRLSGNFEAARRRSAKLQQKTEQQPQPLLLTLPETAPSQVVPIPPVPEEVEDFDRKNWDDPFQVSHYAMDIFNYLKVREAEFPIADYMPRQIHLTTWMRTLLVDWMVEVQETFELNHETLYLAVKIVDLYLCREVINKEKLQLLGAAAFFIACKYDERQPPLIEDFLYICDGAYNHDELVRMERETLRVIKYDLGIPLSYRFLRRYARCAKVPMPTLTLARYILELSLMDYANISFSDSQMASAALFMALRMHGGPGQLDKQTWTSTLIYYTGYQLADFAEIVTALNAGLHRKPRATIKTIRNKYSHKIFHEVAKVPLLTNQELFQGNLDLNESNLS

SEQ ID NO: 2611 - protein, 601 aa, Drosophila melanogaster
MKLEQKRKFIEMDPELGFEPPSAKRQQRLPALYGSEQGNLSSVASSVYTSPVVSVDGQSTQELLSIRSSPAEDLSEAPHSPLPDSPDSPPSPDRGSKQTPVVVRYAAEQVVTSTVVTQKTEDDDLLDDSCEDYSYDEDDEDDVEEEDDDVEIYSSTISPASSGCSQQQAVNGERTPGLPKHQEQIHHPVSDLMINMRTPMSPAVENGLRQCPLPALAWANAADVWRLMCHRDEQDSRLRSISMLEQHPGLQPRMRAILLDWLIEVCEVYKLHRETFYLAVDYLDRYLHVAHKVQKTHLQLIGITCLFVAAKVEEIYPPKIGEFAYVTDGACTERDILNHEKILLQALDWDISPITITGWLGVYMQLNVNNRTPASFSQIGRQKSAEADDAFIYPQFSGFEFVQTSQLLDLCTLDVGMANYSYSVLAAAAISHTFSREMALRCSGLDWQVIQPCARWMEPFFRVISQKAPYLQLNEQNEQVSNKFGLGLICPNIVTDDSHIIQTHTTTMDMYDEVLMAQDAAHAMRSRIQASPATALPPESLLTPPASSHKPDEYLGDEGDETGARSGISSTTTCCNTAASNKVGKSSSNNSVTSCSSRSNP

SEQ ID NO: 2612 - protein, 410 aa, Drosophila melanogaster
MINMRTPMSPAVENGLRQCPLPALAWANAADVWRLMCHRDEQDSRLRSISMLEQHPGLQPRMRAILLDWLIEVCEVYKLHRETFYLAVDYLDRYLHVAHKVQKTHLQLIGITCLFVAAKVEEIYPPKIGEFAYVTDGACTERDILNHEKILLQALDWDISPITITGWLGVYMQLNVNNRTPASFSQIGRQKSAEADDAFIYPQFSGFEFVQTSQLLDLCTLDVGMANYSYSVLAAAAISHTFSREMALRCSGLDWQVIQPCARWMEPFFRVISQKAPYLQLNEQNEQVSNKFGLGLICPNIVTDDSHIIQTHTTTMDMYDEVLMAQDAAHAMRARIQASPATALRAPESLLTPPASSHKPDEYLGDEGDETGARSGISSTTTCCNTAASNKGGKSSSNNSVTSCSSRSNP

SEQ ID NO: 2613 - protein, 709 aa, Drosophila melanogaster
MGLNAKSVCSTSSTEPNGSIVTTAPSNGEVSSSIVVVVSSSSISSSSDSPIAILPHPDPIPSTSFSSASQRSEEELPGTSAASRTDEMCSCDSQNLAASTAATSNGNKRKRRLSSDSNEDPELGFEPPSAKRQQRLPALYGSEQGNLSSVASSVYTSPVVSVDGQSTQELLSIRSSPAEDLSEAPHSPLPDSPDSPPSPDRGSKQTPVVVRYAAEQVVTSTVVTQKTEDDDLLDDSCEDYSYDEDDEDDVEEEDDDVEIYSSTISPASSGCSQQQAVNGERTPGLPKHQEQIHHPVSDLMINMRTPMSPAVENGLRQCPLPALAWANAADVWRLMCHRDEQDSRLRSISMLEQHPGLQPRMRAILLDWLIEVCEVYKLHRETFYLAVDYLDRYLHVAHKVQKTHLQLIGITCLFVAAKVEEIYPPKIGEFAYVTDGACTERDILNHEKILLQALDWDISPITITGWLGVYMQLNVNNRTPASFSQIGRQKSAEADDAFIYPQFSGFEFVQTSQLLDLCTLDVGMANYSYSVLAAAAISHTFSREMALRCSGLDWQVIQPCARWMEPFFRVISQKAPYLQLNEQNEQVSNKFGLGLICPNIVTDDSHIIQTHTTTMDMYDEVLMAQDAAHAMRARIQASPATALRAPESLLTPPASSHKPDEYLGDEGDETGARSGISSTTTCCNTAASNKGGKSSSNNSVTSCSSRSNP

SEQ ID NO: 2614 - protein, 602 aa, Drosophila melanogaster
MKLEQKRKFIEMDPELGFEPPSAKRQQRLPALYGSEQGNLSSVASSVYTSPVVSVDGQSTQELLSIRSSPAEDLSEAPHSPLPDSPDSPPSPDRGSKQTPVVVRYAAEQVVTSTVVTQKTEDDDLLDDSCEDYSYDEDDEDDVEEEDDDVEIYSSTISPASSGCSQQQAVNGERTPGLPKHQEQIHHPVSDLMINMRTPMSPAVENGLRQCPLPALAWANAADVWRLMCHRDEQDSRLRSISMLEQHPGLQPRMRAILLDWLIEVCEVYKLHRETFYLAVDYLDRYLHVAHKVQKTHLQLIGITCLFVAAKVEEIYPPKIGEFAYVTDGACTERDILNHEKILLQALDWDISPITITGWLGVYMQLNVNNRTPASFSQIGRQKSAEADDAFIYPQFSGFEFVQTSQLLDLCTLDVGMANYSYSVLAAAAISHTFSREMALRCSGLDWQVIQPCARWMEPFFRVISQKAPYLQLNEQNEQVSNKFGLGLICPNIVTDDSHIIQTHTTTMDMYDEVLMAQDAAHAMRARIQASPATALRAPESLLTPPASSHKPDEYLGDEGDETGARSGISSTTTCCNTAASNKGGKSSSNNSVTSCSSRSNP

SEQ ID NO: 2615 - protein, 481 aa, Drosophila melanogaster
MADIMDLLCSEIIVYESDPSLYRLNKRQQQMSSPAIIRDQSSICSSLGDAESDSHPDAQNNAVVCNMKELVYIYASVDSAAKNPEQLEPPPPPPPPPPPPPTATQSIQSYPRYISQEPPTSHCQRLDERLTTTADPPATDNVNTAIGDPTLYSDRCLENFLKVEEKHHKIPDTYFSIQKDITPPMRKIVAEWMMEVCAEENCQEEVVLLALNYMDRFLSSKSVRKTQLQILAAACLLLASKLREPSCRALSVDLLVVYTDNSIYKDDLIKWELYVLSRLGWDLSSVTPLDFLELLMMRLPIGSKNFPDINIGKVRGHAQAFISLAAKEHKFAKFSASTIAASSIAASMNGLKWHLRSGHNLHFLLSLMTDLTSVEQAQVRDCMLHMEDIFKEHSRNLEPFLVNIDPKEMSTLYYKRRFQIHQSQHLSQISIRPLPLPKAPAECVEQHQQQHNFGSAAPHRTHTCKMQAQAQAQNEIQDVTF

SEQ ID NO: 2616 - protein, 481 aa, Drosophila melanogaster
MADIMDLLCSEIIVYDSDPSLYRLNKRQQQMSSPAIIRDQSSICSSLGDAESDSHPDAQNNAVVCNMKELVYIYASVDSAAKNPEQLEPPPPPPPPPPPPPTATQSIQSYPRYISQEPPTSHCQRLDERLTTTADPPATDNVNTAIGDPTLYSDRCLENFLKVEEKHHKIPDTYFSIQKDITPPMRKIVAEWMMEVCAEENCQEEVVLLALNYMDRFLSSKSVRKTQLQILAAACLLLASKLREPSCRALSVDLLVVYTDNSIYKDDLIKWELYVLSRLGWDLSSVTPLDFLELLMMRLPIGSKNFPDINIGKVRGHAQAFISLAAKEHKFAKFSASTIAASSIAASMNGLKWHLRSGHNLHFLLSLMTDLTSVEQAQVRDCMLHMEDIFKEHSRNLEPFLVNIDPKEMSTLYYKRRFQIHQSQHLSQISIRPLPLPKAPAECVEQHQQQHNFGSAAPHRTHTCKMQAQAQAQNEIQDVTF

SEQ ID NO: 2617 - protein, 452 aa, Drosophila melanogaster
QMSSPAIIRDQSSICSSLGDAESDSHPDAQNNAVVCNMKELVYIYASVDSAAKNPEQLEPPPPPPPPPPPPPTATQSIQSYPRYISQEPPTSHCQRLDERLTTTADPPATDNVNTAIGDPTLYSDRCLENFLKVEEKHHKIPDTYFSIQKDITPPMRKIVAEWMMEVCAEENCQEEVVLLALNYMDRFLSSKSVRKTQLQILAAACLLLASKLREPSCRALSVDLLVVYTDNSIYKDDLIKWELYVLSRLGWDLSSVTPLDFLELLMMRLPIGSKNFPDINIGKVRGHAQAFISLAAKEHKFAKFSASTIAASSIAASMNGLKWHLRSGHNLHFFLSLMTDLTSVEQAQVRDCMLHMEDIFKEHSRNLEPFLVNIDPKEMSTLYYKRRFQIHQSQHLSQISIRPLPLPKAPAECVEQHQQQHNFGSAAPHRTHTCKMQAQAQAQNEIQDVTF

SEQ ID NO: 2618 - protein, 388 aa, Marthasterias glacialis
MLNGENVDSRIMGKVATRASSKGVKSTLGTRGALENISNVARNNLQAGAKKELVKAKRGMTKSKATSSLQSVMGLNVEPMEKAKPQSPEPMDMSEINSALEAFSQNLLEGVEDIDKNDFDNPQLCSEFVNDIYQYMRKLEREFKVRTDYMTIQEITERMRSILIDWLVQVHLRFHLLQETLFLTIQILDRYLEVQPVSKNKLQLVGVTSMLIAAKYEEMYPPEIGDFVYITDNAYTKAQIRSMECNILRRLDFSLGKPLCIHFLRRNSKAGGVDGQKHTMAKYLMELTLPEYAFVPYDPSEIAAAALCLSSKILEPDMEWGTTLVHYSAYSEDHLMPIVQKMALVLKNAPTAKFQAVRKKYSSAKFMNVSTISALTSSTVMDLADQMC

SEQ ID NO: 2619 - protein, 383 aa, Marthasterias glacialis
MLNGENVDSRIMGKVATRASSKGVKSTLGTRGALENISNVARNNLQAGAKKELVKAKRGMTESKATSSLQSVMGLNVEPMEKAKPQSPEPMDMSEINSALEAFSQNLLVGVEDIDKNDFDNPQLCSEFVNDIYQYMRKLEREFKVRTDYMTIQEITERMRSILIDWLVQVHLRFHLLQETLFLTIQILDRYLEVQPVSKNKLQLVGVTSMLIAAKYEEMYPPEIGDFVYITDNAYTKAQIRSMECNILRRLDFSLGKPLCIHFLRRNSKAGGVDGQKHTMAKYLMELTLPEYAFVPYDPSEIPAAALCLSSKILEPDMEWGTTLVHYSAYSEDHLMPIVQKMALVLKNAPTAKFQVLEILCGLLLCCLDCLVASYPQLKKKIV

SEQ ID NO: 2620 - protein, 458 aa, Hemicentrotus pulcherrimus
MAFSIGNSNASDIMANMAQGGQQFGKKTKRDDNTSRNGPQACKRAALGTITNVSSTRVQPSRAAKHFRVSGENSFPVFQDENAHSRIPQGKPFGIPSAGAAPAFSIHVDTTSSYVQSSTSTSIKSTDKENEHILLDNALSLPVPQAQRIPLRTFPDVEDNNVSLNEESLTSSEFSPMLLDTSLDAKCISPRTVDIRDLSLGEPEYAEEIYQYLKTAESKHRPKHGYMRKQPDITNSMRCILVDWLVEVSEEYRLHNETLYLAAAFIDRFLSQMSVLRAKLQLVGTASMFVASKYEEIYPPDVKEFVYITDDTYSIKQVLRMEHLILKVLSFDLAAPTINSFLPRFIKAAQANSKTEHLTQYLAELTLQEYDFIKYAPSMIAASAVCLANHTLNNEEWTPTMAHYTDYQLGDIYPCVQDLHQLFIKAPTMEQQAVREKYKSQKYSGASMTPVPTTLPTQ

SEQ ID NO: 2621 - protein, 424 aa, Hemicentrotus pulcherrimus
MSRRSGRLQSRQDNQPLTECISDENNLPMCTRKRKTREQDTTGVSKAEEVQRRRQQFTIENRWVPISESSSIETSLLVPMQTKEPSTPSEELMDTANWVTFRNLFPAHVSDRASPIPLLHWDDLPEVWTIMTRKEALCPRKHDCLKSHPSLGERMRAILLDWLIEVCEVYRLHRESFYLAADFVDRYLAAKENVPKTKLQLIGITSLFVAAKLEEIYPPKLHEFAYVTDGACTDDQILDQELIMLMTLNWDLTPITVNTWLNAFMQICNAEEIANRKTNFHFPSYSSTEFVQVAQLLDVCTLDIGSMDFDYSILAASALYHVTNEEVTLSVTGLKWDDIAACVQWMSTFAMTIREVGVAQLKNFKNIYAGDAHNIQTHCSSLELLDKSHEKQRLLREASCCSPVQVPGVLTPPQSDKKSKKGVL

SEQ ID NO: 2622 - protein, 415 aa, Lytechinus variegatus
MMAHTARNSNMNTLGFKKLQNLDNENAGARLGAKSMAVQKPAQRAALGNISNTMRTTQVAGKKVVKKDARTKTMVKSKATSSLQSVASLPVPVDKPDICRSPLPQVVDKMEVDSVESAIEAFSQQLIDLQVEDIDKDDSDNPQLCSEYVKEIYLYMRSLEKRMAVPAAYLDREGQLTGRMRHILVDWLVQVHLRFHLLQETLFLTVQLIDRFLVDHTVSKGKLQLVGVTAMFIASKYEEMYPPEINDFVYITDQAYTKSQIRQMEIVMLKGLGYNLGKPLCLHFLRRNSKAAMVDPQKHTLAKFLMEITLPEYNMVQYDPSEIAAAALYMSMRLLGSEEDGWGAKMTHYSMYNEDHIRPIVRKMAQAVIRNDAMTEKYHAVKTKYRSSRFMNISTLPELESDLIKSLAEDGEERM

SEQ ID NO: 2623 - protein, 457 aa, Strongylocentrotus purpuratus
MAFSIGNPNASDIMANMAQGGQQFGRKTKRDDITSRNGPQACKRAALGTITNVSSTRVQPSRAAKQFRVSGENSFPVFQDENAHSRIPQGKPFGIPSAGAAPAFSIHVDTTSYVQSSTSTSIKSTDKENEHILLDTALSLPIPQAQRIPLRTFPDVEDNNVSLNEESLTSSEFSPMLLDTSLDAKCISPRTVDIRDLSLGEPEYAEEIYQYLKTAESKHRPKHGYMRKQPDITNSMRCILVDWLVEVSEEYRLHNETLYLAAAFIDRFLSQMSVLRAKLQLVGTASMFVASKYEEIYPPDVKEFVYITDDTYSIKQVLRMEHLILKVLSFDLAAPTINSFLPRFIKAAKANSKTEHLTQYLAELTLQEYDFIKYAPSMIAASAVCLANHTLNNEEWTPTMAHYTDYQLGDIYPCVQDLHQLFIKAPTMEQQAVREKYKSQKYSGASMTPVPTTLPTQ

SEQ ID NO: 2624 - protein, 386 aa, Danio rerio
MEMHALRNASNPIYVGAKGGPVSGAVRRPVFGELSNLSHKPVQTKKVVPMQSVKPTGRSAVVHPKSAQVQHEAPKPAATVPPAQADVSMKEEELCQAFSNSLFPVDDIDEGDADMPQLCSEYVKDIYSYLRRLEGQQSVRPRYMEGYDINGRMRALLVDWLIQVHSRFQLLQETLYMTVAILDRFLQVQPVTRRKLQLVGVTAMLIACKYEEMYVPMVGDFAYIADDAFTKAQIREMEMLMLSGLNFKLGRPLPLHFLRRASKAGNADAEKHTLAKYFLELTLLDYDMVHYNPSETAAAALCLSQLVLDGQKWSSTQQHYSTYDEAHLKPIMQLIAKNVVMVNEGLSKHLTVRKKYASSRLMKISLLPQLKSSLVKDLAAPLMPSS

SEQ ID NO: 2625 - protein, 398 aa, Danio rerio
MMALRVTRNTRLASSENQNALPGKAVVANKPGLRPRAALGEIGNNPQTRQALKKKEVKVAPAAEVVVEKAPVVQQPKKDSPKVQHGVKVVSEPSSPVPMETSGCASDDLCQAFSDVLLNIKDVDADDYDNPMLCSEYVKDIYLYLRQLETEQAVRPKYLAGKEVTGNMRAILIDWLVQVQIKFRLLQETMYMTVAIIDRFLQDHPVPKKQLQLVGVTAMFIASKYEEMYPPEIADFAFVTDRAYTTSQIREMEMKVLRVLNFGFGRPLPLQFLRRASKIGDVTAEHHTLAKYFLELTMVDYDMVHYPPSQMASAAYALTLKVFNCGDWTPTLQHYMGYTEDELVPVMQHIAKNVVRVNEGLSKHLAVKNKYSSQKQMRIATISQLKSSLIKDLAKQIS

SEQ ID NO: 2626 - protein, 397 aa, Danio rerio
MALRVTRNTRLASSENQNALPGKAVVANKPGLRPRAALGEIGNNPQTRQALKKKEVKVAPAAEVVVEKAPVVQQPKKDSPKVQHGVKVVSEPSSPVPMETSGCASDDLCQAFSDVLLNIKDVDADDYDNPMLCSEYVKDIYLYLRQLETEQAVRPKYLAGKEVTGNMRAILIDWLVQVQIKFRLLQETMYMTVAIIDRFLQDHPVPKKQLQLVGVTAMFIASKYEEMYPPEIADFAFVTDRAYTTSQIREMEMKVLRVLNFGFGRPLPLQFLRRASKIGDVTAEHHTLAKYFLELTMVDYDMVHYPPSQMASAAYALTLKVFNCGDWTPTLQHYMGYTEDELVPVMQHIAKNVVRVNEGLSKHLAVKNKYSSQKQMRIATISQLKSSLIKDLAKQIS

SEQ ID NO: 2627 - protein, 397 aa, Carassius auratus
MALRVSRNTRLASSENQSALPGKAAVANKPGLRPRAALGEIGNNPQTRQALRKKEVKVAPKVEVVAEKAPVVQQPKKESPKVQHDVPIVSEPSSPVPMETSGCASDDLCQAFSDVLLDIKDVDADDYDNPMLCSEYVKDIYLYLHQLEITQAVKPKYLEGKEITGNMRAILIDWLVQVQIKFRLLQETMYMTVAVIDRFLQDHPVPKKQLQLVGVTAMFIASKYEEMYPPEIADFAFVTDRAYTTGQIRDMEMKILRVLDFSFGKPLPLQFLRRASKIGDVTAEHHTLAKYFLELTMVDYDMVHFPPSQVASAAYALTLKVFNCGDWTPTLQHYMGYTEDSLVPVMQHIARNVVRVNEGLSKHLAVKNKYSSQKQMRIASISQLKSSLIKDLAKQIS

SEQ ID NO: 2628 - protein, 397 aa, Carassius auratus
MALRVTRNTRLASSENQGALPGKAAVANKPGLRPRAALGEIGNNPQTRQALRKKEVKVAPKVEAVAEKAPVVQQPKKESPKVQHDVQILSEPSSPVPMETSGCASDDLCQAFSDVMLNIKDVDADDYDNPMLCSEYVKDIYLYLRQLEIEQAVRPKYLEGSEVTGNMRAILIDWLVQVQIKFKLLQETMYMTVAVIDRFLQDHPVPKKQLQLVGVTAMFIASKYEEMYPPEIADFAFVTDRAYTTGQIRDMEMKILRVLDFSFGKPLPLQFLRRASKIGDVTAEHHTLAKYFLELTMVDYDMVHFPPSQVASARYALTLKVFNCGDWTPTLQHYMGYTEDSLVPVMQHIARNVVRVNEGLSKHLAVKNKYSSQKQMRIASISQLKSSLIKDLAKQIS

SEQ ID NO: 2629 - protein, 63 aa, Cryptoperidiniopsoid sp. brodyi
MRGILADWLVEVHLKFKLVPETLYLTVNIIDRFLQIHKVSRPKLQLVGVTSLLIASKYEEIYP

SEQ ID NO: 2630 - protein, 245 aa, Oncorhynchus mykiss
DIDQAVKPNYLAGQEITGNMRAILIDWLVQVQIKFRLLQETMFMTVGIIDRFLQDNPVPKKQLQLVGVTAMFIASKYEEMYPPEIVDFAFVTDQAYTTAQIRDMEMKILRVLKFSFGCPLPLQFLRRASKIGEVTAEHHTLAKYFVELTMVDYEMVHFPPSQVASAAFALTLKVFNCGEWSSTLQHYMNYTEDSLVHAMQHIAKNVLKVNEGQTKHMTVKNKYSSQKQMRIATISQLKSSLIKDL

SEQ ID NO: 2631 - protein, 359 aa, Oryzias latipes
MSSVEIVAQQLLAAEHPRRMGKGAAADPRRAALGELTNLNAAAATNGTGAAASAPVLAKPSVKEEQELCQAFSEVLLAVQDVDEQDADQPQLCSQYVKDIYKYLHILEEQQPVRANYMQGYEVTERMRALLVDWLVQVHSRFQLLQETLYLTVAILDRFLQVHPVSRRKLQLVGVTAMLVACKYEEMYAPEVGDFAYITDNAFTKSQIVEMEQVILRSLSFQLGRPLPLHFLRRATKVAGADVEKHTLAKYLMELTLLDYHMVHYRPSEVAAAALCLSQLLLDGLPWSLTQQQYSTYEEQHLKPIMQHMAKNVVLVNEGRTKFLAVKKKYSSSKLMKISLIPQLNSSTVKTMADALHDP

SEQ ID NO: 2632 - protein, 387 aa, Oryzias latipes
MSSVEIVAQQLLAAEHPRRMGKGAAADPRRAALGELTNLNAAAATNGKVGPAKKPLKASCAQKPKLTQLVASMIQTGAAASAPVLAKPSVKEEQELCQAFSEVLLAVQDVDEQDADQPQLCSQYVKDIYKYLHILEEQQPVRANYMQGYEVTERMRALLVDWLVQVHSRFQLLQETLYLTVAILDRFLQVHPVSRRKLQLVGVTAMLVACKYEEMYAPEVGDFAYITDNAFTKSQIVEMEQVILRSLSFQLGRPLPLHFLRRATKVAGADVEKHTLAKYLMELTLLDYHMVHYRPSEVAAAALCLSQLLLDGLPWSLTQQQYSTYEEQHLKPIMQHMAKNVVLVNEGRTKFLAVKKKYSSSKLMKISLIPQLNSSTVKTMADALHDH

SEQ ID NO: 2633 - protein, 404 aa, Oryzias latipes
MALRVTRNRLASTRAELGGKTCSVAGPTQKPRAALGEIGNVAVINKDVTKKTIKTEVAKKTKIPAKAEKIELPKAAVVPVKPAPEVQVTEVPDQAEPASPTPMETSGCESADLCQAFSDVILNTAIRDVDADDYDNPMLCSEYVKDIYKYLRQLEMEQSVKPNYLEGQEITGNMRAILIDWLVQVGLKFRLLQETMYMTVGIIDRFLQDHPVPKKQLQLVGVTAMFLASKYEEMYPPEISDFAYVTDRAYTTAQIRDMEMTILRVLKFQLGRPLPLQFLRRASKIYEVTAEQHTLAKYLLELSMVDYDMAHFSPSLVASAALALTLKVLDAGEWDVTLQHYMEYTAETLTPVMAHIAKNVVKVNNGQTKHMAIKGKYSTSKQMRIATISQLKSSVVKDLATQIS

SEQ ID NO: 2634 - protein, 306 aa, Oryzias latipes
MALRVTRNRLASTRAELGGKTCSVAGPTQKPRAALGEIGNVAVINKDVTKKTIKTEVAKKTKIPAKAEKIELPKAAVVPVKPAPEVQVTEVPDQAEPASPTPMETSGCESADLCQAFSDVILNTAIRDVDADDYDNPMLCSEYVKDIYKYLRQLEMEHSVKPNYLEGQEITGNMRAILIDWLVQVGLKFRLLQETMYMTVGIIDRFLQDHPVPKKQLQLVGVTAMFLASKYEEMYPPEISDFAYVTDRAYTTAQIRDMEMTILRVLKFQLGRPLPLQFLRRASKIYEVWRGVGAANCSLPPLHVLR

SEQ ID NO: 2635 - protein, 249 aa, Cynops pyrrhogaster
LIEVKDVDAGDAENPMLCSAYVKDIYNYLRNLEEEQSVRPRYLDGQEVTGNMRAILVDWPVQVQMKFRLLQETMFMTVGIIDRFLQANPVPKKMLQLVGVTAMFVACKYEEMYPPEIGDFAFVTDHTYTKAQIREMEMKILRVLDFGLGRPLPLHFLRRASKIGEVSSEQHTLAKYLMELVMVDYDMVHFPPSQVAAAAFCLALKVLDGGEWTPTLEHYMCYSEGSLTPVMQHMAKNILKVNRGLTKHL

SEQ ID NO: 2636 - protein, 390 aa, Xenopus laevis
MATWAAMRTGQMDNAVVGGVVAAKVKVHGHRPPLEEISNRTAILGRKPAAMNCKVPVKVVRQVTSRANLPLRVKQAFGPKSEEPPPIPMDVADNEEVLCQAFSEALNSVEDIDAEDSSNPQLCADYVKDIYSYLRQLEVQQAVRPRHLQGMEINDRMRAILVDWLIQVHLKFQLLQETLYMAIAIMDRFLQGQPISRSKLQLVGVTSLFIASKYEEMYYPEISDFVYITDNTYSKTQIREMEMMILKEINFDLGRPLPLNFLRRASKCCSADAGQHTLAKYFMELTLLDYDMVHFHPSAIAAAALCLTQKVLNMGTWDAALQFYTGYSQDDLSLPMKHMAKNIVQVNQNLSKFLSVKNKYSSSKLLKISTIPQLNSRVLTGLAAAVTPGS

SEQ ID NO: 2637 - protein, 392 aa, Xenopus laevis
MATRRAAIPREADNILGGAMRSKVQMNSRRAALGEIGNKVTVRGKPPAVKQSSNAVAKPSKMAATKVANVKTKHVPVKPVVAEAAPKVPSPVPMDVSLKEEELCQAFSDALTSVEDIDADDGGNPQLCSDYVMDIYNYLKQLEVQQSVHPCYLEGKEINERMRAILVDWLVQVHSRFQLLQETLYMGVAIMDRFLQVQPVSRSKLQLVGVTSLLIASKYEEMYTPEVADFVYITDNAYTASQIREMEMIILRLLNFDLGRPLPLHFLRRASKSCSADAEQHTLAKYLMELTLIDYEMVHIKPSEIAAAALCLSQKILGQGTWGTTQHYYTGYTEGDLQLIMKHMAKNITKVNQNLTKHVAVRNKYASSKLMKISTLPQLMAPLITELAASLS

SEQ ID NO: 2638 - protein, 393 aa, Xenopus laevis
MALIMTRSMRLNAENVAQGMAGKKAAVSKPVPKPRNALGDIGNQIGKAKVPLKKTTKALRKPTVQKSEKLAVLEENVPKEAEKAAPDSPSPMETSVCVIEEMQPEPAFSSALIPVTDVDAEDSDNPMLCSDYVKDIYCYLRNLEAEQAIGPHYLDGQEINGNMRAILVDWLVQVQLRFKLLQETMSMTVSILDRFLQENPVPKKLLQLAGVSAMFIACKYEEIYCPSIGDFVFVTDNTYTKSQIRNMEMQILRVLNFDIGRPLPLHFLRRASKIGEVDSVHHTLAKYLIELVMTDYDMVHIPPSQLAAAAFCLAMKILNSGEWTPTLEHYMAYKESSLTPVMQHIAKNIVKVNGGHTKFMSVKNKYTSSRQMKISCLPHLKSELVENLAKAAS

SEQ ID NO: 2639 - protein, 397 aa, Xenopus laevis
MSLRITRNMMANTENNVKTTLAGKRVVATKPGLRPRTALGDIGNKAELKVPAKKELKPAVKAVKKTKPIDKVLEPLKVSEENVCPKPTPVEPSSPSPMETSGCLPDELCQAFSDVLIQVKDVDADDDGNPMLCSEYVKDIYGYLRSLEDAQAVRPNYLHGREVTGNMRAILIDWLVQVQMKFRLLQETMFMTVGIIDRFLQEHPVPKNQLQLVGVTAMFLAAKYEEMYPPEIGDFTFVTDHTYTKAQIRDMEMKILRVLKFAIGRPLPLHFLRRASKIGEVTAEQHSLAKYLMELVMVDYDMVHYAPSQIAASASRLSLKILNAGDWTPTLHHYMAYSEEDLVPVMQHMAKNIIKVNKGLTKHLTVKNKYASSKQMKISMIPQLKSDVVVAMARPLV

SEQ ID NO: 2640 - protein, 416 aa, Xenopus laevis
MMPSLRPSRPVASKLPKLGKPVTAENNRLDKVEISQTKRSPSSPQGGAKKRAAFGDITNAHKNPQLIQKKKEGQKVAIKKTKSAPTSDITKNNELNIKKTQKKATVTEEHLPEVKEEKINTEQKTSVPTKEIPEEKVLPPGVEDIDQDSLDDPFSNSEYATDIFSYMRDREEKFLLPNYLEMQTDISKDMRAILVDWMVEVQENFELNHETLYLAVKMVDHYLAVSVVMKEKLQLIGSTAVLIASKFEERCPPCVDDFMYICDDAYKRDEVIAMEMEILQKLYFDINIPVPYRFLRRFAKCAHATMETLTLARYICELTLQEYDFVQERASKMAASCLLLALQMKGLGRWTATLHYYSGYQTNDLLPLVKRLNFLLTYPPNKKLKAVRSKYSHRVFFEVAKLPPMDMLTLTEALQS

SEQ ID NO: 2641 - protein, 182 aa, Silurana tropicalis
MSAILVDWLIQVHLKFQLLQETLYMAIAIMDRFLQGQPISRSKLQLVGVTSLFIASKYEEMYYPEISDFVYITDNTYSKAQIREMEMMILKELNFDLGRPLPLNFLRRASKCCSADAGQHTLAKYFMELTLLDYDMVHFHPSAIAAAALCLTQKVLNIGTWDATLQFYTGYSQDDLILPMKH

SEQ ID NO: 2642 - protein, 166 aa, Silurana tropicalis
MRAILVDWIVQVHSRFQLLQETLYMGIAIMDRFLQVQPVSRSKLQLVGVTSLLVASKYEEMYTPEVADFVYITDNAYTASQIREMEMIILRVLNFDLGRPLPLHFLRRASKSCSADAEQHTLAKYLMELTLIDYEMVHFNPSEIAAAALCLSQKILAQGSWGATQH

SEQ ID NO: 2643 - protein, 166 aa, Silurana tropicalis
MRAILVDWLVQVHLRFKLLQETMSMTIAILDRFLQENPVPKKLLQLAGVSAMFIACKYEEIYCPTIGDFAFVTDHTYTKSQIRNMEMQILRVLKFDIGRPLPLHFLRRASKIGEVDSVHHTLAKYLIELVMTDYDMVHVPPSQLAAAAFCLAMKILNSGEWTPVLE

SEQ ID NO: 2644 - protein, 172 aa, Silurana tropicalis
MRAILVDWLVQVQMKFRLLQETMFMTVGIIDRFLQDHPVPKNQLQLVGVTAMFLAAKYEEMYPPEIGDFTFVTDHTYTKAQIRDMEMKVLRVLKFAIGRPLPLHFLRRASKIGEVTAEQHSLAKYLMELVMVDYDMVHYSPSQIAAAASCLSLKILNTGEWTPTMHHYMAYS

SEQ ID NO: 2645 - protein, 249 aa, Bufo japonicus
LLDIKDVDADDYDNPMLCSEYVKDIYLYLHQLEITQAVKPKYLEGKEITGNMRAILIDWLVQVQIKFRLLQETMYMTVAIIDRFLQDHPVPKKQLQLVGVTAMFIASKYEEMYPPEIADFAFVTDRAYTTGQIREMEMKIRRVLDFSFGRPLPLQFLRRASKIGDVTAEHHTLAKYFLELTMVDYEMVHFPPSQVRSAAYALTLKVFNCGDWTPTLQHYMGYTEDALVPVMQHIAKNVVRLNEGLSKHL

SEQ ID NO: 2646 - protein, 392 aa, Rana japonica
MATRRAAIAREVDNAVGAMRSKAQLNGRRAALGEIGNKVTVRAVKQPAKNSNTTSKTTRPVAKVSNVSVKPKAVTVTEAPSQVKEASPVPMDVSMKEEEELCQAFSEVLNHVVDIDAEDGGNPQLCSEYVVDIYNYLREREVQQSIKQRYLDGMEINERMRAILVDWLIQVNSRFQFLQETLYMGIAIMDRFLQVQPISRGKLQLVGVTSLLLASKYEEMYSPEVADFAYITDNAYTTSQIREMEMIILRELKFDLGRPLPLHFLRRASKACSADAEQHTLAKYLMELTLVDYEMVHFHPSEIAAAALCLAQKVLGVGSWGSTQHHYTGYTEEDLTPIIKHIAKNVTKVNQNRTKHVAVRNKYASSKLMKISTHPQLMSLVITELAASLTSQ

SEQ ID NO: 2647 - protein, 369 aa, Rana japonica
MQTTKWRLRPAKKVGLLKPQHRNALGDIGNNLNRAKAALKKGSKALRTDVEKVAKPAPVEEEKPVPLSPMDTSGSSPMEAESEAFSDALLQVKDVDEDDADNPMLCSDYVKDIYCYLRDLEAERAVRPDYLKGQEITGNMRAILVDWLVQVHLRFKLLQETMFMTVSILDRFLQVNPVPKKSLQLAGVSAMFIASKYEEIYCPTIGDFSFVTDHTFTKSQIRNMEMQILTILNFDIGKPLPLHFLRRASKIGEVDAVLHTLAKYLIELSMVDYEMVHFPPSQVAAAAFCLSQKVLDGGEWTPTLQHYMGYSESSLIPSMRHLAKNVLKVNGGLTKFMSVRDKYAKSQQMRISCLPQLNSDFMVKLAKNV

SEQ ID NO: 2648 - protein, 399 aa, Gallus gallus
MALTRRAAVMRGVENAVTGHNTKAKVQVTGKRAVLEEIGNKVARGSNVPKKTDCIKPPVKATKGPGKMTNTVVPPKPPAAVNQAVKDTTTASKVLSPVPMDVSMQEEDLCQAFSDVLLHNIEDIDADDSGNPQLCSDYVKDIYLYLRQLELQQSVRPHYLDGKTINGRMRAILVDWLVQVHSRFQLLQETLYMCVAVMDRFLQSHPVPRKRLQLVGVTALLLASKYEEMYSPDIADFVYITDNAYNSAEVREMEITILKELNFDLGRPLPLHFLRRASKAGEADAEQHTLAKYLMELTLIDYDMVHYHPSEIAAAALCLSQKVLGHDKWGTKQQYYTGYAEDSLAMTMKHMAKNVVKVNENLTKYTAVRNKYASSKLLRISTISQLNSKTIKDLAASLL

SEQ ID NO: 2649 - protein, 403 aa, Gallus gallus
MPVARSSKAQSSKQPRASKAPSVTENVPPEKEEGCQAKRSPSSPQGGPKKRSAFGDITNAHKNQVVTGKKEGVKAPTRKATRAPPAPIVAKNNEINLKKSLRKTPPADVPVEPEKDSVPEEPVQQVPVVEDIDKEQLGDPYANAEYAKEIFDYMREREEKFLLPDYMEKQSDISRDMRAILVDWMVEVQENFELNHETLYLAVKLVDHYLVEVVSMRDKLQLIGSTAVLIASKFEERCPPCVDDFLYICDDAYKREELIAMETSILRTLNFDINIPIPYRFLRRFAKCARASMETLTLARFVCEMTLQEYDYARERPSKLAASSLLLALTMKNLGGWTPTLEYYSGYCAQDLHPLVKRLNFLLTYQPCDKLKAVRTKYSHRVFFEVAKTTPMDMMKLEEKLKS

SEQ ID NO: 2650 - protein, 60 aa, Sterkiella histriomuscorum
MRAILVDWLIEVHLKFRLQRETLYITVKIIDLYLEKQMVTKSRLQLVGVTSLLIASKYEE

SEQ ID NO: 2651 - protein, 398 aa, Homo sapiens
MALLRRPTVSSDLENIDTGVNSKVKSHVTIRRTVLEEIGNRVTTRAAQVAKKAQNTKVPVQPTKTTNVNKQLKPTASVKPVQMEKLAPKGPSPTPEDVSMKEENLCQAFSDALLCKIEDIDNEDWENPQLCSDYVKDIYQYLRQLEVLQSINPHFLDGRDINGRMRAILVDWLVQVHSKFRLLQETLYMCVGIMDRFLQVQPVSRKKLQLVGITALLLASKYEEMFSPNIEDFVYITDNAYTSSQIREMETLILKELKFELGRPLPLHFLRRASKAGEVDVEQHTLAKYLMELTLIDYDMVHYHPSKVAAAASCLSQKVLGQGKWNLKQQYYTGYTENEVLEVMQHMAKNVVKVNENLTKFIAIKNKYASSKLLKISMIPQLNSKAVKDLASPLIGRS

SEQ ID NO: 2652 - protein, 246 aa, Mustela vison
HEDIHTYLREMEVKCKPKVGYMKKEPDITNSMRAILVDWLVEVGEEYKLQNETLHLAVNYIDRFLSSMSVLRGKLQLVGTAAMLLASKFEEIYPPEVAEFVYVTDDTYTKKQVLRMEHLVLKVLAFDLAAPTVNQFLTQYFLHHDSANCKVESLAMFLGELSLIDADPYLKYLPSVIAAAAFHLALYTVTGQSWPESLVQKTGYTLESLKPCLMDLHQTYLRAPQHAQHAIRENIKVQSIMVIAVS

SEQ ID NO: 2653 - protein, 170 aa, Sus scrofa
GCAPAEEYLCQAFSDVILAVNDVDAEDGGDPNLCSEYVKDIYDYLRQLEEEQAVRPKYLLGREVTGNMRAILIDWLVQVQMKFRLLQETMYMTVSIIDRFMQDNCVPKKMLQLVGVTAMFIASKYEEMYPPEIGDFAFVTDNTYTKYQIRQMEMKILRALNFCLGRPLPL

SEQ ID NO: 2654 - protein, 398 aa, Bos taurus
MALLRRPTVSTDLENNDTGVNSKPKSHVTIRRAVLEEIGNRVTTRAIQVAKKAQNTKVPVPPTKTTNVNKHPKPTASVKPVQMDVLAPKGPSPTPQDISMKEENLCQAFSDALLCKIEDIDTEDWENPQLCSDYVKDIYQYLRQLEVLQSINPHFLDGRDINGRMRAILVDWLVQVHSKFKLLQETLYMCVAVMDRYLQVQPVSRKKLQAVGITALVLASKYEEMFSPNIEDFVYITDNAYTSSQIREMETLILKELKFELGRPLPLHFLRRASKAGEVDVEQHTLAKYLMELTLVDYDMVHYHPSKVAAAASCLSQKVLGQGKWNLKQQYYTGYTESEVLEVMRHMAKNVVRVNENMTKFTAIKNKYASSKLLKISTIPQLNSKAIQELASPLLGRS

SEQ ID NO: 2655 - protein, 282 aa, Mus musculus
MAGNFWQSSHYLQWILDKQDLLKERQKDLKFLSEEEYWKLQIFFTNVIQALGEHLKLRQQVIATATVYFKRFYARYSLKSIDPVLMAPTCVFLASKVEEFGVVSNTRLIAATTSVLKTRFSYAFPKEFPYRMNHILECEFYLLELMDCCLIVYHPYRPLLQYVQDMGQEDVLLPLAWRIVNDTYRTDLCLLYPPFMIALACLHVACVVQQKDARQWFAELSVDMEKILEIIRVILKLYEQWKNFDERKEMATILSKMPKPKPPPNRSSLSDSPLMAGPEAAR

SEQ ID NO: 2656 - protein, 283 aa, Mus musculus
MAGNFWQSSHYLQWILDKQDLLKERQKDLKFLSEEEYWKLQIFFTNVIQALGEHLKLRQQVIATATVYFKRFDARYSLKSIDPVLMAPTCVFLASKVEEFGVVSNTRLIAATTSVLKTRFSYAFPKEFPYRMNHILECEFYLLELMDCCLIVYHPYRPLLQYVQDMGQEDVLLPLAWRIVNDTYRTDLCLLYPPFMIALACLHVACVVQQKDARQWFAELSVDMEKILEIIRVILKLYEQWKNFDERKEMATILSKMPKPKPPPNSEGEQGPNGSQNSSYSQS

SEQ ID NO: 2657 - protein, 304 aa, Mus musculus
MVAPRPLCWLVHLYQGKQYYSMAGNFWQSSHYLQWILDKQDLLKERQKDLKFLSEEEYWKLQIFFTNVIQALGEHLKLRQQVIATATVYFKRFDARYSLKSIDPVLMAPTCVFLASKVEEFGVVSNTRLIAATTSVLKTRFSYAFPKEFPYRMNHILECEFYLLELMDCCLIVYHPYRPLLQYVQDMGQEDVLLPLAWRIVNDTYRTDLCLLYPPFMIALACLHVACVVQQKDARQWFAELSVDMEKILEIIRVILKLYEQWKNFDERKEMATILSKMPKPKPPPNSEGEQGPNGSQNSSYSQS

SEQ ID NO: 2658 - protein, 145 aa, Mus musculus
MAGNFWQSSHYLQWILDKQDLLKERQKDLKFLSEEEYWKLQIFFTNVIQALGEHLKLRQQVIATATVYFKRFYARYSLKSIDPVLMAPTCVFLASKVEEFGVVSNTRLIAATTSVCKCKKFSALRIKFKESSEMYRFVLFLMNHV

SEQ ID NO: 2659 - protein, 298 aa, Rattus norvegicus
MVAPRPLCRLVLLYQAKQYSMAGNFWQSSHYLQWILDKERQKDLKFLSEEEYWKLQIFFTNVIQALGEHLKLRQQVIATATVYFKRFYARYSLKSIDPVLMAPTCVFLASKVEEFGVVSNTSLIAATTSVLKTRFSYASPKEFPYRMNHILECEFYLLELMDCCLIVYHPYRPLLQYVQDMGQEDVLLPLAWRIVNDTYRTDLCLLYPPFMIALACLHVACVVQQKDARQWFAELSVDMEKILEIIRVILKLYEQWKNFDERKEMATILSKMPKPKPPPNSEGEQGPNGSQNSSYSQS

SEQ ID NO: 2660 - protein, 197 aa, Rattus norvegicus
MAPTCVFLASKVEEFGVVSNTRLIAATTSVLKTRFSYAFPKEFPYRMNHILECEFYLLELMDCCLIVYHPYRPLLQYVQDMGQEDVLLPLAWRIVNDTYRTDLCLLYPPFMIALACLHVACVVQQKDARQWFAELSVDMEKILEIIRVILKLYEQWKNFDERKEMATILSKMPKPKPPPNRSSLSDSPLMAGPEAAR

SEQ ID NO: 2661 - protein, 724 aa, Tupaia belangeri chinensis
MEGERKNNNKRWYFTREQLENSPSRRFGVDPDKELSYRQQAANLLQDMGQRLNVSQLTINTAIVYMHRFYMIQSFTQFHRTSVAPAALFLAAKVEEQPKKLEHVIKVAHTCLHPQESLPDTRSEAYLQQVQDLVILESIILQTLGFELTIDHPHTHVVKCTQLVRASKDLAQTSYFMATNSLHLTTFSLQYTPPVVACVCIHLACKWSNWEIPVSTDGKHWWEYVDATVTLELLDELTHEFLQILEKTPNRLKRIRNWRACLAARKTKADDRGADENTSEQTILNMISQSSSDTTIAGLMSMSTSSTSAVPSLPVAEESSSNLSSVEMLQGERWLSSQPPFKLEPTQGHRTSENLALIGVDHSLQQDGSNTFISQKQSSKSVPSAKVSLKEYRAKHAEELAAQKRQLENMEANVKSQYAYAAQNLLSHHDSHSSVILKMPMEGSENPERNFLEKGDKTALKMRIPVAGGDKAASSKPEEIRMRIKVHTAADKHNSVEDSVTKSREHKEKHKTHPSNHHHHNHHSHKHSHSQLPAGTGNKRPGDPKHSSQTSTVAHKTYSLSSSFSSSSSTRKRPPPEETGGAVFDHPAKIAKSTKSSINFPFPPLPTMAQLPGHSSDTSGLPFSQPSCKTRVPHGKLDKGPTGANGHNTTQTIDYQDTVNMLHSLLSAQGVQPTQPPAFEFVHSYGEYLNPRAGGISSRSGNTDKPRPPPLPSEPPPPLPPLPK

SEQ ID NO: 2662 - protein, 279 aa, Anopheles gambiae str. PEST
IFCYSVQLQHSTKMAGNFWQSSHHQQWILDKQDLIRERQHDLKTLSEEEYQKLFMFFANIIQVLGEQLKLRQQVIATATVYFKRFYARNSLKCIDPLLLAPTCILLSSKVEEFGVISNSRLITTCQTVIKNKFSYAYQQEFPYRTNHILECEFYLLENLDCCLIVYQPYRPLLQLMQDIGQEEQLLTLTWRLINDSLRTDVSLLYPPYQIAIGCLQIACVILQKELKSWFAELNVDMDKVQEIARAIVNLFELWKGYDEKKEIQALLEKMPKPKPHPQR

SEQ ID NO: 2663 - protein, 253 aa, Arabidopsis thaliana
MASNFWTSTHYKELKDPEEVNVVHPLDAQRGISVEDFRLIKLHMSNYISKLAQHIKIRQRVVATAVTYMRRVYTRKSLTEYEPRLVAPTCLYLACKAEESVVHAKLLVFYMKKLYADEKFRYEIKDILEMEMKVLEALNFYLVVFHPYRSLPEFLQDSGINDTSMTHLTWGLVNDTYRMDLILIHPPFLITLACIYIASVHKEKDIKTWFEELSVDMNIVKNIAMEILDFYENHRLFTEERVHAAFNKLATNP

SEQ ID NO: 2664 - protein, 259 aa, Arabidopsis thaliana
MAANFWNSSHYKQLLDPEEVDVVHDLDKERGISIDDFKLIKFHMSNHIMKLAQHIKVRQRVVATAITYMRRVYIRKSMVEFEPRLVALTCLYLASKAEESIVQARNLVFYIKRLCNIFFFYPDEYNKYELKDILGMEMKVLEALDYYLVVFHPYRSLSEFLQDAALNDVNMNQITWGIVNDTYKMDLILVHPPYRIALACIYIASVHREKDITAWFEDLHEDMNLVKNIAMEILDFYENYRTITEEKVNSAFSKLALKL

SEQ ID NO: 2665 - protein, 253 aa, Glycine max
MAANFWTSSHYKHLLDQEDVDVVNTLDKEKGITLEDFKLIKMHMANYILKLAQQVKVRQRVVATAVTYMRRVYTRKSMAEYDPRLVAPTCLYLASKAEESTVQARLLVFYIKKLYSDDKYRYEIKDILEMEMKILEALNYYLVVYHPYRSLSPLLQDAGLNDLNMTQLTWGLVNDTYKMDLILVHPPHLIALACIYIASVLREKDTTAWFEELRVDMNVVKNISMEILDFYESNRMFTDERINAALQKLSLRP

SEQ ID NO: 2666 - protein, 164 aa, Glycine max
  unsure (1)..(164): unsure at all Xaa locations
XTAITYFRRVYTRKSMSEYDPRLVAPACLYLASKVEESTVQARLLVFYIKKMCAGSDDKYRFEIKDILEMEMKLLEALDYYLVVYHPYRPLLHLLQDAGVTDLTQFAWGLXVNDTYKMDLILVQPPYMIALACIYIASVLKDKDTTSWFEELHVDXNIVKXXSM

SEQ ID NO: 2667 - protein, 126 aa, Glycine max
  unsure (1)..(126): unsure at all Xaa locations
ARLLVXYIXRLYSDDKYRYEIKDILEMXMXVXXLXXXYXVVYHXYRSLSPLLQDAGLNDLNMTQLTWGLXDXTYKMDLILVHPPXIDCLACIYIASVLREXDTXXWLKTXXXVEXXKXAWSMIXXX

SEQ ID NO: 2668 - protein, 101 aa, Glycine max
  unsure (1)..(101): unsure at all Xaa locations
XYASDSXIIDDDSLFLTWGLVNDTYKMDLILVHPPHLIALACIYIASVLREKDTTAWVEELRVDMNVVKNISMEILDFYESNRMFTDERINAALQKLSLRP

SEQ ID NO: 2669 - protein, 72 aa, Glycine max
MAANFWTSSHYKHLLDQEDVDMVNPLDKEKGITLEDFKLIKMHMANYILKLAQQVKVRQRVVATAITYMRRV

SEQ ID NO: 2670 - protein, 258 aa, Triticum aestivum
  unsure (1)..(258): unsure at all Xaa locations
MAANFWASSHSKQLLDPEDVDLVPAADRERGITTEEFRLVKIHMSSHIWRLAQQVKVRQRVIATAITYFRRVYTRKSMSEYDPRLVAPACLYLASKVEESTVQARLLVFYIKKMCGSDDKYRFEIKDILEMEMKLLEALDYYXLVVYHPYRPLLHLLQDAGVTDLTQFAWGLVNDTYKMDLILVQPPYMIALACIYIASVLKDKDTTSWFEELHVDMNIVKNISMEMLDFYETYKVDPQRGLSDEKISPIMNKLPAKA

SEQ ID NO: 2671 - protein, 200 aa, Triticum aestivum
  unsure (1)..(200): unsure at all Xaa locations
MAANFWTSSHCKQLLDPEDVDLVPAADRERGITPEEFRLIKIHMSFHIWRLAQQVKVRQRVIATAVTYFRRVYTRKSMSDYDPRLVAPTCLYLASKVEESTVQARLLVFYIKKMCGSDDKYRFEIKDILEMEMKLLEALDYYLVVFHPYRPLLQLLQDAGITDLTQFAWGLVNDTYKMDLILIYPPYMIALACIYIASVX

SEQ ID NO: 2672 - protein, 134 aa, Triticum aestivum
  unsure (1)..(134): unsure at all Xaa locations
MAANFWTSSHSKQLLDPEEVDVVPAQDRERGVTPVEFRLVKIHMSFHIWRLAQQVKVRQRVIATAITYFRCVYTRKSMTEYDPRLVAPACLYLASKVEESTVQAXLLVFYIKKMCGSDDKYRFEIKDILEMEMK

SEQ ID NO: 2673 - protein, 101 aa, Triticum aestivum
  unsure (1)..(101): unsure at all Xaa locations
XAGITDLTQFAXWGLVNDTYKMDLILIYPPYMIALACIYIASVXKDKDXTSWFEELRVDMNIVKNXSMEXLDFYDTYKIDPQRGLQEDKIIPVMNKLPSKA

SEQ ID NO: 2674 - protein, 95 aa, Triticum aestivum
  unsure (1)..(95): unsure at all Xaa locations
MAANFWTSSHSKQLLDPEEVDVVPAADRERGVTPVEFRLVKIHMSFHIWRLAQQVKVRQRVIATAITYFRRVYTRKSMTEYDPRLVAPACLYLAX

SEQ ID NO: 2675 - protein, 253 aa, Triticum aestivum
  unsure (1)..(253): unsure at all Xaa locations
MSASYWQSTQCRFWTFTKEQLATMRQKLEEDNAELVRMFPLPQQRHLNIYFNQQLIRLAKRLTIRQQSMATAQVYMKRFYSKVEIRRTNPYLVIATAIYLACKIEESPQHIRLIVTEARQMWGDLVAIDTSKLGECEFFMISEMRSQLIVYQPYRTVVALRSELGLQEDEVQLARSVINDHFMTDLPLLYPPHVIAMVAMLXLALVLRPNNSGPGQNPSGAAAAAGLAAAQXALMRAQGQQTFRGRATDAATX

SEQ ID NO: 2676 - protein, 72 aa, Triticum aestivum
  unsure (1)..(72): unsure at all Xaa locations
MAANFWTSWHSKHLLDPEEVYVVPAQDRERCVTPVEFRLVKIHMFFHIWRVGPQVKXVRQRVXLTVFTYLEX

SEQ ID NO: 2677 - protein, 257 aa, Zea mays
MAANFWTSSHCKQLLDPEDVDLVPAADRERGITPEEFRLIKIHMSFHIWRLAQQVKVRQRVVATAIAYFRRVYTRKSMSDYDPRLVAPTCLYLASKVEESTVQARLLVFYIKKMCGSDDKYRFEIKDILEMEMKLLEALDYYLVVFHPYRPLLQLLQDAGITDLTQFAWGLVNDTYKMDLILIYPPYMIALACIYIASVLKDKDTTAWFEELRVDMNIVKNISMEILDFYDTYKIDPQRGIPEDKISPVMNKLPAKA

SEQ ID NO: 2678 - protein, 257 aa, Zea mays
MAANFWTSSHSKQLLDPEEVDVVPAQDRERGVTPVEFRLVKIHMSFHIWRLAQQVKVRQRVIATAITYFRCVYTRKSMTEYDPRLVAPACLYLASKVEESTVQARLLVFYIKKMCGSDDKYRFEIKDILEMEMKLLEALDYYLVLLHPARPPPRVRQDAGITDLTQFAWGLVNDTYKMDLILIYPPYMIALACIYIASVLKDKDTTAWFEELRVDMNIVKNISMEILDFYDTYKIDPQRGIPEDKISPVMNKLPAKA

SEQ ID NO: 2679 - protein, 258 aa, Zea mays
  unsure (1)..(258): unsure at all Xaa locations
PVDPAFLSSHCKQLRGGGGGDLVPAGGRERGITPEEFRLIKIHMSFHIWGLAQLVXVRLRVVATAMAXAFRRVYTRKSMSDYGPRLVAPTGVYLASKVEESTVQARLLVFYIKKMCGSDDKYRFEIKDILEMEMKLLEALDYYLVLPHPARPPPRVRQDAGITDLTQFAWGLVNDTYKMDLILIYPPYMIALACIYIASVLKDKDTTAWFEELRVDMNIVKNISMEILDFYDTYKIDPQRGIPEDKISPVMNKLPAKA

SEQ ID NO: 2680 - protein, 237 aa, Zea mays
  unsure (1)..(237): unsure at all Xaa locations
PIPPAGLLSGKRRSRXWRPTSGRRRTDIWRLAQQVKVRQRVIATAITYFRCVYTRKSMTEYDPRLVAPACLYLASKVEESTVQARLLVFYIKKMCGSDDKYRFEIKDILEMEMKLLEALDYYLVVYHPYRPLLQLLQDAGITDLTQFAWGLVNDTYKMDLILIYPPYMIALACIYIASVLKDKDTTSWFEELRVDMNIVKNISMEILDFYDTYKIDPQRGIPEDKISPVMNKLPAKA

SEQ ID NO: 2681 - protein, 153 aa, Zea mays
  unsure (1)..(153): unsure at all Xaa locations
HACYILSLACLPRCDLCDLKLLLFQRTRERVVATAIAYFRRVYTRKSMSDYDPRLVAPTCLYLASKXSDDKYRFEIKDILEMEMKLLEALDYYLVVFHPYRPLLQLLQDAGITDLTQFAWGLVNDTYKMDLILIYPPYMIALACIYIAXVLKD

SEQ ID NO: 2682 - protein, 208 aa, Dreissena polymorpha
SSHYQQWLLDKQDLARERQADLKVMSEDEYEKCMIFFANFIQALGEQSKVRQQVIATATVYFKRFYARNSLKCIDPWLMAPTCIFLASKVEEFGLISNSRLITTCQTVVKNKFSHAYPQEYPYRSNNVLECEFYLLEMMDCCLVVFHPYRPLVQYVSDISSTDDSILPLAWRIVNDSLRTDVCLLYPPYLIALSALHIACVIQQKDLK

SEQ ID NO: 2683 - protein, 228 aa, Schizosaccharomyces pombe
MAANYWASSQLTQLFLSTDLESLEPTCLSKDTIYQWKVVQTFGDRLRLRQRVLATAIVLLRRYMLKKNEEKGFSLEALVATCIYLSCKVEECPVHIRTICNEANDLWSLKVKLSRSNISEIEFEIISVLDAFLIVHHPYTSLEQAFHDGIINQKQLEFAWSIVNDSYASSLCLMAHPHQLAYAALLISCCNDENTIPKLLDLIKSTDAFKVILCVQRIISIYYFEDIE

SEQ ID NO: 2684 - protein, 323 aa, Saccharomyces cerevisiae
MSGSFWTSTQRHHWQYTKASLAKERQKLWLLECQLFPQGLNIVMDSKQNGIEQSITKNIPITHRDLHYDKDYNLRIYCYFLIMKLGRRLNIRQYALATAHIYLSRFLIKASVREINLYMLVTTCVYLACKVEECPQYIRTLVSEARTLWPEFIPPDPTKVTEFEFYLLEELESYLIVHHPYQSLKQIVQVLKQPPFQITLSSDDLQNCWSLINDSYINDVHLLYPPHIIAVACLFITISIHGKPTKGSSLASAASEAIRDPKNSSSPVQIAFNRFMAESLVDLEEVMDTIQEQITLYDHWDKYHEQWIKFLLHTLYLRPASAI

SEQ ID NO: 2685 - protein, 355 aa, Neurospora crassa
MAANYWESTQRKHWLFTKDELAAMRAKLEAEEPNLVASFPLPQLRHLNIYFNQQSPTYFCFTLEINRLGKRMGLRQQALATAQVYIKRFYTKVEIRRTNPHHVLVTALYLACKMEECPQHIRLMANEARGFWPTDFQSQTEVARIGECEFYLISEMSSHLIVHSPYRTLTSLQGELGLAQEDVNLAWSVINDHYMTDLPLLHPPHVIALTAILLALVLRQDPSGRLPGTAASASGLVAASAALAQAQAQAQARAAMMAGGGQTVPGLTPQSSSGLQAMLPPQSPAGEGPAEGNKNPRMAKVHRFAAWLSDSNIDIEAMVDCTQELISFYECHEQYNDKNTREQINRFVKARGLDK

SEQ ID NO: 2686 - protein, 327 aa, Caenorhabditis elegans
MALNFWKSSHCQQWIFDKTEIWKQRAEDMKIYNEEEYNRLNIFWANFITAVATEGAHSQANVGCKLRQQVIATAIIYFKRFYLRQSFRDMCPFLVASTALFLACKVEEHTTLSVSSFLKNTAIVLPKRWGVTFETTSTKNGVVYDSEFILVEILDCCLVVHHASRPMCPPPPPREIFDKNWNSGIFLIFFLNFLVKKMENCGIFSEKLENFEFFNLEAIEAQCQKVANDSLRCDVSLIFPPHVIGLSSIMVAMELMGRGEELEAWLVEVDTDFEKVTDCVEQIYKMYTLWKSFDEKEEVKKLMAKLPKPNQQPPPQQQHQHQQGYHL

SEQ ID NO: 2687 - protein, 267 aa, Drosophila melanogaster
MAGNFWQSSHSQQWILDKPDLLRERQHDLLALNEDEYQKVFIFFANVIQVLGEQLKLRQQVIATATVYFKRFYARNSLKNIDPLLLAPTCILLASKVEEFGVISNSRLISICQSAIKTKFSYAYAQEFPYRTNHILECEFYLLENLDCCLIVYQPYRPLLQLVQDMGQEDQLLTLSWRIVNDSLRTDVCLLYPPYQIAIACLQIACVILQKDATKQWFAELNVDLDKVQEIVRAIVNLYELWKDWKEKDEIQMLLSKIPKPKPPPQR

SEQ ID NO: 2688 - protein, 498 aa, Danio rerio
MSLGMLSPHLNTPPPNNQGILIGDKVYSEVFLAIDNSIIPEDRLSTTPSMLDGLDHETETDLRILGCERIQSAGILLRLPQVAMATGQVIFQRFFFSKSFVKHNFEIVAMACVNLASKIEESPRRVRDVINVFHHLKQGKGKKSTPLILDQNYINTKNQVIKAERRILKELGFCVHVKHPHKIIVMYLQVLECEKNQMLVQTAWNYMNDALRTSAFVRFEPETIACACIYLAARVLQIPLPSKPHWFLLFGATKEDIKEICINTMKLYSREKPHSEQLERQVEKRKIFLEEARLKARGQNPNGTPALASINGFSPASKPSSPRDVKMDDKSPNSKLKEPENRQLFAKSPLNGSIKKEDGKVFQNGKNHSRSRSRSTSRSPHRHRRSHSGTYSSHSSHSPSPRQKARRPSPISQLRTDRDRPSETSRHSNKRRRSRSRSRSNSRERVRDRDHIKHKQERSGSGHHWDHRDRERDRSRDHGRNKRQSRSHSGHSHSRHRR

SEQ ID NO: 2689 - protein, 630 aa, Danio rerio
MAACRGSSSKWFFTREQLETTPSRRCGVEPDRELSYRQQAANLIQDMGQRLNVSQLTINTAIVYMHRFYMYHSFTKFHRNIISPTTLFLAAKVEEQPRKLEHVIKVAHACLNPQEPPLDTKSNAYLQQAQELVILETIVLQTLGFEITIEHPHTDVVKCSQLVRASKDLAQTSYFMATNSLHLTTFCLQHKPTVIACVCIHLACKWSNWEIPVSTDGKHWWEYVDNSVTLELLDELTHEFLQILEKTPSRLKRIRNWRATQAAKKPKSDNQGSDSSSLAGSSLTQDPSLMDTLPGVSTSTAFSKGSTSFPVCLSGNSSSSLSLDSIANMQGTSYTYTAPSDWPQDQLRSDPYSVKQLPSHSSMHPQRPDKSADLNPTKHEHKVSGGTKHQATTYPPHAAPTQKMSLDKYREKHAAELAVQKRKQEQQNVETEVYGATTQTDHRKHLPHLSHGQQGAGVTTASPLKIKLPGQDKIQDKCEKGSSLKLRLPVPSQSEKGGSSKEELKMKIKVSSERHSSSDEGAAKSKHSSPLVSKEKHRDHSAHRHHHKHGHSHTHTHSGNGRSSLEVPTTGSVADGPSSASSSSRKRVNPEASHNHHSKKNKSSKSGAGGLRTSQHPSETGQETSGESWP

SEQ ID NO: 2690 - protein, 569 aa, Danio rerio
MMAAVQRGSSKWLFTREQFENTPSRRCGVEPDRELSYRQQAANLIQDMGQRLNVSQLTINTAIVYMHRFYMLNSFTKFHRNIISPTTLFLAAKVEEQPRKLEHVIKVAHACLNPHDPPLDSKSSAYLQQAQELVLLETIVLQTLGFEITIEHPHTDVVRCTQLVRASKDLAQTSYFMATNSLHLTTFCLQHKPTVVACVCIHLACKWSNWEIPVSSDGKHWWEYVDRAVTLQLLDDLTHEFLQILEKTPSRLKRIRNWRATQAAKKPKLDNQSLDGSFQSLNQDTSLMSSMCDLGAGMYSDPSTSFPLDGSSLSLNGLSNLQSSAFGFPAPISQTADAFLALQAAPTSKHGHSSATLAPQKLTLEKYREKQTELEQRRRHEEEDGDQHRKHGHLTSEPSTSIRLKYNQQQVLERPSKSGSLKRRHPSSSENGSASQEELKMKIKVSSDSSGSSKSRHSPLSSREKHREHSSHKTARHDSSHSHGSHHHHHHHHHHSSKSHRSSKSHSSSASISVNQAIGQPQLAKIDRRMGEGHGSEPNAALINNGPHMDYEDTFNMLDSLLNAQNFQI

SEQ ID NO: 2691 - protein, 679 aa, Danio rerio
LSFSVMAASFPSPSQNNNKWYFTREQIENSPSRRAGLDPDKELLYRQQAANLLQDMGQRLNVSQLTINTAIVYMHRFYMVQSFTRFHRNVIAPAALFLAAKVEEQPRKLEHVIKVTHACLNPQDPSPDTRSDTYLQQAQDLVILESIILQTLGFEITIDHPHTHVVKCTQLVRASKDLAQTSYFMATNSLHLTTFCLQYSPPIVACVCIHLACKWSNWEIPVSTDGKHWWQYVDPTVTLELLDELTHEFLQILEKTPSRLKRTRNWKAAGQTAKKSKVQDGDQSEAIMNMISMSSSDSTLAGLTSLSAPPTGSSMDSCADEHSAAASAQHWQPPSKEQPTANELHAPAKVSLSEYRAKHADELAAQKRELKNMEASVKQGYATAAQALMNQQRKDKHHHHQQTSSSDTNNPSPIVLKIPLDERSERSSIKMRLPVPGQSGGGHSHSSGSSSRGSDQDIKVRIRVPDRRGGSGEDGKSREKHRERSNHHHHHHHHHHHSSSSSAGSLSASSSSSSAQKHSAGSSGSSKKLSGDSVRTSSSSMSRKRTHMPDPSSSSTHSSSKVSKSSRNSFQLPTLPGLPSHVMPDILPSLHHQGNYSHSKTDKADTNGHNAAGQSNEYQDTFDMLNSLLSAQGVQPAQPQIFDYRSQYGEFRYSSGARGGAQPPPLPSEPPPPLPPLPK

SEQ ID NO: 2692 - protein, 105 aa, Gallus gallus
MAGNFWQSSHYLQWILDKQDLLKERQKDLKFLSEEEYWKLQIFFTNVIQALGEHLKLRQQVIATATVYFKRFYARYSLKSIDPVLMAPTCVFLASKVEDKTSAPY

SEQ ID NO: 2693 - protein, 94 aa, Gallus gallus
LQWILDKQDLLKERQKDLKFLSEEEYWKLQIFFTNVIQALGEHLKLRQQVIATATVYFKRFYARYSLKSIDPVLMAPTCVFLASKVEDKTSAPY

SEQ ID NO: 2694 - protein, 725 aa, Pan troglodytes
MEGERKNNKRWYFTREQLENSPSRRFGVDPDKELSYRQQAANLLQDMGQRLNVSQLTINTAIVYMHRFYMIQSFTQFPGNSVAPAALFLAAKVEEQPKKLEHVIKVAHTCLHPQESLPDTRSEAYLQQVQDLVILESIILQTLGFELTIDHPHTHVVKCTQLVRASKDLAQTSYFMATNSLHLTTFSLQYTPPVVACVCIHLACKWSNWEIPVSTDGKHWWEYVDATVTLELLDELTHEFLQILEKTPNRLKRIWNWRACEAAKKTKADDRGTDEKTSEQTILNMISQSSSDTTIAGLMSMSTSTTSAVPSLPVSEESSSNLTSVEMLPGKRWLSSQPSFKLEPTQGHRTSENLALTGVDHSLPQDGSNAFISQKQNSKSVPSAKVSLKEYRAKHAEELAAQKRQLENMEANVKSQYAYAAQNLLSHHDSHSSVILKMPIEGSENPERPFLEKADKTALKMRIPVAGGDKAASSKPEEIKMRIKVHAAADKHNSVEDSVTKSREHKEKHKTHPSNHHHHHNHHSHKHSHSQLPVGTGNKRPGDPKHSSQTSNLAHKTYSLSSSFSSSSSTRKRGPSEETGGAVFDHPAKIAKSTKSSSLNFSFPSLPTMAQMPGHSSDTSGLSFSQPSCKTRVPHSKLDKGPTGANGHNTTQTIDYQDTVNMLHSLLSAQGVQPTQPTAFEFVRPYSDYLNPRAGGISSRSGNTDKPRPPPLPSEPPPPLPPLPK

SEQ ID NO: 2695 - protein, 283 aa, Homo sapiens
MAGNFWQSSHYLQWILDKQDLLKERQKDLKFLSEEEYWKLQIFFTNVIQALGEHLKLRQQVIATATVYFKRFYARYSLKSIDPVLMAPTCVFLASKVEEFGVVSNTRLIAAATSVLKTRFSYAFPKEFPYRMNHILECEFYLLELMDCCLIVYHPYRPLLQYVQDMGQEDMLLPLAWRIVNDTYRTDLCLLYPPFMIALACLHVACVVQQKDARQWFAELSVDMEKILEIIRVILKLYEQWKNFDERKEMATILSKMPKPKPPPNSEGEQGPNGSQNSSYSQS

SEQ ID NO: 2696 - protein, 303 aa, Homo sapiens
MVAPRPLRRVVLFYQGKLCSMAGNFWQSSHYLQWILDKQDLLKERQKDLKFLSEEEYWKLQIFFTNVIQALGEHLKLRQQVIATATVYFKRFYARYSLKSIDPVLMAPTCVFLASKVEEFGVVSNTRLIAAATSVLKTRFSYAFPKEFPYRMNHILECEFYLLELMDCCLIVYHPYRPLLQYVQDMGQEDMLLPLAWRIVNDTYRTDLCLLYPPFMIALACLHVACVVQQKDARQWFAELSVDMEKILEIIRVILKLYEQWKNFDERKEMATILSKMPKPKPPPNSEGEQGPNGSQNSSYSQS

SEQ ID NO: 2697 - protein, 727 aa, Equus caballus
MEGERKNNNKRWYFTREQLENSPSRRFGLDPDKELSYRQQAANLLQDMGQRLNVSQLTINTAIVYMHRFYMIQSFTQFHRNSVAPAALFLAAKVEEQPKKLEHVIKVAHACLHPQESLPDTRSEAYLQQVQDLVILESIILQTLGFELTIDHPHTHVVKCTQLVRASKDLAQTSYFMATNSLHLTTFSLQYTPPVVACVCIHLACKWSNWEIPVSTDGKHWWEYVDATVTLELLDELTHEFLQILEKTPNRLKRIRNWRACQAAKKTKADDRGTDENTSEQTILNMISQSSSDTTIAGLMSMSTSSTTSTVPSLPTTEESSSNLSGVEMLQGERWLSSQPPFKLEPAQGHRTSENLALIGVDHSLQQDGSNAFISQKQNSSKSVPSAKVSLKEYRAKHAEELAAQKRQLENMEANVKSQYAYAAQNLLSHHDSHSSVILKMPIEGSENPERPFLEKPDKTALKMRIPVASGDKAASSKPEEIKMRIKVHAAPDKHNSIDDSVTKSREHKEKHKTHPSNHHHHHNHHSHKHSHSQLPAGTGNKRPGDPKHSSQTSTLAHKTYSLSSSFSSSSSSRKRGPPEETGGALFDHPAKIAKSTKSSSINFFPPLPTMAQLPGHSSDTSGLPFSQPSCKTRVPHMKLDKGPTGANGHNTTQTIDYQDTVNMLHSLLHAQGVQPTQPPALEFVHSYGEYLNPRAGGMPSRSGNTDKPRLPPLPSEPPPPLPPLPK

SEQ ID NO: 2698 - protein, 727 aa, Equus caballus
MEGERKNNNKRWYFTREQLENSPSRRFGLDPDKELSYRQQAANLLQDMGQRLNVSQLTINTAIVYMHRFYMIQSFTQFHRNSVAPAALFLAAKVEGQPKKLEHVIKVAHACLHPQESLPDTRSEAYLQQVQDLVILESIILQTLGFELTIDHPHTHVVKCTQLVRASKDLAQTSYFMATNSLHLTTFSLQYTPPVVACVCIHLACKWSNWEIPVSTDGKHWWEYVDATVTLELLDELTHEFLQILEKTPNRLKRIWNWRACEAAKKTKADDRGTDEKTSEQTILNMISQSSSDTTIAGLMSMSTSSTTSTVPSLPTTEESSSNLSGVEMLQGERWLSSQPPFKLEPAQGHRTSENLALTGVDHSLQQDGSNAFISQKQNSSKSVPSAKVSLKEYRAKHAEELAAQKRQLENMEANVKSQYAYAAQNLLSHHDSHSSVILKMPIEGSENPERPFLEKPDKTALKMRIPVASGDKAASSKPEEIKMRIKVHAAPDKHNSIDDSVTKSREHKEKHKTHPSNHHHHHNHHSHKHSHSQLPVGTGNKRPGDPKHSSQTSTLAHKTYSLSSSFSSSSSSRKRGPPEETGGALFDHPAKIAKSTKSSSINFFPPLPTMAQLPGHSSDTSGLPFSQPSCKTRVPHMKLDKGPTGANGHNTTQTIDYQDTVNMLHSLLHAQGVQPTQPPTLEFVHPYGEYLNPRAGGIPSRSGNTDKPRPPPLPSEPPPPLPPLPK

SEQ ID NO: 2699 - protein, 726 aa, Capra hircus
MEGERKNNNKRWYFTREQLENSPSRRFGLDPDKELSNRQQAANLLQDMGQRLNVSQLTINTAIVYMHRFYMIQSFTQFHRNSVAPAALFLAAKVEEQPKKLEHVIKVAHTCLHPQESLPDTRSEAYLQQVQDLVILESIILQTLGFELTIDHPHTHVVKCTQLVRASKDLAQTSYFMATNSLHLTTFSLQYTPPVVACVCIHLACKWSNWEIPVSTDGKHWWEYVDATVTLELLDELTHEFLQILEKTPNRLKRIWNWRAWQADRKTKADDRGADENSSEQTILNMISQSSSDTTIAGLMSMSASSATSAVPSLPATEDSKSNLSNEEMLSSERWLPSHPPFKVEPAQGYRKSENLALGADHSLQQDGSNAFVSQKQNSKSVPSAKVSLKEYRAKHAEELAAQKRQLENMEANVKSQYAYAAQNLLSHHDSHSSVILKMPIEGSENPERPFLEKTDKTALKMRIPMTGGDKAASTKPEEIKMRIKVHTAADKHTSVDDSVTKNREHKEKHKTHPSNHHHHHNHHSHKHSHSQLPAGTGNKRLGDPKYSSQTSTLAHKPYSLSGSFSSSSSSRKRPLPEETGGAVYDHSTKTGKSAKSSSIDFSFPPLPTMAQLPGHSSDTSGLHFSQPSCKTRVPHMKLDKSSTGANSHNTPQTTDYQDTVNMLNSLLNAQGVQPTQPPAFEYVHSYGEYMNPRAGGMSSRSGNTDKPRPPPLPSEPPPPLPPLPK

SEQ ID NO: 2700 - protein, 726 aa, Capra hircus
MEGERKNNNKRWYFTREQLENSPSRRFGLDPDKELSNRQQAANLLQDMGQRLNVSQLTINTAIVYMHRFYMIQSFTQFHRNSVAPAALFLAAKVEEQPKKLEHVIKVAHTCLHPQESLPDTRSEAYLQQVQDLVILESIILQTLGFELTIDHPHTHVVKCTQLVRASKDLAQTSYFMATNSLHFTTFSLQYTPPVVACVCIHLACKWSNWEIPVSTDGKHWWEYVDATVTLELLDELTHEFLQILEKTPNRLKRIWNWRAWQADRKTKADDRGADENSSEQTILNMISQSSSDTTIAGLMSMSASSATSAVPSLPATEDSKSNLSNEEMLSSERWLPSHPPFKVEPAQGYRKSENLALGADHSLQQDGSNAFVSQKQNSKSVPSAKVSLKEYRAKHAEELAAQKRQLENMEANVKSQYAYAAQNLLSHHDSHSSVILKMPIEGSENPERPFLEKTDKTALKMRIPMTGGDKAASTKPEEIKMRIKVHTAADKHTSVDDSVTKNREHKEKHKTHPSNHHHHHNHHSHKHSHSQLPAGTGNKRLGDPKYSSQTSTLAHKPYSLSGSFSSSSSSRKRPLPEETGGAVYDHSTKTGKSAKSSSIDFSFPPLPTMAQLPGHSSDTSGLHFSQPSCKTRVPHMKLDKSSTGANSHNTPQTTDYQDTVNMLNSLLNAQGVQPTQPPAFEYVHSYGEYMNPRAGGMSSRSGNTDKPRPPPLPSEPPPPLPPLPK

SEQ ID NO: 2701 - protein, 430 aa, Mus musculus
MALRVTRNTKINAENKAKVSMAGAMRVPVTVTAASKPGLRPRTALGDIGNKVSEELQARVPLKREAKTLGTGKGTVKALPKPVEKVPVCEPEVELAEPEPEPELEHVREEKLSPEPILVDNPSPSPMETSGCAPAEEYLCQAFSDVILAVSDVDADDGADPNLCSEYVKDIYAYLRQLEEEQSVRPKYLQGREVTGNMRAILIDWLIQVQMKFRLLQETMYMTVSIIDRFMQNSCVPKKMLQLVGVTAMFIASKYEEMYPPEIGDFAFVTNNTYTKHQIRQMEMKILRVLNFSLGRPLPLHFLRRASKVGEVDVEQHTLAKYLMELSMLDCDMVHFAPSQIAAGAFCLALKILDNGEWTPTLQHYLSYSEDSLLPVMQHLAKNVVMVNCGLTKHMTVKNKYAASKHAKISTLAQLNCTLVQNLSKAVTKA

SEQ ID NO: 2702 - protein, 386 aa, Mus musculus
MALRVTRNTKINTENKAEVSMAGAKRVPVTVTAASKPGPRPRTALGDIGNKVSEELQARVPLKREAKTLGTGKGTVKALPKPVEKVPVCEPGVELAEPEPEPELEHVREEKLSPEPILVDNPSPSPMETSGCAPAEEYLCQAFSDVILAVSDVDADDGADPNLCSEYVKDIYAYLRQLEEEQSVRPKYLQGREVTGNMRDILIDWLIQVQMKFRLLQETMYMTVSIIDRFMQNSCVPKKMLQLVGVTAMFIASKYEEMYPPEIGDFAFVTNNTYTKHQIRQMEMKILRVLNFSLGRPLPLHFLRRASKVGEVDVEQHTLAKYLMELSMLDYDMVHFVPSQIAAGAFCLALESLDNGEWTQLCSTTYPTRKTPCFLLCSTWLRIESW

SEQ ID NO: 2703 - protein, 430 aa, Mus musculus
MALRVTRNTKINAENKAKVSMAGAKRVPVTVTAASKPGLRPRTALGDIGNKVSEELQATVPLKREAKTLGTGKGTVKALPKPVEKVPVCEPEVELAEPEPEPELEHVREEKLSPEPILVDNPSPSPMETCGCAPAEEYPCQAFSDVILAVSDVDADSGADPNLCSEYVKDIYAYLRQLEEEQSVRPKYLQGREVTGNMRAILIDWLIQVQMKFRLLQETMYMTVSIIDRFMQNSCVPKKMIQLVGVTAMFIASKYEDMYPPEIGDFAFVTNNTYTKHQIRQMEMKILRVLNFSLGRPLPLHFLRRASKVGEVDVRQHTLAKYLMELSMLDYDMVHFAPSRAFSGAFCLALEILDNGEWTPTLQHYLSYSEDSLLPVMQHLAKNVVMVNCGLTKHMTVKNKYAASKHAKISTLAQLNCTHVQNLSKAVTKA

SEQ ID NO: 2704 - protein, 328 aa, Mus musculus
MAGAKRVPVTVTAASKPGLRPRTALGDIGNKVSEELQARVPLKREAKNVRYWKSPMETSGCAPAGEYLCQAFSDVILAVSDIEAEDGADPNLCSEYANDIYAYFRQLEEEQSVRPKYLQGGEVTGNMRAILFDWLIQVQMKFRLLQETMYMTVSMIDRFMQNSCVPKKVLQLVGVTAMFIASKYEEMYPPETGDFAFVINNMYTKHQIRQMEMKILRVLNFSLGRPLPLHFLRRASKIGEVDAEQHTLAKYLMDYDMVHFAPSQIAAGAFCLALESLDNGEWTPTLQHYLSYTEDFLLPVMQHLAKNVVMVNRGLTKHMTVKNQVCSI

SEQ ID NO: 2705 - protein, 192 aa, Glycine max
  unsure (1)..(192): unsure at all Xaa locations
XVSYVGPPPVPVVEDLVLISDRAYTKGQILEMEKLILNTLQFNMSVPTPYVFMKRFLKAADADKQLELASFFMLELCLVEYQMLDYRPSHLAAAAVYTAQCAINRCQHWTKVCESHSRYTSDQLLECSRMMVDFHQKAGTSKLTGVHRKYSTYKFGCVAKILPAQFLLESGGTXASFRCKLVESTYSTGWIF

SEQ ID NO: 2706 - protein, 449 aa, Oryza sativa (japonica cultivar-group)
MATRSQNVAAAPQPPQNRGNVAALGKQKAVVAGRPDAKNRRALGEIGNVMNVRLPEGKPLQQAPAGRTANFGAQLLKNAQANAAANKQNAVAPAAVARPAQRQARKAPVKPAPPPPEHVIEISSDSDQSMRQQSEGSASSVRKCSRKKVINTLTSVLTARSKVACGITDKPREVIEDIDKLDGDNELAVVDYIEDIYKFYKVAENECRPCDYIDTQVEINSKMRAILADWIIEVHHKFELMPETLYLSMYVIDRYLSMQQVQRRELQLVGVSAMLIACKYEEIWAPEVNDFILISDSAYTREQILAMEKGILNKLQWNLTVPTAYVFIMRYLKAGASADNKSDKEMEHMAFFFAELALMQYGLVASLPSKVAASAVYAARLTLKKSPLWTDTLKHHTGFTESQLLDSAKLLVTSHSTAPESKLRVVYKKYSSEQLGGVALRSPAVELCK

SEQ ID NO: 2707 - protein, 443 aa, Zea mays
MAARAADENRRPAAGKPAPGVRDMASRRALTDIKNLVGAAPYPCAVAKKPMLQKSKRDEKQPALASSRPMTRKFAASLASKGQPECQPIVADPAEVCQQKESVGDGTVDIDVELCDSDIDMGATENKDIMNEDELLMDIDSADSGNPLAATEYVKELYTFYRENEAKSCVNPDYMSSQQDINSKMRAILIDWLIEVHYKFELMDETLFLTVNVIDRFLEKEVVPRKKLQLVGITALLLACKYEEVSVPVVEDLVLISDRAYTKGQILEMEKLILNTLQFNMSVPTPYVFMKRFLKAADADKQLELASFFMLELCLVEYQMLNYRPSHLAAAAVYTAQCAINRCQHWTKVCESHSRYTGDQLLECSRMMVDFHQKAGTGKLTGVHRKYSTYKFGCAAKILPAQFMLESGGTGCNLIESPCFNWVGFFFKVFSILPVNKMQKTSC

SEQ ID NO: 2708 - protein, 429 aa, Zea mays
MAARAADENRRPGVGRPAPCVRDMGSRRALTDIKNLVGVAPNPCAVAKKPVLQKSRKDEKKTALPSSRPMTRKFVASLASKEQPKCQPTGADPEPGVDQRKEPIVDGTVDIDVELGEPVDDSDVDMGDETDQDESLMDIDSADSGNPLAATEYVEELYKFYRENEAKSCVNPDYMSSQQDINAKMRAILIDWLIEVHYKFELMDETLFLTVNVIDRFLEKEVVPRKKLQLVGITALLLACKYEEVSVPVVEDLVLISDRAYTKGQILEMEKLILNTLQFNMSVPTPYVFMKRFLKAADADKQFELVSFFMLELCLVEYQMLNYRPSHLAAAAVYTAQCAINRCQQWTKVCESHSRYTGDQLLECSRMMVDFHQKAGTGKLTGVHRKYSTYKFGCAAKILPAQFMLESGGTGCNLIESPCFNWVGFFLRF

SEQ ID NO: 2709 - protein, 424 aa, Zea mays
MAARAADENRRPAAGKPAPGVRDMASRRALTDIKNLVGAAPYPYAVAKKPMLQKSKRDEKQPALASSRPMTRKFAASLASKGQPECQPIVADPEPEVCQQKESVGDGTVDIDVELYELVDGSDSDIDMGATENKDIMNEDELLMDIDSADSGNPLAATEYVKELYTFYRENEAKSCVRPDYMSSQQDINSKMRAILIDWLIEVHYKFELMDETLFLMVNIIDRFLEKEVVPRKKLQLVGVTAMLLACKYEEVSVPVVEDLVLISDRAYTKGQILEMEKLILNTLQFNMSVPTPYVFMKRFLKAADADKQLELASFFMLELCLVEYQMLNYRPSHLAAAAVYTAQCAINRCQHWTKVCESHSRYTSDQLLECSRMMVDFHQKAGTSKLTGVHRKYSTYKFGCVAKILPAQFLLESGGTPPPSGAN

SEQ ID NO: 2710 - protein, 421 aa, Zea mays
  unsure (1)..(421): unsure at all Xaa locations
MAARAADENRRPGVGRPAPCVRDMGSRRALTDIKNLVGVAPNPCAVAKKPVLQKSRRDEKKTALPSSRPMTRKFVASLASKEQPECQPTRADQRKEAIGDGTVDIDVELDEPVEDSDSDIDMGDETENNMNQDESLMDIDSADSGNPLAATEYVEELYKFYRENEAKSCVNPDYMSSQQDINSKMRAILIDWLIEVHYKFELMDETLFLTVNVIDRFLEKEVVPRKKLQLVGXATALLLXACXYHEVSVPVVEDLVLISDRAYTKGQILEMEKLILNTLQFNMSVPTPYVFMKRFLKAADADKQLELASFFMLELCLVEYQMLNYRPSHLAAAAVYTAQCAINRCQHWTKVCESHSRYTSDQLLECSRMMVDFHQKAGTSKLTGVHRKYSTYKFGCVAKILPAQFLLESGXGHRLLQVQTS

SEQ ID NO: 2711 - protein, 216 aa, Encephalitozoon cuniculi
MEKKRPEMLMKRVFQDITNVNRKNIKLTIHKSSHRRKLVQWLYEVTDDFGYSQVTFSTAVFILDRYTEARGLDLEKYQLVGISALFLSAKIEEKWCKAVDDYVHVTDGACSGKEILDKEIEMLEVFDFNMMLRLPHSFLQERYLEKASDKYTMKQRQEIFFCAFSYVIEKNICGSSMYWIYLEGVKEAEKVLSGCEIDTGLRFYLENNRKIKSIFM

SEQ ID NO: 2712 - protein, 404 aa, Asterina pectinifera
MSLRVRGTTNILGTAKLGMLNSENADARMNGKMVTRATTKTIKSTLGTRGALENISNVAKNNVQAAAKKEIKQKRGMTKSKATSSLQSVIGLHVEPVEKVQSPEPMDMSEVSNALEAFSQNILEMGVDDIDKDDHENPQLCSEYVNDIYHYMRHLEREFKVRTDYMAMQEITERMRTILIDWLVQVHLRFHLLQETLFLTIQILDRYLEVQAVSKTKLQLVGVTSMLIAAKYEEMYPPEIGDFVYITDNAYSKAQIRAMECNILRKLDFNLGKPLCIHFLRRCSKAGGVDGHKHTLSKYIMELTLPEYSFVKYDPSEIAAAALCLSTKILDEDMEWNKTLVHYSAYSEGHLAPIVQKMAVLLNNAPKSKFQAVRKKYASSKFMSISSSQELKSTVITDLADENC

SEQ ID NO: 2713 - protein, 409 aa, Arbacia punctulata
MALGTRNMNMNLHGESKHTFNNENVSARLGGKSIAVQKPAQRAALGNISNVVRTAQAGSKKVVKKDTRQKAMTKTKATSSLHAVVGLPVEDLPTEMRSTSPDVLDAMEVDQAIEAFSQQLIALQVEDIDKDDGDNPQLCSEYAKDIYLYLRRLEVEMMVPANYLDRQETQITGRMRLILVDWLVQVHLRFHLLQETLFLTVQLIDRFLAEHSVSKGKLQLVGVTAMFIASKYEEMYPPEINDFVYITDNAYTKAQIRQMEIAMLKGLKYKLGKPLCLHFLRRNSKAAGVDAQKHTLAKYLMEITLPEYSMVQYSPSEIAAAAIYLSMTLLDPETHSSWCPKMTHYSMYSEDHLRPIVQKIVQILLRDDSASQKYSAVKTKYGSSKFMKISGIAQLDSSLLKQIAQGSNE

SEQ ID NO: 2714 - protein, 264 aa, Danio rerio
LCQAFSDVLLNIKDVDADDYDNPMLCSEYVKDIYLYLRQLETEQAVRPKYLAGKEVTGNMRAILIDWLVQVQIKFRLLQETMYMTVAIIDRFLQDHPVPKKQLQLVGVTAMFIASKYEEMYPPEIADFAFVTDRAYTTSQIREMEMKVLRVLNFGFGRPLPLQFLRRASKIGDVTAEHHTLAKYFLELTMVDYDMVHYPPSQMASAAYALTLKVFNCGDWTPTLQHYMGYTEDELVPVMQHIAKNVVRVNEGLSKHLAVKNKYS

SEQ ID NO: 2715 - protein, 397 aa, Xenopus laevis
MSLRVTRNMLANAENNVKTTLAGKRVVATKPGLRPRTALGDIGNKAEVKVPTKKELKPAVKAAKKAKPVDKLLEPLKVIEENVCPKPAQVEPSSPSPMETSGCLPDELCQAFSDVLIHVKDVDADDDGNPMLCSEYVKDIYAYLRSLEDAQAVRQNYLHGQEVTGNMRAILIDWLVQVQMKFRLLQETMFMTVGIIDRFLQEHPVPKNQLQLVGVTAMFLAAKYEEMYPPEIGDFTFVTDHTYTKAQIRDMEMKILRVLKFAIGRPLPLHFLRRASKIGEVTAEQHSLAKYLMELVMVDYDMVHFTPSQIAAASSCLSLKILNAGDWTPTLHHYMAYSEEDLVPVMQHMAKNIIKVNKGLTKHLTVKNKYASSKQMKISTIPQLRSDVVVEMARPLM

SEQ ID NO: 2716 - protein, 433 aa, Homo sapiens
MALRVTRNSKINAENKAKINMAGAKRVPTAPAATSKPGLRPRTALGDIGNKVSEQLQAKMPMKKEAKPSATGKVIDKKLPKPLEKVPMLVPVPVSEPVPEPEPEPEPEPVKEEKLSPEPILVDTASPSPMETSGCAPAEEDLCQAFSDVILAVNDVDAEDGADPNLCSEYVKDIYAYLRQLEEEQAVRPKYLLGREVTGNMRAILIDWLVQVQMKFRLLQETMYMTVSIIDRFMQNNCVPKKMLQLVGVTAMFIASKYEEMYPPEIGDFAFVTDNTYTKHQIRQMEMKILRALNFGLGRPLPLHFLRRASKIGEVDVEQHTLAKYLMELTMLDYDMVHFPPSQIAAGAFCLALKILDNGEWTPTLQHYLSYTEESLLPVMQHLAKNVVMVNQGLTKHMTVKNKYATSKHAKISTLPQLNSALVQDLAKAVAKV

SEQ ID NO: 2717 - protein, 421 aa, Mesocricetus auratus
MPGSSRQSGREAGSALLSLQQEDQENVNPEKAAPDQRARAALKTGNARGNAPQQRLKARRVAPLKDLSINDEHVASGPSWKAASKQPAFTIHVDEEEDTQKIPPEHKEMRCEDALAFNAAVSLPGARKPLVPLDYPMDGSFESPHAMDMSIVLEEEKPVSVNEVPDYHEDIHTYLREMEIKCKPKVGYMKKQPDITNSMRAILVDWLVEVGEEYKLQNETLHLAVNYIDRFLSSMSVLRGKLQLVGTAAMLLASKFEEIYPPEVAEFVYITDDTYSKKQVLRMEHLVLKVLAFDLAAPTVNQFLNQYFLHQQPANCKVESLAMFLGELSLIDADPYLKYLPSLIAGAAFHLALYTVTGQSWPESLVQKTGYTLESLKPCLMDLHQTYLRAAQHTQQSIREKYKHSKYHGVSLLNPPETLNV

SEQ ID NO: 2718 - protein, 421 aa, Mus musculus
MHRQSSKSGVALPPVGQGPDACQMLSRAQLGQDPPQRTVLGVLTENEQYRRTCGQEITAIRCFSGSENVFPAAGKKVLSDHGVNEPAKRGFDIYMDDPEQGDRDTCSGKEGIIFEDVYEVDTSMLKSDLHFLLDFNTVSPMLVDPTTHAQSEEATDFGSDVINVTEYAEEIHRYLREAEVRHRPKAHYMRKQPDITEGMRAILVDWLVEVGEEYKLRTETLYLAVNFLDRFLSCMSVLRGKLQLVGTAAILLASKYEEIYPPDVDEFVYITDDTYTKRQLLRMEHLLLKVLAFDLTVPTTNQFLLQYLRRQGVCIRTENLAKYVAELSLLEADPFLKYLPSLVAAAAYCLANYIVNRHFWPETLAAFTGYSLNEIVPCLSELHKACLSIPHRPQQAIREKYKASKYLHVSLMEPPVVLPLQ

SEQ ID NO: 2719 - protein, 421 aa, Mus musculus
MHRQSSKSGVALPPVGQGPDACQMLSRAQLGQDPPQRTVLGVLTENEQYRRTCGQEITAIRCFSGSENVFPAAGKKVLSDHGVNEPAKRGFDIYMDDPEQGDRDTCSGKEGIIFEDVYEVDTSMLKSDLHFLLDFNTVSPMLVDPTTHAQSEEATDFGSDVINVTEYAEEIHRYLPEAEVRHRPKAHYMRKQPDITEGMRAILVDWLVEVGEEYKLRTETLYLAVNFLDRFLSCMSVLRGKLQLVGTAAILLASKYEEIYPPDVDEFVYITDDTYTKRQLLRMEHLLLKVLAFDLTVPTTNQFLLQYLRRQGVCIRTENLAKYVAELSLLEADPFLKYLPSLVAAAAYCLANYIVNRHFWPETLAAFTGYSLNEIVPCLSELHKACLSIPHRPQQAIREKYKASKYLHVSLMEPPVVLPLQ

SEQ ID NO: 2720 - protein, 422 aa, Mus musculus
MPGTSRHSGRDAGSALLSLHQEDQENVNPEKLAPAQQPRAQAVLKAGNVRGPAPQQKLKTRRVAPLKDLPINDEHVTAGPSWKAVSKQPAFTIHVDEAEETQKRPAELKETECEDALAFNAAVSLPAARKPLTPLDYPMDGSFESPHAMDMSIVLEDKPVNVNEVPDYQEDIHTYLREMEVKCKPKVGYMKRQPDITNSMRAILVDWLVEVGEEYKLQNETLHLAVNYIDRFLSSMSVLRGKLQLVGTAAMLLASKFEEIYPPEVAEFVYITDDTYSKKQVLRMEHLVLKVLAFDLAAPTVNQFLTQYFLHLQPANCKVESLAMFLGELSLIDADPYLKYLPSLIAGAAFHLALYTVTGQSWPESLAQQTGYTLESLKPCLVDLHQTYLKAPQHAQQSIREKYKHSKYHSVSLLNPPETLSV

SEQ ID NO: 2721 - protein, 422 aa, Mus musculus
MPGTSRHSGRDAGSALLSLHQEDQENVNPEKLAPAQQPRAQAVLKAGNVRGPAPQQKLKTRRVAPLKDLPINDEHVTAGPSWKAVSKQPAFTIHVDEAEETQKRPAELKETECEDALAFNAAVSLPGARKPLTPLDYPMDGSFESPHAMDMSIVLEDKPVNVNEVPDYQEDIHTYLREMEVKCKPKVGYMKRQPDITNSMRAILVDWLVEVGEEYKLQNETLHLAVNYIDRFLSSMSVLRGKLQLVGTAAMLLASKFEEIYPPEVAEFVYITDDTYSKKQVLRMEHLVLKVLAFDLAAPTVNQFLTQYFLHLQPANCKVESLAMFLGELSLIDADPYLKYLPSLIAGAAFHLALYTVTGQSWPESLAQQTGYTLESLKPCLVDLHQTYLKAPQHAQQSIREKYKHSKYHSVSLLNPPETLSV

SEQ ID NO: 2722 - protein, 422 aa, Mus musculus
MPGTSRHSGRDAGSALLSLHQEDQENVNPEKLAPAQQPRAQAVLKAGNVRGPAPQQKLKTRRVAPLKDLPINDEHVTAGPSWKAVSKQPAFTIHVDEAEETQKRPAELKETECEDALAFNAAVSLPAARKPLTPLDYPMDGSFESPHAMDMSIVLEDKPVNVNEVPDYQEDIHTYLREMEVKCKPKVGYMKRQPDITNSMRAILVDWLVEVGEEYKLQNETLHLAVNYIDRFLSSMSVLRGKLQLVGTAAMLLASKFEEIYPPEVAEFVYITDDTYSKKQVLRMEHLVLKVLAFDLAAPTVNQFLTQYFLHLQPANCKVESLAMFLGELSLIDADPYLKYLPSLIAGAAFHLALYTVTGQSWPESLAQQTGYTLESLKPCLVDLHQTYLKPPQHAQQSIREKYKHSKYHSVSLLNPPETLSV

SEQ ID NO: 2723 - protein, 1020 aa, Rattus norvegicus
MDLTLSRADYLQVNRSAGALTGGRGPGEATVPPGRVSSEGTGHLFTITVSVDSESPYVFQVVIGDQDGVVMCFGMKKGEAVSVFKTLPGQKVSRLELGGALNTPQEKIFIAAGSEIRGFTKRGKQFLSFETNLTESIKAMYISGSDLFLSASYIYNHYCDCKDQNYYLSGDKINDVICLPVERLSRVTPVLACQDRVLRVLQGSDVTYEIEVPGPPTVLALHNGDGGDSGEGLLFGTSDGRLGLIQITASKPIHKWEIRNDKKRGGILCLDSFDIMGDGVKDLLVGRDDGMVEVYSFENANEPVLRFDQMLSESVTSVQGGCVGKDGYDEIVLATYSGWVTGLTTEPTHKESGPGEELKLNQEMQNKIASLRTELEHLQLKVLQERENYQQSSQSSQAKSTVPSFSINDKFTLNKDDASYSLVLEVRTAIDNVLIQSDVPIDLLDVDKNSAVVSFSSCDTESNDNFLLATYRCQANTTRLELKIRSIEGQYGTLQAYVTPRIQPKTCQVRQYHIKPLSLHQRTHFIDHDRPMNTLTLTGQFSFAEVHSWAVLCLPEVPEKPPAGECATFYFQNTFLDTQLECAYSACSVRRPPGSRAARERRAPCTLCRRRIRTGAAMPGNSRQAGSALLSQQEDQENVNPEKVAPAQQPRAQAVLKAGKVRGPAPQQRLKTRRVAPLKDLPINDEHVPTVPSWKAVSKQPAFTIHVDEAEETQKRPAEQKETQCEDALAFSAAVSLPGARKPLVPLDYPMDGSFESPHAMDISIVLEDEKPVNVNEVPDYHEDIHTYLREMEVKCKPKVSYMKRQPDITNSMRAILVDWLVEVGEEYKLQNETLHLAVNYIDRFLSSMSVLRGKLQLVGTAAMLLASKFEEIYPPEVAEFVYITDDTYSKKQVLRMEHLVLKVLAFDLAAPTVNQFLTQYFLHLQPANCKVESLAMFLGELSLIDADPYLKYLPSLIAGAAFHLALYTVTGQSWPESLVQKTGYTLESLKPCLMDLHQTYLKAPQHAQQSIREKYKHSK

SEQ ID NO: 2724 - protein, 1378 aa, Rattus norvegicus
MEALILYLPLLVEMVGSAAVFFAPFPAGGSYQKIGKSNHTASASSQGTIKKRSAFEDVTNASYVQCVQPKEDNTELKSHISKRTRKGVGEITQKKIKSSKLGHVTSLSNVEKEFILDIPNKPKTLTTEEPPVFPKTLVLNEQHATEETSLMRKTLKSCAFYQETFLMEKPQTLLEKTKDYKEFDSELMTSRRKDKPEEATIIEEMTDLKEPDLGKVTLTSSPLYLKNKHAVQEEKHAIQGKSSFKKKSLAMKVVTTKENSPVKKPHFRKKKPTTELKSLLQEQSSLQEKYNTQGDASILKKPRVLQKNINNKVDTLTEPVTLKRKHSTNEAIHTKKLSSSKNNHDTQGKGTNLRPLGVQPVTHENEPLSSKKSTTKKKDSHFHGPSVLPDKHSPQMKVSTAKNSLALQNPTTEEMMLHFPVAPVLKMGQNMEEAPCLKKPSPLRKQQQLPKRSRSFSKCAVQETVTSKSLSFKKSNTKKDPSFQGPFALQKKRNSPGKLSKQKKRYVPPKHCMEKDSHFQLDSAFKKQHIREEPASTHKPLILEMQQTTKGTEFRLRNPLVLPTVTSGTKSLTKEPPSFKKENTPLLKRKCATHTITLQQAQLELEETTGEDRNLFSTRPELHKKEPTPGLLQDPLPQNENCLIPQQLSFSMPLDSQKITSQERAHSKESVTSNDDNNFFSQDLFSPFSSTDEDTLKFHKSLDFQEKVDRKNDSPTKMSDSQDSVSEEESFLRKLFCKGRHSSSEESSQERPVALEQEFLLKKVLNENTSSDVEGPLSHQSPHIQNHSGTTKEALEALDALEALDALEALEASETLEALEALEASGALEEPLNIQEELSSEDIVAIMKSLITEDESIKEAFIRSYTTATEAPAEKSLSLEETSINEVATLKEPLSSQEKHRAELVTVLKELLVLVKNPRLERLALAFQENPPSNVETLLREVLALVEKSTGEESTLNEPLALQEKLSTKAELSPKELLALEDNPSFKKASPQGSLTFDHKPDIEKDEITRMSFSFEEFSIDSLYEKVLALSEGFTTTEQLSFTDLQNFDESKIVDEEDIFKSFFVFENENNPNLSSNGFESRKDNSSAPMPSLEAFNSVMNSEPCVSATKSSQSSLGGKETEEKFIVTKYMDEQMELTSDMRAILVDWMVEVQANFRMSHETLYLAVKLMDRYLMKAQCEKNHLQLLGSTAYMIAAKFEESYPPSLTEFLYICEDLYPKSEMVSLERNILKTLNFDINIPIAYHFLRRYASCIHASMKTLTLSRFICEMTLQEYDYIDERPSKLAAASFILALYMRNLKDCVNGWGGLVPSLEYSTGYQLAELHILVRKLNHLLNFRSRTVLKNVFEKYSEETYFEVAKIPPLSMKDLEDLLNCALFS

SEQ ID NO: 2725 - protein, 295 aa, Rattus norvegicus
MEHQLLCCEVETIRRAYPDTNLLNDRVLRAMLKTEETCAPSVSYFKCVQREIVPSMRKIVATWMLEVCEEQKCEEEVFPLAMNYLDRFLSLEPLKKSRLQLLGATCMFVASKMKETIPLTAEKLCIYTDNSIRPEELLQMELLLVNKLKWNLAAMTPHDFIEHFLSKMPEADENKQIIRKHAQTFVALCATDVKFISNPPSMVAAGSVVAAMQGLNLGSPNNFLSCYRTTHFLSRVIKCDPDCLRACQEQIEALLESSLRQAQQNIDPKATEEEGEVEEEAGLACTPTDVRDVDI

SEQ ID NO: 2726 - protein, 747 aa, Rattus norvegicus
MGSGGVIHCRCAKCFCYPTKRRIKRRPRNLTILSLPEDVLFHILKWLSVGDILAVRAVHSHLKYLVDNHASVWASASFQELWPSPQNLKLFERAAEKGNFEAAVKLGIAYLYNEGLSVSDEACAEVNGLKASRFFSMAERLNTGSDPFIWLFIRPPWSVSGSCCKAVVHDSLRAECQLQRSHKASILHCLGRVLNLFEDEEKRKQAHNLFEESAHQGCLASSYLLWESDRKVDMSDPGRCLHSFRKLRDYAAKGCWEAQLALAKACAGGSQLGLEGKACSESVCQLFQASQAVNKQQIFSVQKGLSDTMRYILIDWLVEVATMKDFTSLCLHLTVECVDRYLRRRLVPRYKLQLLGIACMVICTRFISKEILTIREAVWLTDNTYKYEDLVRVMGEIISALEGKIRIPTVVDYKEVLLTLVPVAPRTQHLCSFLCELTLLHTSLSVYAPARLASAALLLARLMHGHTQPWTTQLWDLTGFSYSDLTPCVLSLHKKCFHDDAPKDYRQVSLTAVKQRFEDKCYEEISQEEVLSYAELCSALGVKQESPEPPSFPSSGEIHTFLSSPSGRRSKRKRENSLQEDRGSFVTTPTAELSNQEETLLGSLLDWSLDCCSGYEGDQESEGEKEGDVTAPSGLLDVTVVYLNPEEHCCQESSDEEVWPEDKSHPTPGTQAPPASAPWPLPCNRGDPGKDVTTSGYSSVSSSSPISSLDGGMVGSPRSTSVLSVGSHSSTKPCYHQAKKSCLQCRP

SEQ ID NO: 2727 - protein, 288 aa, Rattus norvegicus
MELLCCEVDPVRRAVPDRNLLEDRVLQNLLTIEERYLPQCSYFKCVQKDIQPYMRRMVATWMLEVCEEQKCEEEVFPLAMNYLDRFLAGVPTPKTHLQLLGAVCMFLASKLKETIPLTAEKLCIYTDNSVKPQELLEWELVVLGKLKWNLAAVTPHDFIEHILRKLPQQKEKLSLIRKHAQTFIALCATDFKFAMYPPSMIATGSVGAAICGLQQDEEVNALTCDALTELLTKITHTDVDCLKACQEQIEAVLLNSLQQFRQEQHNGSKSVEDPDQATTPTDVRDVDL

SEQ ID NO: 2728 - protein, 288 aa, Rattus norvegicus
MELLCCEVDPVRRAVPDRNLLEDRVLQNLLTIEERYLPQCSYFKCVQKDIQPYMRRMVATWMLEVCEEQKCEEEVFPLAMNYLDRFLAGVPTPKTHLQLLGAVCMFLASKLKETIPLTAEKLCIYTDNSVKPQELLEWELVVLGKLKWNLAAVTPHDFIEHILRKLPQQKEKLSLIRKHAQTFIALCATDFKFAMYPPSMIATGSVGAAICGLQQDEEVNALTCDALTELLAKITHTDVDCLKACQEQIEAVLLNSLQQFRQEQHNGSKSVEDPDQATTPTDVRDVDL

SEQ ID NO: 2729 - protein, 293 aa, Rattus norvegicus
MELLCCEGTRLAPRAGPDPRLLGDQRVLQSLLRLEERYVPRGSYFQCVQKEIKPHMRKMLAYWMLEVCEEQRCEEDVFPLAMNYLDRYLSCVPTRKAQLQLLGTVCLLLASKLRETTPLTIEKLCIYTDQAMAPWQLREWEVLVLGKLKWDLAAVIAHDFLALILHRLSLPSDRQALVKKHAQTFLALCATDYTFAMYPPSMIATGSIGAAVLGLGACSMSADELTELLAGITGTEVDCLRACQEQQIEAALRESLREAAQTAPSPVPKAPGGSSSQGPSQTSTPTDVTAIHL

SEQ ID NO: 2730 - protein, 396 aa, Rattus norvegicus
MKEEGGSDLSVRSRKRKPNVPVFLQDPDEEIAKIDKTVKSQDSSQPWDDDSACVDPCSFIPTPNKEEDNELEYPKTAFQPRKIRPPRASPLPVLNWANREEVWRIMLNKEKTYLRDEHFLQRHPLLQARMRAVLLDWLMEVCEVYKLHRETFYLAQDFFDRYMASQQNIIKTLLQLIGISALFIASKLEEIYPPKLHQFAYVTDGACSGDEILTMELMMMKALKWRLSPLTIVSWLNVYVQVAYVNDTGEVLMPQYPQQVFVQIAELLDLCVLDVGCLEFPYGVLAASALYHFSSLELMQKVSGYQWCDIEKCVKWMVPFAMVIREMGSSKLKHFRGVPMEDSHNIQTHTNSLDLLDKAQAKKAILSEQNRISPPPSGVLTPPHSSKKQSSEQETE

SEQ ID NO: 2731 - protein, 288 aa, Rattus norvegicus
MELLCCEVDPVRRAVPDRNLLEDRVLQNLLTIEERYLPQCSYFKCVQKDIQPYMRRMVATWMLEVCEGQKCEEEVFPLAMNYLDRFLAGVPTPKTHLQLLGAVVMFLASKLKETIPLTAEKLCIYTDNSVKPQELLEWELVVLGKLKWNLAAVTPHDFIEHILRKLPQQKEKLSLIRKHAQTFIALCATDFKFAMYPPSMIATGSVGAAICGLQQDEEVNALTCDALTELLAKITHTDVDCLKACQEQIEAVLLNSLQQFRQEQHNGSKSVEDPDQATTPTDVRDVDL

SEQ ID NO: 2732 - protein, 191 aa, Rattus norvegicus
MEHQLLCCEVETIRRAYPDTNLLNDRVLRAMLKTEETCAPSVSYFKCVQREIVPSMRKIVATWMLEVCEEQKCEEEVFPLAMNYLDRFLSLEPLKKSRLQLLGATCMFVASKMKETIPLTAEKLCIYTDNSIRPEELLQMELLLVNKLKWNLAAMTPHDFIEHFLSKMPEADENKQIIRKHAQTFVALCAT

SEQ ID NO: 2733 - protein, 265 aa, Rattus norvegicus
MPGIARQAGSALLSQQEDQENVNPEKVAPAQQPRAQAVLKAGKVRGPAPQQRLKTRRVAPLKDLPINDEHVPTVPSWKAVSKQPAFTIHVDEAEETQKRPAERKETQCEDALAFSAAVSLPGARKPLVPLDYPMDGSFESPHAMDISIVLEDEKPVNVNEVPDYHEDIHTYLGEMEVKCKPKVSYMKRQPDITNSMRAILVDWLVEVGEEYKLQNETLHLAVNYIDRFLFSMSALRGKLQLVGTAAMLLASKFEEIYPPEVAEFV

SEQ ID NO: 2734 - protein, 174 aa, Rattus norvegicus
MFSPNIEDFVYITDNAYTSSQIREMETLILKELKFELGRPLPLHFLRRASKAGEVDVEQHTLAKYLMELTLVDYDMVHYHPSQVAAAASCLSQKVLGQGKWNLKQQYYTGYMESEILEVMQHMAKNVVKVNENLTKFIAVKNKYASSRLLKISTIPQLNSRTIKDLASPLMGRP

SEQ ID NO: 2735 - protein, 71 aa, Rattus sp.
WLMEVCEVYKLHRETFYLAQDFFDRYMASQQNIIKTLLQLIGISALFIASKLEEIYPPKLHQFAYVTDGTC

SEQ ID NO: 2736 - protein, 391 aa, Carassius auratus gibelio
MASRGFAPLSGRQENLMVLGRADGLHALKPGQRVVLGVLTENDQHNRVFGQVSSKYVPAFRDASTLDVSTSSATLGVHVVEPVIAQATKPTSFLLPSELLLVDDVVQDLGSGSCMDSSMQSLPEEAAYEDILCVPEYAEDIHRYLRECEVKYRPKPGYMRKQPDITNCMRVILVDWLVEVGEEYKLCSETLFLAVNYLDRFLSCMSVLRGKLQLVGTAAVLLAAKYEEVYPPEVDEFVYITDDTYTKKQLLRMEQHLLRVLAFDMTAPTVHQFLMQYTLEGHICARTVNLALYLSELSLLEVDPFVQYLPSKTAAAAYCLANYTLNGVLWPENLYAFTGYSLAVIIPCLMELHKLHLGAAGRPQQAIQEKYKGSKYCGVSLLEPVECLPLP

SEQ ID NO: 2737 - protein, 428 aa, Carassius auratus gibelio
MSSVGQTQRIAVQDPGADIHNQENMLSRLRCAAKNRIENRENVNPKPGNRTVLGALENNQRRPPVLRAAKQVSGPQITACKSEEHGNFGEKSSIRPPAFQIHVDEPDGACSKKPCTQRATMACSPLKLNPTVTRLRQPIATIDLPVEASFDSPMDMSIIDGEERPTNGNEVSDYAAEIHAHLREMEIKSKPRAGYMKKLPDITNSMRAILVDWLVVVGEKYKLQNETLYLAVNYIDRFLSSMSVHREKLQLVGTAAMLLASKFEEIYPPEVAEFVYITDDTYTKKQVLRMEHLVLTVLSFDLAAPTINQFLTQYFLHQPVSSKVESFSMFLGELSLIDCDPFLKYLPSQTAAAAFILANRTIAGGSWSKAFVEMTGYTLEDLMPCIQDLHQTYLGAAQHTQQAVREKYKGSKYHEVSLIELPEKLMLN

SEQ ID NO: 2738 - protein, 254 aa, Squirrel monkey herpesvirus 1
MADSPNRLNRAKIDSTTMKDPRVLNNLKLRELLLPKFTSLWEIQTEVTVDNRTILLTWMHLLCESFELDKSVFPLSVSILDRYLCKKQGTKKTLQKIGAACVLIGSKIRTVKPMTVSKLTYLSCDVFTNLELINQEKDILEALKWDTEAVLATDFLIPLCNALKIPEDLWPQLYEAASTTICKALIQPNIALLSPGLICAGGLLTTIETDNTNCRPWTCYLEDLSSILNFSTNTVRTVKDQVSEAFSLYDLEIL

SEQ ID NO: 2739 - protein, 254 aa, Saimiriine herpesvirus 2
MADSPNRLNRAKIDSTTMKDPRVLNNLKLRELLLPKFTSLWEIQTEVTVDNRTILLTWMHLLCESFELDKSVFPLSVSILDRYLCKKQGTKKTLQKIGAACVLIGSKIRTVKPMTVSKLTYLSCDCFTNLELINQEKDILEALKWDTEAVLATDFLIPLCNALKIPEDLWPQLYEAASTTICKALIQPNIALLSPGLICAGGLLTTIETDNTNCRPWTCYLEDLSSILNFSTNTVRTVKDQVSEAFSLYDLEIL

SEQ ID NO: 2740 - protein, 229 aa, Saimiriine herpesvirus 2
RVLNNLKLRELLLPKFTSLWEIQTEVTVDNRTILLTWMHLLCESFELDKSVFPLSVSILDRYLCKKQGTKKTLQKIGAACVLIGSKIRTVKPMTVSKLTYLSCDCFTNLELINQEKDILEALKWDTEAVLATDFLIPLCNALKIPEDLWPQLYEAASTTICKALIQPNIALLSPGLICAGGLLTTIETDNTNCRPWTCYLEDLSSILNFSTNTVRTVKDQVSEAFSLYD

SEQ ID NO: 2741 - protein, 254 aa, Macaca mulatta rhadinovirus
MASVGPVPTGTIDPVLYQDRALSNLLAHEASFVTSTACYGTIQTEVTVGMRVILGTWMRSVARAHQADASVFPLAVSILDRYLECRSIPRRRFQRLGAACLFLAGKIRDLNPFKAAFLCFCAAEDFSVADLLKQEKSILKALRWKLEAVLPTDAIGPTLFKSGFTKEQLFALHSQVVESVHKAIVNPATGGLPPSLVAAACALFSLGAAAPPPARLAEAVGVSAATLAAAAESVATTLREFDEDHILSNARGSS

SEQ ID NO: 2742 - protein, 254 aa, Macaca mulatta rhadinovirus 26-95
MASVGPVPTGTIDPVLYQDRALSNLLAHEASFVTSTACYGTIQTEVTVGMRVILGTWMRSVARAHQADASVFPLAVSILDRYLECRSIPRRRFQRLGAACLFLAGKIRDLNPFKAAFLCFCAAEDFSVADLLKQEKSILKALRWKLEAVLPTDAIGPTLFKSGFTKEQLFALHSQVVESVHKAIVNPATGGLPPSLVAAACALFSLGAAAPPPARLAEAVGVSAATLAAAAESVATTLREFDEDRILSNARGSS

SEQ ID NO: 2743 - protein, 305 aa, Anopheles gambiae str. PEST
MDRWNTFFNAPYCTEYDEDILETLKECESRRMNVHFISPQLEHRRSSVQLILNVCKQQSYRRATVHLAIYLLDVFMSNHTIAVGRLKLVALTCLYLACKIEENDSSVPSPTRLNGFLANVYRPADFIALEVAILCFFDWHITIPTASTFLDIFAMHSFVQQDWDAVSPPWNGCDSMALLMQHINETSSTILEATLQHLKLSIVKPSLLAAGCIAAARCLTPRVSVWSDRLTSATGYEYSQIHEVCQMLLFEAMPQSPRSSRSSLSSSTPKRSTSDAGYLSEWWESENEDENGTIGSCVSSNSSSS

SEQ ID NO: 2744 - protein, 446 aa, Chenopodium rubrum
MAARAVLQEQPRGGVQQKNGQGGERRNRTALGDIGNVVTARGGAIGAANGIAKPQAINRPLTRSFCAQLVANAQAAAEKKKKQGVKAVDVNVGGARKAGVGVAVAPAAAAQKKVQEKKKTEVVVAETKTPSGHGKVEQKPASKKKKTPTFTSFLTARSKEACGLSKKPQELIVNIDEGSVEDELAVVEYVEDIYSFYKIAEDESRVRDYMDSQPDINEKMRSILVDWLIEVHYKFELRQETLYLTINIIDRFLSMKIVPRKELQLVGIASMLIACKYEEIWAPEVNDFVQISDKAYVREQVLCMEKTILGNLEWYLTVPTPYMFLTRYVKASVTLDSEMENMSYFFSELGMMNYSTTIKYPPSLLAASSVYTARCTLNNSPSWTETLKHYTGYSENQLLECARLLVSFHMAAPEGRLRAVYKKFSKPDNGAVALRPPAKSLLASTS

SEQ ID NO: 2745 - protein, 460 aa, Arabidopsis thaliana
MSNILQNRRSSFSSSTKSSLAKRQAPSSSENSVKLMPAMTKKRAPLSNITNQKIASRLQNSDSVHCSNKSAKLKIAPSVCVNASFSSNLQQSIVPHKVASSPSKSDDGSVSMDETRSSSDSYKSPQVEYIENDDVSAVVSIERKALSNLFITPNSETIDNYCSRDVLSDMKKMDKNQIVNIDSNNGDPQLCATFACDIYKHLRASEAKKRPDVDYMERVQKDVNSSMRGILVDWLIEVSEEYRLVPETLYLTVNYIDRYLSGNVISRQKLQLLGVACMMIAAKYEEICAPQVEEFCYITDNTYLKDEVLDMESDVLNYLKFEMTAPTTKCFLRRFVRAAHGVHEAPLMQLECMANYIAELSLLEYTMLSHSPSLVAASAIFLAKYILDPTRRPWNSTLQHYTQYKAMELRGCVKDLQRLCSTAHGSTLPAVREKYSQHKYKFVAKKFCPSVIPQEFFNNS

SEQ ID NO: 2746 - protein, 442 aa, Arabidopsis thaliana
MSSSSRNLSQENPIPRPNLAKTRTSLRDVGNRRAPLGDITNQKNGSRNPSPSSTLVNCSNKIGQSKKAPKPALSRNWNLGILDSGLPPKPNAKSNIIVPYEDTELLQSDDSLLCSSPALSLDASPTQSDPSISTHDSLTNHVVDYMVESTTDDGNDDDDDEIVNIDSDLMDPQLCASFACDIYEHLRVSEVNKRPALDYMERTQSSINASMRSILIDWLVEVAEEYRLSPETLYLAVNYVDRYLTGNAINKQNLQLLGVTCMMIAAKYEEVCVPQVEDFCYITDNTYLRNELLEMESSVLNYLKFELTTPTAKCFLRRFLRAAQGRKEVPSLLSECLACYLTELSLLDYAMLRYAPSLVAASAVFLAQYTLHPSRKPWNATLEHYTSYRAKHMEACVKNLLQLCNEKLSSDVVAIRKKYSQHKYKFAAKKLCPTSLPQELFL

SEQ ID NO: 2747 - protein, 454 aa, Arabidopsis thaliana
MSSSSRNLSQENPIPRPNLAKTRTSLRDVGNRRAPLGDITNQKNGSRNPSPSSTLVNCSNKIGQSKKAPKPALSRNWNLGILDSGLPPKPNAKSNIIVPYEDTELLQSDDSLLCSSPALSLDASPTQSDPSISTHDSLTNHVVDYMVESTTDDGNDDDDDEIVNIDSDLMDPQLCASFACDIYEHLRVSEVNKRPALDYMERTQSSINASMRSILIDWLVEVAEEYRLSPETLYLAVNYVDRYLTGNAINKQNLQLLGVTCMMIAAKYEEVCVPQVEDFCYITDNTYLRNELLEMESSVLNYLKFELTTPTAKCFLRRFLRAAQGRKEVPSLLSECLACYLTELSLLDYAMLRYAPSLVAASAVFLAQYTLHPSRKPWNATLEHYTSYRAKHMEACVKNLLQLCNEKLSSDVVAIRKNTSLQQRSFVPRHYRKSFSSDSVSGYVFFTLVYCTYC

SEQ ID NO: 2748 - protein, 257 aa, Human herpesvirus 8
MATANNPPSGLLDPTLCEDRIFYNILEIEPRFLTSDSVFGTFQQSLTSHMRKLLGTWMFSVCQEYNLEPNVVALALNLLDRLLLIKQVSKEHFQKTGSACLLVASKLRSLTPISTSSLCYAAADSFSRQELIDQEKELLEKLAWRTEAVLATDVTSFLLLKLVGGSQHLDFWHHEVNTLITKALVDPKTGSLPASIISAAGCALLVPANVIPQDTHSGGVVPQLASILGCDVSVLQAAVEQILTSVSDFDLRILDSY

SEQ ID NO: 2749 - protein, 257 aa, Human herpesvirus 8
MATANNPPSGLLDPTLCEDRIFYNILEIEPRFLTSDSVFGTFQQSLTSHMRKLLGTWMFSVCQEYNLEPNVVALALNLLDRLLLIKQVSKEHFQKTGSACLLVASKLRSLTPISTSSLCYAAADSFSRQELIDQEKELLEKLAWRTEAVLATDVTSFLLLKLVGGSQHLDFWHHEVNTLITKALVDPLTGSLPASIISAAGCALLVPANVIPQDTHSGGVVPQLASILGCDVSVLQAAVEQILTSVSDFDLRILDSY

SEQ ID NO: 2750 - protein, 257 aa, Human herpesvirus 8
MATANNPPSGLLDPTLCEDRIFYNILEIEPRFLTSDSVFGTFQQSLTSHMRKLLGTWMFSVCQEYNLEPNVVALALNLLDRLLLIKQVSKEHFQKTGSACLLVASKLRSLTPISTSSLCYAAADSFSRQELIDQEKELLEKLAWRTEAVLATDVTSFLLLKLLGGSQHLDFWHHEVNTLITKALVDPKTGSLPASIISAAGCALLVPANVIPQDTHSGGVVPQLASILGCDVSVLQAAVEQILTSVSDFDLRILDSY

SEQ ID NO: 2751 - protein, 257 aa, Human herpesvirus 8
MATANNPPSGLLDPTLCEDRIFYNILEIEPRFLTSDSVFGSFQQSLTSHMRKLLGTWMFSVCQEYNLEPNVVALALNLLDRLLLIKQVSKEHFQKTGSACLLVASKLRSLTPISTSSLCYAAADSFSRQELIDQEKELLEKLAWRTEAVLATDVTSFLLLKLLGGSQHLDFWHHEVNTLITKALVDPKTGSLPASIISAAGCALLVPANVIPQDTHSGGVVPQLASILGCDVSVLQAAVEQILTSVSDFDLRILDSY

SEQ ID NO: 2752 - protein, 257 aa, Human herpesvirus 8
MATANNPPSGLLDPTLCEDRIFYNILEIEPRFLTSDSVFGSFQQSLTSHMRKLLGTWMFSVCQEYNLEPNVVALALNLLDRLLLIKQVSKEHFQKTGSACLLVASKLRSLTPISTSSLCYAAADSFSRQELIDQEKELLEKLAWRTEAVLATDVTSFLLLKLLGGSQHLDFWHHEVDTLITKALVDPKTGSLPASIISAAGCALLVPANVIPQDTHSGGVVPQLASILGCDVSVLQAAVEQILTSVSDFDLRILDSY

SEQ ID NO: 2753 - protein, 505 aa, Cicer arietinum
MGSRNIVQQQNRAEAAVPGAMKQKNIAGEKKNRRALGDIGNLVTVRGVDGKAKAIPQVSRPVTRSFCAQLLANAQTAAADNNKINAKGAIVVDGVLPDRRVAAARVPAQKKAAVVKPRPEEIIVISPDSVAEKKEKPIEKEKAAEKSAKKKASTLTSTLTARSKVASGVKTKTKEQIVDIDAADVTNDLAVVEYVEDMYKFYKSVENESRPHDYMGSQPEINEKMRAILIDWLVQVHHKFELSPETLYLTINIVDRYLASETTIRRELQLVGIGAMLIASKYEEIWAPEVHELVCISDNTYSDKQILVMEKKILGALEWYLTVPTPYVFLVRFIKASMTDSDVENMVYFLAELGMMNYATLIYCPSMIAAASHQVYAARCTLNKAPFWNETLQLHTGFSEPQLMDCAKLLVAFHKMAGDQKLKSIYRKYSNLERGAVALLSPAKSLFVFLIELLMNAIEKMQCSLFFTSEIWCRFLTCFGRNISPGCSLVLLQRNFLIPLILYAL

SEQ ID NO: 2754 - protein, 484 aa, Glycine max
MSTQNRRSSFSSSTTSSLAKRHASASTTSSLAAAPTNMAKKRPPLSNLTNTVAHRNSSSSVPCAAKFAKTKKDVVPACSGNKRPTLANVKPASAVIFPKANSFPVKNEAPPTPPPPVATVTVPAPVVDVSPSKSDTMSVSTDESMSSCDSFKSPDIEYVDNSDVAAVDSIERKTFSHLNISDSTEGNICSREILVELEKGDKFVNVDNNYADPQLCATFACDIYKHLRASEAKKRPSTDFMEKIQKEINSSMRAILIDWLVEVAEEYRLVPDTLYLTVNYIDRYLSGNVMNRQRLQLLGVASMMIASKYEEICAPQVEEFCYITDNTYFKEEVLQMESAVLNFLKFEMTAPTVKCFLRRFVRAAQGVDEVPSLQLECLTNYIAELSLMEYSMLGYAPSLVAASAIFLAKFILFPSKKPWNSTLQHYTLYQPSDLCVCVKDLHRLCCNSPNSNLPAIREKYSQHKYKYVAKKYCPPSIPPEFFQN

SEQ ID NO: 2755 - protein, 484 aa, Glycine max; identical to SEQ ID NO: 2754

SEQ ID NO: 2756 - protein, 480 aa, Glycine max
MSTQNRRSSFSSSTTSSLAKRHVSASTTSSSLAAPANMAKKRPPLSNLTNTVAHRNSSSLVPCAAKFAKTKKEVVPACSGNKRPTLANVKPTSAAIFPKANSFPVRDEAPPPVATVTVPAPVVDVSPSKSDAMSVSMDESMSSCDSFKSPDIEYVDNIDVAAVDSIERKTFSNLNISDSTEGNICSRDILVELEKGENFVNVDNNYADPQLCATFACDIYKHLRASEAKKRPSTDFMERIQKEINPSMRAILIDWLVEVAEEYRLVPDTLYLTVNYIDRYLSGNVMNRQRLQLLGVASMMIASKYEEICAPQVEEFCYITDNTYFKEEVLQMESAVLNFLKFEMTAPTVKCFLRRFVRAAQGVDEVPSLQLECLTNYIAELSLMEYSMLGYAPSLIAASAIFLAKFILFPSKKPWTSTLQHYTLYKPSDLCVCVRDLHRLCCNSPNSNLPAIREKYSQHKYKYVAKKYCPPSIPPEFFQN

SEQ ID NO: 2757 - protein, 485 aa, Glycine max
MSTQNRRSSFSSSTTSSLAKRHASASTTSSSAAAPANMAKKRPPLSNLTNTVAHRNSSSSVPCAAKFAKTKKDVVPACSGNKRPTLANVKPASAAIFPKANSFPVRDEAPPTPPPPVATVTVPAPVVDVSPSKSDAMSVSTDESMSSCDSFKSPDIEYVDNSDVAAVDSIERKTFSHLNISDSTEGNICSREILVELEKGDKFVNVDNNYADPQLCATFACDIYKHLRASEAKKRPSTDFMEKIQKEINSSMRAILIDWLVEVAEEYRLVPDTLYLTVNYIEDRYLSGNVMNRQRLQLLGVASMMIASKYEEICAPQVEEFCYITDNTYFKEEVLQMESAVLNFLKFEMTAPTVKCFLRRFVRAAQGVDEVPSLQLECLTNYIAELSLMEYSMLGYAPSLIAASAIFLAKFILFPSKKPWTSTLQHYTLYKPSDLCVCVRDLHRLCCNSPNSNLPAIREKYSQHKYKYVAKKYCPPSIPPEFFQN

SEQ ID NO: 2758 - protein, 487 aa, Glycine max
  unsure (1)..(487): unsure at all Xaa locations
MSSTTQNRRSSFTPSTASSLAKAKRHPSSVSSSSSATQNLAVKRAPLANLTNQRNAPYSSSSSSCSNKVAKTKKDSKSTISGNKSSQLKSVXXSSSVVIPKANSLSQKKDAAPTVATFAVPVRSVDVSPSKSDGRFVSMDETTSSCDSIKSPDEVEYLDNRDVSDVDSIQKKIISNLNISDTTEPEGNVCSREIIVELEERVDKIVNIDNIYSDTQLCATYVCDIYKHLRESEEKKRPSTDFMDTIQKDINVSMRAILVDWLVEVAEEYRLVPETLYLTVNYLDRYLSGNAMNRQRLQLLGVSCMMIASKYEEICAPQVEEFCYITDNTYLKEEVLQMESAVLNYLKFEMTAPTVKCFLRRFVRAAAHDVQEIPSLQLEYLTNFIAELSLLEYSMLSYPPSLIAASVIFLARFILFPSKKPWNSTLQHYTLYRPSDLCACVKDLHRLCCSSHDSNLPAIRDKYSQHKYKCVAKKHIPPSIPQEVFQS

SEQ ID NO: 2759 - protein, 489 aa, Glycine max
  unsure (1)..(489): unsure at all Xaa locations
MSSTTQNRRSSFTPSTASSLAKAKRHPSSVSSSSSATQNLAVKRAPLANLTNQRNAPYSSSSSSCSNKVAKTKKDSKSTISGNKSSQLKSVXXSSSVVIPKANSLSQKKDAAPTVATFAVPVRSVDVSPSKSDGRVXVSMDETTSSCDSIKSPDEVEYLDNRDVSDVDSIQKKIISNLNISDTTEPEGNVCSREIIVELEERVDKIVNIDNIYSDTQLCATYVCDIYKHLRESEEKKRPSTDFMDTIQKDINVSMRAILVDWLVEVAEEYRLVPETLYLTVNYLDRYLSGNAMNRQRLQLLGVSCMMIASKYEEICAPQVEEFCYITDNTYLKEEVLQMESAVLNYLKFEMTAPTVKCFLRRFVRAAAHDVQEIPSLQLEYLTNFIAELSLLEYSMLSYPPSLIAASVIFLARFILFPSKKPWNSTLQHYTLYRPSDLCACVKDLHRLCCSSHDSNLPAIRDKYSQHKYKCVAKKHIPPSIPREVFQIN

SEQ ID NO: 2760 - protein, 459 aa, Lupinus luteus
MASRPVVPIHQQQVRGEGVIGGGKQKKNVAADGKNRRALGDIGNLDRVKGVEVKPNRPITRSFCAQLLANAQVAAAVENNKKLAIPNVGGAKPNVVEGAVAKRVAPKPAEKKVVEKPKPREAVEISPHEEVQKNKSVVKKKEGGENKKKPQTLSSVLTARSKAACGLTKKPQEQIIDIDANDSGNELAALEYIEDIYKFYKLEESESRPHQYLDSQPEINERMRAILVDWLIDVNNKFDLSLETLYLTINIVDRFLAVKVVPRRELQLLGISAMLLASKYEEIWPPEVNDFVCLSDRAYTHEQILVMEKIILGKLEWTLTVPTPYVFLVRFIKASVPDQELENMSHFLSELGMMHYSTLMYCPSMVAASAVFAARCTLNKTPFWNETLKLHTSYSEEQLMDCAKLLVSFHSTIGGGKLKVVHRKYSDPQKGAVAVLPPAKYLMPESSSSGTRVSKGLDK

SEQ ID NO: 2761 - protein, 431 aa, Lupinus luteus
MPSIAHSHVAAEPQHPKGENKQKNEGRNRRVLKDIGNLVVKQADPVANVPKRTTRNFGCQLLANAQAAAEKNKKPNTDVGNLAVVTKVEQTKKETEHEVIIISSDDEEEEKEKQVVKGGRKAREKVAGRGKNDKAFSAVLSARSKAACGLTHKPKDLVLVDDIDVADIANELEAVEYLDDIYKFYKLTEDDGRVHDYMPSQPDINIKMRSILFDWLIEVHRKFELMQETLYLTLNIVDRFLSMKAVPRRELQLVGISSMLIACKYEEIWAPEVHDFVCISDNAYVRENILIMEKTILSKLEWYLTVPTTYVFLVRYIKASTPYDKKIEDMIFFLAELSLMDYPLVISYCPSMIAASAVYAARCILGRVPYWTETLKHYTGYYEEQLRDCAKLMVNFHSVAPESKLRAVYKKFSSLERGAVALVAPTKNLLA

SEQ ID NO: 2762 - protein, 454 aa, Lupinus luteus
MASRPIVPLQPQQAKGEGVIGGRRKQENKNGAANGKNRVVLGDIGNLDRVKGANINLNRPITRSLCAQLLAKAEAGENDKNLAIPNVTGPKPQVADGVVAKRRVAPKPAEKKVTAKPKPVEIVEISSGKEVQKDKSANKNKEQGDALSKKKSQTLTSVLTARSKAACGLTEKPKDQIIDIDAGDSRNELAAVEYIEDMYKFYKLAENENRPHQYMDSQPEINERMRAILVDWLIDVQTKFDLSLETLYLTINIVDRFLAVKTVLRRELQLVGVSAMLMASKYEEIWPPEVNDFVCLTDRAYTHEQILVMEKIILGKLEWTLTVPTTFVFLTRFIKASVPDQELENMGHFLSELGMMHYATLVYCPSMVAASAVFAARCTLNKTPIWNETLQLHTGYSEEQLMDCARLLVSFHSTLANGKLKVLYRKYSDPQRGAVSMHPPAKNLMPESSCGSRV

SEQ ID NO: 2763 - protein, 452 aa, Lupinus luteus
MASRPTVRLQQQARDEEVVGGGKQQKNGAGDGKNRKALGDIGNLDHVKPNRPVTRSFCAQLLANAQAAAAAENKKKLAIPNVADPKPNVADGVVAKRVAPKPAEKKVTAKPKAQEVIEINPAEEAQKNKSVNKKKEGGENKKKSRTLTSVLTARSKAACGLTNKPKEKIIDIDAGDSGNELAAVEYIEDIYKFYKLAENENRPHQYMDSQPDINEKMRAILVDWLINVHTKFDLSLETLYLTINIIDRFLALKTVPRKELQLVGISAMLMASKYEEIWPPEVDEFVCLSDRAFIHEEVLAMEKIILGKLEWTLTVPTPYVFLVRFIKASVPDQELENMAHFLSELGMMHYGTLMYCPSMIAASAVFAARCTLNKTPIWNETLKLHTGYSKEQLMDCAKLLVSFHSSIRGEKLKVLYRKYSDPERGAVAVLSPAKNLMSEGGGIDLSVVENNI

SEQ ID NO: 2764 - protein, 484 aa, Medicago sativa
MRKSVTLKAGEVPSRLTRARAVALSTSGQLPPMKEVAPGTQNQKQPLRANSKRAVSDVTYLPHEMRAILQDVTNNCGENTNRSCLNPTEIQAKKRKVAKPAQPDVSNEVPSAAERPPFIADSKPVSSMEMRLRSSEDFRCLDDLEDNAPFRMSSNQSGTNNNLLQNQTSRISARLLSSQKKASQIVAAKKGNISELLDVSKHPDVADIDADFEDPQLCSHYAADIYDHLRVAELSRRPYPNFMETVQQDITPSMRAILVDWLVEVSEGYKLQANTLFLTVYLIDWFLSKNCIERERLQLLGITCMLIATKYEEINAPRIEDFCFITDNTYVKEEVVKLESLVLKSSSYQLFAPTTKTFLRRFLRAAQASYKRPSIELEYLANYLAELTLMNYGFLNFLPSMVAASSVFLARWTLDQSSHPWNPTLEQYASYKASDLKATVLALQDLQLNSNDDCPLTAIRKKYTQDKLNCVAALSSPKLLETLF

SEQ ID NO: 2765 - protein, 452 aa, Medicago sativa
MKEVAPGTQDQKQPLRANSKRALSDVTYLPHKKRAILQDVTNNCGVNTKRSCLNPTEIQAKKRKVAKPAQPHVSNEVPSAAELPPFIADSKPVSSMEMRLRSSEDFRCLDDLEDNAPFRMSSNQCGTNNNLLQSQTSRISARPLSSQKKASQIVAAKKGNISELLDVSKHPDVADIDADFEDPQLCSHYAADIYDHLRVAELSRRPYPNFMETVQQDITPSMRAILVDWLVEVSEGYKLQANTLSLTVYLIDWFLSKNCIERERLQLLGITCMLIATKYEEINAPRIKDFCFIQDNTYTKEEVVKLESLVLKSSSYQLFAPTTKTFLRRFLRAAQASYKRPSIELEYLANYLAELTLMNYGFLNFLPSMVAASSVFLARWTLDQSSHPWNPTLEHYASYKASDLKATVLALQDLQLNSNDDCPLTTIRKKYTQDKLNCVAALSSPKLLETLF

SEQ ID NO: 2766 - protein, 480 aa, Medicago sativa
MRKSVTLKAGEVPSRLTRARAVALSTSGQLPPMKEVAPGTQNQKQPLRANSKRAVSDVTYLPHEMRAILQDVTNNCGENTNRSCLNPTEIQAKKRKVAKPAQPDVSNEVPSAAERPPFIADSKRVSSMEMRLRSSEDFRCLDDLEDNAPFRMSSNQSGTNNNLLQNQTSRISARLLSSQKKASQIVAAKKGNISELLDVSKHPDVADIDADFEDPQLCSHYAADIYDHLRVAELSRRPYPNFMETVQQDITPSMRAILVDWLVEVSEGYKLQANTLFLTVYLIDWFLSKNCIERERLQLLGITCMLIATKYEEINAPRIEDFCFITDNTYVVKLESLVLKSSSYQLFAPTTKTFLRRFLRAAQASYKRPSIELEYLANYLAELTLMNYGFLNFLPSMVAASSVFLARWTLDQSSHPWNPTLEQYASYKASDLKATVLALQDLQLNSNDDCPLTAIRKKYTQDKLNCVAALSSPKLLETLF

SEQ ID NO: 2767 - protein, 445 aa, Sesbania rostrata
MASRPIVPQQPRGDAALGAGKQQKKNGAADGRNRKALGDIGNLVTVRGVEVKPNRPITRSFCAQLLANAQAAAAAENNKKQACPNVAGPPPVVEGVAVAKRVAPKPGQKKVTTKPKPEEVIEISPDEEVHKDNNKKKEGDANTKKKSHTYSSVLTARSKAACGLTNKPKEIIDIDAADTANELAAVEYIEDIYKFYKMVENESRPHDYMDSQPEINERMRAILVDWLIDVHSKFDLSLETLYLTINIVDRFLAVKTVPRRELQLVGISAMLMASKYEEIWPPEVNDFVCLSDRAYTHEQILFMEKIILGKLEWTLTVPTPFVFLVRFIKASVPDEALENMAHFLSELGMMHYATLMYCSSMVAASAVYAARCTLNKSPVWNETLKQHTGYSEEQLMDCARLLVSLHSTVGNGKLKVVYRKYSDPERGSVAVLPPAKNLLSEGKSL

SEQ ID NO: 2768 - protein, 341 aa, Daucus carota
APSMTTPEPASKRRVVLGEISNNSSAVSGNEDLLCREFEVPKCVAQKKRKRGVKEDVGVDFGEKFDDPQMCSAYVSDVYEYLKQMEMETKRRPMMNYIEQVQKDVTSNMRGVLVDWLVEVSLEYKLLPETLYLAISYVDRYLSVNVLNRQKLQLLGVSSFLIASKYEEIKPKNVADFVDITDNTYSQQEVVKMEADLLKTLKFEMGSPTVKTFLGFIRAVQENPDVPKLKFEFLANYLAELSLLDYGCLEFVPSLIAASVTFLARFTIRPNVNPWSIALQKCSGYKSKDLKECVLLLHDLQMGRRGGSLSAVRDKYKKHKFKCVSTLSPAPEIPESIFNDV

SEQ ID NO: 2769 - protein, 443 aa, Petroselinum crispum
MASIPVVQQNRVEAAGGGAVKQKNMAAVEGRNRRALGDIGNLVTGHGIEGKQQQIPQVSRPVTRGFCAQLLANAQAGVVENNKKQRAIVGDGVVAVRQKKVSVKPKPEDIIVISPDTEEADRVNKHLNRKKATEGSLKKKGQTFTSTLTARSKAAAFGLTRKPKEQIVDIDAADANNELAAVEYVEDMYKFYKLAEHESRVFDYIDFQPEINQKMRAILVDWLIEVHNKFELMPETLYLAINILDRYLSTESVARKELQLVGISSMLTASKYEEIWPPEVNDLTKISDNAYTNQQVLIMEKKILGQLEWNLTVPTPYVFLVRFIKASIPNEPAVENMACFLTELGMMNYATVTYCPSMVAASAVYGARCTLDKAPFWNETLKSHTGFSEEQLMECGRTLVRFHSCATENKLRVIYRKYSLDERGCVAMLPPAKALLTVAKPQT

SEQ ID NO: 2770 - protein, 490 aa, Lycopersicon esculentum
MMTTQNRRSSAVAKRQAMAANSSGLEHNQTGKLNAKKRPALSNISNNTTVSARNSVSHSSKLAPCTSKIVNIKKNTSACNSNAVSSGTAVLPASSSVRPSSKPVSIQRSDAVVPKITVIPVPATCSMDISPSHSDGSLVSMDESMSNSDTVRSPEVEYIDDHELAAVDSIEKKACSTLYISEHVKAAAADICKRDVLVDLESGDKIMNIDNNLVDPQLCATMACDIYKHLRASEAKKRPSTDFMAKVQKDINPSMRAILIDWLVEVAEEYRLVPDTLHLTINYIDRYLSGNLMDRQRLQLLGVACMMIASKYEEICAPQVEEFCYITDNTYFKEEVLQMESAVLNYLKFEMTAPTAKCFLRRFVRAAQGLNEVLSLQLEHLASYIAELSLLEYNMLCYAPSLIAASAIFLAKYILLPSVKPWNSTLRHYTLYQPSDLRDCVLALHSLCCNNNNSSLPAVREKYSQHKYKFVAKKYCPPTVPVEFFQNISS

SEQ ID NO: 2771 - protein, 482 aa, Nicotiana tabacum
MATTQNRRNSVSSAVAKRQAMAENNHGKLPAGGAKKRPALTNISNHTTASARNSLSHSSKLAPCTSKVVSIKKNNSNAASSVLPTSSSFVKPISKTVSLPRSDAAVPKITAIPPLPSTCSMDISPSHSDGSLVSMDETMSTSNSLRSPDVEYIDDNQTAAFDSIEKKAFSTLYISEDVKAADICKRDVLVDMESGDKIANIDNNLVDPQLCATMACDIYKHLRATEVKKRPSTDFMEKVQKDINASMRAILIDWLVEVAEEYRLVPDTLYLTVNYIDRYLSGNLMDRQRLQLLGVACMMIASKYEEICAPQVEEFCYITDNTYFKEEVLQMESTVLNYLKFEMTAPTAKCFLRRFVRAAQGLNEVLSLQLEHLASYIAELSLLEYNMLCYAPSVIAASAIFLAKYILLPSKKPWNSTLRHYTLYQPSDLRDCVMALHSLCCNNNNSSLPAIREKYSQHKYKFVAKKYCPPTIPVEFFQNISC

SEQ ID NO: 2772 - protein, 483 aa, Nicotiana tabacum
MATTQNRRSSVSSATAKRQAMTANSSLENNNHGKLVAKKRPALTNISNHTTASARNSLSHSSKLAPCTSKAVSIKKSNSNAASSVLPTSSFVKPISKTVSIPRSDAAIPKITAIPLPATCSMDISPSHSDGSLVSMDETMSTSDSLRSPDVEYIDDNQTAAFDSIEKKAFSTLYISEDVKAADICKRDVLVDIESGDKIANIDNNFVDPQLCATMACDIYKHLRATEVKKRPSTDFMEKVQKDINASMRAILIDWLVEVAEEYRLVPDTLYLTVNYIDRYLSGNLMDRQRLQLLGVACMMIASKYEEICAPQVEEFCYITDNTYFKEEVLQMESTVLNYLKFEMTAPTAKCFLRRFVRAAQGLNEVLSLQLEHLASYIAELSLLEYNMLCYAPSVIAASAIFLAKYILLPSKKPWNSTLRHYTLYQPSDLRDCVVALHSLCCNNNNSSLPAIREKYSQHKYKFVAKKYCPPTIPVEFFQNISC

SEQ ID NO: 2773 - protein, 483 aa, Nicotiana tabacum
MATTQNRRSSVSSATTKRQAMTSNSSLENNNHGKLVAKKRPALTNISNHTTASARNSLSHSSKLAPCTSKAVSIKKSNSNAASSVLPTSSFVKPISKTVSIPRSDAAIPKITAIPLPATCSMDISPSHSDGSLVSMDETMSTSDSLRSPDVEYIDDNQTAAFDSIEKKAFSTLYISEDVKAADICKRDVLVDIESGDKIANIDNNFVDPQLCATMACDIYKHLRATEVKKRPSTDFMEKVQKDINASMRAILIDWLVEVAEEYRLVPDTLYLTVNYIDRYLSGNLMDRQRLQLLGVACMMIASKYEEICAPQVEEFCYITDNTYFKEEVLQMESTVLNYLKFEMTAPTAKCFLRRFVRAAQGLNEVLSLQLEHLASYIAELSLLEYNMLCYAPSVIAASAIFLAKYILLPSKKPWNSTLRHYTLYQPSDLRDCVVALHSLCCNNNNSSLPAIREKYSQHKYKFVAKKYCPPTIPVEFFQNISC

SEQ ID NO: 2774 - protein, 437 aa, Petunia x hybrida
MNTNRAVLVPHRGEVGGKQKNGQADGRNNRRVLGDIGNLVTGAPVIEGKPKAQISRPATRSFCAQLLANAQAEKNKVKPLAEVVNKVPAKKKASDKPAVQEAVIVISPDEEVKKKTIEKSPLSKRKAKKTGKTLTSTLTARSKAACGLSNRPKNEIDDIDAADAANHLAVVEYVEDIYNFYKLTEDESRVNNYMEFQPELNHKMRAILVDWLIEVHRKFELMPESLYLTINILDRFLSMKTVPRKELQLVGISAMLIACKYEEIWAPEVNDFMHISDNVYTRDHILQMEKAILGKLEWYLTVPTPYVFLVRYIKAAMPSDDQEIQNMAFFFAELGLMNYTTTISYCPSMLAASAVYAARGTLNKGPLWTPTLQHHTGYSEEQLMECTKQLVSYHKGAAESKLKAIYRKFSSPDRGAVALFPPARNLLPTTTTTTTSS

SEQ ID NO: 2775 - protein, 441 aa, Antirrhinum majus
MGSRHQVVQQQNRGDVVPGAIKQKSMAVEKKNRRALGDIGNVVTVRGVEGKALPQVSRPITRGFCAQLIANAEAAAAENNKNSLAVNAKGADGALPIKRAVARVPVQKKTVKSKPQEIIEISPDTEKKKAPVLEKEITGEKSLKKKAPTLTSTLTARSKAASVVRTKPKEQIVDIDAADVNNDLAVVEYVEDMYKFYKSAENDSRPHDYMDSQPEINEKMRAILIDWLVQVHYKFELSPETLYLTINIVDRYLASKTTSRRELQLLGMSSMLIASKYEEIWAPEVNDLVCISDGSYSNEQVLRMEKKILGALEWYLTVPTPYVFLVRFIKASLPDSDVEKNMVYFLAELGMMNYATIIMYCPSMIAAAAVYAARCTLNKMPIWNETLRMHTGFSEVQLMDCAKLLIDFHGGSTDQKLQGIYRKYSRLEKGAVALLPQPLLA

SEQ ID NO: 2776 - protein, 473 aa, Antirrhinum majus
MGSRNIVQQQNRAEAAVPGAMKQKNIAGEKKNRRALGDIGNLVTVRGVDGKAKAIPQVSRPVTRSFCAQLLANAQTAAADNNKINAKGAIVVDGVLPDRRVAAARVPAQKKAAVVKPRPEEIIVISPDSVAEKKEKPIEKEKAAEKSAKKKAPTLTSTLTARSKAASGVKTKTKEQIVDIDAADVNNDLAVVEYVEDMYKFYKSVENESRPHDYMGSQPEINEKMRAILIDWLVQVHHKFELSPETLYLTINIVDRYLASETTIRRELQLVGIGAMLIASKYEEIWAPEVHELVCISDNTYSDKQILVMEKKILGALEWYLTVPTPYVFLVRFIKASMTDSDVENMVYFLAELGMMNYATLIYCPSMIAAASVYAARCTLNKAPFWNETLQLHTGFSEPQLMDCAKLLVAFPKMAGDQKLKSIYRKYSNLERGAVALLSPAKSVFVFLIELLMNAIEKIQCSLFFTSEIWCRF

SEQ ID NO: 2777 - protein, 256 aa, Triticum aestivum
  unsure (1)..(256): unsure at all Xaa locations
XRKRPSTDFLETIQKDVNPSMRAILIDWLVEVAEEYRLVPDTLYLTVNYIDRYLSGNEINRQRLQLLGVACMLIAAKYEEICAPQVEEFCYITDNTYFKDEVLDMEASVLNYLKFEMTAPTAKCFLRRFVRAAQVCDEDPPLHLEFLANYVAELSLLEYSLLAYPPSLVAASAIFLSKFILQPAKHPWNSTLAHYTQYKPSELCDCVKALHRLFSVGPGSNLPAIREKYSQHKYKFVGKKQCPTSVPAEFFRDAAC

SEQ ID NO: 2778 - protein, 502 aa, Zea mays
MSTHAASRRSSSSSAVAKRPAIAEGATKAAGPGPTAAQAKKRTALVNITNVAAPGARVAAVGKVAPPVTGAKLNPATSGAPLKKPSLANARTIRGSAAKSASIKPAPPVSRHDSSSEQKHNVPVPTTVHVPSRAPALVPYSSFVSPGRSGDSVSTDETMSTCDSMKSPDFEYIDNGGCSMLASLQRRADEHLRTSEDRDVEENKWKKNGPAPMEIDSICEVDSNFEDPQLCAALASDIYMHLREAEMKKRPSTDFMETIQKDVNPSMRAILIDWLVEVAEEYRLAPDTLYLTVNYIDRYLSGNEINRQRLQLLGVACMLIAAKYEEICAPQVEEFCYITDNTYFRDEVLEMEASVLNYLKFEMTAPTAKCFLRRFARSAQACDEDPALHLEFLANYIAELSLLEYSLLSYPPSLIAASAIFLARFVLQPTKYPWNSTLAHYTQYKPSELSECVKALHRLSSVGPGSNLPAIREKYSQHKYKFVAKKQSPPQIPAEFFRDAAC

SEQ ID NO: 2779 - protein, 502 aa, Zea mays; identical to SEQ ID NO: 2778

SEQ ID NO: 2780 - protein, 512 aa, Zea mays
MSTIAASRRSSSSSSSATAKRPAIADGPGGPKATAAQAKKRVALGNITNVAARGGRASVGGSLGNVMAPTSSAKLNPTVPLKKPSLATSARSVSSSIRGSADKPASIKPAPPVARHGSATQRHNNVPPPKVPTIADVPSRAPALVSCTGLVSPGRSGDSVSSDETMSTCDSMKSPDFEYVDNQDTSMLASLQRRTSEHLRISEDRDVEENKRKKNAVAPMEIDRICDVDSEYEDPQLCATLASDIYMHLREAETKKRPSTDFMETIQKDVNPSMRAILIDWLVEVAEEYRLVPDTLYLTVNYIDRYLSGNEISRQRLQLLGVACMLIAAKYEEICAPQVEEFCYITDNTYFRDEVLDMEASVLNYLKFEMTAPTAKCFLRRFARAAQACDEDPALHLEFLANYIAELSLLEYSLLSYPPSLIAASAIFLARFILQPTKYPWNSTLAHYTQYKPSKLSECVKALHRLCSVGSGSNLPAIREKYSQHKYKFVAKKQCPPQIPSLEFFRDATCLD

SEQ ID NO: 2781 - protein, 456 aa, Zea mays
RASVGSLGNVTAPTSSAKLNPTVPLKKPSLATSARSVSSSIRGSADKPASIKPAPPVARHGSATQRHNNVPPPKVPTIADVPSRAPALVSCTGLVSPGRSGDSVSSDETMSTCDSMKSPDFEYVDNQDTSMLASLQRRTSEHLRISEDRDVEENKRKKNAVAPMEIDRICDVDSEYEDPQLCATLASDIYMHLREAETKKRPSTDFMEMIQKDVNPSMRAILIDWLVEVAEEYRLVPDTLYLTVNYIDRYLSGNEIRRKRLQLLGVACMLIAAKYEEICAPQVEEFCYITDNTYFRDEVLDMEASVLNYLKFEMTAPTAKCFLRRFARAAQACDEDPALHLEFLANYIAELSLLEYSLLSYPPSLIAASAIFLARFILQPTKYPWNSTLAHYTQYKPSKLSECVKALHRLCSVGSGSNLPAIREKYSQHKYKFVAKKQCPPQIPSLEFFRDATCLD

SEQ ID NO: 2782 - protein, 484 aa, Zea mays
  unsure (1)..(484): unsure at all Xaa locations
NSPLPHRLSRNVLLGSRAPLIGVGHGGXNAGARGAKEAVVTSGKRVALGNISNVFRGSWGSGAANSASDAKLSSTKPDDVKKGSYACLRNVNTERGSSRRLASEQFDQAVSLLQKNTSLPSVPDVVSTGCSSPXXPVSGXXSVSMEDAMSTCNSTESSDVEYLNNNDDPSMTSSSHWWASDRPHFSDSMDVAEFNWRKHSPNHXXTYKDPRLSTTLACEIYESLREAETRKMPPTNFLETTQTDMSKTMRAILIDWLVEVTEEYRLVPETLYLTVNYIDRYLSVKEISRHRLQLVGVACLLIAAKYEEICPPLVEELCYITDYSYTKEEVLQMEASVLNNLKFEMTVPTAKCFLRRFVRVAQVPDKGSSLHLEFLVNYICELSLLEYSLLCYLPSMVAASSVFLAKFILMPIKNPWNSSLSYYTRYTPSELRGCVRVLHRLFRLGPGSNLPAIREKYSQHKYKFVAKKYCPQSIPTKFFQDLTS

SEQ ID NO: 2783 - protein, 483 aa, Zea mays
  unsure (1)..(483): unsure at all Xaa locations
NSHFRTDSPEMSCWAAGGRKFASAMAENAGARGAKEAVVTSGKRVALGNISNVFRGSWGSGAANSASDAKLSSTKPDDVKKGSYACLRNVNTERGSSRRLASEQFDQAVSLLQKNTSLPSVPDVVSTGCSSPXXPVSGXXSVSMEDAMSTCNSTESSDVEYLNNNDDPSMTSSSHWWASDRPHFSDSMDVAEFNWRKHSPNHXXTYKDPRLSTTLACEIYESLREAETRKMPPSNFLXETTQTDMSKTMRAILIDWLVEVTEEYRLVPETLYLTVNYIDRYLSVKEISRHRLQLVGVACLLIAXYEEICPPLVEELCYITDYSYTKEEVLQMEASVLNNLKFEMTVTTAKCFLRRFVRVAQVPDKGSSLHLEFLVNYICELSLLEYSLLCYLPSMVAASSVFLAKFILMPIKNPWNSSLSYYTRYTPSELRGCVRVLHRLFRLGPGSNLPAIREKYSQHKYKFVAKKYCPQSIPTKFFQDLTS

SEQ ID NO: 2784 - protein, 419 aa, Dreissena polymorpha
MSQFAIHQDVENQVPRRGKAANTRTVTQGQKRAVLGVITNQANQPNRVQPSRAAKPKVPETVQDENAFAKENWKILGQTGQFSVFVDEQTKPVSKAPKSTELPSVLTAVPHTRLPLDQVPCSPEIICLDDSVESPMVLDIQEDEKKPFDREAVILTAPEYEEDIYSYLREAEAKNRAKPGYMKRQQDITSSMRSILVDWLVEVAEEYKLHRETLFLAVNYIDRFLSKISVLRGKLQLVGAASMFLAAKYEEIYPPDVTEFAYITDDTYDKKQILRMEHLILKVLAFDVAIPTTNWFCESFLKSIDAEEKLKSLTMFLSELTLIEMDSYLKYVPSITASACICLARYSLGLEPWPQSLVKKTGYEVGHFVDCLKELHKTYQAAESHPQQAVQEKYKQDKFQQVSDFTKNPVPHSLTLLAV

SEQ ID NO: 2785 - protein, 415 aa, Schizosaccharomyces pombe
MDVSTQTRHATYFQDENQLQKDHIYVKKKSHIKLNTGVPAPFKAVDNINQQDEPTLIEGNNESSISSSTGDTFEEDFAYQDKVEIEERSIRSTPKSIGDDDLENREGSFDAPEGILTHGKHRLPTIPEWTKEDLAALSEAAARLQANPSPEDIETDPSMVPDYDPEIFHYMQSLERKLAPPPNYMSVQQEIDWVTRHMLVDWIVQVQIHFRLLPETLFLAVNLIDRFLSIKVVSLQKVQLVGLSALLIACKYEEIHPPSIYNFAHVVQGIFTVDEIIRAERYMLMLLDFDISWPGPMSFLRRISRAHSYDHDIRMLAKYLQEVTLMDEIFIGAHISFIAATAYYLSMQMLGHLDWTPCHVYYSGYTARQLKPCANIIWECLVDAPNHHNAIYRKYSENRMKRVSAFAHNWVLSVI

SEQ ID NO: 2786 - protein, 310 aa, Schizosaccharomyces pombe
MDVSTQTRHATYFQDENQLQKDHIYVKKKSHIKLNTGVRAPFKAVDNINQQDEPTLIEGNNESSISSSTGDTFEEDFAYQDKVEIEERSIRSTPKSIGDDDLENREGSFDAPEGILTHGKHRLPTIPEWTKEDLAALSEAAARLQANPSPEDIETDPSMVPDYDPEIFHYMQSLERKLAPPPNYMSVQQEIDWVTRHMLVDWIVQVQIHFRLLPETLFLAVNLIDRFLSIKVVSLQKVQLVGLSALLIACKYEEIHPPSIYNFAHVVQGIFTVDEIIRAERYMLMLLDFDISWPGPMSFLRRISRADSYD

SEQ ID NO: 2787 - protein, 402 aa, Schizosaccharomyces pombe
MNSNNKRVALQEISNYVSKSLNVKGWVNAQVREISLQNGCSPSDKHFPSQSWHGISSIEESQIQKDYDSFLASPLEEEIVFTEKQLLVDLDVCSISNVQSPNCSVSEFGIAIEESNDNCAEEDEEEELQMRYSADESVSVEYAKEILSHMEKLEIRFMPDYRHMSAQPYYVTEMRASVINWIVGVHTCINLLPESLFLSINVLDRFLSLQNVPASKMKLCGATALFIACKYEEIHPPTVKDLEIVLEGEWIGEDICGMEKYMLMVLQYQLGWPGPVSFLRLLTIVNKWESQLRIMIKYFLEVSLVEQRFSSLRASQLVATCAYTGQSILQEENWSNTLPQITGYDYMSLVSYVHLLLKCLENPFDHHYAIYSKYATPYFHGISRQVHDWIATNTNLMAMDGS

SEQ ID NO: 2788 - protein, 359 aa, Schizosaccharomyces pombe
MLVSSNEEQLTAHTPTSSSSIEPKILAACSYSLSVGPCSLAVSPKGVNSKSPSLKNETAFVVDSVSTLSAESSALLYNTQSSLLTGLSMNGYLGEYQEDIIHHLITREKNFLLNVHLSNQQPELRWSMRPALVNFIVEIHNGFDLSIDTLPLSISLMDSYVSRRVVYCKHIQLVACVCLWIASKFHETEDRVPLFEELKLACKNIYAEDLFIRMERHILDTLDWDISIPTPASYIPVLDPIFFLVLDASMFVPNLFKFPASKIACSVMNIVNEHVGSFLLTHPSMESYRKDDNFLWPEDLDTVTSYMENMSKRYANEECTDLLFSSLGRISSILAKKYPEQCAMAAWCNMTEKDTERTL

SEQ ID NO: 2789 - protein, 359 aa, Schizosaccharomyces pombe
MLVSSNEEQLTAHTPTSSSSIEPKILAACSYSLSVGPCSLAVSPKGVNSKSPSLKNETAFVVDSVSTLSAESSALLYNTQSSLLTGLSMNGYLGEYQEDIIHHLITREKNFLLNVHLSNQQPELRWSMRPALVNFIVEIHNGFDLSIDTLPLSISLMDSYVSRRVVYCKHIQLVACVCLWIASKFHETEDRVPLLQELKLACKNIYAEDLFIRMERHILDTLDWDISIPTPASYIPVLDPIFFLVLDASMFVPNLFKFPASKIACSVMNIVNEHVGSFLLTHPSMESYRKDDNFLWPEDLDTVTSYMENMSKRYANEECTDLLFSSLGRISSILAKKYPEQCAMAAWCNMTEKDTERTL

SEQ ID NO: 2790 - protein, 277 aa, Schizosaccharomyces pombe
MLVSSNEEQLTAHTPTSSSSIEPKILAACSYSLSVGPCSLAVSPKGVNSKSPSLKNETAFVVDSVSTLSAESSALLYNTQSSLLTGLSMNGYLGEYQEDIIHHLITREKNFLLNVHLSNQQPELRWSMRPALVNFIVEIHNGFDLSIDTLPLSISLMDSYVSRRVVYCKHIQLVACVCLWIASKFHETEDRVPLLQELKLACKNIYAEDLFIRMERHILDTLDWDISIPTPASYIPVLDPIFFLVLDASMFVPNLFKFPASKIACSVMNIVNEHVGS

SEQ ID NO: 2791 - protein, 645 aa, Neurospora crassa
MWAPPVRYGDENIPPADPTHQSKRSDSKIKAMMAVNGTLNAPPKRAACFDKSNTSKPLADGGNKDMLKNRVKPMVTTSSTRDLRSDGRENNRSAAEEHYMRPTATSKAASHGHQKYSSTAPLSSHAASGAYGGIRSHNAIAKLSAPVKKTTNVYRDNKVKEESTSHAPTSSSVDDLVAMVDKHIKDPRHYKSQPQLKSDQQHTLHRNQSKYVPNYENLNDVDDPDDSNADYAESYEDAVEQLSRDLDIPANTDPAAIVHANHMSIAQASYDSMPQGAPLAPSKPVRALPLPPNVSDPEEYSEDDDDQDLYDDQGYTTAHSYRSHCDNTTGGPPTLVAPKFTADIQKELDIAKAWVLEHQTEEEVEEENWDVSMVAEYGDEIFEYLRELEERMLPNPHYMDIQTEIRWSMRSVLMDWLVQVHHRFSLLPETLFLTVNYIDRFLSVKVVSLGKLQLVGATAIFVAAKYEEINCPSIQELVYMVDQGYSVEEILKAEKFMLTMLNFELGWPGPMSFLRRISKADDYDLETRTLAKYLLEVTIMDERFVGCPASYLAAGAHCLSRFFLQRGPWTHAHVHFSGYTLAQLRPLIISILDCCQEPRKHHGAVYDKYSHQRFKSASTFVEGKIANGFVLPIRTNASISDSAQS

SEQ ID NO: 2792 - protein, 653 aa, Neurospora crassa
MDAKPQRPLWAPPVRYGDENIPPADPTHQSKRSDSKIKAMMAVNGTLNAPPKRAACFDKSNTSKPLADGGNKDMLKNRVKPMVTTSSTRDLRSDGRENNRSAAEEHYMRPTATSKAASHGHQKYSSTAPLSSHAASGAYGGIRSHNAIAKLSAPVKKTTNVYRDNKVKEESTSHAPTSSSVDDLVAMVDKHIKDPRHYKSQPQLKSDQQHTLHRNQSKYVPNYENLNDVDDPDDSNADYAESYEDAVEQLSRDLDIPANTDPAAIVHANHMSIAQASYDSMPQGAPLAPSKPVRALPLPPNVSDPEEYSEDDDDQDLYDDQGYTTAHSYRSHCDNTTGGPPTLVAPKFTADIQKELDIAKAWVLEHQTEEEVEEENWDVSMVAEYGDEIFEYLRELEERMLPNPHYMDIQTEIRWSMRSVLMDWLVQVHHRFSLLPETLFLTVNYIDRFLSVKVVSLGKLQLVGATAIFVAAKYEEINCPSIQELVYMVDQGYSVEEILKAEKFMLTMLNFELGWPGPMSFLRRISKADDYDLETRTLAKYLLEVTIMDERFVGCPASYLAAGAHCLSRFFLQRGPWTHAHVHFSGYTLAQLRPLIISILDCCQEPRKHHGAVYDKYSHQRFKSASTFVEGKIANGFVLPIRTNASISDSAQS

SEQ ID NO: 2793 - protein, 416 aa, Neurospora crassa
MVTSRHNDETFFVESDDQPAPRVNVRDAAKLIARNKQEMIANNLSRLACDEYLEDIMQHIRHMEDETLPDANLIDMQREIQWFMRPYLIDFLIEAHAAFSLLPETLFLTVNLLDRYCSKRVVYKQHYQLVGCAALLIAAKYGDKKDRVPQINELNNMCCGLYDAGMFTQMEMHVLNTLDWNIGHPTVDFFTQLIVAEERDSRDVEHMAAYICEIALYHRDFVSTKPSIMARVSLVLARAILGKPEVNDGEWDQVENATLLALSQHLHQPSVTLSRKYSSAYLSKVSGKLADFLAQQAAINRRGGAPPSSPGELTPNSSKASNVYSTPHKGLGAVPGAADGYMTPPITPDAASFAQNGTMMKEYPAPRCPVTPTPQPNSHSQSYPPAAQHQTSASSTSSSTKAPSYFETAPSSQVTY

SEQ ID NO: 2794 - protein, 427 aa, Caenorhabditis briggsae
MDFASSSSAGPSGSSSSFDYFPEPSTSRTSTLNRNVALPKWRMPAHLAAIVNDSEHSEKTRYFIYNRTDPNIQCDMRAFYNCMEYEEMLKPNYEYFTAVQNELTPYHREQAIDWIYDVAKEENCDGDVFLLAVALIDRFLSLQCILKHDIQMVAGVALFMASKLKAPHPLTAFKISYYSDNSLSIPMILQWELVMITALDWETESPTAFSFFDFLASSYPQIHGMRSEFQYVVHKCQKMHRLATLFPSMQCAIVLYYVSHIRHHLPLAEDIKALMVNMFQLEINLLDPYIPLVKRCLAPAPIYAVEPEQQVPAPIAPIAPIAMQEEDIDGDDEQEDDEEEEMEMVVSPKEKAPEGTLTPPNGEEEPHQVQVFAQVPECDQSPITPLNDSGFSSDFSSPSNSAEKKRRRSSDWFEDEDYTPPKIFKFK

SEQ ID NO: 2795 - protein, 405 aa, Caenorhabditis elegans
MDFESSSAGPSTSYAEEPCTLSMLPQVSAVLSETSITESNVSCQLHPSRSAALNDNVRTLIYNRTDPHIQLDMRAFYNCMEYEEALQPNYHYFTGVQENITPFHREQAIDWIYDVAKEENCDGDVFLLAVSLIDRFMSVQNILKHDIQMIAGVALFIASKLKAPHPMTASKIAYYSDNSCPIDMILQWELLIVTTLQWETESPTAFSFFDFLASRIPQIHNMRGDFQTVVQKCQKMHKLATLFPSMQCAIGLYYVSNLPTQNKELAVKIKDLLANMFQLEVNLLDSYIPMVQRCMSTTPIYTSEDAEKTEPTPSAPASTQEPEAFQELKELKEEPLPTPPPEEPAFQKLVLLEPIPLSEQTPSTPLNDSGFSSDVSSPASSEKKRRRSTDWFEEDSTPPKIFKTL

SEQ ID NO: 2796 - protein, 405 aa, Caenorhabditis elegans
MDFESSSAGPSTSYAEEPCTLSMLPQVSAVLSETSITESNVSCQLHPSRSAALNDNVRTLIYNRTDPHIQLDMRAFYNCMEYEEALQPNYHYFTGVQENITPFHREQAIDWIYDVAKEENCDGDVFLLAVSLIDRFMSVQNILKHDIQMIAGVALFIASKLKAPHPMTASKIAYYSDNSCPIDMILQWELLIVTTLQWETESPTAFSFFNFLASRIPQIHNTRGDFQTVVQKCQKMHKLATLFPSMQCAIGLYYVSNLPTQNKELAVKIKDLLANMFQLEVNLLDSYIPMVQRCMSTTPIYTSEDAEKTEPTPSAPASTQEPEAFQELKELKEEPLPTPPPEEPAFQKLVLLEPIPLSEQTPSTPLNDSGFSSDVSSPASSEKKRRRSTDWFEEDSTPPKIFKTL

SEQ ID NO: 2797 - protein, 426 aa, Patella vulgata
MSMVHGSSFQIAQDGENENQGVQRVKKAGLTARGNVAVAKRSALGTITNQNIRVQPSRAAKSGNADCQDENVFAKQKSFGSSNNENKGFKIHVDEPTVQVLTTATLKTTRQSEDEDIKLNDQVTSLPSLQALEDIQVDNENGSPMVLDVTIEDAEKKPIDREAIILSVPEYAEDIYKHLREAESRHRSKPGYMKKQPDITNSMRSILVDWMVEVSEEYKLHRETLFLAINYIDRFLSQMSVLRGKLQLVGAASMFIASKYEEIYPPEVSEFVYITDDTYEQKQVLRMEHLILKVLSFDVAQPTINWFTDTYAKMADTDETTKSLSMYLSELTLVDADPYLKYLPSTIAAASLCLANITLGSEPWPSSLAKESKYEISEFSECLQEMYQTYLNAPNHPQQAIREKYKSSKYQQVSSISPPSSLSFTM

SEQ ID NO: 2798 - protein, 422 aa, Spisula solidissima
MSQPFALHHDGENQMQRRGKMNTRSNGLSGQKRAALGVITNQVNQQVRIQPSRAAKPKSSEFNIQDENAFTKKNAKTFGQQPSQFSVFVDPTPAAPVQKAPTSHVTDIPAALTTLQRVPLTEVPGSPDIISLEDSMESPMILDLPEEEKPLDREAVILTVPEYEEDIYNYLRQAEMKNRAKPGYMKRQTDITTSMRCILVDWLVEVSEEDKLHRETLFLGVNYIDRFLSKISVLRGKLQLVGAASMFLAAKYEEIYPPDVKEFAYITDDTYTSQQVLRMEHLILKVLTFDVAVPTTNWFCEDFLKSCDADDKLKSLTMFLTELTLIDMDAYLKYLPSITAAAALCLARYSLGIEPWPQNLVKKTGYEIGHFVDCLKDLHKTSLGAESHQQQAVQEKYKQDKYHQVSDFSKNPVPHNLALLAL

SEQ ID NO: 2799 - protein, 445 aa, Asterina pectinifera
MSFAFSENPLTYDVENSQNAGPQTRKTKREDAGRGNGPQACKRAALGTLSTNVTRKQPSRAAKQSGFADGFYNYQDENAFARPAAGKSTGSCGFALPPTASQPSFSIHIDPVEPAPSRARFLKEQKPTELPLDPIGYFVTRSRKTALRTVFTLDESASPMVLDTSLSEENTAQATIEDIDNSDGVFGVPEYAEDIYEYLREAELRNRPKPGYMRKQPDITSGMRSILVDWLIEVGEEYRLHNETLYLAVSYIDRFLSQMSVLRSKLQLVGAASMFLAAKFEEIYPPEVNEFVYITDDTYTVKQVLRMEHLILKVLSFDVAVPTANAFLSRYLKAAKADSRNGTSSQYLAELTLPDCEYIKYIPSTIAAAAVCLANYTLSGTAWTPMLEKHSGYNLEDIAPCVRDLLKTFTNAPSQSQQAAQEKYKSQRYNSVSMIAAPTTLPSWL

SEQ ID NO: 2800 - protein, 410 aa, Danio rerio
MLSRLRGAAAKNRVENRENVNPNPKAANNRTVLGELENSQRRQLGLRGAKQGSGPQIIACKPEENARSFGERPSNRQPAAFQIHVDEPDGACSKKAPLQRSTMDCSPLTLNPTVTRLRQPLATIDLPLEASFDSPMDMSVIDCEERPTNVNEVSDYAAEIHTHLREMEVKSKPKAGYMRKQPDITNSMRAILVDWLVEVGEEYKLQNETLYLAVNYIDRFLSSMSVLRGKLQLVGTAAMLLASKFEEIYPPEVAEFVYITDDTYTKKQVLRMEHLVLTVLSFDLAAPTINQFLTQYFLHQPVSSKVESLSMFLGELSLIDCDPFLKYLPSQMAAAAFILANHTLASGSWSKSLVDLTGYSLEDLLPCVQDLHQTYLAASQHAQQAVREKYKGSKYHEVSLIEPPEKLMLN

SEQ ID NO: 2801 - protein, 428 aa, Danio rerio
MSTQGSAVHDSDIHNQENMLSRLRGAAAKNRVENRENVNPNPKAANNRTVLGELENSQRRQLGLRGAKQGSGPQIIACKPEENARSFGERPSNRQPAAFQIHVDEPDGACSKKAPLQRSTMDCSPLTLNPTVTRLRQPLATIDLPLEASFDSPMDMSVIDCEERPTNVNEVSDYAAEIHTHLREMEVKSKPKAGYMRKQPDITNSMRAILVDWLVEVGEEYKLQNETLYLAVNYIDRFLSSMSVLRGKLQLVGTAAMLLASKFEEIYPPEVAEFVYITDDTYTKKQVLRMEHLVLTVLSFDLAAPTINQFLTQYFLHQPVSSKVESLSMFLGELSLIDCDPFLKYLPSQMAAAAFILANHTLASGSWSKSLVDLTGYSLEDLLPCVQDLHQTYLAASQHAQQAVREKYKGSKYHEVSLIEPPEKLMLN

SEQ ID NO: 2802 - protein, 428 aa, Carassius auratus
MSSVGQTQRSAVQDPGADIHNQENMLSRLRGAAKNRIENRENVNPKPGNRTVLGALENNQRRPPVLRAAKQVSGPQITACKSEEHGSFGEKPSTRPPAFQIHVDEPDGACSKKQCTQRATMACSPLTLNPTVTRLRQPLATIDLPVEASFDSPMDMSIIDSEERPTNVNEVSDYAAEIHAHLREMEIKSKPKAGYMKKQPDITNSMRAILVDWLVEVGEEYKLQNETLYLAVNYIDRFLSSMSVLRGKLQLVGTAAMLLASKFEEIYPPEVAEFVYITDDTYTKKQVLRMEHLVLTVLSFDLAAPTINQFLTQYFLHQPVSSKVESLSMFLGELSLIDCDPFLKYLPSQTAAAAFILANHTIAGGSWSKAFVEMTGYTLEDLMPCIQDLHQTYLGAAQHTQQAVREKYKGSKYHEVSLIEPPEKLMLN

SEQ ID NO: 2803 - protein, 391 aa, Carassius auratus
MASRGFAPLSGRQENIMVLGRADGLHALKPGQRVVLGVLTENDQHNRVFGQVSSKYVPALRDASTLDVSTSSATLGVHVVEPVIAQATKPTSFLLPSELLLVDDVVQDLGSGSCMDSSMQSLPEEAAYEDILCVPEYAEDIHRYLRECEVKYRPKPGYMRKQPDITNCMRVILVDWLVEVGEEYKLCSETLFLAVNYLDRFLSCMSVLRGKLQLVGTAAVLLAAKYEEVYPPEVDEFVYITDDTYTKKQLLRMEQHLLRVLAFDMTAPTVHQFLMQYTLEGHICARTVNLALYLSELSLLEVDPFVQYLPSKTAAAAYCLANYTLNGVLWPENLYAFTGYSLAVIIPCLMELHKLHLGAAGRPQQAIQEKYKGSKYCGVSLLEPVESLPLP

SEQ ID NO: 2804 - protein, 391 aa, Carassius auratus
MASRGFAPLSGREENIMVLGRADGLHALKPGQRVVLGVLTENDQHNRVFGQVSSKYVPALRDASTLDVSTSSATLGVHVVEPVIAQATKPTSFLLPSELLLVDDVVQDLGSGSCMDSSMQSLPEEAAYEDILCVPEYAEDIHRYLRECEVKYRPKPGYMRKQPDITNCMRVILVDWLVEVGEEYKLCSETLFLAVNYLDRFLSCMSVLRGKLQLVGTAAVLLAAKYEEVYPPEVDEFVYITDDTYTKKQLLRMEQHLLRVLAFDMTAPTVHQFLMQYTLEGHICARTVNLALYLSELSLLEVDPFVQYLPSKTAAAAYCLANYTLNGVLWPENLYAFTGYSLAVIIPCLMELHKLHLGAAGRPQQAIQEKYKGSKYCGVSLLEPVESLPFP

SEQ ID NO: 2805 - protein, 418 aa, Xenopus laevis
MRRSMASNGHILTASSVVGASSAFQNPCLAKVEVQPNLPQRTVLGVIGDNEQRRRSVSRGGVPAKSLPGIENVLAFPGKILSANPAPVAPKPSFTVYVDEPTETYSVEIDCPSLGDEDSNIVKQNIHLLLDISEASPMVVDTSPQTSPEDDSVTDPDAVAVSEYIHEIHQYLREAELKHRPKAYYMRKQPDITSAMRTILVDWLVEVGEEYKLHTETLYLAMNYLDRFLSCMSVLRGKLQLVGTAAILLASKYEEIYPPDVDEFVYITDDTYSKKQLLRMEHVLLKVLAFDLTVPTVNQFLLQYLQRHAVSVKMEHLAMYMAELTLLEVEPFLKYVPSLTAAAAYCLANYALNKVFWPDTLEAFTGYALSDIAPCLSDLHQFCLGAPYQAQQAIREKYKTTKYMQVSLLEMPSILPLN

SEQ ID NO: 2806 - protein, 415 aa, Xenopus laevis
MSDHLLRDEHQENVQPRKLLVPVGGRTVLGVLQENHRGPKALKVSKPALQQTQVLSVNHLGVNDENYGKIPARKAASKQPAFTIHVDEPDCATNKRKAVHKKTVQDENLQQLNSVLGSIGTRKPLHPIQIAMETSFGSPMDVSIVDEEQKVVGCNNVADYAKEIHTYLREMEVKCKPKAGYMQKQPDITGNMRAILVDWLVEVGEEYKLQNETLYLAVNYIDRFLSSMSVLRGKLQLVGTAAMLLASKFEEIYPPEVAEFVYITDDTYTKKQVLKMEHLVLKVLSFDLAAPTILQYLNQYFQIHPVSPKVESLSMFLGELSLVDADPFLRYLPSVVAAAAFVIANCTINERTWSDPLVEYTSYTLETLKPCILDLYQTYLSAASHQQQAVREKYKAPKNHAVSLIIPPESMSTFL

SEQ ID NO: 2807 - protein, 262 aa, Ateline herpesvirus 3
MNGLFLAKMSGSKNKLNKAKIDPATMKDPRVLNNLKLRELLLPKWTSLWENQQEITISNRTTLLTWLYILCEEFDLDPSVFPLTVSILDRYLCKEQGTKTTLQKIGAACVLIASKIRTVKPMSVAHLTYLSCECFTHSELRDQEKSILEALEWDVEAVLSTDFLIPVCHALKIPEEFWPQLFELTSITICKALVQPNIALLPPCLICAGGLLTTIETENTNYQTWTHYLEDLGCILNFSTNTIRTAKDQVAEALATYNPEAI

SEQ ID NO: 2808 - protein, 395 aa, Gallus gallus
MLAEQENQENVPPAAKAPPPAAGTRVALGLLRGGPARPGPAAQAARNGEGRGAAAGQQQQPFSVYVDEPDEERRRPQRKKERDEEAADAPGLRAALGTVGERRPLAPLGNAMELSLDSPSIMDISITSEAEERPNVNNVPDYVSDIHTYLREMEVKCKPKIGYMKKQPDITNNMRAILVDWLVEVGEEYKLQNETLHLAVNYIDRFLSSMSVLRGKLQLVGTAAMLLASKFEEIYPPEVAEFVYITDDTYNKKQVLRMEHLILKVLSFDLAAPTINQFLTQYFLHQQTNAKVESLSMYLGELTLIDADPYLKYLPSVIAAAAFHLASYTITGQTWPESLCKVTGYTLEHIKPCLMDLHRTYLKAAQHTQQSIREKYKSTKYHAVSLIDAPETLDL

SEQ ID NO: 2809 - protein, 465 aa, Homo sapiens
METGFPAIMYPGSFIGGWGEEYLSWEGPGLPDFVFQQQPVESEAMHCSNPKSGVVLATVARGPDACQILTRAPLGQDPPQRTVLGLLTANGQYRRTCGQGITRIRCYSGSENAFPPAGKKALPDCGVQEPPKQGFDIYMDELEQGDRDSCSVREGMAFEDVYEVDTGTLKSDLHFLLDFNTVSPMLVDSSLLSQSEDISSLGTDVINVTEYAEEIYQYLREAEIRHRPKAHYMKKQPDITEGMRTILVDWLVEVGEEYKLRAETLYLAVNFLDRFLSCMSVLRGKLQLVGTAAMLLASKYEEIYPPEVDEFVYITDDTYTKRQLLKMEHLLLKVLAFDLTVPTTNQFLLQYLRRQGVCVRTENLAKYVAELSLLEADPFLKYLPSLIAAAAFCLANYTVNKHFWPETLAAFTGYSLSEIVPCLSELHKAYLDIPHRPQQAIREKYKASKYLCVSLMEPPAVLLLQ

SEQ ID NO: 2810 - protein, 464 aa, Homo sapiens
METGFPAIMYPGSFIGGWGEEYLSWEGPGLPDFVFQQPVESEAMHCSNPKSGVVLATVARGPDACQILTRAPLGQDPPQRTVLGLLTANGQYRRTCGQGITRIRCYSGSENAFPPAGKKALPDCGVQEPPKQGFDIYMDELEQGDRDSCSVREGMAFEDVYEVDTGTLKSDLHFLLDFNTVSPMLVDSSLLSQSEDISSLGTDVINVTEYAEEIYQYLREAEIRHRPKAHYMKKQPDITEGMRTILVDWLVEVGEEYKLRAETLYLAVNFLDRFLSCMSVLRGKLQLVGTAAMLLASKYEEIYPPEVDEFVYITDDTYTKRQLLKMEHLLLKVLAFDLTVPTTNQFLLQYLRRQGVCVRTENLAKYVAELSLLEADPFLKYLPSLIAAAAFCLANYTVNKHFWPETLAAFTGYSLSEIVPCLSELHKAYLDIPHRPQQAIREKYKASKYLCVSLMEPPAVLLLQ

SEQ ID NO: 2811 - protein, 411 aa, Homo sapiens
VLATVARGPDACQILTRAPLGQDPPQRTVLGLLTANGQYRRTCGQGITRIRCYSGSENAFPPAGKKALPDCGVQEPPKQGFDIYMDELEQGDRDSCSVREGMAFEDVYEVDTGTLKSDLHFLLDFNTVSPMLVDSSLLSQSEDISSLGTDVINVTEYAEEIYQYLREAEIRHRPKAHYMKKQPDITEGMRTILVDWLVEVGEEYKLRAETLYLAVNFLDRFLSCMSVLRGKLQLVGTAAMLLASKYEEIYPPEVDEFVYITDDTYTKRQLLKMEHLLLKVLAFDLTVPTTNQFLLQYLRRQGVCVRTENLAKYVAELSLLEADPFLKYLPSLIAAAAFCLANYTVNKHFWPETLAAFTGYSLSEIVPCLSELHKAYLDIPHRPQQAIREKYKASKYLCVSLMEPPAVLLLQ

SEQ ID NO: 2812 - protein, 432 aa, Homo sapiens
MLGNSAPGPATREAGSALLALQQTALQEDQENINPEKAAPVQQPRTRAALAVLKSGNPRGLAQQQRPKTRRVAPLKDLPVNDEHVTVPPWKANSKQPAFTIHVDEAEKEAQKKPAESQKIEREDALAFNSAISLPGPRKPLVPLDYPMDGSFESPHTMDMSIVLEDEKPVSVNEVPDYHEDIHTYLREMEVKCKPKVGYMKKQPDITNSMRAILVDWLVEVGEEYKLQNETLHLAVNYIDRFLSSMSVLRGKLQLVGTAAMLLASKFEEIYPPEVAEFVYITDDTYTKKQVLRMEHLVLKVLTFDLAAPTVNQFLTQYFLHQQPANCKVESLAMFLGELSLIDADPYLKYLPSVIAGAAFHLALYTVTGQSWPESLIRKTGYTLESLKPCLMDLHQTYLKAPQHAQQSIREKYKNSKYHGVSLLNPPETLNL

SEQ ID NO: 2813 - protein, 260 aa, Homo sapiens
NEVPDYHEDIHTYLREMEVKCKPKVGYMKKQPDITNSMRAILVDWLVEVGEEYKLQNETLHLAVNYIDRFLSSMSVLRGKLQLVGTAAMLLASKFEEIYPPEVAEFVYITDDTYTKKQVLRMEHLVLKVLTFDLAAPTVNQFLTQYFLHQQPANCKVESLAMFLGELSLIDADPYLKYLPSVIAGAAFHLALYTVTGQSWPESLIRKTGYTLESLKPCLMDLHQTYLKAPQHAQQSIREKYKNSKYHGVSLLNPPETLNL

SEQ ID NO: 2814 - protein, 261 aa, Homo sapiens
VPDYHEDIHTYLREMEVKCKPKVGYMKKQPDITNSMRAILVDWLVEVGEEYKLQNETLHLAVNYIDRFLSSMSVLRGKLQLVGTAAMLLASKFEEIYPPEVAEFVYITDDTYTKKQVLRMEHLVLKVLTFDLAAPTVNQFLTQYFLHQQPANCKVESLAMFLGELSLIDADPYLKYLPSVIAGAAFHLALYTVTGQSWPESLIRKTGYTLESLKPCLMDLHQTYLKAPQHAQQSIREKYKNSKYHGVSLLNPPETLNLLNL

SEQ ID NO: 2815 - protein, 258 aa, Homo sapiens
VPDYHEDIHTYLREMEVKCKPKVGYMKKQPDITNSMRAILVDWLVEVGEEYKLQNETLHLAVNYIDRFLSSMSVLRGKLQLVGTAAMLLASKFEEIYPPEVAEFVYITDDTYTKKQVLRMEHLVLKVLTFDLAAPTVNQFLTQYFLHQQPANCKVESLAMFLGELSLIDADPYLKYLPSVIAGAAFHLALYTVTGQSWPESLIRKTGYTLESLKPCLMDLHQTYLKAPQHAQQSIREKYKNSKYHGVSLLNPPETLNL

SEQ ID NO: 2816 - protein, 259 aa, Homo sapiens
EVPDYHEDIHTYLREMEVKCKPKVGYMKKQPDITNSMRAILVDWLVEVGEEYKLQNETLHLAVNYIDRFLSSMSVLRGKLQLVGTAAMLLASKFEEIYPPEVAEFVYITDDTYTKKQVLRMEHLVLKVLTFDLAAPTVNQFLTQYFLHQQPANCKVESLAMFLGELSLIDADPYLKYLPSVIAGAAFHLALYTVTGQSWPESLIRKTGYTLESLKPCLMDLHQTYLKAPQHAQQSIREKYKNSKYHGVSLLNPPETLNL

SEQ ID NO: 2817 - protein, 406 aa, Bos taurus
EFQEDQENVNPEKAAPAQQPRTRAGLAVLRAGNSRGPAPQRPKTRRVAPLKDLPINDEYVPVPPWKANNKQPAFTIHVDEAEEIQKRPTESKKSESEDVLAFNSAVTLPGPRKPLAPLDYPMDGSFESPHTMEMSVVLEDEKPVSVNEVPDYHEDIHTYLREMEVKCKPKVGYMKKQPDITNSMRAILVDWLVEVGEEYKLQNETLHLAVNYIDRFLSSMSVLRGKLQLVGTAAMLLASKFEEIYPPEVAEFVYITDDTYTKKQVLRMEHLVLKVLAFDLAAPTINQFLTQYFLHQQPANCKVESLAMFLGELSLIDADPYLKYLPSVIAAAAFHLALYTVTGQSWPESLVQKTGYTLETLKPCLLDLHQTYLRAPQHAQQSIREKYKNSKYHGVSLLNPPETLNV

SEQ ID NO: 2818 - protein, 268 aa, Bos taurus
GVNEVPDYHEDIHTYLREMEVKCKPKVGYMKKQPDITNSMRAILVDWLVEVGEEYKLQNETLHLAVNYIDRFLSSMSVLRGKLQLVGTAAMLLASKFEEIYPPEVAEFVYITDDTYTKKQVLRMEHLVLKVLAFDLAAPTINQFLTQYFLHQQPANCKVESLAMFLGELSLIDADPYLKYLPSVIAAAAFHLALYTVTGQSWPESLVQKTGYTLETLKPCLLDLHQTYLRAPQHAQQSIREKYKNSKYHGVSLLNPPETLNLHHHHHH

SEQ ID NO: 2819 - protein, 445 aa, Arabidopsis thaliana
MATRANVPEQVRGAPLVDGLKIQNKNGAVKSRRALGDIGNLVSVPGVQGGKAQPPINRPITRSFRAQLLANAQLERKPINGDNKVPALGPKRQPLAARNPEAQRAVQKKNLVVKQQTKPVEVIETKKEVTKKEVAMSPKNKKVTYSSVLSARSKAACGIVNKPKIIDIDESDKDNHLAAVEYVDDMYSFYKEVEKESQPKMYMHIQTEMNEKMRAILIDWLLEVHIKFELNLETLYLTVNIIDRFLSVKAVPKRELQLVGISALLIASKYEEIWPPQVNDLVYVTDNAYSSRQILVMEKAILGNLEWYLTVPTQYVFLVRFIKASMSDPEMENMVHFLAELGMMHYDTLTFCPSMLAASAVYTARCSLNKSPAWTDTLQFHTGYTESEIMDCSKLLAFLHSRCGESRLRAVYKKYSKAENGGVAMVSPAKSLLSAAADWKKPVSS

SEQ ID NO: 2820 - protein, 445 aa, Arabidopsis thaliana
MATRANVPEQVRGAPLVDGLKIQNKNGAVKSRRALGDIGNLVSVPGVQGGKAQPPINRPITRSFRAQLLANAQLERKPINGDNKVPALGPKRQPLAARNPEAQRAVQKKNLVVKQQTKPVEVIETKKEVTKKEVAMSPKNKKVTYSSVLSARSKAACGIVNKPKIIDIDESDKDNHLAAVEYVDDMYSFYKEVEKESQPRMYMHIQTEMNEKMRAILIDWLLEVHIKFELNLETLYLTVNIIDRFLSVKAVPKRELQLVGISALLIASKYEEIWPPQVNDLVYVTDNAYSSRQILVMEKAILGNLEWYLTVPTQYVFLVRFIKASMSDPEMENMVHFLAELGMMHYDTLTFCPSMQAASAVYTARCSLNKSPAWTDTLQFHTGYTESEIMDCSKLLAFLHSRCGESRLRAVYKKYSKAENGGVAMVSPAKSLLSAAADWKKPVSS

SEQ ID NO: 2821 - protein, 428 aa, Arabidopsis thaliana
MMTSRSIVPQQSTDDVVVVDGKNVAKGRNRQVLGDIGNVVRGNYPKNNEPEKINHRPRTRSQNPTLLVEDNLKKPVVKRNAVPKPKKVAGKPKVVDVIEISSDSDEELGLVAAREKKATKKKATTYTSVLTARSKAACGLEKKQKEKIVDIDSADVENDLAAVEYVEDIYSFYKSVESEWRPRDYMASQPDINEKMRLILVEWLIDVHVRFELNPETFYLTVNILDRFLSVKPVPRKELQLVGLSALLMSAKYEEIWPPQVEDLVDIADHAYSHKQILVMEKTILSTLEWYLTVPTHYVFLARFIKASIADEKMENMVHYLAELGVMHYDTMIMFSPSMVAASAIYAARSSLRQVPIWTSTLKHHTGYSETQLMDCAKLLAYQQWKQQEEGSESSTKGALRKKYSKDERFAVALIPPAKALLTGTESA

SEQ ID NO: 2822 - protein, 414 aa, Arabidopsis thaliana
MATGPVVHPQPVRGDPIDLKNAAAKNRRALGDIGNVDSLIGVEGGKLNRPITRNFRAQLLENAQVAAAANKKAPILDGVTKKQEVVRAVQKKARGDKREPSKPIEVIVISPDTNEVAKAKENKKKVTYSSVLDARSKAASKTLDIDYVDKENDLAAVEYVEDMYIFYKEVVNESKPQMYMHTQPEIDEKMRSILIDWLVEVHVKFDLSPETLYLTVNIIDRFLSLKTVPRRELQLVGVSALLIASKYEEIWPPQVNDLVYVTDNSYNSRQILVMEKTILGNLEWYLTVPTQYVFLVRFIKASGSDQKLENLVHFLAELGLMHHDSLMFCPSMLAASAVYTARCCLNKTPTWTDTLKFHTGYSESQLMDCSKLLAFIHSKAGESKLRGVLKKYSKLGRGAVALISPAKSLMSSAP

SEQ ID NO: 2823 - protein, 428 aa, Arabidopsis thaliana
MMTSRSIVPQQSTDDVVVVDGKNVAKGRNRQVLGDIGNVVRGNYPKNNEPEKINHRPRTRSQNPTLLVEDNLKKPVVKRNAVPKPKKVAGNPKVVDVIEISSDSDEELGLVAAREKKATKKKATTYTSVLTARSKAACGLEKKQKEKIVDIDSADVENDLAAVEYVEDIYSFYKSVESEWRPRDYMASQPDINEKMRLILVEWLIDVHVRFELNPETFYLTVNILDRFLSVKPVPRKELQLVGLSALLMSAKYEEIWPPQVEDLVDIADHAYSHKQILVMEKTILSTLEWYLTVPTHYVFLARFIKASIADEKMENMVHYLAELGVMHYDTMIMFSPSMVAASAIYAARSSLRQVPIWTSTLKHHTGYSETQLMDCAKLLAYQQWKQQEEGSESSTKGALRKKYSKDERFAVALIPPAKALLTGTESA

SEQ ID NO: 2824 - protein, 427 aa, Arabidopsis thaliana
MATGPVVHPQPVRGDPIDLKNAAAKNRRALGDIGNVDSLIGVEGGKLNRPITRNFRAQLLENAQVAAAANKKAPILDGVTKKQEVVRAVQKKARGDKREPSKPIEVIVISPDTNEVAKAKENKKKVTYSSVLDARSKVDSLFNIESIMCKAASKTLDIDYVDKENDLAAVEYVEDMYIFYKEVVNESKPQMYMHTQPEIDEKMRSILIDWLVEVHVKFDLSPETLYLTVNIIDRFLSLKTVPRRELQLVGVSALLIASKYEEIWPPQVNDLVYVTDNSYNSRQILVMEKTILGNLEWYLTVPTQYVFLVRFIKASGSDQKLENLVHFLAELGLMHHDSLMFCPSMLAASAVYTARCCLNKTPTWTDTLKFHTGYSESQLMDCSKLLAFIHSKAGESKLRGVLKKYSKLGRGAVALISPAKSLMSSAP

SEQ ID NO: 2825 - protein, 387 aa, Arabidopsis thaliana
MASSRVSDLPHQRGIAGEIKPKNVAGHGRQNRKVLGDIGNLVTGRDVATGKDVAKKAKQPQQQTKAEVIVISPDENEKCKPHFSRRTHIRGTKTFTATLRARSKAASGLKDAVIDIDAVDANNELAAVEYVEDIFKFYRTVEEEGGIKDYIGSQPEINEKMRSILIDWLVDVHRKFELMPETLYLTINLVDRFLSLTMVHRRELQLLGLGAMLIACKYEEIWAPEVNDFVCISDNAYNRKQVLAMEKSILGQVEWYITVPTPYVFLARYVKAAVPCDAEMEKLVFYLAELGLMQYPIVVLNRPSMLAASAVYAARQILKKTPFWTETLKHHTGYSEDEIMEHAKMLMKLRDSASESKLIAVFKKYSVSENAEVALLPSLDDFSVSCA

SEQ ID NO: 2826 - protein, 454 aa, Glycine max
MASRIVQQQQARGEAVVGGGKQQKKNGVADGRNRKALGDIGNLANVRGVVDAKPNRPITRSFGAQLLANAQAAAAADNSKRQACANVAGPPAVANEGVAVAKRAAPKPVSKKVIVKPKPSEKVTDIDASPDKKEVLKDKKKEGDANPKKKSQHTLTSVLTARSKAACGITNKPKEQIIDIDASDVDNELAAVEYIDDIYKFYKLVENESRPHDYIGSQPEINERMRAILVDWLIDVHTKFELSLETLYLTINIIDRFLAVKTVPRRELQLVGISAMLMASKYEEIWPPEVNDFVCLSDRAYTHEHILTMEKTILNKLEWTLTVPTPLVFLVRFIKASVPDQELDNMAHFLSELGMMNYATLMYCPSMVAASAVLAARCTLNKAPFWNETLKLHTGYSQEQLMDCARLLVGFYSTLENGKLRVVYRKYSDPQKGAVAVLPPAKFLLPEGSASQHS

SEQ ID NO: 2827 - protein, 462 aa, Glycine max
MASRAIVQQQQARGEAVVGGGKQQKKNGVADGRNRKALGDIGNLANIRSAVEVKPNRPITRSFGAQLLANAQAAAAAGNNKKQACANVAGPPAVANGGVAVAKRVAPKPGSKKVTVTVKPKPSEEVTDIDASPDKKEVLKDKKKEGDANPKKKSQHTLTSVLTARSKAACGITNKPKEQIIDIDASDVDNELAAVELAAVEYIDDIYKFYKLVENESRPHDYIGSQPEINERMRAILVDWLIDVHTKFELSLETLYLTINIIDRFLAVKTVPRRELQLVGISAMLMASKYEEIWPPEVNDFVCLSDRAYTHEHILTMEKTILNKLEWTLTVPTPLVFLVRFIKASVPDQELDNMAHFLSELGMMNYATLMYCPSMVAASAVLAARCTLNKAPFWNETLKLHTGYSQEQLMDCARLLVGFHSTLENGKLRVVYRKYSDPQKGAVAVLPPAKFLLPEGSASQHS

SEQ ID NO: 2828 - protein, 439 aa, Glycine max
  unsure (1)..(439): unsure at all Xaa locations
MASRLEQQQQPTNVGGENKQKNMGGEGRNRRVLQDIGNLVGKQGHGNGINVSKPVTRNFRAQLLANAQAATEKNKKSSTEVNNGAVVATDGVGVGNFVPARKVGAAKKPKEEPEVIVISSDDESSXKQAVEGKKAREKSAMKNAKGFCSVCSAMCKAACGLPSNFVMNIDATDMDNELAAAEYIDDIYKFYKETEEDGCVHDYMGSQPDINAKMRSILVDWLIEVHRKFELMPETLYLTLNIVDRFLSVKAVPRRELQLVGISSMLIASKYEEIWAPEVNDFVCISDNAYVSEQVLMMEKTILRKLEWYLTVPTPYHFLVRYTKASTPSDKEMENMVFFLAELGLMHYPTVILYRPSLIAASAVFAARCTLGRSPFWTNTLMHYTGYSEEQLRDCAKIMANLHAAAPGSKLRAVYKKFSNSDLSAVALLSPAKDLSALS

SEQ ID NO: 2829 - protein, 373 aa, Glycine max
MWLVLAVANEGVAVAKRAAPKPVSKKVIVKPKPSEKVTDIDASPDKKRVLKDKKKEGDANPKKKSQHTLTSVLTARSKAACGITNKPKEQIIDIDASDVDNELAAVELAAVEYIDDIYKFYKLVENESRPHDYIGSQPEINERMRAILVDWLIDVHTKFELSLETLYLTINIIDRFLAVKTVPRRELQLVGISAMLMASKYEEIWPPEVNDFVCLSDRAYTHEHILTMEKTILNKLEWTLTVPTPLVFLVRFIKASVPDQELDNMAHFLSELGMMNYATLMYCPSMVAASAVLAARCTLNKAPFWNETLKLHTGYSQEQLMDCARLLVGFHSTLENGKLRVVYRKYSDPQKGAVAVLPPAKFLLPEGSASQHS

SEQ ID NO: 2830 - protein, 440 aa, Glycine max
MASRLEQQQQPTNVGGENKQKNMGGEGRNRRVLQDIGNLVGKQGHGNGINVSKPVTRNFRAQLLANAQAATEKNKKSSTEVNNGAVVATDGVGVGNFVPARKVGAAKKPKEEPEVIVIISDDESDEKQAVKGKKAREKSAMKNAKAFSSVLSARSKAACGLPRDFVMNIDATDMDNELAAAEYIDDIYKFYKETEEDGCVHDYMGSQPDINAKMRSILVDWLIEVHRKFELMPETLYLTLNIVDRFLSVKAVPRRELQLVGISSMLIASKYEEIWAPEVNDFVCISDNGYVSEQVLMMEKQILRKLEWTLTVPTPYHFLVRDTKASTPSDKEMENMVFFLAELGLMHYPTVILYRPSLIAASAVFAARCTLGRSPFWTNTLMHYTGYSEEQLRDCAKIMANLHAAAAPGSKLRAVYKKFSNSDLSAVALLSPAKDLSALS

SEQ ID NO: 2831 - protein, 440 aa, Glycine max; identical to SEQ ID NO: 2830

SEQ ID NO: 2832 - protein, 275 aa, Glycine max
SGFPRRPTRPLAAVEYIDDIYKFYKLVENESHPHDYIDSQPEINERMRAILVDWLIDVHTKFELSLETLYLTINIIDRFLAVKTVPRRELQLVGISAMLMASKYEEIWPPEVNDFVCLSDRAYTHEQILAMEKTILNKLEWTLTVPTPFVFLVRFIKAAVPDQELENMAHFMSELGMMNYATLMYCPSMVAASAVFAARCTLNKAPLWNETLKLHTGYSQEQLMDCARLLVGFHSTLGNGKLRVVYRKYSDPQKGAVAVLPPAKLLSEGSASQHS

SEQ ID NO: 2833 - protein, 293 aa, Glycine max
  unsure (1)..(293): unsure at all Xaa locations
LGFFFFFFFFFFFFFFVGELGIDATDMDNELAAAEYLDDIYKFYKXTEKKGWVGXTGVRISFFNAKMRSILGDWLIEVHRKFELMPETLYLTLNIVDRFLSVKAVPRRELQLVGISSMLIASKYEEIWAPEVNDFECISDNAYVSQQVLMMEKTILRKLEWYLTVPTPYHFLGRYIKASTPSDKEMENMVFFLAELGLMHYPTAILYRPSLIAAAAVFAARCTLGRSPFWTSTLKHYTGYSEEQLRDCAKIMVNLHAAAPGSKLRAVYKKFCNSDLSAVALLSPAKENCLEQA

SEQ ID NO: 2834 - protein, 257 aa, Glycine max
DIYKFYKLVENESHPHDYIDSQPEINERMRAILVDWLIDVHTKFELSLETLYLTINIIDRFLAVKTVPRRELQLVGISAMLMASKYEEIWPPEVNDFVCLSDRAYTHEQILAMEKTILNKLEWTLTVPTPFVFLVRFIKAAVPDQELENMAHFMSELGMMNYATLMYCPSMVAASAVFAARCTLNKAPLWNETLKLHTGYSQEQLMDCARLLVGFHSTLGNGKLRVVYRKYSDPQKGAVAVLPPAKLLSEGSASQHS

SEQ ID NO: 2835 - protein, 436 aa, Catharanthus roseus
MATRNVVQVPQQNRDAAPAGMKQKNMAGEGKIRRALGDIGNLVTVRGVEGKPLPQVSRPITRSFCAQLLANAQAAAVAENNKKCKAVNVDGAADGGIIPKGARKPAQKKAATIKPKPEAVIEISSDSEQVKKEKKPSKKDAPTLTSTLTARSKAACGLSKKPKDQIIDIDAADADNELAVVEYVEDIYKFYKIAENESRVHNYMDSQPEINDKMRAILIDWLIEVHHKFELNPETLYLTINIVDRYLAVQTTLRKELQLVGMSAMLIASKYEEIWAPEVNDFVCISDRAYSHQQVLVMEKRILGGLEWNLTVPTPYVFLVRFIKASVPDSNMENMVYFFAELGMMNYSVAMMYCSSMIAASAVYAARCTFNKTPSWDDTLKLHTGFSEYQLIDCAKVLVNLHAMAADNKLKVIFRKYSSLERGSVALLPPAKSLLA

SEQ ID NO: 2836 - protein, 375 aa, Lycopersicon esculentum
TRLIAKGQEPVQKNKTKPLVTKGVAARKVGVPAKAEAIKKDYVKAKAGTISGICPEEDVKTIEKIPLKERKVRKSGKTLTSILTARSKAACGLSNKPRSQIVDIDAADIDNHLAGVEYVEDIYKFYKLTEDENRPCDYMDSQPEINDRVRAILVDWLIEAHKRFELRPESLYLTVNIMDRFLSEEPVPRRELQLLCISSMLIASKYEEIWAPEVNDFLTITDNAYVRDQILLMEKVILGKLEWYLTVPTPYVFLVRYIKAAVPSDQEMENMTFFLAELGLMNYTTVISYCPSKIAASAGYAARSTLNRSPRWTDTLKHHTGYTEDQLRECAKQLVSFHFGAAENKLKAVYRKFSSPDRCAVALLPPARDVHIGSS

SEQ ID NO: 2837 - protein, 473 aa, Nicotiana tabacum
MASRIVLQQQNRGEAVPGAVKQKKNMAPEGRNRKALGDIGNVATGRGLEGKKPLPQKPVAVKVKGANVAKVPAARKPAQKKATVKPNPEDIIEISPDTQEKLKEKMQRKKADKDSLKQKATLTSTLTARSKAACGLSKKPKEQVVDIDAADVNNELAVVEYVEDIYSFYKLAENETRVHDYMDSQPEINDRMRAVLIDWLVEVHQKFELNPETLYLTINIVDRYLAVKTTSRRELQLLGISAMLIASKYEEIWAPEVNDFVCISDKSYTHDQVLAMEKEILGQLEWYLTVPTPYVFLARFIKASLPDSEIENMVYFLAELGLMNYATIIYCPSMIAASAVYAARHTLNRTPFWNETLKLHTGFSESQLIECARLLVSYQSAAATHKLKVIYKKYSSPERGVVSLLTPAKSLLAASSSSVLSEQADLRKSTEAAATSSSKMVVVGCQRCHMYVMVTEADPRCPQCKSTTTRKMT

SEQ ID NO: 2838 - protein, 449 aa, Nicotiana tabacum
MDNNSVGVPHNLPRGEMGGKQKNAQADGRNRRALGDIGNLVPAPAAEGKPKAAQISRPVTRSFCAQLLANAQEEKNKKPLAEVVNKDVPAKKKASDKEMKTVGGSPLSKRKAKKSGKTLTSTLTARSKAACGLSNRPKYEIEDIDVADADNHLAAVEYVEDIYNFYKLTEGESRVDDDYMNFQPDLNHKMRAILVDWLIEVHRKFELMPESLYLTITILDRFLSLKTVPRKELQLVGISSMLIACKYEEIWAPEVNDFIHISDNAYAREQILQMEKAILGKLEWYLTVPTPYVFLVRYIKAATPSDNQEMENMTFFFAELGLMNYKITISYRPSMLAASSVYAARSTLNKTPLWTQTLQHHTGYSEDQLMECAKILVSYHLDAAESKLKAIYRKFSSPDRGAVAFFPPARNLLPTTTTDAASLVLEEFYFLVWEAFLGSFYCCDLSSLD

SEQ ID NO: 2839 - protein, 425 aa, Nicotiana tabacum
MDNNSVGVPHNLPRGEMGGKQKNAQADGRNRRALGDIGNLVPAPAAEGKPKAAQISRPVTRSFCAQLLANAQEEKNKKPLAEVVNKDVPAKKKASDKEMKTVGGSPLSKRKAKKSGKTLTSTLTARSKAACGLSNRPKYEIEDIDVADADNHLAAVEYVEDIYNFYKLTEGESRVDDDYMNFQPDLNHKMRAILVDWLIEVHRKFELMPESLYLTITILDRFLSLKTVPRKELQLVGISSMLIACKYEEIWAPEVNDFIHISDNAYAREQILQMEKAILGKLEWYLTVPTPYVFLVRYIKAATPSDNQEMENMTFFFAELGLMNYKITISYRPSMLAASSVYAARSTLNKTPLWTQTLQHHTGYSEDQLMECAKILVSYHLDAAESKLKAIYRKFSSPDRGAVAFFPPARNLLPTTTTDAASSSS

SEQ ID NO: 2840 - protein, 446 aa, Nicotiana tabacum
MASRNVLQQQNIGEAVPGALKQKNMAAAAQGRNRKALGDIGNNMVTVRGVEGKPLPQRPITRGFCAQLLANAQAAAENQKKSMVVNGDAPIVAKGVLPVKGAAKKPVQKKAAVKPKPDVIEISPDTEEQVKENKQKKKAGDDSSVKKATLTSTLTARSKAACGLSHKPKVQIVDIDAADVNNELAVVEYVEDIYNFYKIAENESRIHDYMDSQPEITARMRAILIDWLIEVHHKFELSQETLYLTINIVDRYLAVTTTSRRELQLVGMSAMLIASKYEEIWAPEVNDFVCISDKAYSHEQVLGMEKRILGQLEWYLTVPTPYVFLVRYIKAAVSNAQMENMVYFLAELGLMNYATNIYCPSMIAASAVYVAQHTLNCTPFWNDTLKLHTGFSESQLLGCAKLLVSYHMEAPEHKLKVIYKKYSKPERGAVALQPPAKSLLAASSYE

SEQ ID NO: 2841 - protein, 230 aa, Triticum aestivum
  unsure (1)..(230): unsure at all Xaa locations
XVHHRLMLMPETLYLTVYIIDQYLSLENVLRKELQLVGVSAMLISCKYEEIWAPLVKELLVLSDNAFSREQVLSTEKSILNKLQWNLTVPTVYVFLLRYAKAAMGDKELENMAFFYAELALVDYSMLVYSPSVTAAAAVYTARCTLNMSPGWSDILEHHTGLGESQLMQCARRLASLHSTAAGSSKQKVVYNKYANPKLGAVSLYSPAKRLXPSERLFARIISSTLPFDG

SEQ ID NO: 2842 - protein, 411 aa, Triticum aestivum
  unsure (1)..(411): unsure at all Xaa locations
MAARAHNNVAAAQQQNRALGGGPAGGKQQKAAMAGRPDPKNTRRALGDIGNVVNARAAEGKPQPHEPVNRPVTRNFGAQLLKNAQEIAMEXXVARPAVRRAHHVKPAPPPPEHVIEISSDSDVTKSEAGSVSSVRKYSRKKVVTTLSHVLSARSKFAAGITEEPAIQDIDKLDGDNQLAVVDYIEDIYKFYKVAENECRARDYMDSQVEINAKMRGILIDWILEVHQKFDLMPESLYLTVYIIDMYLSLQSVLRRELQLVGVSALLIACKYEEIWAPEVNDFILISDSAYTREQILKMEKAILNRLEWNLTVPTPYVFLVRFAKAACSSDHKNDKEMENTVFFFAELALLQYGLVQSKPSMVAAAAVYAARLTLKKTPLWTDTLKHHTGFTEAQLMDAAKILVASHSTGPX

SEQ ID NO: 2843 - protein, 418 aa, Triticum aestivum
  unsure (1)..(418): unsure at all Xaa locations
MAARAHNNVAAAQQQNRALGGGGGGGVPAMGKQQKAAMAGRPDPKNTRRALGDIGNVVDVRAAEGKPQPHEPVNRPVTRNFGAQLLKNAAGDCYRTXVARPAVRRAHHVKPAPPPPEHVIEISSDSDVTKSEAGSVSSVRKYSRKKVVTTLSHVLSARSKFAAGITEEPAIQDIDKLDGDNQLAVVDYIEDIYKFYKVAENECRAKDYMDSQVEINAKMRGILIDWILEVHQKFDLMPESLYLTVYIIDMYLSLQTVLRRELQLVGVSALLIACKYEEIWAPEVNDFILISDSAYTREQILKMEKAILNRLEWXNLTVPTPYVFLVRFAKAASSSDQKNDKXEMENTVFFFAELALLQYGLVQSKPSMVAAAAVYAARLTLKKTPLWTDTLKHHTGFTEAQLMDAAKILVASHSTGPX

SEQ ID NO: 2844 - protein, 479 aa, Zea mays; identical to SEQ ID NO: 386

SEQ ID NO: 2845 - protein, 479 aa, Zea mays
MECARELRVRSTFTAAAMASKKQVGPGGAVPAQEQMNGGDAARLVRKPMDTFPQPAAARGRRALVDVGNLMNGRPSLVNHQKQAVAAAATSHKPLNVGNKKPLVPQAAARGLRPLADVTNLMINDRAAPANRQKPLDAVFNRNGKAVKLKECKVKPEVIVSIPDSEKEKKSKFPGGQKVCRRVPTLFDNLTKCSRASDGITTPKKKNPYDIDAPDSCNELAVVEYVEDIYRFYKSTEGTCLPLSSYMSSQAEISERMRAILIDWIIEVQYRLTLMPETLYLTVYIIDQYLSMESVPRKELQLVGISAMLIASKYEEIWAPLVKDLMCLCDNAFTRDQILTKEKAILDMLHWNLTVPTMYMFIVRYLKAAMCDAELENMAFFYSELALVQYAMLVYPPSVTAAAAVYAARSTLGMNPPWTDILEHHTGLAEPQLLDCARRLISFHALAPESKQKAVYRKYSKPKLGSVALQSPDKKLLSG

SEQ ID NO: 2846 - protein, 479 aa, Zea mays; identical to SEQ ID NO: 2845

SEQ ID NO: 2847 - protein, 458 aa, Zea mays
MECARELRVRSTFTAAAMASKKQVGPGGAVPAQEQMNGGDAARLVRKPMDTFPQPAAARGRRALVDVGNLMNGRPSLVNHQKQAVAAAATSHKPLNVGNKKPLVPQAAARGLRPLADVTNLMINDRAAPANRQKPLDAVFNRNGKAVKLKECKVKPEVIVSIPDSEKEKKSKFPGGQKVCRRVPTLFDNLTKCSRASDGITTPKKKNPYDIDAPDSCNELAVVEYVEDIYRFYKSTEGTCLPLSSYMSSQAEISERMRAILIDWIIEYLSMESVPRKELQLVGISAMLIASKYEEIWAPLVKDLMCLCDNAFTRDQILTKEKAILDMLHWNLTVPTMYMFIVRYLKAAMCDAELENMAFFYSELALVQYAMLVYPPSVTAAAAVYAARSTLGMNPPWTDILEHHTGLAEPQLLDCARRLISFHALAPESKQKAVYRKYSKPKLGSVALQSPVKKLLSG

SEQ ID NO: 2848 - protein, 458 aa, Zea mays
MECARELRVRSTFTAAAMASKKQVGPGGAVPAQEQMNGGDAARLVRKPMDTFPQPAAARGRRALVDVGNLMNGRPSLVNHQKQAVAAAATSHKPLNVGNKKPLVPQAAARGLRPLADVTNLMINDRAAPANRQKPLDAVFNRNGKAVKLKECKVKPEVIVSIPDSEKEKKSKFPGGQKVCRRVPTLFDNLTKCSRASDGITTPKKKNPYDIDAPDSCNELAVVEYVEDIYRFYKSTEGTCLPLSSYMSSQAEISERMRAILIDWIIEYLSMESVPRKELQLVGISAMLIASKYEEIWAPLVKDLMCLCDNAFTRDQILTKEKAILDMLHWNLTVPTMYMFIVRYLKAAMCDAELENMAFFYSELALVQYAMLVYPPSVTAAAAVYAARSTLGMNPPWTDILEHHTGLAEPQLLDCARRLISFHALAPESKQKAVYRKYSKPKLGSVALQSPDKKLLSG

SEQ ID NO: 2849 - protein, 369 aa, Arabidopsis thaliana
MAENQNCARMTRAAAKRKASSMALDENPVSKKRVVLGELPNMSNVVAVPNQERETLKAKTSVNTSKRQMKKALMIPEASVLIESRSVDPQMCEPFASDICAYLREMEGKPKHRPLPDYIEKVQSDLTPHMRAVLVDWLVEVAEEYKLVSDTLYLTISYVDRFLSVKPINRQKLQLVGVSAMLIASKYEEIGPPKVEDFCYITDNTFTKQEVVSMEADILLALQFELGSPTIKTFLRRFTRVAQEDFKDSQLQIEFLCCYLSELSMLDYTCVKYLPSLLSASAVFLARFIIRPKQHPWNQMLEEYTKYKAADLQVCVGIIHDLYLSRRGNTLEAVRNKYKQHKYKCVATMPVSPELPLAFFEDITIRGMA

SEQ ID NO: 2850 - protein, 355 aa, Arabidopsis thaliana
MADEKENCVRMTRAATKRKASMEAAIDKERINKKRVVLGELPNLSNIKKSRKATTKQKKKSVSIPTIETLNSDIDTRSDDPQMCGPYVTSIFEYLRQLEVKSRPLVDYIEKIQKDVTSNMRGVLVDWLVEVAEEYKLLSDTLYLAVSYIDRFLSLKTVNKQRLQLLGVTSMLIASKYEEITPPNVDDFCYITDNTYTKQEIVKMEADILLALQFELGNPTSNTFLRRFTRVAQEDFEMSHLQMEFLCSYLSELSMLDYQSVKFLPSTVAASAVFLARFIIRPKQHPWNVMLEEYTRYKAGDLKECVAMIHDLYLSRKCGALEAIREKYKQHKFKCVATMPVSPELPLTVFEDVNI

SEQ ID NO: 2851 - protein, 372 aa, Arabidopsis thaliana
MTEQEICVRVTRAAAKRKASTAMGIDGDRVNKKRVVLGELLNVSNVNLLANLNQKKETQKPKRNLKPPPAKQIKSAPVAIIDLESKSDIDSRSDDPQMCGPYVADIYEYLRQLEVKPKQRPLPDYIEKVQKDVTPSMRGVLVDWLVEVAEEYKLGSETLYLTVSHIDRFLSLKTVNKQKLQLVGVSAMLIASKYEEISPPKVDDFCYITDNTFSKQDVVKMEADILLALQFELGRPTINTFMRRFTRVAQDDFKVPHLQLEPLCCYLSELSILDYKTVKFVPSLLAASAVFLARFIIRPKQHPWNQMLEEYTKYKAADLQVCVGIIHDLYLSRRGGALQAVREKYKHHKFQCVATMPVSPELPVTFWEDVTI

SEQ ID NO: 2852 - protein, 327 aa, Arabidopsis thaliana
MVSKKDKQIHSDHNPQDASPVEWAEIRHKLLAFQENIQSGSDIDARSDDPQMCGLYVSDIYEYLRELEVKPKLRPLHDYIEKIQEDITPSKRGVLVDWLVEVAEEFELVSETLYLTVSYIDRFLSLKMVNEHWLQLVGVSAMFIASKYEEKRRPKVEDFCYITANTYTKQDVLKMEEDILLALEFELGRPTTNTFLRRFIRVAQEDFKVPNLQLEPLCCYLSELSMLDYSCVKFVPSLLAASAVFLARFIILPNQHPWSQMLEECTKYKAADLQVCVEIMLDLYLSRSEGASKAVREKYKQHKFQYVAAIPVYQELPVTFWEDVVTI

SEQ ID NO: 2853 - protein, 360 aa, Glycine max
  unsure (1)..(360): unsure at all Xaa locations
MATSENNSSARPQREAKKRAAAAICNAAKKKRVVLGDVTNVSSSDVAVSVSKKPVQTHKNVKLEKPAAPVATPEKVEERHDPQLCGPYVSDIYEYLRGMEVDPSKRPLMDYVQKIQRDVNANMRGVLVDWLVEVAEEYKLVSDTLYFSVAYIDRFLSLNILSRQRLQLLGVASMLIASKYEEIKPPEVEDFCYITDNTYSKEEVVNMEAEILKALKFELGGPTVKTFLRRFSRVGQEGVDTSDLQFEFLSCYLAELSLLDYNCIKFLPSLVAASVVFLARFMFSTKTHPWNSALHQLTRYKPADLKECVLNLHDLYLSRRGASLQAVREKYKQHKFKCVATTPSPPEIPLSFFEFXGADS

SEQ ID NO: 2854 - protein, 358 aa, Glycine max
  unsure (1)..(358): unsure at all Xaa locations
MATSENNNARPQRVAKKRAAAAICELHRNAAKRKRVVLGDLTNDYVAVTEKEIQKQKKVKREQPARPVSTPEKVEERHDPQLCGPYVSDIYEYLRGMEVDPSKRPLMDYVQKIQRDVNANMRGVLVDWLVEVAEEYKLVSDTLYFSVAYIDRFLSLNILSRQRLQLLGVASMLIASKYEEIKPPEVEDFCYITDNTYSKEEVVNMEAEILKALKFELGGPTVKTFLRRFSRVGQEGVDTSDLQFEFLSCYLAELSLLDYNCIKFLPSLVAASVVFLARFMFSTKTHPWNSALHQLTRYKPADLKECVLNLHDLYLSRRGASLQAVREKYKQHKFKCVATTPSPPEIPLSFFEFXGADS

SEQ ID NO: 2855 - protein, 348 aa, Glycine max
METRAAAKRKANAAIVVVVEKQHPKRQRVVLGELPNLQNLIVSKIQNPRKEKLQCRKNPNANKPSPTNNTLSSPQLDGSYVSDIHEYLREMEMQKKRRPMVNYIEKFQKIVTPTMRGILVDWLVEVAEEYKLLSDTLHLSVSYIDRFLSVNPVTKSRLQLLGVSSMLIAAKYEETDPPSVDEFCSITDNTYDKAEVVKMEADILKSLKFEMGNPTVSTFLRRYANVASDVQKTPNSQIEHLGSYIGELSLLDYDCLRFLPSIVAASVIFLAKFIIWPEVHPWTSSLCECSGYKPAELKECVLILHDLYLSRKAASFKAVREKYKHQKFKCVANLPTPPYVPSCYFEDQ

SEQ ID NO: 2856 - protein, 348 aa, Glycine max; identical to SEQ ID NO: 2855

SEQ ID NO: 2857 - protein, 355 aa, Pisum sativum
MADQDNSTRRPQREAKKRAVAALCEQRKRKRVALGDITNDVVSETEKLVSDSHSHTQKKKKRNIAKSPVPEKLEDPQLCEPYVSDIHDYLRNLEVDPSKRPLPDYIQKVQRDINANMRGVLVDWLVEVAEEYKLVADTLYFSVSYIDRFLSLNDLSRQKLQLLGVSSMLIASKYEEIKPPEVEDFCYITDNTYSKEEVLSMEAEILKTLKFELGGPTIKTFLRRFITKVGQEGVDASELQFEFLCCYLAELSLLDYNCVKFLPSMVAASVVFLARFMLNPKSRPWNSAICQFTSYKPADLKECVLNMHDLYLGRKGATLQAVRDKYKQHKFKCVATTPSPPEISLSFFEFRGADP

SEQ ID NO: 2858 - protein, 372 aa, Catharanthus roseus
MADKENCIRVTRLAKKRAVEAMAASEQQRPSKKRVVLGELKNLSSNISSIQTYDFSSGPQKQQKNKNKRKAKESLGFEVKEKKVEEAGIDVFSQSDDPQMCGAYVSDIYEYLHKMEMETKRRPLPDYLDKVQKDVTANMRGVLIDWLVEVAEEYKLLPDTLYLTVSYIDRFLSMNALSRQKLQLLGVSSMLIASKYEEISPPHVEDFCYITDNTYKKEEVVKMEADVLKFLKFEMGNPTIKTFLRRLTRVVQDGDKNPNLQFEFLGYYLAELSLLDYGCVKFLPSLIASSVIFLSRFTLQPKVHPWNSLLQHNSGYKPADLKECVLIIHDLQLSKRGSSLVAVRDKYKQHKFKCVSTLTAPPSIPDEFFEDI

SEQ ID NO: 2859 - protein, 306 aa, Catharanthus roseus
MADKENCIRVTRLAKKRAVEAMAASEQQRPSKKRVVLGELKNLSSNISSIQTYDFSSGPQKQQKNKNKRKAKESLGFEVKEKKVEEAGIDVFSQSDDPQMCGAYVSDIYEYLHKMEMETKRRPLPDYLDKVQKDVTANMRGVLIDWLVEVAEEYKLLPDTLYLTVSYIDRFLSMNALSRQKLQLLGVSSMLIASKYEEISPPHVEDFCYITDNTYKKEEVVKMEADVLKFLKFEMGNPTIKTFLRRLTRVVQDGDKNPNLQFEFLGYYLAELSLLDYGCVKFLPSLIASSVIFLSRFTLQPKVHPW

SEQ ID NO: 2860 - protein, 378 aa, Lycopersicon esculentum
MVDEENKVPATAAASRGSNKRAFDSIAITNENDPLQISERPYPANKKRVVLGELNNLGNVIVSTQNSDLTETHESKRKIKLRKTRNVVKETVELKTSANSSPKDNLQKCSYGPLIYQHLHSLEVEERRRPLSNYMEKVQNNVIPSMRTVLVDWLVEVTEEYKLVSDTLYLAVSYIDRFLSSHVLAMEKLQLLGVSCMLVASKYEEISPPHVEDFCYITDNTYTREEVVNMERDLLSFLNFEISSPTTITFLRIFLKAAQDNLSFLTLQFEFLSCYLAELSLLDYSCVRFLPSMTAASAIFLSRFTVLPEVCPWTLALQQCTGYKPSELKDCVLVIHELQSSLMEATGRALREKYMNHKYKCVAALHPPDIPSCFFDDA

SEQ ID NO: 2861 - protein, 384 aa, Nicotiana tabacum
MKKQEKEAIMADLENCGRVTRLAKKRAAEAMASHQQQHPSKKRVVLGEIQNFSNLGVSQIKGLNTEPKKQPKSKQQQSKRKLKRAVTSKIDKEELNVDNVDANYDDPQMCSAYVSDIYDYLRKMEIEEKRRPLPDYLEKVQKDLSPNMRGVLVDWLVEVAEEYKLLSDTLYLAVSYIDRFLSTNVITRQKLQLLGVSSMLISAKYEEISPPHVEDFCYITDNTYTKEEVVKMEADVLKTLNFEMGNPTVKTFLRRFTGVAQEDYKTPNLQLEFLGYYLAELSILDYSCVKYVPSLLAAAVVFLSRFTLQPNTHPWSLALQQYSGYKAADLKECILILHDLQLSRRGGSLAAVRDKYKQHKFKCVSSLTSPVEIPASFFEDMRQL

SEQ ID NO: 2862 - protein, 371 aa, Nicotiana tabacum
MANEENKAAPTNTSRASNKRAFDDTLAAASSNGNDPLLKRVVLGELTNLEYVVGSTKTNTHNSKHKIKLKKTAPTKRKKIAIQSFKSDAATNFSPNDDLQKCAYAPLIYQHLHSLEVEARRRPLSNYMEKVQNDVTPTMRMILVDWLVEVADEYKLVSDTLYLTVTFVDRFLSSHVMARNSLQLLGVSCMLVASKYEEISPPHVEDFCYITDNTYTGEEVVNMERDLLNFLNFEISNPTTKTFLRIFTKVSQDNVDFLTLHFEFLGCYLAELSLLDYSCVRFLPSAVAASAIFLSRFTLLPKVHPWNLALQHCTGYKPSELKDCVLVIHELQSGRRAASVQAVRKKYMDHKYKCVAALHPPDIPACFFDDA

SEQ ID NO: 2863 - protein, 371 aa, Nicotiana tabacum
MANEENKASPTNTSRASNNRAFDDTLAAASSNGNDPLLKRVVLGELTNLEYVVGSTKTNTHNSKRKIKLKKTAPTKRKKVAKQSFKSDAATNFSPNDDLQKCAYAPLIYQHLHSLEVEERRRPLSNYMEKIQNDVTPTMRMILVDWLVEVADEYKLVSDTLYLTVTFIDRFLSSHVLARNSLQLLGVSCMLAASKYEEISPPHVEDFCYITDNTYTGEEVVNMERELLNFLDFEISNPTTKTFLRIFTKAAQDNVDFLTLHFEFLGCYLTELSLLDYSCVQFLPSVVAASAIFLSRFTILPKVHPWNLALQQCTGYKPSELKDCVLVIHELQSGRRAASVQAVRKKYMDHKYKCVAALHPPDIPACFFDDA

SEQ ID NO: 2864 - protein, 314 aa, Nicotiana tabacum
MADQENCVRVTRLAKKRAAEAMVQHLQQPNKKRVVLGEIRNLSNQIQMFDSEPLKPKCNKQTTKRKVKRSVSVKEREFREEDVDSKLDDDPQMCSAYVSDIYEYLHQMEIEKKRRPLSDYLEKVQKDVTANMRGVLVDWLVEVAEEYKLLSDTLYLAVAYIDRYLSIKVIPRQRLQLLGVSSMLIASKYEEIKPPRVEDFCYITDNTYTKKDVVKMEADVLQSLKFEMGNPTTKTFLRRFTRVAQEDCKNSNLKLEFLGCYLAELSLLDYNCVKFLPSLVAAAVIFLSRFTLQPKLHPWSVGLEQNSGYRACLL

SEQ ID NO: 2865 - protein, 388 aa, Oryza sativa
  unsure (1)..(388): unsure at all Xaa locations
MADKENSTPASAARLTRSSAAAGAQAKRSAAAGVADGGAPPAKRKRVALSDLPTLSNAVVVAPRQPHHPVVIKPSSKQPEPAXRRRRRPAAAAAAPPCHSAFDVDGXRPSSGWDPQYASDIYTYLRSMEVEARRQSAADYIEAVQVDVTANMRAILVDWLVEVADEYKLVADTLYLAVSYLDRYLSAHPLRRNRLQLLGVGAMLIAAKYEEISPPHVEDFCYITDNTYTRQEVVKMESDILKLLEFEMGNPTIKTFLRRFTRSCQEDKKRSSLLLEFMGSYLAELSLLDYGCLRFLPSVVAASVVFVAKLNIDPYTNPWSKKMQKLTGYKVSELKDCILAIHDLQLRKKCSNLTAIRDKYKQHKFKCVSTLLPPVDIPASYLQDLTEX

SEQ ID NO: 2866 - protein, 317 aa, Oryza sativa
  unsure (1)..(317): unsure at all Xaa locations
ARGRSMEVQPKRRPAADYIETGRVDVTANMRAILVDWLVEVAEEYKLVSDTLYLTVSYIDRFLSAKAINRQRLQLLGVSAMLIASKYEEISPPNVEDFCYITDNTYMKQEVVKMERDILNVLKFEMGNPTTKTFLRMFIRSSQEDDKYPSLPLEFMCSYLAELSLLEYGCVRLLPSVVAASVVFVARLTLDSDTNPWSKKLQEVTGYRASELKDCITCIHDLQLNRKGSSLMAIRDKYKQHRFKGVSTLLPPVEIPASYFEDLNEXMLLDDDVVRLRLSFPQDRSMVTEVERGLVSTLSTRDVLPWMLDCQSLARSS

SEQ ID NO: 2867 - protein, 357 aa, Helianthus tuberosus
MAILSPYSSSFLDTLFCNEQQDHEYHEYEYEDEFTQTTLTDSSDLHLPPLDQLDLSWEHEELVSLFTKEQEQQKQTPCTLSFGKTSPSVFAARKEAVDWILKVKSCYGFTPLTAILAINYLDRFLSSLHFQEDKPWMIQLVAVSCLSLAAKVEETQVPLLLDLQVEDTKYLFEAKNIQKMELLVMSTLKWRMNPVTPISFLDHIVRRLGLTDHVHWDFFKKCEAMILCLVSDSRFVCYKPSVLATATMLHVVDEIDPPNCIDYKSQLLDLLKTTKDDINECYELIVELAYDHHNKRKHDANETTTNPVSPAGVIDFTCDESSNESWELNAHHFREPSFKKTRMDSTIRVRVWFTYKL

SEQ ID NO: 2868 - protein, 420 aa, Oryza sativa
MDRASENRRLAAVGKPVPGIGEMGNRRPLRDINNLVGAPSHPSAIAKKPMLEKSGKEEQKPALVVSHRPMLRNFAASLTRKEQLDHQVSVADAAVVCTDPQKNPIPDGTVDDDVESCESNDYIAVDECNDTDEDESMMDIDSADSGNPLAATEYVEELYKFYRENEEMSCVQPDYMSSQGDINEKMRAILIDWLIEVHHKFELMDETLFLTVNIVDRFLEKQVVPRKKLQLVGVTAMLLACKYEEVAVPVVEDLVLISDRAYTKGQILEMEKLILNTLQFNMSVPTPYVFMRRFLKAAQSDKQLQLLSFFILELSLVEYQMLKYRPSLLSAAAVYTAQCALTRCQQWTKTCELHSRYTGEQLLECSRMMVDFHQKAGAGKLTGVHRKYSTFKFGCAAKTEPALFLLESGAGGYNLKKQPC

SEQ ID NO: 2869 - protein, 420 aa, Oryza sativa; identical to SEQ ID NO: 376

SEQ ID NO: 2870 - protein, 434 aa, Brassica napus
MGKENVVSRPLTRAFASALRASTTENQQRANTKRPASEDVNVTAPPNKKKKRAVLGDISNASFSAAKLEARDIKQVKKSQGLASASCVTSEVTDLQSGTEAKAEVVSVTAGNTNDTADNCIEKHKLPPRPLGRSSASIVEKSGVIRSSTALDLPKFTDIDSDDKDPLLCCLYAPEIYYNLRVSELKRRPVPNFMERIQKDVTQSMRGILVDWLVEVSEEYTLVPDTLYQTVYLIDWFLHGNYLERQRLQLLGITCMLIASKYEEINAPRIEEFCFITDNTYTRDQVLEMENQVLAHFSFQIYTPTPKTFLRRFLRAAQASYLIPRRELECLASYLTEVTLIDYHFLKFLPSVIAASAVFLAKWTLDQSNHPWNPTLEHYTTYKASDLKASVHALQDLQLNTKGCPLSAIRMKYKQEKFKSVAVLMSPKLLDTLF

SEQ ID NO: 2871 - protein, 62 aa, Brassica napus
MRGILVDWLLEVHVKFELNLETLYLTVNIIDRFLSVKAVPKRELQLVGISALLIASKYEEIY

SEQ ID NO: 2872 - protein, 62 aa, Brassica napus
MRGILVDWLVEVAEEYTLVPDTLYLTVYLIDWFLNGNYVERNRLQLLGVTCMLIASKYEEIY

SEQ ID NO: 2873 - protein, 63 aa, Brassica napus
MRGILADWLVEVSEEYTLVPDTLYLTVYLIDWFLHGNHIERQNLQLLGITCMLIASKYEEIYP

SEQ ID NO: 2874 - protein, 62 aa, Brassica napus
MRGILADWLVEVSEEYTLVPDTLYLTVYLIDWFLHGNHIERQNLQLLGITCMLIASKYEEIY

SEQ ID NO: 2875 - protein, 63 aa, Brassica napus
MRGILVDWLVEVSEEYTLVPDCVYLTVYLIDWFLHGKYLERQRLQLLGITCMLIASKYEEIYP

SEQ ID NO: 2876 - protein, 62 aa, Brassica napus
MRGILVDWLVEVSEEYTLVPDCVYLTVYLIDWFLHGKYLERQRLQLLGITCMLIASKYEEIY

SEQ ID NO: 2877 - protein, 56 aa, Brassica napus
DWLVEVSEEYKLASDTLYLAVNLIDRFLSNNYIEKRRLQLLGVTCMLIASKYEEIY

SEQ ID NO: 2878 - protein, 57 aa, Brassica napus
DWLVEVSEEYKLASDTLYLAVNLIDRFLSNNYIEKRRLQLLGVTCMLIASKYEEIYP

SEQ ID NO: 2879 - protein, 470 aa, Oryza sativa; identical to SEQ ID NO: 378

SEQ ID NO: 2880 - protein, 580 aa, Saccharomyces cerevisiae
MAILKDTIIRYANARYATASGTSTATAASVSAASCPNLPLLLQKRRAIASAKSKNPNLVKRELQAHHSAISEYNNDQLDHYFRLSHTERPLYNLTNFNSQPQVNPKMRFLIFDFIMYCHTRLNLSTSTLFLTFTILDKYSSRFIIKSYNYQLLSLTALWISSKFWDSKNRMATLKVLQNLCCNQYSIKQFTTMEMHLFKSLDWSICQSATFDSYIDIFLFQSTSPLSPGVVLSAPLEAFIQQKLALLNNAAGTAINKSSSSQGPSLNINEIKLGAIMLCELASFNLELSFKYDRSLIALGAINLIKLSLNYYNSNLWENINLALEENCQDLDIKLSEISNTLLDIAMDQNSFPSSFKSKYLNSNKTSLAKSLLDALQNYCIQLKLEEFYRSQELETMYNTIFAQSFDSDSLTCVYSNATTPKSATVSSAATDYFSDHTHLRRLTKDSISPPFAFTPTSSSSSPSPFNSPYKTSSSMTTPDSASHHSHSGSFSSTQNSFKRSLSIPQNSSIFWPSPLTPTTPSLMSNRKLLQNLSVRSKRLFPVRPMATAHPCSAPTQLKKRSTSSVDCDFNDSSNLKKTR

SEQ ID NO: 2881 - protein, 397 aa, Saccharomyces cerevisiae
MAILKDTIIRYANARYATASGTSTATAASVSAASCPNLPLLLQKRRAIASAKSKNPNLVKRELQAHHSAISEYNNDQLDHYFRLSHTERPLYNLTNFNSQPQVNPKMRFLIFDFIMYCHTRLNLSTSTLFLTFTILDKYSSRFIIKSYNYQLLSLTALWISSKFWDSKNRMATLKVLQNLCCNQYSIKQFTTMEMHLFKSLDWSICQSATFDSYIDIFLFQSTSPLSPGVVLSAPLEAFIQQKLALLNNAAGTAINKSSSSQGPSLNINEIKLGAIMLCELASFNLELSFKYDRSLIALGAINLIKLSLNYYNSNLWENINLALEENCQDLDIKLSEISNTLLDIAMDQNSFPSSFKSKYLNSNKTSLAKSLLDALQNYCIQLKLEEFYRSQELETM

SEQ ID NO: 2882 - protein, 414 aa, Trypanosoma brucei
MNIRTTVTLNSIPGPFGDPSSIDYKSHPGEGDTVSHVAIFEMMKKKEMTPLDDIKKLKKSVYSYRNRKIITNWLRDVCVALNLKGTTLCLAIQLTDAFISGSLQTLPIEKCQLAAATCLWDAAKFEEMDNSLPSLKKIVRVCDDAYSSEQILEMEETILCFFKWRLPHTTVINHLYLQLHMLGSEDLVSCGSVVKREPGEIVILNILVVEEDVHKWKRLEATEDCIITSIVPQLCAIAGIPASNNIEVFQVFGENVLVTRRTPLDTPLRSLYVDSKRESRLCLSNGGVNFVFVERGTLVVPRNINKRFLNQCQVLVQEVVLHVEFIQLPSHVTALGVLMLSMCILATNMVEGKSAINYIQGKLGISSSRCLAAARLLCVKYKETIEEYRKSVKLPQLPEDIMERLDMCLATRNS

SEQ ID NO: 2883 - protein, 1396 aa, Mus musculus
MPPPLLPKRSKLETEKAQSNKITPREEQQSEKIGKSNHAASSSSSSTQGAVKRRSVFEDVTNASHSQCVQSKEDNIELKSHVSKRTKKGVGEVTQKKIKSSKMGHVTSLSNMEKEFILDIPNKPKTLTTEEPSVFQKTLVLNEEPATKETCLMRKTLKSCAFHQETLLMEKPLTLLVETEDYNEFDTELMTSKKKDKPEDPTIIEEMTDLKKSVIRKVTLTSSPLWLKNKHVVQEEKPVIQEKSSFKRISLVSNVVTTKEKPPVKKPHFRKKKPTTEMKSLLQEPSLEEKYNTQEDASILKKPQVLQENTNNKDATLTEPVTFKGKHSANEATHTKKPSSSKNNPDPQGKGTNLRPLRVHPVTYENEPMSSKKSTTKKKDSHFHGPSVLPDKHSPQMEVSTVKKSLALPNPTTEEKMLHFPVATVLEKQHNMGEAPCLKKPSPLRKQQQLPKRRRFFSNSAVQETVIRKPLFFKMSTTEKDPPSQWPSALPKKHISPGELSKQKKQHVSPKHNMEEDSQCWLDSAFKKQLSREEPASTHTPLKLEMQQAITKETGFHLRNPLVLPTVTSEAKSLTKEPPSFREQNTSLLKRKSTTHTITLQQAQSEWQEMTDEDRNLFSIKPGSHRKEPIPEFLQNPLPPNENCLISQKLSHSMPFASQKTTSQERAHRKESVASNDDKNFFSQDLFSPFSSADEDTLKFHKSLDFQEQVDRKNDSHKKMFDSQDSVSEEESFLRKLFCKDRCSSTEELSQERTVALEQEFLLIKILNENTSSDVDEPLSHQSPHIQNHSDTTKEALEASEALEAPEALETLEALVASEDLEEPLNILEELSTENMVALMKMLVTEDESTKDSFSGNYTAAREAHAEKSLSLEETSINEAATLKESLSSQEKHRAELVTVLKELLVLMKNPSLKRVALAFQENPSNNVETLLREVLALVENSTADESTLQEKPSTKTDVTPKELLALEENSSNKKANPMDSLSFDHKPDTEMGEIARMVLTDEEYNIDTLYERVLALSQGLIAADQLSFTDLQNFEETKIVDEEEFFKSFLVFENKNSPNMSSNAFESRTDNSSAIMPSSKAFNPVENSNPYVSSSKSFKSTLGAKETEITIQDDSDSLERIEKEGQDPLLNTIYAKDVFNYLKEREEKFLVQKYMDGQMELTSDMRAILVDWLVEIQGSFQMTHETLYLAVKIMDLYLMKAQCKKNHLQLLGSTTYMIAAKFEESYPPSLSEFLFICEDMYEKSDMVSLESSILQTLNFDINIPTAYNFLRRYASCIHASMKTLTLSRFICEMTLQEYEYIEERPSKLAAASFILALYMRNLSNCVPTLEYFTGYKMAELHILVRKLNHLLNFRSHSILKNVFEKYSEETYFEVAKIPPLSKQDLENLLNCALFH

SEQ ID NO: 2884 - protein, 493 aa, Mus musculus
MPPPLLPKRPKLETEKAQSNKITPREEQQSEKIGKSNHAASSSSSSTQGAVKRRSVFEDVTNASHSQCVQSKEDNIELKSHVSKRTKKGVGEVTQKKIKSSKMGHVTSLSNMEKEFILDIPNKPKTLTTEEPSVFQKTLVLNEEPATKETCLMRKTLKSCAFHQETLLMEKPLTLLVETEDYNEFDTELMTSKKKDKPEDPTIIEEITIQDDSDSLERIEKEGQDPLLNTIYAKDVFNYLKEREEKFLVQKYMDGQMELTSDMRAILVDWLVEIQGSFQMTHETLYLAVKIMGLYLMKAQCKKNHLQLLGSTTYMIAAKFEESYPPSLSEFLFICEDMYEKSDMVSLESSILQTLNFDINIPTAYNFLRRYASCIHASMKTLTLSRFICEMTLQEYEYIEERPSKLAAASFILALYMRNLSNCVPTLEYFTGYKMAELHILVRKLNHLLNFRSHSILKNVFEKYSEETYFEVAKIPPLSKQDLENLLNWALFH

SEQ ID NO: 2885 - protein, 238 aa, Mus musculus
QMELTSDMRAILVDWLVEIQGSFQMTHETLYLAVKIMDLYLMKAQCKKNHLQLLGSTTYMIAAKFEESYPPSLSEFLFICEDMYEKSDMVSLESSILQTLNFDINIPTAYNFLRRYASCIHASMKTLTLSRFICEMTLQEYEYIEERPSKLAAASFILALYMRNLSNCVPTLEYFTGYKMAELHILVRKLNHLLNFRSHSILKNVFEKYSEETYFEVAKIPPLSKQDLENLLNCALFH

SEQ ID NO: 2886 - protein, 237 aa, Mus musculus
MELTSDMRAILVDWLVEIQGSFQMTHETLYLAVKIMDLYLMKAQCKKNHLQLLGSTTYMIAAKFEESYPPSLSEFLFICEDMYEKSDMVSLESSILQTLNFDINIPTAYNFLRRYASCIHASMKTLTLSRFICEMTLQEYEYIEERPSKLAAASFILALYMRNLSNCVPTLEYFTGYKMAELHILVRKLNHLLNFRSHSILKNVFEKYSEETYFEVAKIPPLSKQDLENLLNCALFH

SEQ ID NO: 2887 - protein, 352 aa, Mus musculus
MVTPCPASPGSPAAGAGRRDSHQNLRAPVKKSRRPCLRRKKPLRPLNACSLPGDSGVCDLFESPSSSSDGADSPAVSAARDCSSLLNPAQPLTALDLQTFREYGQSCYDFRKAQENLFHPRESLARQPQVTAESRCKLLSWLLQVHRQFGLSFESLCLTVNTLDRFLLTTPVAADCFQLLGVTCLLIACKQVEVHPPRLKQLLALCGGAFSRQQLCNLECIVLHKLHFSLGAPTINFFLEHFTQWRMEAGQAEVTEALEAQTLARGVAELSLTDYAFTTYTPSLMAICCLALADGLLQHQHEMDLRLGEHPEATLQDCLGKLQTLVSINSSSLPRILPPQIWERCSLPQSWQ

SEQ ID NO: 2888 - protein, 263 aa, Mus musculus
MALRVTRNTKINAENKAKVSMAGAKRVPVTVTAASKPGLRPRTALGDIGNKVSEELQARVPLKREAKTLGTGKGTVKALPKPVEKVPVCEPEVELAEPEPEPELEHVREEKLSPEPILVDNPSPSPMETSGCAPAEEYLCQAFSDVILAVSDVDADDGADPNLCSEYVKDIYAYLRQLEEEQSVRPKYLQGREVTGNMRAILIDWLIQVQMKFRLLQETMYMTVSIIDRFMQNSCVPKKMLQLVGVTAMFIASKYEEMYPPQK

SEQ ID NO: 2889 - protein, 404 aa, Mus musculus
MSRRSSRLQAKQHAQPNQPDSPQETQIIQAKKRKTAQDVKKRKEEITKKHQYEIRNCWPPVLSGGISPCIIIETPHKEIGTSDFSRFTNYRFKNLFINPSPLPDLSWACSQEVWQNMLQKENRYVHDKHFQVLHSDLEPQMRSILLDWLLEVCEVYTLHRETFYLAQDFFDRFMLTQKDVNKNMLQLIGITSLFIASKLEEIYAPKLQEFAYVTDGACSEVDILKMELNILKALKWELCPVTVISWLNLFLQVDAVKDVPKVLLPQYSQETFIQIAQLLDLCILAIDSLEFQYRILAAAALCHFTSIEVVKKASGLEWDDISECVDWMVPFVSVVKSVSPVKLKTFKKIPMEDRHNIQTHTNYLALLNEVNYVNIYRKGGQLSPVCNGGIMTPPKSTEKPPGKH

SEQ ID NO: 2890 - protein, 491 aa, Mus musculus
MPRERDSTDHSNMKEEGGSDLSVRSRKRKANVAVFLQDPDEEIAKIDKTVKSEDSSQPWDDNSACVDPCSFIPTPNKEEDNELEYPRTAFQPRKIRPPRASPLPVLNWGNREEVWRIMLNKEKTYLRDEHFLQRHPLLQARMRAVLLDWLMEVCEVYKLHRETFYLAQDFFDRYMASQQNIIKTLLQLIGISALFIASKLEEIYPPKLHQFAYVTDGACSGDEILTMELMMMKALKWRLSPLTIVSWLNVYVQVAYVNDTGEVLMPQYPQQVFVQIAELLDLCVLDVGCFRFPYGVLAASALYHFSSLELMQKVSGYQWCDIEKCVKWMVPFAMVIREMGSSKLKHFRGVPMEDSHNIQTHTNSLDLLDKAQAKKAILSEQNRISPPPSVVLTPPPSSKKAEQRAGDRMTKPAIASKDSGVEAAAWSSLCCLGGQEPLQMLCSMERCISSGAAGVCKMPWMEVLLLNARCFNYRVKYTSHLQNTTECSRSC

SEQ ID NO: 2891 - protein, 300 aa, Mus musculus
LSWACSQEVWQNMLQKENRYVHDKHFQVLHSDLEPQMRSILLDWLLEVCEVYTLHRETFYLAQDFFDRFMLTQKDVNKNMLQLIGITSLFIASKLEEIYAPKLQEFAYVTDGACSEVDILKMELNILKALKWELCPVTVISWLNLFLQVDAVKDVPKVLLPQYSQETFIQIAQLLDLCILAIDSLEFQNRILAAAALCHFTSIEVVKKASGLEWDDISECVDWMVPFVSVVKSVSPVKLKTFKKIPMEDRHNIQTHTNYLALLNEVNYVNIYRKGGQLSPVCNGGIMTPPKSTEKPPGKH

SEQ ID NO: 2892 - protein, 403 aa, Mus musculus
MSRRSRLQAKQHAQPNQPDSPQETQIIQAKKRKTAQDVKKRKEEITKKHQYEIRNCWPPVLSGGISPCIIIETPHKEIGTSDFSRFTNYRFKNLFINPSPLPDLSWACSQEVWQNMLQKENRYVHDKHFQVLHSDLEPQMRSILLDWLLEVCEVYTLHRETFYLAQDFFDRFMLTQKDVNKNMLQLIGITSLFIASKLEEIYAPKLQEFAYVTDGACSEVDILKMELNILKALKWELCPVTVISWLNLFLQVDAVKDVPKVLLPQYSQETFIQIAQLLDLCILAIDSLEFQYRILAAAALCHFTSIEVVKKASGLEWDDISECVDWMVPFVSVVKSVSPVKLKTFKKIPMEDRHNIQTHTNYLALLNEVNYVNIYRKGGQLSPVCNGGIMTPPKSTEKPPGKH

SEQ ID NO: 2893 - protein, 295 aa, Mus musculus
MEHQLLCCEVETIRRAYPDTNLLNDRVLRAMLKTEETCAPSVSYFKCVQKEIVPSMRKIVATWMLEVCEEQKCEEEVFPLAMNYLDRFLSLEPLKKSRLQLLGATCMFVASKMKETIPLTAEKLCIYTDNSIRPEELLQMELLLVNKLKWNLAAMTPHDFIEHFLSKMPEADENKQTIRKHAQTFVALCATDVKFISNPPSMVAAGSVVAAMQGLNLGSPNNFLSCYRTTHFLSRVIKCDPDCLRACQEQIEALLESSLRQAQQNVDPKATEEEGEVEEEAGLACTPTDVRDVDI

SEQ ID NO: 2894 - protein, 480 aa, Mus musculus
MTVSCIAYQLHKPVDHFLLKLGNSGKMCGVGGDDLVEAMPRQKTTDCKWCYFSQQLENDLETTVVNINRVSAKPTLSASNRGAMALRGTRNTKVNTENKARISMAGAKRVPVAIAAASKPRLRWRTALGDIGTKVQARVPLKKEAKTLGTVKVLPKPVEKVPEVKLAEPGPELELDLNLNLFWLIIPPSQAQWKHLNVHLQKNICVRLFSDVILAVSDVDADDDDGADPNLCSEYVNDIYAYLRQLEEEQSVRPKYLQGREVTGNMRAILIDWLIQVQMKFRLLQETMYMTLSMTDRFVQNSCVPKKMLQLVGVTAMFIASNYEEMHPPEIASKIGEVDAEQHTLAKYLMALSLLDMAHFAPPQIAAGAFCLALESLDNGEWTPTLQHYLSYTEKSLLPLMQHLAKNRVMVNRGLTKHMTVKNKYAASKHDAVPSKISTLAQLNSSTAVMDAGENSSSLGSGYVISLALPLPQRLVLKQM

SEQ ID NO: 2895 - protein, 379 aa, Mus musculus
MELEGQWWRGQLAADIHQALRYKELKLPSYKGQSPQLNLRRYFADLIAIVSNRFTLCPPARHLAVYLLDLFMDRYDISIQQLHLVALSCLLLASKFEEKEDSVPKLEQLNSLGCMTNMNLVLTKQTLLHMELLLLETFQWNLCLPTAAHFIEYYLSEAVHETDLHDGWPMVCLEKTKLYMAKYADYFLEVSLQDYAFLNYAPSLVAAACVASSRIILRLSPTWPTRLHRLTAYSWDFLVQCIERLLLAHDNDVKEANKQRGQSAPQSTQLTVFQTAQPSRPVHFQQPQYLHQSSLQYRHPVSEQPSRQQIVSTTHTSSYTLQTCPAGFQTSVQGLGHMQTGVGMSLAIPVEVKPCLSVSYNRSYQINEHFPCITPCFER

SEQ ID NO: 2896 - protein, 776 aa, Mus musculus
MGSGGVIHCRCAKCFCYPTKRRIKRRPRNLTILSLPEDVLFHILKWLSVGDILAVRAVHSHLKYLVDNHASVWASASFQELWPSPQNLKLFQRAAEKGNFEAAVKLGIAYLYNEGLSVSDEACAEVNGLKATRFFSMAERLNTGSEPFIWLFIRPPWSVSGSCCKAVVHDSLRAECQLQRSHKASILHCLGRVLNLFEDEEKRKQARSLLEESSRQGCLISSYLLWESDRKVDMSDPGRCLHSFRKLRDYAAKGCWEAQLALAKACAGGSQLGLEGKACSESVCQLFQASQAVNKQQIFSGQKGLSDTMRYILIDWLVEVATMKDFTSLCLHLTVECVDRYLRRRLVPRYKLQLLGIACMVICTRFISKEILTIREAVWLTDNTYKYEDLVRVMGEIISALEGKIRIPTVVDYKEVLLTLVPVAPRTQHLCSFLCELTLLHTSLSIYAPARLAAAALLLARLMHGQTQPWTTHLWDLTGFSYSDLVPCVLSLHKKCFHDDAPKDYRQISLTAVKQRFEDKCYEEISQEEVLSYADLCSAIGVKQESPEPPSFPSSGEIHTFLSSPSGESKRKRENSLQEDRGSFVTTPTAELSNQEETLLGSLLDWSLECCSGYEGDQESEGEKEGDVTAPSRLLDVTVVYLNPEEHCCQESSDEEAWPEDKIHPAPGTQAPPASAPRPLLCNRGDRAKDITTSGYSSVSSSSPISSLDGGMGGSPQSTSVLSVGSHSSTKPCHHQAKKSCLQCRPPNSPESGVHQQPVKRQNLSVHSDKDTHLAS

SEQ ID NO: 2897 - protein, 777 aa, Mus musculus
MGSGGVIHCRCAKCFCYPTKRRIKRRPRNLTILSLPEDVLFHILKWLSVGDILAVRAVHSHLKYLVDNHASVWASASFQELWPSPQNLKLFERAAEKGNFEAAVKLGIAYLYNEGLSVSDEACAEVNGLKASRFFSMAERLNTGSEPFIWLFIRPPWSVSGSCCKAVVHDSLRAECQLQRSHKASILHCLGRVLNLFEDEEKRKQARSLLEESSRQGCLISSYLLWESDRKVDMSDPGRCLHSFRKHRDYAAKGCWEAQLALAKACAGGSQLGLEGKACSESVCQLFQASQAVNKQQIFSVQKGLSDTMRYILIDWLVEVATMKDFTSLCLHLTVECVDRYLRRRLVPRYKLQLLGIACMVICTRFISKEILTIREAVWLTDNTYKYEDLVRVMGEIISALEGKIRIPTVVDYKEVLLTLVPVAPRTQHLCSFLCELTLLHTSLSIYAPARLASAALLLARLMHGQTQPWTTHLWDLTGFSYSDLVPCVLSLHKKCFHDDAPKDYRQVSLTAVKQRFEDKCYEEISREEVLSYADLCSTIGVKQESPEPPSFPSSGEIHTFLSSPSGRRSKRKRENSLQEDRGSFVTTPTAELSNQEETLLGSLLDWSLECCSGYEGDQESEGEKEGDVTAPSRLLDVTVVYLNPEEHCCQESSDEEAWPEDKIHPAPGTQAPPASAPRPLLCNRGDRAKDITTSGYSSVSSSSPISSLDGGMGGSPQSTSVLSVGSHSSTKPCHHQAKKSCLQCRPPNSPESGVHQQPVKRQNLSVHSDKDMHLAS

SEQ ID NO: 2898 - protein, 777 aa, Mus musculus
MGSGGVIHCRCAKCFCYPTKRRIKRRPRNLTILSLPEDVLFHILKWLSVGDILAVRAVHSHLKYLVDNHASVWASASFQELWPSPQNLKLFERAAEKGNFEAAVKLGIAYLYNEGLSVSDEACAEVNGLKASRFFSMAERLNTGSEPFIWLFIRPPWSVSGSCCKAVVHDSLRAECQLQRSHKASILHCLGRVLNLFEDEEKRKQARSLLEESSRQGCLISSYLLWESDRKVDMSDPGRCLHSFRKLRDYAAKGCWEAQLALAKACAGGSQLGLEGKACSESVCQLFQASQAVNKQQIFSVQKGLSDTMRYILIDWLVEVATMKDFTSLCLHLTVECVDRYLRRRLVPRYKLQLLGIACMVICTRFISKEILTIREAVWLTDNTYKYEDLVRVMGEIISALEGKIRIPTVVDYKEVLLTLVPVAPRTQHLCSFLCELTLLHTSLSIYAPARLASAALLLARLMHGQTQPWTTHLWDLTGFSYSDLVPCVLSLHKKCFHDDAPKDYRQVSLTAVKQRFEDKCYEEISREEVLSYADLCSTIGVKQESPEPPSFPSSGEIHTFLSSPSGRRSKRKRENSLQEDRGSFVTTPTAELSNQEETLLGSLLDWSLECCSGYEGDQESEGEKEGDVTAPSRLLDVTVVYLNPEEHCCQESSDEEAWPEDKIHPAPGTQAPPASAPRPLLCNRGDRAKDITTSGYSSVSSSSPISSLDGGMGGSPQSTSVLSVGSHSSTKPCHHQAKKSCLQCRPPNSPESGVHQQPVKRQNLSVHSDKDMHLAS

SEQ ID NO: 2899 - protein, 816 aa, Mus musculus
MGSGGGECWRDGVGDRSYGTEAGGAWTRAPVTRECASHPPKHGVVIHCRCAKCFCYPTKRRIKRRPRNLTILSLPEDVLFHILKWLSVGDILAVRAVHSHLKYLVDNHASVWASASFQEPWPSPQNLKLFERAAEKGNFEAAVKLGIAYLYNEGLSVSDEACAEVNGLKASRFFSMAERLNTGSEPFIWLFIRPPWSVSGSCCKAVVHDSLRAECQLQRSHKASILHCLGRVLNLFEDEEKRKQARSLLEESSRQGCLISSYLLWESDRKVDMSDPGRCLHSFRKLRDYAAKGCWEAQLALTKACAGGSQLGLEGKACSESVCQLFQATQAVNKQQIFSVQKGLSDTMRYILIDWLVEVATMKDFTSLCLHLTVECVDRYLRRRLVPRYKLQLLGIACMVICSRFISKEILTIREAVWLTDNTYKYEDLVRVMGEIISALEGKIRIPTVVDYKEVLLTLVPVAPRTQHLCSFLCELTLLHTSLSIYAPARLASAALLLARLMRGQTQPWTTHLWDLTGFSYSDLVPCVLSLHKKCFHDDAPKDYRQISLTAVKQRFEDKCYEEISREEVLSYADLCSAIGVKQESPEPPSFPSSGEIHTFLSSPSERRSKRKRENSLQEDRGSFVTTPTAELSNQEETLLGGLLDWSLECCSGYEGDQESEGRKEGDVTAPSRLLDVTVVYLNPEEHCCQESSDEEAWPEDKIHPAPGTQAPPASAPRPLLCNRGDRAKDITTSGYSSVSSSSPISSLDGGMGGSPQSTSVLSVGSHSSTKPCHHQAKKSCLQCRPPNSPESGVHQQPVKRQNLSVHSDKDTHLAS

SEQ ID NO: 2900 - protein, 777 aa, Mus musculus
MGSGGVIHCRCAKCFCYPTKRRIKRRPRNLTILSLPEDVLFHILKWLSVGDILAVRAVHSHLKYLVDNHASVWASASFQEPWPSPQNLKLFERAAEKGNFEAAVKLGIAYLYNEGLSVSDEACAEVNGLKASRFFSMAERLNTGSEPFIWLFIRPPWSVSGSCCKAVVHDSLRAECQLQRSHKASILHCLGRVLNLFEDEEKRKQARSLLEESSRQGCLISSYLLWESDRKVDMSDPGRCLHSFRKLRDYAAKGCWEAQLALTKACAGGSQLGLEGKACSESVCQLFQATQAVNKQQIFSVQKGLSDTMRYILIDWLVEVATMKDFTSLCLHLTVECVDRYLRRRLVPRYKLQLLGIACMVICSRFISKEILTIREAVWLTDNTYKYEDLVRVMGEIISALEGKIRIPTVVDYKEVLLTLVPVAPRTQHLCSFLCELTLLHTSLSIYAPARLASAALLLARLMRGQTQPWTTHLWDLTGFSYSDLVPCVLSLHKKCFHDDAPKDYRQISLTAVKQRFEDKCYEEISREEVLSYADLCSAIGVKQESPEPPSFPSSGEIHTFLSSPSERRSKRKRENSLQEDRGSFVTTPTAELSNQEETLLGGLLDWSLECCSGYEGDQESEGRKEGDVTAPSRLLDVTVVYLNPEEHCCQESSDEEAWPEDKIHPAPGTQAPPASAPRPLLCNRGDRAKDITTSGYSSVSSSSPISSLDGGMGGSPQSTSVLSVGSHSSTKPCHHQAKKSCLQCRPPNSPESGVHQQPVKRQNLSVHSDKDTHLAS

SEQ ID NO: 2901 - protein, 775 aa, Mus musculus
MGSGGVIHCRCAKCFCYPTKRRIKRRPRNLTILSLPEDVLFHILKWLSVGDILAVRAVHSHLKYLVDNHASVWASASFQELWPSPQNLKLFERAAEKGNFEAAVKLGIAYLYNEGLSVSDEACAEVNGLKASRFFSMAERLNTGSEPFIWLFIRPPWSVSGSCCKAVVHDSLRAECQLQRSHKASILHCLGRVLNLFEDEEKRKQARSLLEESSRQGCLISSYLLWESDRKMSDPGRCLHSFRKLRDYAAKGCWEAQLALAKACAGGSQLGLEGKACSESVCQLFQASQAVNKQQIFSVQKGLSDTMRYILIDWLVEVATMKDFTSLCLHLTVECVDRYLRRRLVPRYKLQLLGIACMVICTRFISKEILTIREAVWLTDNTYKYEDLVRVMGEIISALEGKIRIPTVVDYKEVLLTLVPVAPRTQHLCSFLCELTLLHTSLSIYAPARLASAALLLARLMHGQTQPWTTHLWDLTGFSYSDLVPCVLSLHKKCFHDDAPKDYRQISLTAVKQRFEDKCYEEISREEVLSYADLCSAIGVKQESPEPPSFPSSGEIHTFLSSPSGRRSKRKRENSLQEDRGSFVTTPTAELSNQEETLLGSLLDWSLECCSGYEGDQESEGEKEGDVTAPSRLLDVTVVYLNPEEHCCQESSDEEAWPEDKIHPAPGTQAPPASAPRPLLCNRGDRAKDITTSGYSSVSSSSPISSLDGGMGGSPQSTSVLSVGSHSSTKPCHHQAKKSCLQCRPPNSPESGVHQQPVKRQNLSVHSDKDTHLAS

SEQ ID NO: 2902 - protein, 292 aa, Mus musculus
MELLCCEGTRHAPRAGPDPRLLGDQRVLQSLLRLEERYVPRASYFQCVQKEIKPHMRKMLAYWMLEVCEEQRCEEDVFPLAMNYLDRYLSCVPTRKAQLQLLGTVCLLLASKLRETTPLTIEKLCIYTDQAVAPWQLREWEVLVLGKLKWDLAAVIAHDFLALILHRLSLPSDRQALVKKHAQTFLALCATDYTFAMYPPSMIATGSIGAAVLGLGACSMSADELTELLAGITGTEVDYLRACQEQIEAALRESLREAAQTAPSPVPKAPRGSSSQGPSQTSTPTDVTAIHL

SEQ ID NO: 2903 - protein, 292 aa, Mus musculus
MELLCCEGTRHAPRAGPDPRLLGDQRVLQSLLRLEERYVPRASYFQCVQKEIKPHMRKMLAYWMLEVCEEQRCEEDVFPLAMNYLDRYLSCVPTRKAQLQLLGTVCLLLASKLRETTPLTIEKLCIYTDQAVAPWQLREWEVLVLGKLKWDLAAVIAHDFLALILHRLSLPSDRQALVKKHAQTFLALCATDYTFAMYPPSMIATGSIGAAVLGLGACSMSADELTELLAGITGTEVDCLRACQEQIEAALRESLREAAQTAPSPVPKAPRGSSSQGPSQTSTPTDVTAIHL

SEQ ID NO: 2904 - protein, 237 aa, Mus musculus
MRKMLAYWMLEVCEEQRCEEDVFPLAMNYLDRYLSCVPTRKAQLQLLGTVCLLLASKLRETTPLTIEKLCIYTDQAVAPWQLREWEVLVLGKLKWDLAAVIAHDFLALILHRLSLPSDRQALVKKHAQTFLALCATDYTFAMYPPSMIATGSIGAAVLGLGACSMSADELTELLAGITGTEVDCLRACQEQIEAALRESLREAAQTAPSPVPKAPRGSSSQGPSQTSTPTDVTAIHL

SEQ ID NO: 2905 - protein, 289 aa, Mus musculus
MELLCCEVDPVRRAVPDRNLLEDRVLQNLLTIEERYLPQCSYFKCVQKDIQPYMRRMVATWMLEVCEEQKCEEEVFPLAMNYLDRFLAGVPTPKTHLQLLGAVCMFLASKLKETIPLTAEKLCIYTDNSVKPQELLEWELVVLGKLKWNLAAVTPHDFIEHILRKLPQQKEKLSLIRKHAQTFIALCATDFKFAMYPPSMIATGSVGAAICGLQQDDEVNTLTCDALTELLAKITHTDVDCLKACQEQIEALLLNSLQQFRQEQHNAGSKSVEDPDQATTPTDVRDVDL

SEQ ID NO: 2906 - protein, 468 aa, Oryza sativa
  unsure (1)..(468): unsure at all Xaa locations
MATRSQNVAAAPQPPQNRGNVAALGKQKAVVAGRPDAKNRRALGEIGNVMNVRLPEGXSLCSRRRPVDXHFGXQLLKNAQANAAAQGAPADVARPAQRQARKAPVKPAPPPPEHVIEISSDSDQSMRQQSEGSASSVRKCSRKKVINTLTSVLTARSKVACGITDKPREVIEDIDKLDGDNELAVVDYIEDIYKFYKVAENECRPCDYIDTQVEINSKMRAILADWIIEVHHKFELMPETLYLSMYVIDRYLSMQQVQRRELQLVGVSAMLIACKYEEIWAPEVNDFILISDSAYTREQILAMEKGILNKLQWNLTVPTAYVFIMRYLKAGASADNKSDKEMEHMAFFFAELALMQYGLVASLPSKVAASAVYAARLTLKKSPLWTDTLKHHTGFTESQLLDSAKLLVTSHSTAPESKLRVVYKKYSSEQLGGVALRSPAVELCKXMEISFVSYFVCLFGLECNGRRV

SEQ ID NO: 2907 - protein, 858 aa, Oryza sativa
  unsure (1)..(858): unsure at all Xaa locations
MEALAGGRPLSGRARQVGRSREEELLGLLSDFSGDSGEFGRELSFSDLVVVEDTANNPSPRGGDGGGDRAAPTAAAAENGQARPSSSSEQEEAAEAASRRQQQQQAAAAARERRLRRRRSDSRGSCGGSGDGVLLNFYVPGLLTRSMTTPRPAARGTLPGAAAAAAAPATAAAGKARMDAPLAVGCWPALWGGGGRRDRRKPAKPAAGRRDTRVVTTVTLGGSVRVDKKKKSFNKIVRKQKQLFSRVQCVMLSCENRKPNAAHRIGMGHGPPVPGAPRRALGRDFHRARFAVESTPRHPGRRSSRPLEASPSAPDKARAPHRAAPPTPTHLRVSPLRSKQIKQEQEILERELEERREKRRRRGRPPASVREGVRRSSWRSWSPEEEEEEQQEAVRMATRHQRAAAAPQPANRGAAVAAGKQKAAATAAAGRPGARNRQALGDIGNVLNAHVVDGKIXSCRRGSIXPITRSFGAQLLKKAQENAVAANKIVVQNPARKEPAPKXRQRRSYPVRRTPPRPAPAPASTRTRSRRSRRAPAAAAAVQPSSXSRKKVVNTLTSVLTXARSKHACGITEKPKEVVEDIDKLDGDNQLAVVEYIEDIYNFYRTAQLERRPTDYMSSQVEVNPKMRAILADWIIDVHYKFELMPETLYLTMYVIDRYLSLQPVLRRELQLVGVAAMLIASKYEEMWAPEVQDLMHVCDTAYSRQHILAMEKNILNRLQWNITVPTPYVFLLRFIKAAGXXDKELENMVFFFSEMALKEYGMASLCPSLVAASAVYAAQCTLKRSPLWTSTLKHHTGFTESQLRECAKVLVNAHAAAPESKLKTAYRKYASEQLGRVSLRPPAVCLAXDXSTVLDSV

SEQ ID NO: 2908 - protein, 410 aa, Carassius auratus
MPSKKVLRTEQFNTTDEAPKTMSVRPRKRKADVAIHLQDPDEEISEMTRKKPCASQACWNPDTGYTSPCRRIPTPDEVEEPVAVGSVGFAQYASENIFVTPTRSTPLPALCWASRDDVWNNLLRKDKLYLRDTHVMERHPHLQPKMRAILLDWLIEVCEVYKLHRETFYLGQDYFDRFMATQENVLKTTLQLIGISCLFIAAKMEEIYPPKVHQFAYVTDGACTEDDILSMEIIIMKELDWSLSPLTPVAWLNIYMQMAYLKETAQVLVAQYPQATFVQIAELLDLCILDARSLEFSYSLLAASALFHFSSLELVMKVSGLKWCDLEECVRWMVPFAMSIREAGSSSLKTFKGIAADDLHNIQTHVPYMEWLGRVNSYQPVDIESSQTSPVPSGVLTPPPSSEKPESEVS

SEQ ID NO: 2909 - protein, 373 aa, Gallus gallus
FLQDPDEEIAKIEMSRKKQYENQLSWNNINKDPHMLIPTPDKDDDPVGVDYSHFIHLNVASTRSSPLPILGDWANRDDVWKNMINKEETYVRDKLYMQRHPLLQPKMRTILLDWLMEVCEVYKLYRETFYLAQDFFDRFMATQQNVVKTLLQLIGISSLFIAAKLEEIYPPKLHQFAYVTDGACTEDEILSMELIIMKALNWNLNPLTVVSWLNIYMQVAYLNELYEVLLPQYPQQIFVQIAELLDLCVLDIGCLEYTYGVLAASALYHFSSSELMQKVSGYEWCEIEECVKWMVPFAMAIREVGSSKSKHFRGIAPEDLHNIQTHINSLDLLDKAQAKQAILAEQNRTSPFPTGVLTPPQSSKKQPAGLKPI

SEQ ID NO: 2910 - protein, 407 aa, Gallus gallus
MRRESDCAEEKAPAKGEGGAEGTVRARKRKADVATFLQDPDEEIAKIEMSRKKQYENQLSWNNINKDPHMLIPTPDKDDDPVGVDYSHFIHLNVASTRSSPLPILGWANRDDVWKNMINKEETYVRDKLYMQRHPLLQPKMRTILLDWLMEVCEVYKLYRETFYLAQDFFDRFMATQQNVVKTLLQLIGISSLFIAAKLEEIYPPKLHQFAYVTDGACTEDEILSMELIIMKALNWNLNPLTVVSWLNIYMQVAYLNELYEVLLPQYPQQIFVQIAELLDLCVLDIGCLEYTYGVLAASALYHFSSSELMQKVSGYEWCEIEECVKWMVPFAMAIREVGSSKLKHFRGIAPEDLHNIQTHINSLDLLDKAQAKQAILAEQNRTSPFPTGVLTPPQSSKKQPAGLKPI

SEQ ID NO: 2911 - protein, 292 aa, Gallus gallus
MEHQLQCCEVETIRRAYLDANLLNDRVLQTMLKAEETCSPSVSYFKCVQKEILPYMRKIVATWMLEVCEEQKCEEEVFPLAMNYLDRFLSFEPLKKSRLQLLGATCMFVASKMKETIPLTAEKLCIYTDNSIRPDELLQMELLLVNKLKWNLAAMTPHDFIEHFLTKMPLAEDTKQIIRKHAQTFVALCATDVKFISNPPSMIAAGSVVAAVQGLHLGNTNTFLSYQCLTHFLSQVIKCDPDCLRACQEQIESLLESSLRQAQQHNVSSETKTVEDEADLSCTPTDVRDVNI

SEQ ID NO: 2912 - protein, 291 aa, Gallus gallus
MELLCCEVDPMRRALPDPNLLYDDRVLHNLLTIEERYLPQCSYFKCVQKDIQPFMRRMVATWMLEVCEEQKCEEEVFPLAMNYLDRFLAVVPTRKCHLQLLGAVCMFLASKLKETIPLTAEKLCIYTDNSIKPQELLEWELVVLGKLKWNLAAVTPHDFIEHILRKLPLPKDKLVLIRKHAQTFIALCATDFNFAMYPPSMIATGSVGAAICGLQLDDGDRSLSGDSLTDFLAKITSTDVDCLKACQEQIESVLVSNLRQVRQQQQQSNPSKTIEELDQASTPTDVRDINL

SEQ ID NO: 2913 - protein, 1395 aa, Homo sapiens
MLLPLPPQSSKPVPKKSQSSKIVPSHHDPSEKTGENCQTKISPSSLQESPSSLQGALKKRSAFEDLTNASQCQPVQPKKEANKEFVKVVSKKINRNTHALGLAKKNKRNLKWHKLEVTPVVASTTVVPNIMEKPLILDISTTSKTPNTEEASLFRKPLVLKEEPTIEDETLINKSLSLKKCSNHEEVSLLEKLQPLQEESDSDDAFVIEPMTFKKTHKTEEAAITKKTLSLKKKMCASQRKQSCQEESLAVQDVNMEEDSFFMESMSFKKKPKTEESIPTHKLSSLKKKCTIYGRICHFRKPPVLQTTICGAMSSIKKPTTEKETLFQELSVLQEKHTTEHEMSILKKSLALQKTNFKEDSLVKESLAFKKKPSTEEAIMMPVILKEQCMTEGKRPRLKPLVLQEITSGEKSLIMKPLSIKEKPSTEKESFSQEPSALQKKHTTQEEVSILKEPSSLLKSPTEESPFDEALAFTKKCTIEEAPPTKKPLILKKKHATQGTMSHLKKPLILQTTSGEKSLIKEPLPFKEEKVSLKKKCTTQEMMSICPELLDFQDMIGEDKNSFFMEPMSFRKSPTTEETVLTKTSLSLQEKKITQGEMSHLKKPLVLQKITSEEESFYKKLLPFKMKSTTEEKFLSQEPSALKEKHTTLQEVSLSKESLAIQEKATTEEEFSQELFSLHVKHTNKSGSLFQEALVLQEKTDAEEDSLKNLLALQEKSTMEEESLINKLLALKEELSAEAATNIQTQLSLKKKSTSHGKVFFLKKQLALNETINEEEFLNKQPLALEGYPSIAEGETLFKKLLAMQEEPSIEKEAVLKEPTIDTEAHFKEPLALQEEPSTEKEAVLKEPSVDTEAHFKETLALQEKPSIEQEALFKRHSALWEKPSTEKETIFKESLDLQEKPSIKKETLLKKPLALKMSTINEAVLFEDMIALNEKPTTGKELSFKEPLALQESPTYKEDTFLKTLLVPQVGTSPNVSSTAPESITSKSSIATMTSVGKSGTINEAFLFEDMITLNEKPTTGKELSFKEPLALQESPTCKEDTFLETFLIPQIGTSPYVFSTTPESITEKSSIATMTSVGKSRTTTESSACESASDKPVSPQAKGTPKEITPREDIDEDSSDPSFNPMYAKEIFSYMKEREEQFILTDYMNRQIEITSDMRAILVDWLVEVQVSFEMTHETLYLAVKLVDLYLMKAVCKKDKLQLLGATAFMIAAKFEEHNSPRVDDFVYICDDNYQRSEVLSMEINILNVLKCDINIPIAYHFLRRYARCIHTNMKTLTLSRYICEMTLQEYHYVQEKASKLAAASLLLALYMKKLGYWVPFLEHYSGYSISELHPLVRQLNKLLTFSSYDSLKAVYYKYSHPVFFEVAKIPALDMLKLEEILNCDCEAQGLVL

SEQ ID NO: 2914 - protein, 1395 aa, Homo sapiens [sequence omitted]

SEQ ID NO: 2915 - protein, 291 aa, Homo sapiens
MLLPLPPQSSKPVPKKSQSSKIVPSHHDPSEKTGENCQTKISPSSLQESPSSLQGALKKRSAFEDLTNVSFEMTHETLYLAVKLVDLYLMKAVCKKDKLQLLGATAFMIAAKFEEHNSPRVDDFVYICDDNYQRSEVLSMEINILNVLKCDINIPIAYHFLRRYARCIHTNMKTLTLSRYICEMTLQEYHYVQEKASKLAAASLLLALYMKKLGYWVPFLEHYSGYSISELHPLVRQLNKLLTFSSYDSLKAVYYKYSHPVFFEVAKIPALDMLKLEEILNCDCEAQGLVL

SEQ ID NO: 2916 - protein, 190 aa, Oryza sativa
ALVLATLLKMAFATLFDSLYCPEEHLDLFHDTAADDDLHLDLHLHQPPPPPPLLDDDLPALFHALRGKEDPLRPAADDDGYGGVSAREAAVGWALRAVARLGFSALTAALAVAYLDRCFLGGALRLGDRPWMARLAAVACVALAAKVEETRVPVLLDLQLCDEAYVFEDKTVRRMELLVLSALGWRMHPV

SEQ ID NO: 2917 - protein, 339 aa, Arabidopsis thaliana
MRSYRFSDYLHMSVSFSNDMDLFCGEDSGVFSGESTVDFSSSEVDSWPGDSIACFIEDERHFVPGHDYLSRFQTRSLDASAREDSVAWILKVQAYYNFQPLTAYLAVNYMDRFLYARRLPETSGWPMQLLAVACLSLAAKMEEILVPSLFDFQVAGVKYLFEAKTIKRMELLVLSVLDWRLRSVTPFDFISFFAYKIDPSGTFLGFFISHATEIILSNIKEASFLEYWPSSIAAAAILCVANELPSLSSVVNPHESPETWCDGLSKEKIVRCYRLMKAMAIENNRLNTPKVIAKLRVSVRASSTLTRPSDESSFSSSSPCKRRKLSGYSWVGDETSTSN

SEQ ID NO: 2918 - protein, 335 aa, Arabidopsis thaliana
MRSYRFSDYLHMSVSFSNDMDLFCGEDSGVFSGESTVDFSSSEVDSWPGDSIACFIEDERHFVPGHDYLSRFQTRSLDASAREDSVAWILKVQAYYNFQPLTAYLAVNYMDRFLYARRLPETSGWPMQLLAVACLSLAAKMEEILVPSLFDFQVAGVKYLFEAKTIKRMELLVLSVLDWRLRSVTPFDFISFFAYKIDPSGTFLGFFISHATEIILSNIKEASFLEYWPSSIAAAAILCVANELPSLSSVVNPHESPETWCDGLSKEKIVRCYRLMKAMAIENNRLNTPKVIAKLRVSVRASSTLTRPSDESSSPCKRRKLSGYSWVGDETSTSN

SEQ ID NO: 2919 - protein, 334 aa, Arabidopsis thaliana
MRSYRFSDYLHMSVSFSNDMDLFCGEDSGVFSGESTVDFSSSEVDSWPGDSIACFIEDERTFVPGHDYLSRFQTRSLDASAREDSVAWILKVQAYYNFQPLSAYLAVNYMDRFLYARRLPETSGWPMQLLAVACLSLAAKMEEILVPSLFDFQVAGVKYLFEAKTIKRMELLVLSVLDWRLRSVTPFDFISFFAYKIDLRVPFSGSLSPMLQSILSNIKEASFLEYWPSSIAAAAILCVANELPSLSSVVNPHESPETWCDGLSKEKIVRCYRLMKAMAIENNRLNTPKVIAKLRVSVRASSTLTRPSDESSSPCKRRKLSGYSWVGDETSTSN

SEQ ID NO: 2920 - protein, 350 aa, Glycine max
  unsure (1)..(350): unsure at all Xaa locations
SSTATLSFSTVTHTSGDFSDDSFLLCGEDSSGIIDSSPECSSDLDSPPPSEAEAESIAGFIEDERNFVPGFEYLNRFQSRSLDASAREESVAWILKVQAYYAFQPLTAYLSVNYLDRFLNSRQLPQTNGWPLQLLSVACLSLAAKMEEPLVPSLLDLQVEGAKYVFEPKTIRRMELLVLGVLDWRLRSVTPFSFLDFFACKLDSSGTFTGFLISRATQIILSNIQEASFLAYWPSCIAAASILHAANEIPNWSFVRPEHXXESWCEGLRKEKVIGCYQLMQELVINNNRRKPPKVLAQLRVTTRTRMRSSTVSSFSSTSSSSSSTSFSLSCKRRKLNNRLWVDDEKGNSE

SEQ ID NO: 2921 - protein, 350 aa, Glycine max
  unsure (1)..(350): unsure at all Xaa locations
MRNHRRXLLMSVSCLSDYDLLCGEDSSGILSGESPECSFSDIDSSPPPSIASFIEHERNFVPGFEYLSRFQSRSLDANAREESVGWILKVHAYYGFQPLTAYLAVNYMDRFLDSRRLPETNGWPLQLVSVACLSLAAKMEEPLVPSLLDLQIEGAKYIFEPRTIRRMELLVLGVLDWRLRSVTPLCFLAFFACKVDSTGTFIRFLISRATEIIVSNIQEASFLAYWPSCIAAAAILTAANEIPNXXSVVKPENAESWCEGLRKEKVIGCYQLMQELVINNNQRKLPTKVLPQLRVTTRTRMRSSTVSSFSSTSSSSSSTSFSLSCKRRKLNNRLWVDDKGNSEXRENEQQ

SEQ ID NO: 2922 - protein, 380 aa, Glycine max
  unsure (1)..(380): unsure at all Xaa locations
PASAAHSLFLHSSPQLTLPAKPPRKPWPENESPPIAMSVSCSNCFPDDDHSFLLCGEDSSGIMDSSPECSSDLDSSPPSEAESIAGFMEDERNFVPGFEYLNRFQSRSLDASAREESVAWILKVQAYYAFQPVTAYLSVNYLDRFLNSRPLPQTNGWPLQLLSVACLSLAAKMEESLVPSLLDLQVEGAKYVFEPRTIRRMELLVLGXVLDWRLXRSVTPLCFLVFFACKADSTGTFTRFLISRATEIIVSNIQEASFLAYRPSCIAAAAILTAANEIPNXXSVVKPEQAESWCQGIRKEKVIGCYQLMQELVINNNQRKLPTKVLPQLRVTTRTRMRSSTVSSFSSTSSSSSSTSFSLSCKRRKLNNRLWVDDEKGNSE

SEQ ID NO: 2923 - protein, 322 aa, Oryza sativa (japonica cultivar-group)
MGAPATAASGGGDDDDRDVVFEYLLCTEEDAASAGSFFQQLQGPAPAVSSSPSTTTATAPAAAGSCDDGGEEEEEEVWTVDVVAELIGGEAERSHSPRADYPGRLRSGRPADLAARADSVAWILKVRELYGMLPVTAYLAVSYMDRFLSLHRLPMEDARYIFEHRTIFRMELLVLDALDWRLRSITPFTFMYLFADKVDPNGKHIRELIHQATQVTLATIHDTEFLDHCPSSIAAAAVLCASSEIMQLVSIDHGTLVSWRIIGLDEEAIIRCYRLMQQLISSNNVGRESTEITMATTTTTATTAVSSEEVVSSSPPSKRRKM

SEQ ID NO: 2924 - protein, 330 aa, Antirrhinum majus
MSLSCSDCFSDLLCGEDSNIIFSGGGDDLPEYTSDVESIPTDVDESIAGLLEDERDLAGVNSSSSNQSVDSSTRTESTAWILKVQRYYGFQPLTAYLAVSYFDRFLNAHHLPKLNGWPMQLLSVACLSLAAKMEESLVPSLLDLQVEGANFIFEPRNIQRMELLVLRVLDWRLRSISPFCYLSFFALKIDPTGTYTGFLTSRAKEIILSTVQETSLIEYRPSCIAAATMLSSANDLPKFSFITAQHAEAWCDGLHKDNIASCIKLIQGVESNNRPKKQPKVLPQLRVMTRASLASSESSSSTSSSPSYKRRKLNNSSRADDDKESSDYGV

SEQ ID NO: 2925 - protein, 315 aa, Helianthus tuberosus
MSISCSDCFSDLLCCEDSGILSGDDRPECSYDFEYSGDFDDSIAEFIEQERKFVPGIDYVERFQSQVLDASAREESVAWILKVQRFYGFQPLTAYLSVNYLDRFIYCRGFPVANGWPLQLLSVACLSLAAKMEETLIPSILDLQVEGAKYIFEPKTIRRMEFLVLSVLDWRLRSVTPFSFIGFFSHKIDPSGMYTGFLISRATQIILSNIQEASLLEYWPSCIAAATILCAASDLSKFSLINADHAESWCDGLSKEKITKCYRLVQSPKILPVHVRVMTARVSTESGDSSSSSSSPSPYKKRKLNNYSWIEEDKR

SEQ ID NO: 2926 - protein, 240 aa, Triticum aestivum
  unsure (1)..(240): unsure at all Xaa locations
PLPSSSSSASTPHPLQARGGARGPSRRWSEPRLSHLRRVSSYHLLPGRKRPMAPNYEMAASILLCAEDSSSIFGFGDGEEAAAGARAEGSPYCGGDDEFAAGFPLPSEECVARWVATEAEHMPREDYAERLRAGGXXDLRVRMDAVDWIWKVHTYYGFGPVTACXLAVNYMDRFLSLYQIPEGKAWMTLLLSCACLSLAMEMDDAPQPQAIEVPGGDARFVEAKTTIXKMELLVLSTLKX

SEQ ID NO: 2927 - protein, 140 aa, Triticum aestivum
TLVERGYSSVATISAPLPHRIASAPPPPPPPRRPLDGNGRCSVTAPTGPAMPEDDASFLLCAEDAFFFVDAATASTCTTAEQIGGWCSGAEEESAAASFVAELIGGEADYSPRSDYSDRLRSRSVDPAARADSVATLKVQ

SEQ ID NO: 2928 - protein, 323 aa, Arabidopsis thaliana
MGEPKDSLALFLCHESESSLNEDDDETIERSDKQEPHFTTTIDDEDYVADLVLKENLRFETLPSKTTSSSDRLIAIDWILTTRTRFGFQHQTAYIAISYFDLFLHKRFIGLQKDETWAMRLLSVACLSLAAKMEERIVPGLSQYPQDHDFVFKPDVIRKTELLILSTLDWKMNLITPFHYFNYFLAKISQDNHSVSKDLVLLRSSDSLLALTKEISFTEYRQFVVAAVTTLLASSSTSSDIRLTREEIANKFGSISWWTSNENENVYLCYQRTLEIEERKHMTPPPEIAVSREPPASGSGAKRRLSFDDSDQSSPPAKRMRRL

SEQ ID NO: 2929 - protein, 265 aa, Glycine max
  unsure (1)..(265): unsure at all Xaa locations
XEIVLGFXXRDESMVFGDWVKRARVEAINWILKTRATLGFRFETAYLSVTYFDRFLSRRSIDSEKSWAIRLLSIACLSLAAKMEECNVPGLSEFKLDDYSFEGKVIQRVELLVLSTLEWEMGIITPFDFLSYFITKFCKESHFLQDHATHLHHNESIXLSPCAEVNLMDHKPSVIAVAATLVAMDQQLTRDAVELKMSSIPQHRLLESKDVFEYYNLIQRLYEENTKSDTHTPIEMTESSRVTSSAAMTKRRRLTFSDDEGSSHG

SEQ ID NO: 2930 - protein, 348 aa, Oryza sativa
  unsure (1)..(348): unsure at all Xaa locations
MGDASASTSAPATPTSTLICREDGNDLFSADPADDDGGGGSGGDWELSIADDDHVLLMDRDDEYLALMLSKERCAGGGGGGERGDEEEEEMVEEWMKMGDASANARAWCVGWIVKTNAGFRFSLKTAYVAVTYLDRFLARRDKEWALQLLSVACLSLAAKVEERRPPRLPEFKLDXXYDCASLMRMELLVLTTLKWQMITETPFSYLNCFTAKFRHDERKAIVLRAIECIFASIKVISSVGYQPSTIALAAILIARNKETAPIDELKSVVGSLWQQLDTGHVYSCYNKMMIQEDRSMQSTTEVASSGVSVAHIGGSEDSAMGGANNATTLEATPDKKRKRLHSPQRQX

SEQ ID NO: 2931 - protein, 420 aa, Oryza sativa
  unsure (1)..(420): unsure at all Xaa locations
MGDASASTSAPATPTSTLICREDGNDLFSADPADDDGGGGSGGDWELSIADDDHVLLMDRDDEYLALMLSKERCAGGGGGGERGDEEEEEMVEEWMKMGDANARAWCVGWIVKTNAGFRFSLKTAYVAVTYLDRFLARRCVDRDKEWALQLLSVACLSLAAKVEERRPPRLPEFKLXXMYDCASLMRMELLVLTTLKWQMITETPFSYLNCFTAKXSGTTSGXAIVLRAIECIFASIKGRSFLGYQPSTIALAAILIARNKETAPNLDELKSVVGSLWQQLDTGHVYSCYNKMMIQEDRSMQSTTEVASSGVSVAHRSEDSAMGGANNATTLEATPDKKRKSNGFAVLCLLGEGLKFSPNLVPPTKHHAKKQLPMNDLNLIQMAVDDQPLHWIPLAPGDSSWAVATGIAVKTQKRCTSMT

SEQ ID NO: 2932 - protein, 238 aa, Oryza sativa
  unsure (1)..(238): unsure at all Xaa locations
PRAAGMRHEALSLSLSLSLFQSSPESCVGWIXLQTNAGFRFSLKTAYVAVTYLDRFLARRCVDRDKEWALQLLSVACLSLAAKVEERRPPRLPEFKLXXMYDCASLMRMELLVLTTLKWQMITETPFSYLNCFTAKXSGTTSGXAIVLRAIECIFASIKVISSVGYQPSTIALAAILIARNKETAPNLDELKSVVGSLWQQLDTGHVYSCYXXKMMIPEDRSMQSTTEVASSGVSVAX

SEQ ID NO: 2933 - protein, 138 aa, Triticum aestivum
MGDASTSAAPATPTSTLICLEDGNDLFLDDDSPDGGLADSRLAADDGLLLLDRDDEYVALMLSKEGAGGGGTWGEELDEWTKAARAVCVDWIVKTNARFLFSGKTAYVAVTYLDRFLAQRRVDRGKEWALQLLSVACL

SEQ ID NO: 2934 - protein, 171 aa, Triticum aestivum
  unsure (1)..(171): unsure at all Xaa locations
FPVDPASAAQWQXIAGTPFPYLSCFAARFRHDERKAIVLRAVKCIFASIKAMRSVEYQSSTMALVPILVARGGSEGTTGPNLEEELKAILGSSWQQLQTGHVCSCYSVMIQEEDRSVQSSREVASSDVSAAAPAGSPGTSVAMAVAANDNKAIATTSADNKRRRLHFPQRQ

SEQ ID NO: 2935 - protein, 133 aa, Triticum aestivum
  unsure (1)..(133): unsure at all Xaa locations
LSLQSVSLKMIAGTPFPYLSCFVARFRHDERKAIVLRAVKCIFASIKAMSSVEYQPSTMALASILVARGGREGTGTAPNLEEELKAILGSSWQQLHTGHVYSCYSVMIQEEDRSTQSGREVASSGVSXAAPPE

SEQ ID NO: 2936 - protein, 289 aa, Homo sapiens
MELLCHEVDPVRRAVRDRNLLRDDRVLQNLLTIEERYLPQCSYFKCVQKDIQPYMRRMVATWMLEVCEEQKCEEEVFPLAMNYLDRFLAGVPTPKSHLQLLGAVCMFLASKLKETSPLTAEKLCIYTDNSIKPQELLEWELVVLGKLKWNLAAVTPHDFIEHILRKLPQQREKLSLIRKHAQTFIALCATDFKFAMYPPSMIATGSVGAAICGLQQDEEVSSLTCDALTELLAKITNTDVDCLKACQEQIEAVLLNSLQQYRQDQRDGSKSEDELDQASTPTDVRDIDL

SEQ ID NO: 2937 - protein, 240 aa, Homo sapiens
MELLCHEVDPVRRAVRDRNLLRDDRVLQNLLTIEERYLPQCSYFKCVQKDIQPYMRRMVATWMLEVCEEQKCEEEVFPLAMNYLDRFLAGVPTPKSHLQLLGAVCMFLASKLKETSPLTAEKLCIYTDNSIKPQELLEWELVVLGKLKWNLAAVTPHDFIEHILRNVPQQREKLSLIRKHAQTFIALCATDFKFAMYPPSMIATGSVGAAICGLQQDEEVSSLHCDALTELLAKITNTDV

SEQ ID NO: 2938 - protein, 374 aa, Homo sapiens
MSRRSSRLQAKQQPQPSQTESPQEAQIIQAKKRKTTQDVKKRREEVTKKHQYEIRNCWPPVLSGGISPCIIIETPHKEIGTSDFSRFTNYRFKNLFINPSPLPDLSWGCSKEVWLNMLKKESRYVHDKHFEVLHSDLEPQMRSILLDWLLEVCEVYTLHRETFYLAQDFFDRFMLTQKDINKNMLQLIGITSLFIASKLEEIYAPKLQEFAYVTDGACSEEDILRMELIILKALKWELCPVTIISWLNLFLQVDALKDAPKVLLPQYSQETFIQIAQLLDLCILAIDSLEFQYRILTAAALCHFTSIEVVKKASGLEWDSISECVDWMVPFVNVVKSTSPVKLKTFKKIPMEDRHNIQTHTNYLAMLCMISSHV

SEQ ID NO: 2939 - protein, 404 aa, Homo sapiens
MSRRSSRLQAKQQPQPSQTESPQEAQIIQAKKRKTTQDVKKRREEVTKKHQYEIRNCWPPVLSGGISPCIIIETPHKEIGTSDFSRFTNYRFKNLFINPSPLPDLSWGCSKEVWLNMLKKESRYVHDKHFEVLHSDLEPQMRSILLDWLLEVCEVYTLHRETFYLAQDFFDRFMLTQKDINKNMLQLIGITSLFIASKLEEIYAPKLQEFAYVTDGACSEEDILRMELIILKALKWELCPVTIISWLNLFLQVDALKDAPKVLLPQYSQETFIQIAQLLDLCILAIDSLEFQYRILTAAALCHFTSIEVVKKASGLEWDSISECVDWMVPFVNVVKSTSPVKLKTFKKIPMEDRHNIQTHTNYLAMLEEVNYINTFRKGGQLSPVCNGGIMTPPKSTEKPPGKH

SEQ ID NO: 2940 - protein, 473 aa, Oryza sativa
  unsure (1)..(473): unsure at all Xaa locations
MALPFPVPRGAHWAVTSTAHVLVGFTGEMARVEQPRAPAPYNAAFLRKNPEEEEEEQQEAVRMATRHQRAAAAPQPANRGAAVAAGKQKAAATGNRQALGDIGNVLNDVVDGKIQLPEGINRPITRSFGAQLLKKAQENAVAANKIVVQNPARKEPAPKPAKKVVPRPENAAKASTGAGVNENKKPSAEGAGSSSGGSALKYSRKKVVNTLTSVLTARSKHACGITEKPKEVVEDIDKLDGDNQLAVVEYIEDIYNFYRTAQLERRPTDYMSSQVEVNPKMRAILADWIIDVHYKFELMPETLYLTMYVIDRYLSLQPVLRRELQLVGVAAMLIASKYEEMWAPEVQDLIHVCDNAYSRQHILAMEKNILNRLQWNITVPTPYVFLLRFIKAAGGDKELENMVFFFSEMALKEYGMASLCPSLVAASAVECAKVLVNAQPLLRASXRRHTGSTHPSSLGVSLCALRQFXXSLX

SEQ ID NO: 2941 - protein, 197 aa, Triticum aestivum
  unsure (1)..(197): unsure at all Xaa locations
XYMGSQTEINPKMRAILTDWLVEVTHKFELMPESMYLTIYVIDRFLSLQAVPRRELQLVGIAAMLIACKYEEIWAPEVNDFISIADNSYSRQQILSMEKNILNSMAWNLTVPTPYVFLVRFAKAAGSDKELEHMIFFFAELALMEYGLVTVRPSLGXQASGRVPLPRCTAXXKEAPFWTGTFKHXQTGIRLKPQASG

SEQ ID NO: 2942 - protein, 356 aa, Oryza sativa (japonica cultivar-group)
MAALTSYEMAASILLCAEDSSSVLGFGGEEEEEEEDVVAGKRARCAGPPPPPCVDVAGVDFAVPSEECVARLVETEADHMPREDYAERLRAGGGDGDLDLRVRMDAIDWIWKVHSYYSFAPLTACLAVNYLDRFLSLYQLPDGKDWMTQLLAVACLSLAAKMEETDVPQSLDLQVGEERYVFEAKTIQRMELLVLSTLKWRMQAVTPFSYVDYFLRELNGGDPPSGRSALLSSELILCIARGTECLGFRPSEIAAAVAAAVVGEEHAAFSHVNKERMSHCQEVIQAMELIHPKPSSPSRVFVSSSIPRSPTGVLDAAGCLSYRSDDSAVASHYAASSWGYEHDSSPVSSKRRKISR

SEQ ID NO: 2943 - protein, 287 aa, Oryza sativa
  unsure (1)..(287): unsure at all Xaa locations
MEAEDEYSAGCSFSLMCQEDSTDALARRATVKWILETRGCFGFCHRTAYLAIAYFDRFCLRRCIDRSVMPWAARLLAVACVSLAAKMEEYRAPALSEFRAGVGDDGYEFSCVCIRRMELLVLSTLDWRMAAVTPFDYLPCLSSRLRXXHVGGGGGAGASAALIFSAAEAASVLDHRPSTVAAAAVLAATHGALTREALXSPRXAASPHLSXLDKEDVFACYSAMLSQPTSPASKSTTTTTGKRSSSSSCSESTDAASSYDATAASFPAAARAARGXGWSCREASSDX

SEQ ID NO: 2944 - protein, 327 aa, Oryza sativa
  unsure (1)..(327): unsure at all Xaa locations
LLLLLFFLPLRRRRRRRLXDYRRRRRRRGLVPAXARLAAVKWILETRGYFGFGHRTAYLAIAYFDRFCLRRRVDREAMPWAARLLSIACVSVAAKMEEYQSPALSEFDAGGGRVFCSDSIRRMELLVLSTLGWRMGAVTPFDFLPCFSSRLHRHGAAAAARVAHAVGFIFATAEAGSVLDYRPSTVAAAAILAASYGAPLTKEALESKMSNLSPSCLIDKENVHACYSMMVGDMNNNRRSSKRPLQCSDSNEITTTSTYDSVLVDDVTDTAAXSLRRRXISGSGQSRRESVEEASTTRDTQFLVRCLGGAWFGSSPFPLLFFSLFLT

SEQ ID NO: 2945 - protein, 175 aa, Oryza sativa
  unsure (1)..(175): unsure at all Xaa locations
PSPPXRSRAPLSSFSGRRRHRRRPWAARLLSIACVSVAAKIEEYQSPALSEFDAGGGRVFCSDSIRRMELLVLSTLGWRMGAVTPFDFLPCFSSRLHRHHHAAAAARVALNAVGFIFATAEAGSVLDYRPSTVAAAAILAASYGAPLTKEALESKMSNLSPSCLIDKENVHACYX

SEQ ID NO: 2946 - protein, 268 aa, Triticum aestivum
  unsure (1)..(268): unsure at all Xaa locations
MPGMEEAEDYASCAFSLTCPEDGAELGDGVVDDGDLFLFYVGGGAAADDEDGDDEYVEQLVSKEASFCSSSDSGDNGCSFSTRGPALLQARRTPPTYGRRAGRTDTRLATPRRGCTEEEVEDDVVVCVQXVRPRVRAAMPWAARLLSVACVSVAAKMEEYCAPALSELDAGGGYEFCFASVRRMELLVLSTLGWRMAAVTPFDYLPCFSSRLDRHDGRGGGGLDPAGVALKSIGSICATAEAGSVLDYMPSTAAAAAILVAIGSSEXX

SEQ ID NO: 2947 - protein, 172 aa, Triticum aestivum
  unsure (1)..(172): unsure at all Xaa locations
MPGMEEAEDYASCAFSLTCPEDGAELGDGVVDDGDLFLFYAGGGAAADDEDGDDEYVEQLVSKEASFCSSSDSGDADCSSAASEDWFLQARLAAVKWILETRGCFGFGHRTAYLAIAYFDRFFLRRRVDRAAMPWAARLLSVACVSVAAKMEEYCAPALSELDAGGGYEFCX

SEQ ID NO: 2948 - protein, 508 aa, Oryza sativa; identical to SEQ ID NO: 377

SEQ ID NO: 2949 - protein, 508 aa, Oryza sativa; identical to SEQ ID NO: 377

SEQ ID NO: 2950 - protein, 497 aa, Oryza sativa
MSSSLASRRSSSSSAAKRPAAGEGGGKAAAGAAAAKKRVALGNITNVAAAANNAVREGSLKFNSATWAAPVKKGSLASGRNVGTNRVSAVKSASTKPASAISRHESAPQKESVLPPKVLRIVPTAAPAPVTVPCSSFVSPMHSGDSVSVDETMSTCDSMKSPDFEYIDNGDSSSVLGSLQRRANENLRISEDRDVEETKWKKDAPSPMEIDQICDVDNNYEDPQLCATLASDIYMHLREAETRKHPSTDFMETLQKDVNPSMRAILIDWLVEVAEEYRLVPDTLYLTVNYIDRYLSGNEINRQRLQLLGVACMLIAAKYKEICAPQVEEFCYITDNTYFRDEVLEMEASVLNYLKFEMTAPTAKCFLRRFVRVAQVSDEDPALHLEFLANYVAELSLLEYNLLSYPPSLVAASAIFLAKFILQPAKHPWNSTLAHYTQYKSSELSDCVKALHRLFCVGPGSNLPAIREKYTQHKYKFVAKKPCPPSIPTEFFRDSTC

SEQ ID NO: 2951 - protein, 506 aa, Oryza sativa
  unsure (1)..(506): unsure at all Xaa locations
RHEGRPRVGKSTQTLASALANPXAPGRGGGGLQGRIEASGEAARGRRGGGEGGRGGGGGQAPGKAGNAKLNLAAXAAPVKKGSLASGRSVGXTNRASAVKSASTKPAPAISRHESAAQKESVLPPKVPSIVPTAALAPVTVPCSSFVSPMHSGDSVSVDETMSTCDSMKSPEFEYIDNGDSSSVLGSLQRRANENLRISEDRDVEETKWKKDAPSPMEIDQICDVDNNYEDPQLCATLASDIYMHLREAETRKRPSTDFMETIQKDVNPSMRAILIDWLVEVAEEYRLVPDTLYLTVNYIDRYLSGNEINRQRLQLLGVACMLIAAKYEEICAPQVEEFCYITDNTYFRDEVLEMEASVLNYLKFEMTAPTAKCFLRRFVRVAQVSDEDPALHLEFLANYVAELSLLEYNLLSYPPSLVAASAIFLAKFILQPTKHPWNSTLAHYTQYKSSELSDCVKALHRLFSVGPGSNLPAIREKYTQHKYKFVAKKPCPPSIPTEFFRDATC

SEQ ID NO: 2952 - protein, 450 aa, Oryza sativa
  unsure (1)..(450): unsure at all Xaa locations
MAAKRPAAGEGGGKAAAGAAAAKKRVALVNITNVAAAANNAKFNSATWAAPVKKGSLASGRNVCTNRVSAVKSASAKPAPAISRHESAPQKXXSFVSPMHSGDSVSVDETMSMCDSMKSPDFEYIDNGDSSSVLGSLQRRANENLRISEDRDVEETKWKKDAPSPMEIDQICDVDNNYEDPQLCATLASDIYMHLREAETRKHPSTDFMETLQKDVNPSMRAILIDWLVEVAEEYRLVPDTLYLTVNYIDRYLSGNEINRQRLQLLGVACMLIAAKYKEICAPQVEEFCYITDNTYFRDEVLEMEASVLNYLKFEMTAPTAKCFLRFYSLLFIVQDPALHLEFLANYVAELSLLEYNLLSYPPSLVAASAIFLAKFILQPAKHPWNSTLAHYTQYKSSELSDCVKALHRLFCVGPGSNLPAIREKYTQHKYKFVAKKPCPPSIPTEFFRD

SEQ ID NO: 2953 - protein, 394 aa, Oryza sativa
  unsure (1)..(394): unsure at all Xaa locations
EGEVSKNIEIRAEXSSTSRLPTIVPWHHDCSPGLSDNSMSKEDAMSTGDSTESLDIDCLDDGDSEVVSSLQHLADDKLHISDNRDVAGVASKWTKHGCNSVEIDYIVDIDNNHEDPQLCATLAFDIYKHLRVAETKKRPSTDFVETIQKNIDTSMRAVLIDWLVEVTEEYRLVPETLYLTVNYIDRYLSSKVINRRKMQLLGVACLLIASKYEEICPPQVEELCYISDNTYTKDEVLKMEASVLKYLKFEMTAPTTKCFLRRFLRAAQVCHEAPVLHLEFLANYIAELSLLEYSLICYVPSLIAASSXFLAKFILKPTENPWNSTLSFYTQYKPSDLCNCAKGLHRLXLVGPGGNLRAVREKYSQHKYKFVAKKYSPPSIPAEFFEDPSSYKPD

SEQ ID NO: 2954 - protein, 411 aa, Oryza sativa
  unsure (1)..(411): unsure at all Xaa locations
MSSNLAASRRSSSSSSVAAAAAAKRPAVGEGGGGGGGKAAAGAAAAKKRVALSNISNVAAGGGAPGKAGNAKLNLAASAAPVKKGSLASGRNVGTNRASAVKSASAKPAPAISRHESATQKESVLPPKVPSIVPTAALAPVTVPCSSFVSPMHSGDSVSVDETMSTCDSMKSPEFEYIDNGDSSSVLGSLQRRANENLRISEDRDVEETKWKKDAPSPMEIDQICDVDNNYEDPQLCATLASDIYMHLREAEVAEEYRLVPDTLYLTVNYIDRYLSGNEINRQRLQLLGVACMLIAAKYEEICAPQVEEFCYITDNTYFRDELFIVQDPALHLEFLANYVAELSLLEYNLLSYPPSLVAASAIFLAKFILQPTKHPWXGLAECRXIDASAVCDICSXCDRLKHDDSARFLX

SEQ ID NO: 2955 - protein, 510 aa, Oryza sativa
  unsure (1)..(510): unsure at all Xaa locations
MCPLFERLLRKLRSISPIIWSRSLSPGARLDSFLFLFFCVKALRKDITGGRIKGLCYAHTPEDPRVDFIGCLVIQVWQVKGLGQNGPRKCWAVSGRHGYCCMDRWPTHLQENVIRVKLQSQVFYSREGSKPSPCSASDPRRPPPPSQPSQQQQEEEGSGGGCRRPMSSSLASRRSSSSSAAKRPAAGEGGGKAAAGAAAAKKRVALGNITNVAAAANNAKFNSATWAAPVKKGSLASGRNVGTNRVSAVKSASTKPASAISRHESAPQKEASVSVDETMSTCDSMKSPDFEYIDNGDSSSVLGSLQRRANENLRISEDRDVEETKWKKDAPSPMEIDQICDVDNNYEDPQLCATLASDIYMHLREAEVAEEYRLVPDTLYLTVNYIDRYLSGNEINRQRLQLLGVACMLIAAKYKEICAPQVEEFCYITDNTYFRDELFIVQDPALHLEFLANYVAELSLLEYNLLSYPPSLVAASAIFLAKFILQPAKHPWIYAADVIDLNMMIQRDSX

SEQ ID NO: 2956 - protein, 314 aa, Oryza sativa
EDAMSTGDSTESLDIDCLDDGDSEVVSSLQHLADDKLHISDNRDVAGVASKWTKHGCNSVEIDYIVDIDNNHEDPQLCATLAFDIYKHLRVAETKKRPSTDFVETIQKNIDTSMRAVLIDWLVEVTEEYRLVPETLYLTVNYIDRYLSSKVINRRKMQLLGVACLLIASKYEEICPPQVEELCYISDNTYTKDEAPVLHLEFLANYIAELSLLEYSLICYVPSLIAASSIFLAKFILKPTENPWNSTLSFYTQYKPSDLCNCAKGLHRLFLVGPGGNLRAVREKYSQHKAQLPRAKKHTDLLPLSNLKSGDCGI

SEQ ID NO: 2957 - protein, 419 aa, Oryza sativa; identical to SEQ ID NO: 374

SEQ ID NO: 2958 - protein, 419 aa, Oryza sativa; identical to SEQ ID NO: 374

SEQ ID NO: 2959 - protein, 291 aa, Oryza sativa
APIGSERQKRTADSAFHGPADMECTKITSDDLPLPMMSEMDEVMGSELKEIEMEDIEEAAPDIDSCDANNSLAVVEYVDEIYSFYRRSEVHYKLELLDETLFLTVNIIDRFLARENVVRKKLQLVGVTAMLLACKYEEVSVPVVEDLILICDRAYTRTDILEMERMIVNTLQFDMSVPTPYCFMRRFLKAAQSDKKCLLKQLELMSFFIIELSLVEYEMLKFQPSMLAAAAIYTAQCTINGFKECSKMMVELHQKAGHGKLTGVHRKYSTFRYGCAAKSEPAVFLLKSVAL

SEQ ID NO: 2960 - protein, 361 aa, Arabidopsis thaliana
MALEEEEESQNAPFCVLDGLFCEEESEFHEQVDLCDESVEKFPFLNLGLSDHDMLWDDDELSTLISKQEPCLYDEILDDEFLVLCREKALDWIFKVKSHYGFNSLTALLAVNYFDRFITSRKFQTDKPWMSQLTALACLSLAAKVEEIRVPFLLDFQVEEARYVFEAKTIQRMELLVLSTLDWRMHPVTPISFFDHIIRRYSFKSHHQLEFLSRCESLLLSIIPDSRFLSFSPSVLATAIMVSVIRDLKMCDEAVYQSQLMTLLKVDSEKVNKCYELVLDHSPSKKRMMNWMQQPASPIGVFDASFSSDSSNESWVVSASASVSSSPSSEPLLKRRRVQEQQMRLSSINRMFFDVLSSSPR

SEQ ID NO: 2961 - protein, 317 aa, Arabidopsis thaliana
MAEFMEPNLVSNFDDEKSNSVDTRSIFQMGFPLESEEIVREMIEKERQHSPRDDYLKRLRNGDLDFNVRIQALGWIWKACEELQFGPLCICLAMNYLDRFLSVHDLPSGKAWTVQLLAVACLSLAAKIEETNVPELMQLQVGAPMFVFEAKSVQRMELLVLNVLRWRLRAVTPCSYVRYFLSKINGYDQEPHSRLVTRSLQVIASTTKGDRLGLFFFKGVLIVDVWAGIDFLEFRASEIAAAVALSVSGEHFDKFSFSSSFSSLEKERVKKIGEMIERDGSSSSSQTPNNTVLQFKSRRYSHSLSTASVSSSLTSLS

SEQ ID NO: 2962 - protein, 367 aa, Arabidopsis thaliana
MALEKEEEASQNGAFCVLDGLYCEEETGFVEDDLDDDGDLDFLEKSDESVVKFQFLPLLDMFLWDDDEILSLISKENETNPCFGEQILDGFLVSCRKEALDWVLRVKSHYGFTSLTAILAVNYFDRFMTSIKLQTDKPWMSQLVAVASLSLAAKVEEIQVPLLLDLQVEEARYLFEAKTIQRMELLILSTLQWRMHPVTPISFFDHIIRRFGSKWHQQLDFCRKCERLLISVIADTRFMRYFPSVLATAIMILVFEELKPCDEVEYQSQITTLLKVNQEKVNECYELLLEHNPSKKRMMNLVDQDSPSGVLDFDDSSNSSWNVSTTASVSSSSSSPEPLLKRRRVQEQQMRLPSINRMFLDVLSSPR

SEQ ID NO: 2963 - protein, 376 aa, Arabidopsis thaliana
MAIRKEEESREEQSNSFLLDALYCEEEKWDDEGEEVEENSSLSSSSSPFVVLQQDLFWEDEDLVTLFSKEEEQGLSCLDDVYLSTDRKEAVGWILRVNAHYGFSTLAAVLAITYLDKFICSYSLQRDKPWMLQLVSVACLSLAAKVEETQVPLLLDFQVEETKYVFEAKTIQRMELLILSTLEWKMHLITPISFVDHIIRRLGLKNNAHWDFLNKCHRLLLSVISDSRFVGYLPSVVAAATMMRIIEQVDPFDPLSYQTNLLGVLNLTKEKVKTCYDLILQLPVDRIGLQIQIQSSKKRKSHDSSSSLNSPSCVIDANPFNSDESSNDSWSASSCNPPTSSSSPQQQPPLKKMRGAEENEKKKPILHLPWAIVATP

SEQ ID NO: 2964 - protein, 376 aa, Arabidopsis thaliana
MAIRKEEESREEQSNSFLLDALYCEEEKWDDEGEEVEENSSLSSSSSPFVVLQQDLFWEDEDLVTLFSKEEEQGLSCLDDVYLSTDRKEAVGWILRVNAHYGFSTLAAVLAITYLDKFICSYSLQRDKPWMLQLVSVACLSLAAKVEETQVPLLLDFQVEETKYVFEAKTIQRMELLILSTLEWKMHLITPISFVDHIIRRLGLKNNAHWDFLNKCHRLLLSVISDSRFVGYLPSVVAAATMMRIIEQVDPFDPLSYQTNLLGVLNLTKEKVKTCYDLILQLPVDRICLQIQIQSSKKRKSHDSSSSLNSPSCVIDANPFNSDESSNDSWSASSCNPPTSSSSPQQQPPLKKMRGAEENEKKKPILHLPWAIVATP

SEQ ID NO: 2965 - protein, 402 aa, Glycine max
  unsure (1)..(402): unsure at all Xaa locations
XSYLGPRGPEQTDKKENLGDRKQRHQCPPHQQCLSRRTLPSSAPXEAAIAGLLDAEPHHMPEKDYLRRCRDRSVDVTARLDAVNWILKVHAYYEFSPVTAFLSVNYFDRFLSRCSLPQQSGGWAFQLLSVACLSLAAKMEESHVPFLLDLQLFEPKFVFEPKTIQRMELWVMSNLKWRLRSVTPFDYLHYFISKLPSSSSSQSLNHFFSTSSNLILSTTRVINFLGFAPSTVAAAAVLCSANGQLPLSFHDRVNDEMVRCCHQLMEEYVVDTCPASVKARITEPAPPSSPVGVLDAATCGSYTPSDRNFAGPPNKRLRSSASDAPPVDNTGTSLHSRHHISYNSHIHYYNHNIIYKCLLFLFIFCQGERGFLLWFLNFIYQLPILYLYLLLGYIKRPRSKIW

SEQ ID NO: 2966 - protein, 243 aa, Glycine max
  unsure (1)..(243): unsure at all Xaa locations
KNFIFSFIAQMAPSFDCVSSLLCVEDNSIFDENDYGGSVEVLEDAWQDPRYRRNLSQSENLDVPNGWFQLQSDECLRLMVEKEWDHLPNGDYRNKLRSGDLDFEARKEAIDWIQKVQEHFGFGPVCAYLSINYLDRFLSAYELPKHRTWTMQLLAVGCLSLAAKMEETDAPMSLDLQVGESKYIFEAKTIQRMELLVLSTLRWRMQAITPXFSFIDHFLYKINDDQSPIGASIXQSIQLILST

SEQ ID NO: 2967 - protein, 414 aa, Glycine max
  unsure (1)..(414): unsure at all Xaa locations
MAIQHHNDQHVSSVLDALYCDEGKWEEEEEEKEEEEDEGXXNESEVTTNTATCLFPLLLLEQDLFWEDEELNSIFSKEKVQHEEAYDTSNNNVHLDSCLSQPRREAVEWMLKVNAHYGFSALTATLAVTYLDRFLLSFHFQREKPWMIQLVAVTCISLAAKVEETQVPLLLDLQVQDTKYLFEAKTIQRMELLVLSTLKWKMHPVTPLSFLDHIIRRLGLRTHLHWEFLRRCEHLLLSVLLDSRFVGCLPSVLATATMLHVIDQIQHSGGIEYKTQLLSVLKISKEKVDECYNAILQLSKANKYGHNNINNTSKRKYEQIPSSPSGVIDAAFCSDGSNDSWAVGSSLLYSPPEPLFKKSRTQGQQMNLSPLKRFIIGIVGTSPXLINTLSQTKKKKSKYLFTVVINLSMHAAEL

SEQ ID NO: 2968 - protein, 232 aa, Glycine max
HAVRYINVVPFPTLFFHPPLHVSLNPLRVYIIDFFIFVCIKFSSFNPSVEELVLQDESLSWDHKHLNLNNQCRSEHFWDFSVQSDETVMGLVGRESEHLPHVGYLKRLLSGDLDLSVRKEALDWIWKAHAYFDFGPCSLCLSVNYLDRFLSVYELPRGKSWSMQLLAVACLSIAAKMEEIKVPPCVDLQFAFEAKDIQAMELLVLSTLRWKMQASTPFSFLDYFLRKITCDQ

SEQ ID NO: 2969 - protein, 259 aa, Glycine max
  unsure (1)..(259): unsure at all Xaa locations
ENLPQDGYLKRLLSGDLDLSVRKEALDWIWKRGKSWSMQLLAVACLSIAAKMEEIKVPPCVDLQVGEPKFAFEAKDIQRMELLVLSTLRWKMQASTPFSFLDYFLRKITCDQVIVKSSILRSVGPILNIIKCINFLEFRPSEIAAAVAISVSREMQAEEIDKTLTCFFIVGKERILKCLELIKDLSLIQDSANLGTNLASFVPQSPIGVLXXAACLSSISDELTVGSYTDSSHSKRRRKSDXTLLMGHSSHEILIYFLH

SEQ ID NO: 2970 - protein, 385 aa, Glycine max
KWLCLPSLRCNEETFVFLLRRRKMALGDDAQHHSPSFLDALLCEERETFEEDFDENGYERETSQSLPLVLHDNDLFWEDEELVSLIAKEGETHLCFHGVVANGALEGPRVEAVNWISKVCGHYGFSALTTVLAVNYFDRFITSLKFQNDKPWMTQLTAVACLSLAVKTEETHVPLLLDLQVEESRFVFEAKTIQRMELLVLSTLKWRMHPVTPISFFEHIVRRLGLKSRLHWEFLWRCERVLLNVIADSRVMSYLPSTLAAATMIRVIKEIESFNATEYIDQLLGLLKISEEQVNQCYKIIQKLLGCYEGIYSLHQKRKRLSEPGSPGAVTDASFSCDSSNDSWTVSSSVSLSLEPLLKRRKSQDQQMRLPSVNCVSIDVLNSPR

SEQ ID NO: 2971 - protein, 268 aa, Glycine max
  unsure (1)..(268): unsure at all Xaa locations
XLEPNRLEENLPQDGYPKRLLSGDLDLSVRKEALDWIWKRGKSWSMQLLAVACLSIAAKMEEIKVPPCVDLQVGEPKFAFEAKDIQRMELLVLSTLRWKMQASTPFSFLDYFLRKITCDQVIVKSSILRSVGPILNIIKCINFLEFRPSEIAAAVAISVSREMQAEEIDKTLTCFFIFILQERILKCLELIKDLSLIQDSANLGTNLASFVPQSPIGVLXXAACLSSISDELTVGSYTDSSHSKRRRKSDXTLLMGHSSHEILIYFLH

SEQ ID NO: 2972 - protein, 368 aa, Glycine max
  unsure (1)..(368): unsure at all Xaa locations
MALGDDAQHHSHSPSFLDSLLCEERETXSRKTLTRTVTSARPKTTTXSVIKSQPLPLVLYDNDLFWEDDELVSLIAKEGETHXXRSFSDGALEGPRVEAVNWVSKVSGHYGFSALTTVLAVNYFDRFITSLKFQRDKPWMTQLAAVACLSLAAKTEETHVPLLLDLQVEESRFVFEAKTIQRMELLVLSTLKWRMLPVTPISFFEHIVRRLGLKSRLHWEFLWRCERVLLNIIADSRVMSYLPSTLAAATMIHVIKEIESFNATEYIDQLLGLLKISEEQVNKCYRIIQKLCIYGLPQKCKRLSELGSPSAVTDASFSCDSSNDSWAVSSSVSLSLEPQLKRRRSQDQQMRLXXSVSRVSIDVLNSPH

SEQ ID NO: 2973 - protein, 381 aa, Glycine max
  unsure (1)..(381): unsure at all Xaa locations
MKKRFFFLLRRRKMALGDDAQHHSHSPSFLDSLLCEERETXSRKTLTRTVTSARPKTTTXSVIKSQPLPLVLYDNDLFWEDDELVSLIAKEGETHXXRSFSDGALEGPRVEAVNWVSKVSGHYGFSALTTVLAVNYFDRFITSLKFQRDKPWMTQLAAVACLSLAAKTEETHVPLLLDLQVEESRFVFEAKTIQRMELLVLSTLKWRMLPVTPISFFEHIVRRLGLKSRLHWEFLWRCERVLLNIIADSRVMSYLPSTLAAATMIHVIKEIESFNATEYIDQLLGLLKISEEQVNKCYRIIQKLCIYGLPQKCKRLSELGSPSAVTDASFSCDSSNDSWAVSSSVSLSLEPQLKRRRSQDQQMRLXXSVSRVSIDVLNSPH

SEQ ID NO: 2974 - protein, 379 aa, Glycine max
  unsure (1)..(379): unsure at all Xaa locations
XDTLCCTLDCTIGDEEEQHLHYDENSNTTSTNTLFSNVGWVEHDLFWDHEELPSLLAKEHQNQLSNTLLQNNLVLALSPEEAVEWILKVNARYSFSTLTAVLDVNYLERLLFIFRFQNDNNDNNNNNNPWLTQLSAVACLSLAAKFEETHVPLFIDLQVEESKYLFEAKTVKRMEILVLSTLGWRMNPVTPLSFLDYITRKLGLKGYLCWEFLRRCETVLLSVFADSRFMGYLPSVLATATVMRVVNTVEPRLGVEYQDQLLGILGIDKEKVEECYNLMMEVVSGYDEEGKRSKLKKRKLESIIPCSSQNGVMEGSFSCDSSSNESWELGASSVSSSNKKTSTQDQLLXXTIQTHQILXAFLASYXFQFSLSLPLSSLN

SEQ ID NO: 2975 - protein, 384 aa, Glycine max
  unsure (1)..(384): unsure at all Xaa locations
MPLDHHLFLEEIKMAHRYPKPLLDTLYCLKDHNWEEEQVEDDEYSSSTTTTITNTNTDTSHIVFLEHDLFWDREELSSLLWDHQELPSSNTLQKNHQLANTRQENNEWILKVNARYSFSTLTAVLAVNYLDRFLFTFRFQNDNNDNNNNNNPWLTQLSAVACLSLAAKFEETHVPLFIDLQVEESKYLFEAKTVKRMEILVLSTLGWKMNPVTPLSFLDYITRKLGLKGYLCWEFLRRCETVLLSVFADSRFMGYLPSVLATATVMRVVNTVEPRLGVEYQDQLLGILGIDKEKVEECYNLMMEVVSGYDEEGKRSKLKKRKLESISSSQNGVMEGSFSCDSSXXNESWELGASSVSSSSKKTRTQDQLLLNHSNSSDFISIPR

SEQ ID NO: 2976 - protein, 372 aa, Glycine max
  unsure (1)..(372): unsure at all Xaa locations
MAYHHHDHTNRKSLLDTLYCSEXXEEDYGHFLNNSSPASPPFLLQSDMFSDEQELTSLLGKEHHNPLSTCLQTNPALDFARREAVEWMLKVNSHYSFSALTAVLSVNYFDRFLFSFRFQNDKPWMVQLAAVACLSIAAKVEETHVPFLIDLQQVEESRYLFEAKTIKKMEILILSTLGWKMNPPTSLSFLDYFTRRLGLKDHLFWEFLTKSEGVLLSLIGDSRFMSYLPSVLATATMMQVLKSVEPSLEAEYKSQLFGILRIDKEKVNSCCKLMLELWSEFEGKQCMKRKFGIGWIPGSPNGVMDVSFSCDSSSNDSWVSSSPEPLSKKSRSEXNSSCFYQTLPTQFFSVAFNLISTTLPFLWKTYIVFSPL

SEQ ID NO: 2977 - protein, 409 aa, Glycine max
  unsure (1)..(409): unsure at all Xaa locations
PRVRTLQXSPTSKMAYHHHDHTNRKSLLDTRSEAEEDYGHLTTPPLRPLLSXLQSDMFSDEQELTSLLGKEHHNPLSTCLQTNPALDFARREAVEWMLKVNSHYSFSALTAVLSVNYFDRFLFSFRFQNDKPWMVQLAAVACLSIAAKVEETHVPFLIDLQQVDESRYLFEAKTIKKMEIXVLSTLGWKMNPPTPLSFLDYFTRRXLDXKDHLCWEELSKSQGVLLCVLGDSRFMSYLPSVLATATMMHVVKSVEPGLEAEYKSQLFGILRIDKEKPEKVNSCCKLLLEVWSGYEEEEQEQGKQCMKRKFGIGSIPGSPNGVMDVSFSCDSSSNDSSVSSSPEPLSKKSRSEGSFFYQTQTIPTQIFSIAFNVNSFMENIYRLSPVLITLYLSFVSLFDEQVKLPTISA

SEQ ID NO: 2978 - protein, 326 aa, Glycine max
  unsure (1)..(326): unsure at all Xaa locations
XRAARAAPDVNGFLSIINQLSLPSSSFFSFTSTAMPRPHSPSFLLCQEHYSFTFQQHSQTLSNTQPSPLTFPDNLQHDLLLSSPRHHVVRLISKLSNFHGFSPLTTVLAVNYFDRFVATLRFQSELKPWMTQLTAVACVSLAAKVEETRVPLLSDFQVEESKFLFEAKTIQRMELLVLSTLEWKMNPVTPISFFQHFLTSLGLKRHLHSESLRRCQRLLLSVIADSRVMSYLPSTLAAAIMIHIIKEIEPLNATEYQNQLPGLLKTSEEQVNECYKLILDVCSNGIHNLRRKRLSEPSSSPDGVIDASFSCDSSNDSWTVASPSVX

SEQ ID NO: 2979 - protein, 384 aa, Glycine max
  unsure (1)..(384): unsure at all Xaa locations
MAYHHQKSLLDTLYCSEEHWIGDDQAEEEYGNSNSNSSSTLVNNSPESSPHLLLESDMFWDEQELASLLEKEQHNPLSSCLQSNPALEGARIEAVEWILKVNAHYSFSALTAVLAVNYFDRFLFSFRFQNDIKPWMTRLAAVACLSLAAKVDETHVPFLIDLQQVXEGSRYLFEAKTIKKMEILILSTLGWKMNPPTSLSFLDYFTRRLGLKDHLFWEFLTKSEGVLLSLIGDSRFMSYLPSVLATATMMQVLKSVEPSLEAEYKSQLFGILRIDKEKVNSCCKLMLELWSEFEGKQCMKRKFGIGWIPGSPNGVMDVSFSCDSSSNDSWVSSSPEPLSKKSRSEXNSSCFYQTLPTQFFSVAFNLISTTLPFLWKTYIVFSPL

SEQ ID NO: 2980 - protein, 373 aa, Nicotiana tabacum
MAIEHNEQQELSQSFLLDALYCEEEEEKWGDLVDDETIITPLSSEVTTTTTTTTKPNSLLPLLLLEQDLFWEDEELLSLFSKEKETHCWFNSFQDDSLLCSARVDSVEWILKVNGYYGFSALTAVLAINYFDRFLTSLHYQKDKPWMIQLAAVTCLSLAAKVEETQVPLLLDFQVEDAKYVFEAKTIQRMELLVLSSLKWRMNPVTPLSFLDHIIRRLGLRNNIHWEFLRRCENLLLSIMADCRFVRYMPSVLATAIMLHVIHQVEPCNSVDYQNQLLGVLKINKEKVNNCFELISEVCSKPISHKRKYENPSHSPSGVIDPIYSSESSNDSWDLESTSSYFPVFKKSRVQEQQMKLASSISRVFVEAVGSPH

SEQ ID NO: 2981 - protein, 368 aa, Nicotiana tabacum
MGIQHNEHNQDQTQSFLLDALYCEEERWEETIEDEILEKEATLPLPLPLLEQDLFWEDEELLSLFTKEKETISNFETIKTDPLLCLSRKEAVKWILKVNAHYGFSTFTAILAINYFDRFLSSLHFQKDKPWMIQLVAVTCLSLAAKVEETQVPLLLDFQVEDAKYVFEAKTIQRMELLVLSSLKWRMNPVTPLSFVDHIIRRLGLKSHIHWEFLKQCERILLLVIADCRFLSYMPSVLATATMLHVIHQVEPCNAADYQNQLLEVLNISKEKVNDCYELITEVSYNSISHKRKYESPINSPSAVIDTFYSSENSNESWDLQTSSSIPSTYSPRDQFLPLFKKSRVQEQQMRLTSLSRVFVDYAVGSPR

SEQ ID NO: 2982 - protein, 367 aa, Nicotiana tabacum
MVFPLDTQLLNPIFDVLYCEEDRFLDDDDLGEWSSTLEQVGNNVKKTLPLLECDMFWEDDQLVTLLTKEKESHLGFDCLISDGDGFLVEVRKEALDWMLRVIAHYGFTAMTAVLAVNYFDRFVSGLCFQKDKPWMSQLAAVACLSIAAKVEETQVPLLLDLQVADSRFVFEAKTIQRMELLVLSTLKWKMNPVTPLSFIDHIMRRFGFMTNLHLDFLRRCERLILGIITDSRLLHYPPSVIATAVVYFVINEIEPCNAMEYQNQLMTVLKVKQDSFEECHDLILELMGTSGYNICQSLKRKHQSVPGSPSGVIDAYFSCDSSNDSWSVASSISSSPEPQYKRIKTQDQTMTLAPLSSVSVVVGSSPR

SEQ ID NO: 2983 - protein, 343 aa, Antirrhinum majus
MYQQNSPSLCFDALYCEEEQNWDNGEIINDCFIEEQEPFSDLLKHDLLCGVDDDDDDKEELSSLLCKEQEYELYRVLEDNPSLAKARDEAVEWMFKVIGYYSFSALTAVLAVNYLDRFLCTFQFQQDKPWMYQLAAVACLSLAAKVEETQVPLLLDLQVEESKYVFESKTIQRMELLVLSTLKWKMNPVTPISFLEYIARRLALKSHLCKEFLNRCECLLLSLITDCRFMCHLPSALATATMLYVISSLEPCIGVEYQDQLINILGINKDKVEECCKLIQEVATSVHFQSGNKRKFGSLPYSPKGVVDISFSCDDSWPLDSTASVSSSPEHLSKKIKTQNPDH

SEQ ID NO: 2984 - protein, 361 aa, Antirrhinum majus
MLFSHSQQTHLQNPIFDALLCNEEHFDEDLDLGSGLKDPGFINQIHHNQKKEEPFTTFLFEHDLLWEDDELVNLLSKEKEQEQQAHLGYDDVMDSDGFLKRVRNEGIKWMLKVIGHYGFNAMTAVLAVNYYDRFITNVGFQKDKPWMSQLAAVACLSVKVEETQVPLLLDFQVEESKYVFEAKTIQRMELLVLTTLKWKMNPVTPISFFDHIVRRFELMNNVQCEFMKRCESVILSIITDYRFVRYLPSVVAAATMIYVIKELYPCDALEYQNEFVTVLRTSKEKTDDCHMLITEVINNQSYILCHKRKYGSIPSSPNGVIDAYFSSDGSNDSWSAVSSVSSSPEPVFKRIRAIGGANPPH

SEQ ID NO: 2985 - protein, 344 aa, Zea mays
  unsure (1)..(344): unsure at all Xaa locations
MGILCLGASSTLLCGEDRNNVLGLGXRQRAGGGGGGHDGLDSVVGAVFPVDTDEAVRALLEKETDHKPQDGYAERLERGGLEYSWRRDAMDWICKVHSYYRFGPLSLYLAVNYLDRFLSSYDLPHDKPWMRQLLSVACLALAVKMEETVLPLPVDLQVCDVKFEFEARTIGRMELLVLATLKWRMQAVTPFTFISYFLDKFNGGKPPSMALASRCTEIIIGTLKGSTFLSFRPSEIAAASALAAVSENQVVGSSSALSASEVPINKEMIARCYELLQEQALVRKTGHINGSPSVPQSPIGVLDATCFSFRSEDVRLGSSQSNNISSSSNDNQVSKRRRLSISPI

SEQ ID NO: 2986 - protein, 252 aa, Zea mays
LQVHSYYRFGPLSLYLAVNYLDRFLSSYDLPHDKPWMRQLLSVACLALAVKMEETVLPLPVDLQVCDVKFEFEARTIGRMELLVLATLKWRMQAVTPFTFISYFLDKFNGGKPPSLALASRCTDIIIGTLKGSTFLSFRPSEIAAASALAAVSENQVVGSSSALSASEVPINKVMIARCYELLQEQALVRKTGHVNGSPSVPQSPIGVLDATCFSFRSEDARLVSSQSNNISSSSSNDNQVSKRRRLSISPI

SEQ ID NO: 2987 - protein, 252 aa, Zea mays
  unsure (1)..(252): unsure at all Xaa locations
LQVHSYYRFGPLSLYLAVNYLDRFLSSYDLPDKPWMRQLLSVACLALAVKMEETVLPLPVDLQVCDVKFEFEARTIGRMELLVLATLKWRMQAVTPFTFISYFLDKFNGGKPPSLALASRCTDIIIGTLKGSTFLSFRPSEIAAASALAAVSENQAVGSSSALSASEVPINKVMIARCYELLQEQALVRKTGHVNGSPSVPQSPIGVLDATCFSFRSEDARLVSSQXXNNISSSSSNDNQVSTRRRLSISTI

SEQ ID NO: 2988 - protein, 326 aa, Arabidopsis thaliana
MSAVLTAGGGLTAGDRSIITAINTGASSLSFVGSAFIVLCYCLFKELRKFSFKLVFYLALSDMLCSFFLIVGDPSKGFICYAQGYTTHFFCVASFLWTTTIAFTLHRTVVKHKTDVEDLEAMFHLYVWGTSLVVTVIRSFGNNHSHLGPWCWTQTGLKGKAVHFLTFYAPLWGAILYNGFTYFQVIRMLRNARRMAVGMSDRVDQFDNRAELKVLNRWGYYPLILIGSWAFGTINRIHDFIEPGHKIFWLSVLDVGTAALMGLFNSIAYGFNSSVRRAIHERLELFLPERLYRWLPSNFRPKNHLILHQQQQQRSEMVSLKTEDQQ

SEQ ID NO: 2989 - protein, 326 aa, Arabidopsis thaliana
MSAVLTAGGGLTAGDRSIITAINTGASSLSFVGSAFIVLCYCLFKELRKFSFKLVFYLALSDMLCSFFLIVGDPSKGFICYAQGYTTHFFCVASFFWTTTIAFTLHRTVVKHKTDVEDLEAMFHLYVWGTSLVVTVIRSFGNNHSHLGPWCWTQTGLKGKAVHFLTFYAPLWGAILYNGFTYFQVIRMLRNARRMAVGMSDRVDQFDNRAELKVLNRWGYYPLILIGSWAFGTINRIHDFIEPGHKIFWLSVLDVGTAALMGLFNSIAYGFNSSVRRAIHERLELFLPERLYRWLPSNFRPKNHLILHQQQQQRSEMVSLKTEDQQ

SEQ ID NO: 2990 - protein, 326 aa, Arabidopsis thaliana
MSAVLTAGGGLTAGDRSIITAINTGASSLSFVGSAFIVLCYCLFKELRKFSFKLVFYLALSDVLCSFFLIVGDPSKGFICYAQGYTTHFFCVASFLWTTTIAFTLHRTVVKHKTDVEDLEAMFHLYVWGTSLVVTVIRSFGNNHSHLGPWCWTQTGLKGKAVHFLTFYAPLWGAILYNGFTYFQVIRMLRNARRMAVGMSDRVDQFDNRAELKVLNRWGYYPLILIGSWAFGTINRIHDFIEPGHKIFWLSVLDVGTAALMGLFNSIAYGFNSSVRRAIHERLELFLPERLYRWLPSNFRPKNHLILHQQQQQRSEMVSLKTEDQQ

SEQ ID NO: 2991 - protein, 159 aa, Brassica napus
YTTHFFCVASFLWTTTIAFTLHRTVVKHKTDVEDLEAMFHLYVWGTSLVVTVIRSFGNNHSHLGPWCWTQTGLKGKAVHFLTFYAPLWGAILYNGFTYFQVIRMLRNARRMAVGMSDRVDQFDNRAELKVLNRWGYYPLILIGSWAFGTINRIHDFIEP

SEQ ID NO: 2992 - protein, 306 aa, Glycine max
  unsure (1)..(306): unsure at all Xaa locations
MATSVAVAGALTAHDRRILTAVNVGASSLSLAGSSFIVVCYLLFKELRKFSFKLVFYLALSDMLCSFFGIIGDPSKGFFCYAQGYSTHFFCVASFLWTTTIAFTLHRTVVKHKTDVEDLEAMFHLYVWGTSLVMTVMRSFGNDQEHFGAWWGTQTGRTGKAVHFVTFYMPLWGAILYNGFTYLQVIRMLNNATRMAVGMSGQTFVSDTRDNMRALNRWGYYPLILIGSWTFGTINRIHDFLEPNHKIFWLTFLDVGTAALMGLXNSIAYGLNSSVRRAICERLDKFWPERLNRWLPNKLKYKNLQX

SEQ ID NO: 2993 - protein, 316 aa, Glycine max
  unsure (1)..(316): unsure at all Xaa locations
MATSVAVAGALTAHDRRILTAVNVGASSLSLAGSSFIVVCYLLFKELRKFSFKLVFYLALSDMLCSFFGIIGDPSKGFFCYAQGYSTHFFCVASFLWTTTIAFTLHRTVVKHKTDVEDLQSEDMQHVVAKWXXSILLRGTCNAKQFSPLLKXXINAVHFVTFYMPLWGAILYNGFTYFQVIRMLNNATRMAVGMSGQTFVSDTRDNMRALNRWGYYPLILIGSWAFGTINHIHDFFEPNHKIFWLTFLDVGTAALMGLFNSIAYGLNSSVRRAICERLDKFWPERLNRWLPNSLKYKNXXQQESELVLFKTEDQXQ

SEQ ID NO: 2994 - protein, 121 aa, Glycine max
  unsure (1)..(121): unsure at all Xaa locations
MANLVAIAGALXTAHDRRILTAVNVGASSLSLAGSSFIVVCYLLFKELRKFSFKLVFYLALSDMLCSFFGIIGDPSKGFFCYAQGYSTHFFCVASFLWTTTIAFTLHRTVVKHKTDVEDLX

SEQ ID NO: 2995 - protein, 114 aa, Glycine max
  unsure (1)..(114): unsure at all Xaa locations
MATSVAVAGALTAHDRRVLTAVNAGASSLSLAGSSFIVVCYLLFKELRKFSFKLVFYLALSXXCFFFLSFRVPLLQIXNLRFYFLTFLRIDSFVSLVTLIXVITIGRNDTXKRA

SEQ ID NO: 2996 - protein, 81 aa, Glycine max
  unsure (1)..(81): unsure at all Xaa locations
AVHFVTFYMPLWGAILYNGFTYFQVIRMLNNATRVXVSNFTDSFSNKNKLLVXALFETLLFLFLGEFQMAVGMSGQTFVSD

SEQ ID NO: 2997 - protein, 369 aa, Dictyostelium discoideum
MIQILLSTFISFIIIIVSSNDIRSGENDNFNNNKMINNFLTTITTNDTIIIKETESPNDYDFSKEQIESLDKIVYFSSTMGIVGALFIIVSFFLFKAARTFATKMIFFLSLSDLFAAIFYLPYYRDSDIMCNLQGMGLVFFLSSSYLWTMCISISLFMVFFTTIFELNHWFKYFHFICWGIPLFTAIISLIFHAYGKTGSWCFISDPTSIFRLLYYLPLIVVFFINLVVFIAIRWKISQHSNSLVSRVNIIVSFYLIAFSLSQLPTIINSIQNFSDPDNPQFSLFAFQLLLQPLQGFLNCVVYGINEGFINHYVEFLEKNIFRCRCKKSRELKKIESDKTSLLVDYENRDDEKGFDGMDKLIIEDYNRV

SEQ ID NO: 2998 - protein, 490 aa, Dictyostelium discoideum
MENLNTTSTAALTGMTKQENDASYAVLLIADFTSIIGCTLVLLGFWRLKLLRNHITKIITFFCSTSLAKDLISTILTLIEKKQSNGSFQCYLYATVITYGSLACWLWTLCLSFSIYNLIVKREPEPEKFEKYYHVFCWVVPFIMSVIMLSKGVIEVTGNWCWIGNTYVGYRFGLFYGPFLAIWFLAAVLVGLTSRYTYKVIRSSVSDNKDRHMTYQFKLINYIIVFLLCWVFAVINRIVNGLNMFPAWVSILHTYLSVSHGFYASVTFIYNNPLMWRYLASIILIPFTKFGYFVETQQRLEKNKNNNNHSPVGLSNNAQNNNHHHNHNNNHNNNHNNHNNNNNNNNSDFVNNDSSNYYTASMIESFSVQNENSKSINGADNFKQNGASQQDDKDSPNSNNNNNNNNNNNNNNNNNNNNNNNNNNYNNKDIEPIDNCNTNSIPMDNIATRIEIPPQHPTLTPQQSLQEINLNDDDNKINTHQSNKKKDSNV

SEQ ID NO: 2999 - protein, 339 aa, Triticum aestivum
  unsure (1)..(339): unsure at all Xaa locations
MAASALAASAAASQSMKNREILDAVGTTAAALSLAGSSFIVLCYLLFRELRKFSFKLVYFLAGADMLCSLFTIMGGPAGAFYCFAHDYSAHFFCVASFLWTTTIAFTLHRTVVKHKTDVEEFGFIFHLYVWGTSLVTTDVRGIGGDYGRPGTWCWIQQGSTGKILHLITFYLPLWGAILYNGFTYYQVNRMLNNATRMAVGMSDRSSQSDVRADKKAFNRWGYYPLILIGSWAFATINRLHDFANPGHKIFWLSILDIGFAGLMGLFNSIAYGLNSSVRRAIAERIDMYLPERIKREPPNXLSRLRSQQENELTSLIVESNNSITETTMRVTPRSSLAG

SEQ ID NO: 3000 - protein, 137 aa, Triticum aestivum
  unsure (1)..(137): unsure at all Xaa locations
XSKRFRSCGWISSLKPHCLFPETKVLNRWGYYPLILIGSWAFGTINRIHDFIEPGHKIFWLSVLDVGTAALMGLFNSIAYGFNSSVRRAIHERLELFLPERLYRWLPSNFRPKNHLILHQQQQQRSEMVSLKTEDQQ

SEQ ID NO: 3001 - protein, 116 aa, Triticum aestivum
  unsure (1)..(116): unsure at all Xaa locations
XRSCGWISSLKPYCSFAETKALNSWGHYPLIPIXSWAFGTINRIHDFIEPGLKIFWLSLLDFGTVELMGLDQLISYGFXTSTRLAIHERLEPATPTELFGWLYSNYRXKAXLFXNX

SEQ ID NO: 3002 - protein, 371 aa, Zea mays
  unsure (1)..(371): unsure at all Xaa locations
MAPAVSAAASAAMRQALRDRQILDAVGTGAAALSLAGSSFIVICYLLFRELRKFSFKLVFYLAVSDMFCSLFTILGGPSNAFYCFAHDYSAHFFCVASFLWTTTISFTLHRTVVKHKTDVEEFGSIFHLYVWGTSLSTTVLRSIGSDYGRPGTWCWIQQGSMAKVLHLITFYLPLWGAILYNGFTYYEVNRMLNNATQMAAGISDRSNQSDIRADRKAFNRWGYYPLILIGSWAFATINRLYDFANPGHRIVWLSFLDVGFAGLMGLFNSIAYGLNSSVRRAISERIDTFLPERIKRSLPALSRLRSXXRKMNSLLLSLRVTDMXWIFHAHEAFFFCLSVRSSISNKGMQHHCRSSGLVTRRIGSKKKKKK

SEQ ID NO: 3003 - protein, 356 aa, Zea mays
  unsure (1)..(356): unsure at all Xaa locations
MAPAVAAAASAAMRQALRDRQILDAVGTGAAALSLAGSSFIVICYLLFRELRKFSFKLVFYLAVSDMFCSLFTILGGPSNAFYCFAHDYSAHFFCVASFLWTTTISFTLHRTVVKHKTDVEEFGSIFHLYVWGTSLSTTVLRSIGSDYGRPGTWCWIQQGSMAKVLHLITFYLPLWGAILYNGFTYYEVNRMLNNATQMAAGISDQSNQSDIRAGRKAFNRWGYYPLILIGSWAFATINRLYDFANPGHRIVWLSFLDVGFAGLMGLFNSIAYGLNSSVRRAISERIDTFLPERIKRSLPALSRLRSXXKKMNSLLLSLRVTDMXWIFHAHEAFFVYLFVLQSPTRECNITVGAVG

SEQ ID NO: 3004 - protein, 287 aa, Zea mays
  unsure (1)..(287): unsure at all Xaa locations
MRQLHNLHLSTQSGYNNQQFSRPFSLEIPRPINRRLMDPVAASEETRGDEVVLRKRHILYDVSTGAAELSLVGSSFMVMCYLLFREVRKVSFKLVFYLSVSDMICSLFTILLGTSNAFFCSALGSSAHFRWGASPLWTTTISGTLHRAAGKHRTAVEEFGPICHLXVVRGTSLSTTVLRAIGRDYGRPGTXWRWRSAGKHGXKVLHLIPFELPLWXGPVMYNGVTSYEGNRMLNNATXQMAAGISDQSNQADTRAGRKAXVNRWGYYPLNLIXSWAFATINRLYDFA

SEQ ID NO: 3005 - protein, 201 aa, Zea mays
  unsure (1)..(201): unsure at all Xaa locations
LAGNRRINFYVRPQVEEFGSIFHLYVWGTSLSTTVLRSIGSDYGRPGTWCWIQQGSMAKVLHLITFYLPLWGAILYNGFTYYEVNRMLNNATQMAAGISDQSNQSDIRAXXQEGHRIVWLSFLDVGFAGLMGLFNSIAYGLNSSVRRAISERIDTFLPERIKRSXPALSRLRSXXKKMNSLFLSLRGTDMKWIFHAPRTFF

SEQ ID NO: 3006 - protein, 364 aa, Hordeum vulgare subsp. vulgare
MEEIGHHFGLGATAHGQHHSQLPWGSSPLSAVISPPPQQQQQHQQQSAGYLAHSPLSLNTAPPGVSHGGGSGCSNPVLQLANGSLLEACAKAAKEPSSSSYAADVEAIKAKIISHPHHSSLLAAYLDCQKVGAPPEVSARLTAVAQDLELRQRTALGGLGTATEPELDQFMEAYHEMLVKYREELTRPLQEAMEFLRRVETQLNSLSISVRSLRNILSTGSSEEDQEGSGGETELPEIDAHGVDQELKHHLLKKYSGYLSSLKQELSKKKKKGKLPKEARQQLLSWWEMHYKWPYPSESQKVALAESTGLDLKQINNWFINQRKRHWKPTDEMQFVMMDAYHPPNAAFYMDGHFVNDSGLYRFG

SEQ ID NO: 3007 - protein, 488 aa, Physcomitrella patens
MNRDMVGIVSSASARLEENPRLESYIASTGELAGWVEKSASVEATRSSLQLSQSQAFFEQYSTQYPQSDISSSSQADISAHDYLNIFKGTHAQAKADMKPRITQFMIPVQNQLEAGSYLLPHMAHDDSNNFSTSSNIGRATQSLCTMHQDMETLRQVPKSNDLLIAITASAAAAVNQERGSGSETGQHDRDDDEKNKATDRGKLPENEEEQLLRDAIVDHPLYPELVVAHISIFKIGAPKGLLIKLDEMEKKFQRFQYGESSWNVLHVTKFGQDPSLDFFMRSYIDLLTKFREDLENPYNKFAQYKDKVTKDLEDLCGHYIETTPDEEDNFGSDIGTKDMSQDLNDLEILGEENLMYTADIDESIVIDPDAADEELKKMLRLKYGKHIAGLKAEFNRVRKKGKLPTNARQILKDWFSRHSYWPYPSEMEKAYLQRLCGLNLKQINNWFINERKRHWSCKGKCMYPNTKFYPRDGHVDPNNHGEGYLEQ

SEQ ID NO: 3008 - protein, 456 aa, Venturia canescens
MQEGSTAVALAMVTPGYDQDPASGVADYTTHQDQAQFEADKRAVYKHPLFPLLALLFERCELATQSSDNSMSESFNMDIQAFVQHQERDRKPFLINDPEIDGLMIKAIQVLRIHLLELEKVQELCKDFCNRYIGCLKGKMQSENLLRSDYSHHGHDMGPSSGSNGSSPLQVLSSTGNDVEPGANGLGVSRGDALSDNGSVDLPIAQDEDPLDLERSSTRSSSVNAHRSVRSDSHDQDDPLSPSTIHGSTPLSQIGAHSCAPVNDIYLGQDITVTGSPSPGPSEDDDDGSGGAPATHSGGHGSIRKGRQKRGVLPKQATSIMRAWLFHHLVHPYPTEDEKRQIASQTNLTLLQVNNWFINARRRILQPMLDGAGAEALPRTGKRHKVAKQSSQNQQPNQQLQDQQLSQHQSHSQQAIGAAGGDWQSEDSGSESGSSDGDGGAEKFKDGNESDEDDLH

SEQ ID NO: 3009 - protein, 434 aa, Picea abies
MEHLNAAAAQASSSLYGVSMAEYGDVGVSSMMALMTQHEPHERDSILTTSMPSSFSSFHGHAECLLSAAMFQASQGDHKLKRQPEMDQLVSEQAVMSDSSMPSVKTEGCSSLRNQFEIRREQTGNCYTDQSSNAPVSPLVTSLVPQAGGEARMITSLEADSSHFSGGKEAEAIKAKILAHPQYPSLLGAYIDCQKIGAPPEVVARLDALTHEYENQQHRTTVSIGMDPELDQFMEAYCEMLTKYHEELTKPFKEAMSFLKKIEAQLNSLSKGTIRISPSAENDEKTEGGASSEEVEDGSGGETDFQEVDHHAVEDRELKDHLLRKYSGYLSSLKQEFMKKKKKGKLPKDARQKLLDWWTVHYKWPYPSETEKIALAECTGLDQKQINNWFINQRKRHWKPSEDMQLMAMDGQSPHGATLYVERHLMTEGYHLDC

SEQ ID NO: 3010 - protein, 383 aa, Picea abies
SRPCQGANKFEPANAHIGGGGAGHFVMEQFIPEQAVISDSSISSVKTEVCSGSGGTGVPGQFELIRRKEEGRCARAYAEPSFVVTPLVTSLPPQQQEARMVTSLAVDMDSSCSCKPIEADAMKAKIIAHVHYPRLVAAYIDCQKVGAPPDVVSELDELSQKCHAQQCVATISIGADPELDQFMEAYCEMFIKYQEELTKPFKEAMAFLKKIENQLGALTKGTIRTSSLDQGDERGDGAASSEEEDGSGGEVEFHEVDPHAEDRELKDQLLRKYSGYLSSLKQEFLKKKKKGKLPKEARQKLLDWWTRNYKWPYPSESQKIALAESTGLDQKQINNWFINQRKRHWKPSEEMQFVVMDSPNPHNAAFFLEGHLRTDGTAFSMDC

SEQ ID NO: 3011 - protein, 433 aa, Picea abies
MEHLNTAAAQASSSLYGVGMAEYGDAGVSSMMALITQHEPHDSESIMSTRMPSSFSSFHGHADCLLSAAMFQASQGDHKLKRQPGMDQLVSEQAGMSDSSMPSVKTEVGSGLRNQLEFHREQTGNGYTDQSSNTPVNPLVTSLASQARGEAQMIPSWDANSPHFNVDNEEYAIKSKILAHPQYPSLLGAYIDCQKIGAPPEAVARLDALTREYQNQQRRTVSIGMDPELDQFMEAYCEILTKYHEELAKPFKEAMTFLMKIEAQFNSLGKGTIRISPPAENDKKTEGGGSSEEVEDGSGGETDFQEVDHHAVEDRELKDHLLRRYSGYLSSLKQEFMKKKKKGKLPKDARQKLLDWWSLHDKWSYPSETEKIALAECTGLDQKQINNWFINQRKRHWKPSEDMHFMVMNSHSPHSAALYVERHLMTEGYHLDC

SEQ ID NO: 3012 - protein, 442 aa, Picea mariana
MKKLFHSDMEHLNAAAAQASSSLYGVSMAEYGDVGVSSMMALMTQHEPHERDSILTTSMPSSFSSFHGHAECLLSAAMFQASQGDHKLKRQPEMDQLVSEQAVMSDSSMPSVKTEGCSSLRNQFEIRREQTGNCYTDQSSNAPVSPLVTSLVPQAGGEARMITSLEADSSHFSGGNEAEAIKAKILAHPQYPSLLGAYIDCQKIGAPPEVVARLDALTHEYENQQHRTTVSIGMDPELDQFMEAYCEMLTKYHEELTKPFKEAMSFLKKIEAQLNSLSKGTIRISPSAENDEKTEGGASSEEVEDGSGGETDFQEVDHHAVEDRELKDHLLRKYSGYLSSLKQEFMKKKKKGKLPKDARQKLLDWWTVHYKWPYPSETEKIALAECTGLDQKQINNWFINQRKRHWKPSEDMQLMAMDGQSPHGATLYVERHLMTEGYHLDC

SEQ ID NO: 3013 - protein, 433 aa, Picea mariana
MEHLNTAAAQASSSLYGVGMAEYGDAGVSSMMALITQHEPHDSESIMSTRMPSSFSSFHGHADCLLSAAMFQASQGDHKLKRQPGMDQLVSEQAVMSDSSMPSVKTEVCSGLRNQFEFHREQTGNCYTDQSPNTPVNPLVTSLASQARGEAQMIPSLDANSPHFNVDNEEYAIKSKILAHPQYPSLLGAYIDCQKIGAPPEAVARLDALTHEYQNQQRRTVSIGMDPELDQFMEAYCEILTKYHEELAKPFKEAMTFLMKIEAQFNSLGKGTIRISPPAENDEKTEGGGSSEEVEDGSGGETDFQEVDHHAVEDRELKDHLLRRYSGYLSSLKQEFMKKKKKGKLPKDARQKLLDWWSLHDKWPYPSETEKIALAECTGLDQKQINNWFINQRKRHWKPSEDMHFMVMNSHSPHSAALYVERHLMTEGYHLDC

SEQ ID NO: 3014 - protein, 382 aa, Acetabularia acetabulum
MNDMDFAALFNQHEGNNPDNLQPNAPPYMLSPQQNAAATMPKSHCSGDNTLMLSDMGEQVIMHPLYPDLVKAIMDCRKVGGMDESRHHIQIRTEQVLEDLHRKREQYQITGRMPALDPELDQFLRQYIQVLDELHAELLNINREADNILHMFTTQIAEVINMPMDPRSMHARNAFNAQSNIDMTWFEIRNEQEQRVLLKQKYRQELLALKEEFSKRKKRGKLPTHSIEVLKSWWKEHIAWPYPTDSAKRSLASQTNLTSIQINNWFINQRKRHWHKLFPEGVPNSQEEALRSLKARGMLGMDSSGPMRLMSMDIESQETQEVEQETEDIQTPNEFQFQSAFLNEHEQMMDEAGFTSRPNVQLPDAISQFQSQLGQIRKDSDE

SEQ ID NO: 3015 - protein, 58 aa, Santalum album
KKKGKLPENAKTTLLDWWSTHYRWPYPTEEEKMKLSEITGLDPRQINNWFINQRKGSR

SEQ ID NO: 3016 - protein, 97 aa, Populus deltoides
LMAHPHYHRLLAAYANCQKVGAPPEVVARLEEACASAASMGPANTDGIGEDPALDQFMEAYCEMLTKYEQELSKPLKEAMVFLQRVECQFRALTLSS

SEQ ID NO: 3017 - protein, 383 aa, Brassica oleracea
MESGSNSTSCPMAFAGDNSDGPMCPMMMMMMPVITSHQQHHGHDQQHQHQQQHDGYAYQSHHQHSSLLFLQSLTPPSQEAKNKVRSSCSPSSGAPAYSFMEINHQNELLAGGLQSPVLSSLLVKAKIMAHPHYHRLLLAYVNCQKVGAPPEVQARLEETCSSAAAAAASMGPTGSLGEDPGLDQFMEAYCEMLVKYEQELSKPFKEAMVFLQHVECQFKSLSLSSPSSLGYGEAAIERNNNGSSEEEVDMNNEFVDPQAEDRELKGQLLRKYSGYLGSLKQEFMKKRKKGKLPKEARQQLLDWWSRHYKWPYPSEQQKLALAESTGLDQKQINNWFINQRKRHWKPSEDMQFVVMDATHPLHYFMGNVLGNPFPIDHISGTML

SEQ ID NO: 3018 - protein, 380 aa, Brassica oleracea
MESGSNSTSCPMAFAGDNSDGPMCPMMMMMMPVITSHQQHHGHDQQHQHQQQHDGYAYQSHHQHSSLLFLQSLTPPSQEAKNKVRSSCSPSSGAPAYSFMEINHQNELLAGGLNPCSSASVKAKIMGHPHYHRLLLAYVNCQKVGAPPEVQARLEETCSSAAAAAASMGPTGSLGEDPGLDQFMEAYCEMLVKYEQELSKPFKEAMVFLQHVECQFKSLSLSSPSPFSGYGEAAIERNNNGSSEEEVDMNNEFVDPQAEDRELKGQLLRKYSGYLGSLKQEFMKKRKKGKLPKEARQQLLDWWSRHYKWPYPSQKLALAESTGLDQKQINNWFINQRKRHWKPSEDMQFVVMDATHPHHYFMDNVMGNPFPIDHISSTML

SEQ ID NO: 3019 - protein, 381 aa, Medicago truncatula
MEGSSNGSCSYVMGAFGENSGGLCPPMMMMPLVTSSHHNAHHPINSNNNNNNNNNNTNANNTTGLFLPIPNSTNNNNNHYTNCNNNTSSIMLQNNHQNTPGLGYYFMDNINNHGSSSSSSSSSVKSKIMAHPHYHRLLEAYINCQKVGAPSEVVARLEEACATAVRMGGDAVGSGCLGEDPALDQFMEAYCEMLIKYEQELSKPLKEAMLFLQRIEVQFKNLTVSSSSDNIACSEGGDRNGSSEEDHVDLYNNMIDPQAEDRELKGQLLRKYSGYLGSLKQEFMKKRKKGKLPKEARQQLLEWWSRHYKWPYPSESQKLALAESTGLDQKQINNWFINQRKRHWKPSEDMQFVVMDPSHPHYYMDNVLTNSYPMDLSNTML

SEQ ID NO: 3020 - protein, 371 aa, Pisum sativum
MEGSSNGSSSYVMAAFGENSGGLCPPMMMMPLVTSSHHHPINSNNNNANNTSCLFLPIPNSTNNNNHYTNNNNSNNTMLQNNHHTTQNTPGLGYYFMDNHNNNGASSSSSSSAVKAKIMAHPHYHRLLEAYINCQKVGAPSEVVTRLEEACASAVRMGGDAVGSGCIGEDPALDQFMEAYCEMLIKYEQELSKPLKEAMLFLQRIEVQFKNLTVSSSSDNIACNEGGDRNGSSEEDQVDLYNNMIDPQAEDRELKGQLLRKYSGYLGSLKQEFMKKRKKGKLPKEARQQLLEWWSRHYKWPYPSESQKLALAESTGLDQKQINNWFINQRKRHWKPSEDMQFVVMDPTHPHYYMDNVLTNSFPMDLSNTML

SEQ ID NO: 3021 - protein, 251 aa, Pisum sativum
MEEYTNNPNQNQNQSSRPNFLYNQIPMKQHLSSSIKRIRKLFSFRNKLHHHQHQHHHHQQQSAVENWNLIVTSQLHTPIFHYPNLMRTNIIPQTIMNHHQQGGGGSPSSSNEAESIKAKIIAHPQYSSLLQAYMDCQKIGAPPEAVARMVEARQEFEARQRSSVNSRESSKDPELDQFMEAYYDMLVKYREELTRPIQEAMDFMRRIETQLNMLCNGPLRIFPDDKNEGVGSSEEEQENSGGETDQVQEID

SEQ ID NO: 3022 - protein, 365 aa, Oryza sativa (indica cultivar-group)
MEELEGHRGEGRLPPPPPLLPFPKVSVQVYTVPSSSTAASAAAAGGARQAVAPATRDGGDGGGRAAGVLDDPVKARIVSHPRYHRLLAAFLDCHKVGCPAEAAEEIAAAARVREARQRAAAAASRMPPAPEDPELDQFMEDYCKLLVECKEELSRPLQEAEEFLRTVESELNSINSGPPLTALISESKAGLDSSDDDEHEDGSGMEMMEAAEDEDLGIIDPRSDDKALKRHLLRKYSGYLGGLRKELSKKRKKGKLPKEARQKLLTWWELHYRWPYPSEMEKIALAESTGLEQKQINNWFINQRKRHWKPTEEMQFAVMEAYHHQSTDAAAAFYVDVDARLVGATAAAPASAVYTARPDHGVWRA

SEQ ID NO: 3023 - protein, 138 aa, Oryza sativa (indica cultivar-group)
SDDKALKRHLLRKYSGYLGGLRKELSKKRKKGKLPKEARQKLLTWWELHYRWPYPSEMEKIALAESTGLEQKQINNWFINQRKRHWKPTEEMQFAVMEAYHHQSTDAAAAFYVDVDARLVGATAAAPASAVYTARPDH

SEQ ID NO: 3024 - protein, 204 aa, Oryza sativa (indica cultivar-group)
MDQSFGNLGGGGAGGSGKAAASSFLQLPLSTAAAATAYYGTPLALHQAAAAAGPSQYHGHGHPHHGGGHHHSKHGGAGGGEISAAEAESIKAKIMAHPQYSALLAAYLDCQKVGAPPEVLERLTATAAKLDARPPGRHDARDPELDQFMEAYCNMLAKYREELTRPIDEAMEFLKRVESQLDTIAGGGHGGSGGGAGSARLLLA

SEQ ID NO: 3025 - protein, 161 aa, Oryza glumipatula
MEELEGHRGAGRLPPPPPLLPFPKVSVQVYTVPSSSTSASAAAAGGARQAVAPATRDGGGRAAGVLDDPVKARIVSHPRYHRLLAAFLDCHKVGCPAEAAEEIAAAARVREARQRAAAAASRMPPAPEDPELDQFMEDYCKLLVECKEELSRPLQEAEEFL

SEQ ID NO: 3026 - protein, 136 aa, Oryza meridionalis
SDDKALKRHLLRKYSGYLGGLRKELSKKRKKGKLPKEARQKLLTWWELHYRWPYPSEMEKIALAESTGLEQKQINNWFINQRKRHWKPTEEMQFAVMEAYHHQSADAAAAFYVDARLVGATAAAPAAAVYTTRPDH

SEQ ID NO: 3027 - protein, 159 aa, Oryza meridionalis
MEELEGHRGAGRLPPPPPLLPFPKVSVQVYTVPSSSTAAAGGARQAVAPATRDGGGGGRAAGVLDDPVKARIVSHPRYHRLLAAFLDCHKVGCPAEAAEEIAAAARVREARQRAAAAASHMPPAPDDPELDQFMEDYCKLLVECKEELSRPLQEAEEFL

SEQ ID NO: 3028 - protein, 58 aa, Avena vaviloviana
KGKLPKEARLKLLHWWELHSKWPYPSETEKIALAETTGLDQKQINNWFINQRKRHWKP

SEQ ID NO: 3029 - protein, 347 aa, Petunia x hybrida
MEGGGNSSGNNTSSLMAYGDHENNNNAICPPMMMMMMPPPPLSITNTSNNGESSSNNNNNILFLPFMENNSNTIHEDGNSCSSNIKAKIMAHPHYPRLLAAYINCQKIGAPPEVVARLEEVCATSAHMGRNGGGGGGGGNNVIGEDPALDQFMEAYCEMLTKYEQELSKPFKEAMVFLSRIECQFKALTLASTSESVAAFGEAMDRNGSSEEEVDVNNSLVDPQAEDRELKGQLLRKYSGYLGSLKQEFMKKRKKGKLPKEARQQLLDWWTRHYKWPYPSESQKLALAESTGLDQKQINNWFINQRKRHWKPSEDMQFVVMDAAHPHYYIDNVLGNPFPMDMTPTLL

SEQ ID NO: 3030 - protein, 345 aa, Solanum tuberosum
MDDEMYGFHSTRDDYADKALMSPENLMMQTEYNNFHNYTNSSILTSNPMMFGSDDIQLSSEQTNSFSTMTLQNNDNIYQIRSGNCGGGSGSGGSSKDHNDNNNNNEDYDEDGSNVIKAKIVSHPYYPKLLNAYIDCQKVGAPAGIVNLLEEIRQQTDFRKPNATSICIGADPELDEFMETYCDILLKYKSDLSRPFDEATTFLNKIEMQLGNLCKDDGGVSSDEELSCGEADASMRSEDNELKDRLLRKFGSHLSSLKLEFSKKKKKGKLPKEARQMLLAWWDDHFRWPYPTEADKNSLAESTGLDPKQINNWFINQRKRHWKPSENMQLAVMDNLSSQFFSSDD

SEQ ID NO: 3031 - protein, 353 aa, Antirrhinum majus
MEGSGGGGMMAFGENNNNNSNNGFCPSNMMMPQLASNCEGGYSTTPFVPLVPFTNHHHHHQEMNRQRSTVVGGSSMVYEEGHQNNSNAITSTGYYFMDSTNCDESSLKAKIMAHPHYHRLLAAYVNCHKIGAPPEVVSRLEEAAAAMARHGTISVGEDPGLDQLMEAYSEMLSKYEQELSKPFKEAMLFLSRIESQFKALTVSAARGEAMFRNGSSEEEIDVNNSFIDPQAEDIELKGQLLRKYSGYLGSLKQEFMKKRKKGKLPKEARQQLLEWWSRHYKWPYPSESQKLALAESTGLDQKQINNWFINQRKRHWKPSEDMQFVVMDAANPQYYMENILGNPFPMDISPALL

SEQ ID NO: 3032 - protein, 351 aa, Antirrhinum majus
MEGGGGSSSNSCMIGFGENTSSNNGFCPMTMMMMPPPSMASSHPNGNTLFFPLPSTNNSHQGLNHRTSASTMLEDQHNNNTITSTGYYFMDGNDNDSVKAKIMAHPYYHKLLAAYINCQKIGAPPEVAVKLEEACASAATMGRNSVSRIGEDPALDQFMEAYCEMLSKYEQELSKPFREAMLFLSRIECQFKALTLSSSDSACGEAMDRHGSSEEEIDVDNSLIDPQAEDRELKGQLLRKYSGYLGSLKQEFMKKRKKGKLPKEARQQLLDWWSRHYKWPYPSESQKLALAEQTGLDQKQINNWFINQRKRHWKPSEDMQFVVMDAAHPGHYYMDNVLGNPFAMDILPTLL

SEQ ID NO: 3033 - protein, 41 aa, Aegilops longissima
KGKLPKDARLALVDWWNTHYRWPYPTINNWFVNQRKRHWKP

SEQ ID NO: 3034 - protein, 364 aa, Hordeum vulgare
MEEIGHHFGLGATAHGQHHSQLPWGSSPLSAVISPPPQQQQQHQQQSAGYLAHSPLSLNTAPPGVSHGGGSGCSNPVLQLANGSLLEACAKAAKEPSSSSYAADVEAIKAKIISHPHYSSLLAAYLDCQKVGAPPEVSARLTAVAQDLELRQRTALGGLGTATEPELDQFMEAYHEMLVKYREELTRPLQEAMEFLRRVETQLNSLSISGRSLRNILSTGSSEEDQEGSGGETELPEIDAHGVDQELKHHLLKKYSGYLSSLKQELSKKKKKGKLPKEARQQLLSWWEMHYKWPYPSESQKVALAESTGLDLKQINNWFINQRKRHWKPTDEMQFVMMDAYHPPNAAFYMDGHFVNDSGLYRFG

SEQ ID NO: 3035 - protein, 58 aa, Hordeum marinum
KGKLPKEARQKLLHWWELHSKSPYPSETEKMALGESTGLDQKQINNWFINQRKRHCKP

SEQ ID NO: 3036 - protein, 138 aa, Oryza rufipogon
SDDKALKRHLLRKYSGYLGGLRKELSKKRKKGKLPKEARQKLLTWWELHYRWPYPSEMEKIALAESTGLEQKQINNWFINQRKRHWKPTEETQFAVMEAYHHQSTDAAAAFYVDVDARLVGATAVAPASAVYTARPDH

SEQ ID NO: 3037 - protein, 164 aa, Oryza rufipogon
MEELEGHRGEGRLPPPPPLLPFPKVSVQVYTVPSSSTAASAAAAGGARQAVAPATRDGGDGGGRAAGVLDDPVKARIVSHPRYHRLLAAFLDCHKVGCPAEAAEEIAAAARVREARQRAAAAASRMPPTPEDPELDQFMEDYCKLLVECKEELSRPLQEAEEFL

SEQ ID NO: 3038 - protein, 164 aa, Oryza rufipogon
MEELEGHRGEGRLPPPPPLLPFPKVSVQVYTVPSSSTAASAAAAGGARQAVAPATRDGGDGGGRAAGVLDDPVKARIVSHPRYHRLLAVFLDCHKVGCPAEAAEEIAAAARVREARQRAAAAASRMPPAPEDPELDQFMEDYCKLLVECKEELSRPLQEAEEFL

SEQ ID NO: 3039 - protein, 163 aa, Oryza rufipogon
MEELEGHRGAGRLPPPPLLPFPKVSVQVYTVPSSSTAASAAAAGGARQAVAPATRDGGDGGGRAAGVLDDPVKARIVSHPRYHRLLAAFLDCHKVGCPAEAAEEIAAAARVREARQRAAAAASRMPPAPEDPELDQFMEDYCKLLVECKEELSRPLQEAEEFL

SEQ ID NO: 3040 - protein, 361 aa, Oryza sativa
MEEISHHFGVVGASGVHGGHQHQHHHHPWGSSLSAIVAPPPPPQLQQQQTQAGGMAHTPLTLNTAAAAVGNPVLQLANGSLLDACGKAKEASASASYAADVEAIKAKIISHPHYSSLLAAYLDCQKVGAPPEVAARLTAVAQDLELRQRTALGVLGAATEPELDQFMEAYHEMLVKYREELTRPLQEAMEFLRRVETQLNTLSISGRSLRNILSSGSSEEDQEGSGGETELPEIDAHGVDQELKHHLLKKYSGYLSSLKQELSKKKKKGKLPKDARQQLLNWWELHYKWPYPSESQKVALAESTGLDLKQINNWFINQRKRHWKPSDEMQFVMMDGYHPTNAAAFYMDGHFINDGGLYRLG

SEQ ID NO: 3041 - protein, 361 aa, Oryza sativa
MEEISHHFGVVGASGVHGGHQHQHHHHPWGSSLSAIVAPPPPPQLQQQQTQAGGMAHTPLTLNTAAAAVGNPVLQLANGSLLDACGKAKEASASASYAPDVEAIKAKIISHPHYSSLLAAYLDCQKVGAPPEVAARLTAVAQDLELRQRTALGVLGAATEPELDQFMEAYHEMLVKYREELTRPLQEAMEFLRRVETQLNTLSISGRSLRNILSSGSSEEDQEGSGGETELPEIDAHGVDQELKHHLLKKYSGYLSSLKQELSKKKKKGKLPKDARQQLLNWWELHYKWPYPSESQKVALAESTGLDLKQINNWFINQRKRHWKPSDEMQFVMMDGYHPTNAAAFYMDGHFINDGGLYRLG

SEQ ID NO: 3042 - protein, 361 aa, Oryza sativa; identical to SEQ ID NO: 3041

SEQ ID NO: 3043 - protein, 58 aa, Oryza officinalis
KGKLPKDARQQLLNWWELHYKWPYPSESQKVALAESTGLDLKQINNWFINQRKRHWKP

SEQ ID NO: 3044 - protein, 138 aa, Oryza glaberrima
SDDKALKRHLLRKYSGYLGGLRKELSKKRKKGKLPKEARQKLLTWWELHYRWPYPSEMEKIALAESTGLEQKQINNWFINQRKRHWKPTEEMQFAVMEAYHHQSTDAAAAFYVDVDARLVGATAAAPAAAVYTARPDH

SEQ ID NO: 3045 - protein, 138 aa, Oryza glaberrima
SDDKALKRHLLRKYTGYLGGLRKELSKKRKKGKLPKEARQKLLTWWELHYRWPYPSEMEKIALAESTGLEQKQINNWFINQRKRHWKPTEEMQFAVMEAYHHQSTDAAAAFYVDVDARLVGATAAAPAAAVYTARPDH

SEQ ID NO: 3046 - protein, 161 aa, Oryza glaberrima
MEELEGHRGAGRLPPPPPLLPFPKVSVQVYTVPSSSTAASAAAAGGARQAVAPATRDGGGRAAGVLDDPVKARIVSHPRYHRLLAAFLDCHKVGCPAEAAEEIAAAARVREARQRAAAAASRMPPAPEDPELDQFMEDYCKLLVECKEELSRPLQEAEEFL

SEQ ID NO: 3047 - protein, 57 aa, Pennisetum glaucum
KGKLPKDARLSLMNWWNTHYSWPYPTEEDKRRGRHDGLDQRQINNWFVNQRKRHWKP

SEQ ID NO: 3048 - protein, 363 aa, Triticum aestivum
MEEIGHHFGLGATAHGQHHSQLPWGSSPLSAVIAPPPQQQQQQQQSAGYLAHSPLSLNTAPPSGSHGGGSGCSNPVLQLANGSLLEACAKAAKEPSSSSYAADVEAIKAKIISHPHYSSLLAAYLDCQKVGAPPEVLARLTAVAQDLELRQRTALGSLGTATEPELDQFMEAYHEMLVKYREELTRPLQEAMEFLRRVETQLNSLSISGRSLRNILSSGSSEEDQEGSGGETELPEIDAHGVDQELKHHLLKKYSGYLSSLKQELSKKKKKGKLPKDARQQLLSWWEMHYKWPYPSESQKVALAESTGLDLKQINNWFINQRKRHWKPSDEMQFVMMDAYHPPNAAFYMDGHFVNDSGLYRFG

SEQ ID NO: 3049 - protein, 363 aa, Triticum aestivum; identical to SEQ ID NO: 3048

SEQ ID NO: 3050 - protein, 363 aa, Triticum aestivum; identical to SEQ ID NO: 3048

SEQ ID NO: 3051 - protein, 362 aa, Triticum aestivum
MEEIGHHFGLGATAHGQHHSQLPWGSSPLSAVIAPPPQQQQQQQSAGYLAHSPLSLNTAPPSGSHGGGTGCSNPVLQLANGSLLEACAKAAKEPSSSSYAADVEAIKAKIISHPHYSSLLAAYLDCQKVGAPPEVLARLTAVAQDLELRQRTALGSFGTATEPELDQFMEAYHEMLVKYREELTRPLQEAMEFLRRVETQLNSLSISGRSLRNILSSGSSEEDQEGSGGETELPEIDAHGVDQELKHHLLKKYSGYLSSLKQELSKKKKKGKLPKDARQQLLSWWEMHYKWPYPSESQKVALAESTGLDLKQINNWFINQRKRHWKPSDEMQFVMMDAYHPPNAAFYMDGHFVNDSGLYRFG

SEQ ID NO: 3052 - protein, 362 aa, Triticum aestivum; identical to SEQ ID NO: 3051

SEQ ID NO: 3053 - protein, 512 aa, Ceratopteris richardii
MDYDGHMRASMSSNICNVMNYAEGQVGSMVALMTTDHGTEGEQNRNHNPQHTSQHEQPQNQSSHSRNDRRQQLRSLNQTTMSSSLPTSSLTYYNAAMVEPYLQSALLQSTHTFNQSNNVETHPHIISALDQLETSVVVSAEEEKPHIGIRPKPVQSAQFPSSIDCNYVLSSSGQSVLVSPGANSTTHESQAAVASVSRDMENAHASADRSDVIRSKIMSHPTYPRLVMAYVNCHKIGAPPEVATSLEEISKKYQSFRSSSPAPTGADPELDNFMETYCNVLQKYHDELMQPYKEAMTFFRKIELQLNALSKGTVRLCHTGDDKADANCNSGQHGLISGGSSGEEDAEEGDVSCGEVDFHEEMIDPLADDQKVKEQLLRKYSGYIYKLKQEFLKKKKKGKLPKNAREKLLDWWNQHYKWPYPSEAEKAALAETTGLDQKQINNWFINQRKRHWKPSEDMQYVMVDSPTAHHHHHVLHGHAHLTPHPLAPYAVMETMDAAAAAAAAVTMLPSLQ

SEQ ID NO: 3054 - protein, 430 aa, Ceratopteris richardii
MATNAVSSTHSASSLSYYSTRIVEPYLQSELLQGTQGFHRPHTSHCQRQVTSSVESLELSAVAGERGKADTAIAIDRSQGFEILSPTCNYVVSSNGETVLANPSLDSTGHANHEEGPSLPSRSMADRDDLIRTKIVSHPSYPRLVMAYVNCYKIGAPEDAALILEEVSRKYQEIRSSSSEVIGADPELDNFMELYCNVLQRYHEELTHPYKEAMAFFKKIELQLDAISKGSLSLSQSGETKTEANSDSAWHGQTGAAPSIEDEPEEGDMSSGEVDFHDEMIDPLAEDQKLKEQLLRKYSGYIFKLKQEFLKKKKKGKLPREARQMLLDWWTQHYKWPYPSEAEKTALAESTGLDQKQINNWFINQRKRHWKPSEDMQYVMMDSPAGQTQHTFLRPHSHIASQHLSPYTVLQTMEVAAGAAPSATMMSSLH

SEQ ID NO: 3055 - protein, 240 aa, Ceratopteris richardii
MQETYCNVLQKYHDELMQPYKEAMTFFRKIELQLNALSKGTVRLCHTGDDKADANCNSGQHGLISGGSSGEEDAEEGDVSCGEVDFHEEMIDPLADDQKVKEQLLRKYSGYIYKLKQEFLKKKKKGKLPKNAREKLLDWWNQHYKWPYPSEAEKAALAETTGLDQKQINNWFINQRKRHWKPSEDMQYVMVDSPTAHHHHHVLHGHAHLTPHPLAPYAVMETMDAAAAAAAAVTMLPSLQ

SEQ ID NO: 3056 - protein, 458 aa, Drosophila melanogaster
MDSGAAAAAMYDPHAGHRPPGLQGLPSHHSPHMTHAAAAAATVGMHGYHSGAGGHGTPSHVSPVGNHLMGAIPEVHKRDKDAIYEHPLFPLLALIFEKCELATCTPREPGVQGGDVCSSESFNEDIAMFSKQIRSQKPYYTADPEVDSLMVQAIQVLRFHLLELEKVHELCDNFCHRYISCLKGKMPIDLVIDERDTTKPPELGSANGEGRSNADSTSHTDGASTPDVRPPSSSLSYGGAMNDDARSPGAGSTPGPLSQQPPALDTSDPDGRWCRREWSSPADARNADASRRLYSSVFLGSPDNFGTSASGDASNASIGSGEGTGEEDDDASGKKNQKKRGIFPKVATNILRAWLFQHLTHPYPSEDQKKQLAQDTGLTILQVNNWFINARRRIVQPMIDQSNRAVYTPHPGPSGYGHDAMGYMMDSQAHMMHRPPGDPGFHQGYPHYPPAEYYGQHL

SEQ ID NO: 3057 - protein, 457 aa, Drosophila melanogaster
MDSGAAAAAMYDPHAGHRPPGLQGLPSHHSPHMTHAAAAAATVGMHGYHSGAGGHGTPSHVSPVGNHLMGAIPEVHKRDKDAIYEHPLFPLLALIFEKCELATCTPREPGVQGGDVCSSESFNEDIAMFSKQIRSQKPYYTADPEVDSLMVQAIQVLRFHLLELEKVHELCDNFCHRYISCLKGKMPIDLVIDERDTTKPPELGSANGEGRSNADSTSHTDGASTPDVRPPSSSLSYGGAMNDDARSPGAGSTPGPLSQQPPALDTSDPGRWCRREWSSPADARNADASRRLYSSVFLGSPDNFGTSASGDASNASIGSGEGTGEEDDDASGKKNQKKRGIFPKVATNILRAWLFQHLTHPYPSEDQKKQLAQDTGLTILQVNNWFINARRRIVQPMIDQSNRAVYTPHPGPSGYGHDAMGYMMDSQAHMMHRPPGDPGFHQGYPHYPPAEYYGQHL

SEQ ID NO: 3058 - protein, 472 aa, Drosophila melanogaster
MAQPRYDDGLHGYGMDSGAAAAAMYDPHAGHRPPGLQGLPSHHSPHMTHAAAAAATVGMHGYHSGAGGHGTPSHVSPVGNHLMGAIPEVHKRDKDAIYEHPLFPLLALIFEKCELATCTPREPGVQGGDVCSSESFNEDIAMFSKQIRSQKPYYTADPEVDSLMVQAIQVLRFHLLELEKVHELCDNFCHRYISCLKGKMPIDLVIDERDTTKPPELGSANGEGRSNADSTSHTDGASTPDVRPPSSSLSYGGAMNDDARSPGAGSTPGPLSQQPPALDTSDPDGRWCRREWSSPADARNADASRRLYSSVFLGSPDNFGTSASGDASNASIGSGEGTGEEDDDASGKKNQKKRGIFPKVATNILRAWLFQHLTHPYPSEDQKKQLAQDTGLTILQVNNWFINARRRIVQPMIDQSNRAVYTPHPGPSGYGHDAMGYMMDSQAHMMHRPPGDPGFHQGYPHYPPAEYYGQHL

SEQ ID NO: 3059 - protein, 487 aa, Drosophila melanogaster
MAQPRYDDGLHGYGMDSGAAAAAMYDPHAGHRPPGLQGLPSHHSPHMTHAAAAAATVGMHGYHSGAGGHGTPSHVSPVGNHLMGAIPEVHKRDKDAIYEHPLFPLLALIFEKCELATCTPREPGVQGGDVCSSESFNEDIAMFSKQIRSQKPYYTADPEVDSLMVQAIQVLRFHLLELEKVHELCDNFCHRYISCLKGKMPIDLVIDERDTTKPPELGSANGEGRSNADSTSHTDGASTPDVRPPSSSLSYGGAMNDDARSPGAGSTPGPLSQQPPALDTSDPDGKFLSSLNPSELTYDGRWCRREWSSPADARNADASRRLYSSVFLGSPDNFGTSASGDASNASIGSGEGTGEEDDDASGKKNQKKRGIFPKVATNILRAWLFQHLTHPYPSEDQKKQLAQDTGLTILQVNNWFINARRRIVQPMIDQSNRAVYTPHPGPSGYGHDAMGYMMDSQAHMMHRPPGDPGFHQGYPHYPPAEYYGQHL

SEQ ID NO: 3060 - protein, 471 aa, Drosophila melanogaster
MAQPRYDDGLHGYGMDSGAAAAAMYDPHAGHRPPGLQGLPSHHSPHMTHAAAAAATVGMHGYHSGAGGHGTPSHVSPVGNHLMGAIPEVHKRDKDAIYEHPLFPLLALIFEKCELATCTPREPGVQGGDVCSSESFNEDIAMFSKQIRSQKPYYTADPEVDSLMVQAIQVLRFHLLELEKVHELCDNFCHRYISCLKGKMPIDLVIDERDTTKPPELGSANGEGRSNADSTSHTDGASTPDVRPPSSSLSYGGAMNDDARSPGAGSTPGPLSQQPPALDTSDPGRWCRREWSSPADARNADASRRLYSSVFLGSPDNFGTSASGDASNASIGSGEGTGEEDDDASGKKNQKKRGIFPKVATNILRAWLFQHLTHPYPSEDQKKQLAQDTGLTILQVNNWFINARRRIVQPMIDQSNRAVYTPHPGPSGYGHDAMGYMMDSQAHMMHRPPGDPGFHQGYPHYPPAEYYGQHL

SEQ ID NO: 3061 - protein, 380 aa, Danio rerio
MAQRYEDLVHYGMDAVGIPSPMYGDPHAARAMQAVHVSHGPPLHPYPHPATAPGVPPPVNDALKRDKDAIYGHPLFPLLALVFEKCELATCTPRESGVTGDVCSSESFDEDITVFSKQIRAEKPFFSCNPDLDNLMIQAIQVLRFHLLELEKVHELCDNFCHRYISCLKGKMPIDLVVDDKNGGSRSDGEEFTRTPGGSEQVFWREDDTASVHSTDTPAACVRRSSSHYGDTIIEHGDFLDQSVPSPSTGEEEDPDKERKNNKKRGIFPKVASTIMIPWVFQHLTHPYPSEEQKRQLSQDTGLTILQVNNWFINARRRIVQPMIDQSNRAVGHSGPYTPDAQPMGGFVMDGQSHMGIRPPAALGGLGGVNMGLESQWHYM

SEQ ID NO: 3062 - protein, 388 aa, Danio rerio
MAQRYEDIPHYGMDGVGIPSTMYGDPHAARSMQAVHLNHGPQLHSHQYPHTAHTNAMPPSMGSSVNDALKRDKDSIYGHPLFPLLALIFEKCELATCTPREPGVAGGDVCSSESFNEDIAVFAKQIRAEKPLFSSNPELDNLMIQAIQVLRFHLLELEKVHELCDNFCHRYISCLKGKMPIDLVIDDREGGSKSDSEEITRSSGPLDQTSWNRDHDDTASTRSGGTPGPSSGGHTSHSGDNSSEQGDGLDNSVASPSTGDDDDPDKEKKRNKKRGIFPKVATNIMRAWLFQHLTHPYPSEEQKKQLAQDTGLTILQVNNWFINARRRIVQPMIDQSNRAVSQGAPYNPDGQPMGGFVMDGQQHMGIRPPGPMSGMGMNMGMEGQWHYM

SEQ ID NO: 3063 - protein, 451 aa, Xenopus laevis
MAQRYDEMVHYPGLDGMSLAGFADAHTGRALQHHSLSQSTPYGSTGAAHRVPMPPGMGSNDGLKREKDEIYGHPLFPLLALVFEKCELATCSPRDNSGSFPGGDVCSSDSFNEDIAVFAKQVRTEKPLFSSNPELDNLMIQAIQVLRFHLLELEKVHDLCDNFCHRYITCLKGKMPIDLVIDDRDGSSKSDLEDFTGSCTSLSDQNNTWIRDHDETGSTHSGTPGPSSGGLASQSGDNSSEQGDCMDNSVASPSTGDDDDLDRDKKRNKKRGIFPKVATNIMRAWLFQHLSHPYPSEEQKKQLAQDTGLTILQVNNWFINARRRIVQPMIDQSNRTGQGGAPYSPGGQNMGGYVMDGQQHMGIRPPGFQGIPGDYTAAPSTMPMGFPPAGYTPAIPPHSAGLRHGPSLHSYLPGHPHSMILPAGASPHHLVSAQSPADALLNGQNIDIHAH

SEQ ID NO: 3064 - protein, 137 aa, Xenopus laevis
EVASPSTGDDDDPDKDKKRHKKRGIFPKVATNIMRAWLFQHLTHPYPSEEQKKQLAQDTGLTILQVNNWFINARRRIVQPMIDQSNRAVSQGTPYNADGQPMGGFVMDGQQHMGIRAPGPMSGMGMNMGMEGQWHYM

SEQ ID NO: 3065 - protein, 390 aa, Xenopus laevis
MAQRYDDLPHYGGMDGVGLPSSMYGDPHAARSMKSVHHLNHGPPLHPHQYPHSAHTNAMPPSMGSSVNDALKRDKDSIYGHPLFPLLALIFEKCELATCTPREPGVAGGDVCSSESFNEDIAVFSKQIRAEKPLFSSNPELDNLMIQAIQVLRFHLLELEKVHELCDNFCHRYISCLEGKMPIDLVIDDRDGGSKSDSEDLTRSAPLTDQPSWSRDHDDAASIRSGGTPGPSSGGHTSHSGDNSSEQGDGLDNSIASPSTGDDDDPDKEKKRNKGRGIFPKVATNIMRAWLFQHLTHPYPSEEQKKQLAQDTGLTILQVNNWFINARRRIVQPMIDQSNRAVSQGTPYNPDGQPIGGFVMDGQQHMGIRAPGPMSGMGMNMGMEGQWHYM

SEQ ID NO: 3066 - protein, 390 aa, Gallus gallus
YDELPHYGGMDGVGVPASMYGDPHAPRPIPPVHHLNHGPPLHAGQHYGAHAPHPNVMPASMGSAVNDALKRDKDAIYGHPLFPLLALVFEKCELATCTPREPGVAGGDVCSSDSFNEDIAVFAKQVRAEKPLFSSNPELDNLMIQAIQVLRFHLLELEKVHELCDNFCHRYISCLKGKMPIDLVIDERDGSSKSDHEELSGSSTNLADHNPSSWRDHDDATSTHSAGTPGPSSGGHASQSGDNSSEQGDGLDNSVASPGTGDDDDPDKDKKRQKKRGIFPKVATNIMRAWLFQHLTHPYPSEEQKKQLAQDTGLTILQVNNWFINARRRIVQPMIDQSNRAVSQGAAYSPEGQPMGSFVLDGQQHMGIRPAGPMSGMGMNMGMDGQWHYM

SEQ ID NO: 3067 - protein, 267 aa, Homo sapiens
GTPPGGDVCSSDSFNEDIAAFAKQVRSERPLFSSNPELDNLMIQAIQVLRFHLLELEKGKMPIDLVIEDRDGGCREDFEDYPASCPSLPDQNNMWIRDHEDSGSVHLGTPGPSSGGLASQSGDNSSDQGNGLDTSVASPSSGGEDEDLDQERRRNKKRGIFPKVATNIMRAWLVQHLSHPYPSEEQKKQLAQDTGLTILQVNNWFINARRRIVQPMIDQSNRTGQGAAFSPEGQPIGGYTETQPHVAVRPPGSVGMSLNLEGEWHYL

SEQ ID NO: 3068 - protein, 385 aa, Rhodopseudomonas palustris
MLIQALVVDDSRSALDYLKRTIEADGQVHVIAFTDPLEALSSARNIDIDIVFADYEMPKMDGISLIRRLRSLPKFSDIPIVMITSIESDEVRLQALDAGATDFLPKRPKSLETQVRLRNMIRLGSAVRKLNDRAALLASEVARATHALQEREEEIILRLALSVEYRDNDTGDHTLRVAKYSRMIAEGLGLPERLCRDIYLAAPLHDVGKVATPDHILLKPGKLTPDEIAVMQTHTTIGASILAGSRCELIQLAADIAIGHHERWDGKGYPNKLKGAEIPIAARIVAVADVFDALATARPYKVAMPLPVARQHLENGRGQHFDPTCVDVFLARWDEVVAIATERLKLQQTHDAPLQPSLPPDAREPTITLPASNRKAGQMGLVPSE

SEQ ID NO: 3069 - protein, 149 aa, Deinococcus radiodurans
MMPQSLSILLVDDNPADLMLAREVFESHEDWVNVASCSSGNEAISHLKDPNYALPDVVITDLNMPSMTGLDVIRAIKSDPELRHIPVVVLSTSDAPDQIEQAYNLHATSYMVKATGFSEFVDQIEAFLNFWRCSKLARRERQSLDTATL

SEQ ID NO: 3070 - protein, 249 aa, Agrobacterium tumefaciens str. C58 (U. Washington)
MFTQMVSMRLNEMLGVSVEVCRSFEELQACYEHSPEPVTLAISNINLPGAEKGEALEYLIDLSIPTIVFTSTFHEATRETLIAKDVVDYILKDNIFAVDMLTESVCRFLTNHRHHVLIVDDSPTARALLSSRLKRYNFRVSLADSGAKALEILRANPDIGLVVTDYNMPDIDGFELTRRIRTVRGSHELRIIGVSSSTNRLLSARFLKAGGNDFMLRPFIDEEFYCRVNQNLDTLVQIQLAKAGIRPAA

SEQ ID NO: 3071 - protein, 264 aa, Dianthus caryophyllus
MLNFGATARNGVVSTRRWKSDTCIDLGPSDVRSEAHVLAVDDSLIDRKVIERLLKTTSCKVTVVDSGMRALEFLGLDAEQRTSVVDGLKIDLIITDYCMPGMTGYELLKKIKESSTFKETPVVIMSSENVIARIDRCLEEGAEDFILKPVKLSDVKRLRDYMTNKYDKSNSRVISGTNKRKQMDGSDQSYDSSSSSSSSSSLSLSPISTQSQPLISPSSSTPSSPCGPLDSNSMPSSPSGPSDTPSRRRRMAVDVDDDQTAVMP

SEQ ID NO: 3072 - protein, 231 aa, Arabidopsis thaliana
MAKDGGVSCLRRSEMIGIGIGELESPPLDSDQVHVLAVDDSLVDRIVIERLLRITSCKVTAVDSGWRALEFLGLDDDKAAVEFDRLKVDLIITDYCMPGMTGYELLKKIKESTSFKEVPVVIMSSENVMTRIDRCLEEGAEDFLLKPVKLADVKRLRSYLTRDVKVAAEGNKRKLTTPPPPPPLSATSSMESSDSTVESPLSMVDDEDSLTMSPESATSLVDSPMRSPGLA

SEQ ID NO: 3073 - protein, 259 aa, Arabidopsis thaliana
MARDGGVSCLRRSEMMSVGGIGGIESAPLDLDEVHVLAVDDSLVDRIVIERLLRITSCKVTAVDSGWRALEFLGLDNEKASAEFDRLKVDLIITDYCMPGMTGYELLKKIKESSNFREVPVVIMSSENVLTRIDRCLEEGAQDFLLKPVKLADVKRLRSHLTKDVKLSNGNKRKLPEDSSSVNSSLPPPSPPLTISPESSPPLTVSTESSDSSPPLSPVEIFSTSPLSSPIDDEDDDVLTSSSEESPIRRQKMRSPGLD

SEQ ID NO: 3074 - protein, 238 aa, Glycine max
  unsure (1)..(238): unsure at all Xaa locations
MGMAAESQFHVLAVDDSLIDRKLIERLLRTSSYEVTTVDSGSKALEFLGLCENDESNPSTPYVCPNNHQEVEVNLVITDYCMPGMTGYDLLKKIKESSSLRNIPVVIMSSENVPSRINRCLEEGAEEFFLKPVRLSDLNKLKPHMKKTKLKDQKQGTVETTATTTNHHPKXAAPSXPKSRDLLQPESESESHPQPTIEQQQQILQQANNNNKRKTMEQGLSPETDRTRPRYSGIATVV

SEQ ID NO: 3075 - protein, 232 aa, Oryza sativa (japonica cultivar-group)
MTVVDAESRFHVLAVDDSLIDRKLIEMLLKNSSYQVTTVDSGSKALELLGLRDEGDDSSSSPSSSSPDHQEIDVNLIITDYCMPGMTGYDLLKRVKGSSSLKDIPVVIMSSENVPARINRCLEDGAEEFFLKPVKLADMKKLKSHLLKRKQQLPMAAAAPDKPPHKPDEAAASAAAIAEAATAQTDGIISDCSCSGSSKRKAAAMEQEVISSPDQRTKPRLSSTSSGLAVET

SEQ ID NO: 3076 - protein, 151 aa, Oryza sativa
  unsure (1)..(151): unsure at all Xaa locations
XARGDLLKAIKALGSPNPIPVVVMSSENEPQRISRCLTAGAEDFILKPLKMNDVQRLRKCSGATRPKSAVAGDDDRCCNTAKKAAAAAAATPEQQQQQQRSLLQVMNASSFEVSHYFQLIFKLILLAYAVLCLSQLLHRWSNGSILSLWCA

SEQ ID NO: 3077 - protein, 303 aa, Magnetospirillum magnetotacticum
MTFNTLKFPPAMAAVLTRTRDYLQEEIGLKVSRAKPRTGNVDSLQLRDITAVVCTDGPIKLMIVFSFQRVLLEHIREVVTARLKVLPEERELFLRETAGETVNFILGHATADLAETGNVMHLSPPSILDEERNILRPKKAIFTTIEMATSHGILDINFIGPSELFDQKLNVIEEEETQGGEMHPLKVLIVDDSLLTVRTLTGMLTELGHLVVQTAGSGALALEAYRRSKPDLVTMDITMPDMDGIEATSGILKEFPEANIIMVTSHGQQGMVMNAVKAGAKGYVLKPIKLEKLRDMIARVFKT

SEQ ID NO: 3078 - protein, 155 aa, Desulfovibrio desulfuricans G20
MLGRTNRQRRQEYLMNVLLVDDEVAFVEALARRLTRKNMTVHTVHNGPEALDFLRKNPSVDAVVLDVVMPGPDGLKVQEIIRKEFPLVEVIMLSGNSTTAMAVQGMKQGAFDYLSKPCSTEELIEKLHEAKRRRDTYCEELAALKAGDIVLRRGD

SEQ ID NO: 3079 - protein, 256 aa, Oceanobacillus iheyensis HTE831
MKKCRIKEMLETSKVDECNMNILIVEDDKTIATGLEYSLKQEGYDVVVCHKVQEAQRKINNDLDDISLCLFDLSLPDGSGYELCEMVKRKADIPVIFLTVVDDEVNVVMGLDMGADDYITKPFRIRELISRIKTVLRRYEKSKPNKEQLSSVISIGSINIHTLEGKVYKETEEILLTALEYRLLMIFVNHRGQVLSRKQLLQLIWDIAGDFVNDNTLTVYIKRLRKKIEEDAQHPTVIETVRGMGYRMVDTHDKKQ

SEQ ID NO: 3080 - protein, 131 aa, Burkholderia pseudomallei
MDKSMKILVVDDFPTMRRIVRNLLKELGYSNVDEAEDGLAGLARLRGGGYDFVISDWNMPNLDGLAMLKEIRADASLTHLPVLMVTAESKKENIIAAAQAGASGYVVKPFTAATLDEKLNKILEKMAKAGS

SEQ ID NO: 3081 - protein, 664 aa, Arabidopsis thaliana
MVNPGHGRGPDSGTAAGGSNSDPFPANLRVLVVDDDPTCLMILERMLMTCLYRVTKCNRAESALSLLRKNKNGFDIVISDVHMPDMDGFKLLEHVGLEMDLPVIMMSADDSKSVVLKGVTHGAVDYLIKPVRIEALKNIWQHVVRKKRNEWNVSEHSGGSIEDTGGDRDRQQQHREDADNNSSSVNEGNGRSSRKRKEEEVDDQGDDKEDSSSLKKPRVVWSVELHQQFVAAVNQLGVDKAVPKKILEMMNVPGLTRENVASHLQKYRIYLRRLGGVSQHQGNMNHSFMTGQDQSFGPLSSLNGFDLQSLAVTGQLPPQSLAQLQAAGLGRPTLAKPGMSVSPLVDQRSIFNFENPKIRFGDGHGQTMNNGNLLHGVPTGSHMRLRPGQNVQSSGMMLPVADQLPRGGPSMLPSLGQQPILSSSVSRRSDLTGALAVRNSIPETNSRVLPTTHSVFNNFPADLPRSSFPLASAPGISVPVSVSYQEEVNSSDAKGGSSAATAGFGNPSYDIFNDFPQHQQHNKNISNKLNDWDLRNMGLVFSSNQDAATATATAAFSTSEAYSSSSTQRKRRETDATVVGEHGQNLQSPSRNLYHLNHVFMDGGSVRVKSERVAETVTCPPANTLFHEQYNQEDLMSAFLKQEGIPSVDNEFEFDGYSIDNIQV

SEQ ID NO: 3082 - protein, 669 aa, Arabidopsis thaliana
MMNPSHGRGLGSAGGSSSGRNQGGGGETVVEMFPSGLRVLVVDDDPTCLMILERMLRTCLYEVTKCNRAEMALSLLRKNKHGFDIVISDVHMPDMDGFKLLEHVGLEMDLPVIMMSADDSKSVVLKGVTHGAVDYLIKPVRMEALKNIWQHVVRKRRSEWSVPEHSGSIEETGERQQQQHRGGGGGAAVSGGEDAVDDNSSSVNEGNNWRSSSRKRKDEEGEEQGDDKDEDASNLKKPRVVWSVELHQQFVAAVNQLGVEKAVPKKILELMNVPGLTRENVASHLQKYRIYLRRLGGVSQHQGNLNNSFMTGQDASFGPLSTLNGFDLQALAVTGQLPAQSLAQLQAAGLGRPAMVSKSGLPVSSIVDERSIFSFDNTKTRFGEGLGHHGQQPQQQPQMNLLHGVPTGLQQQLPMGNRMSIQQQIAAVRAGNSVQNNGMLMPLAGQQSLPRGPPPMLTSSQSSIRQPMLSNRISERSGFSGRNNIPESSRVLPTSYTNLTTQHSSSSMPYNNFQPELPVNSFPLASAPGISVPVRKATSYQEEVNSSEAGFITPSYDMFTTRQNDWDLRNIGIAFDSHQDSESAAFSASEAYSSSSMSRHNTTVAATEHGRNHQQPPSGMVQHHQVYADGNGGSVRVKSERVATDTATMAFHEQYSNQEDLMSALLKQV

SEQ ID NO: 3083 - protein, 690 aa, Arabidopsis thaliana
MMNPSHGRGLGSAGGSSSGRNQGGGGETVVEMFPSGLRVLVVDDDPTCLMILERMLRTCLYEVTKCNRAEMALSLLRKNKHGFDIVISDVHMPDMDGFKLLEHVGLEMDLPVIMMSADDSKSVVLKGVTHGAVDYLIKPVRMEALKNIWQHVVRKRRSEWSVPEHSGSIEETGERQQQQHRGGGGGAAVSGGEDAVDDNSSSVNEGNNWRSSSRKRKDEEGEEQGDDKDEDASNLKKPRVVWSVELHQQFVAAVNQLGVEKAVPKKILELMNVPGLTRENVASHLQKYRIYLRRLGGVSQHQGNLNNSFMTGQDASFGPLSTLNGFDLQALAVTGQLPAQSLAQLQAAGLGRPAMVSKSGLPVSSIVDERSIFSFDNTKTRFGEGLGHHGQQPQQQPQMNLLHGVPTGLQQQLPMGNRMSIQQQIAAVRAGNSVQNNGMLMPLAGQQSLPRGPPPMLTSSQSSIRQPMLSNRISERSGFSGRNNIPESSRVLPTSYTNLTTQHSSSSMPYNNFQPELPVNSFPLASATGISVPVRKATSYQEEVNSSEAGFTTPSYDMFTTRQNDWDLRNIGIAFDSHQDSESAAFSASEAYSSSSMSRHNTTVAATEHGRNHQQPPSGMVQHHQVYADGNGGSVRVKSERVATDTATMAFHEQYSNQEDLMSALLKQEGIAPVDGEFDFDAYSIDNIPV

SEQ ID NO: 3084 - protein, 382 aa, Arabidopsis thaliana
MPINDQFPSGLRILVVDDDTSCLFILEKMLLRLMYQVTICSQADVALTILRERKDSFDLVLSDVHMPGMNGYNLLQQVGLLEMDLPVIMMSVDGRTTTVMTGINHGACDYLIKPIRPEELKNIWQHVVRRKCVMKKELRSSQALEDNKNSGSLETVVVSVSECSEESLMKCRNKKKKKKRSVDRDDNEDDLLLDPGNSKKSRVVWSIELHQQFVNAVNKLGIDKAVPKRILELMNVPGLSRENVASHLQKFRLYLKRLSGEASQSNDSESTKRYENIQALVSSGQLHPQTLAALFGQPIDNHHSASFGVWIPNDNLGRSQNEHFSVDVSSASNRPVSVAVHGLSSSANFRQRGDVNNNRIRQGYGSNVNEESWILERSSRQR

SEQ ID NO: 3085 - protein, 382 aa, Arabidopsis thaliana
MPINDQFPSGLRILVVDDDTSCLFILEKMLLRLMYQVTICSQADVALTILRERKDSFDLVLSDVHMPGMNGYNLLQQVGLLEMDLPVIMMSVDGRTTTVMTGINHGACDYLIKPIRPEELKNIWQHVVRRKCVMKKELRSSQALEDNKNSGSLETVVVSVSECSEESLMKCRNKKKKKKRSVDRDDNEDDLLLDPGNSKKSRVVWSIELHQQFVNAVNKLGIDKAVPKRILELMNVPGLSRENVASHLQKFRLYLKRLSGEASQSNDSESTKRYENIQALVSSGQLHPQTLAALFGQPIDNHHSASFGVWIPNDNLGRSQNEHFSVDVSSASNRPVSVAVHGLSSSANFRQRGNVNNNRIRQGYGSNVNEESWILERSSRQR

SEQ ID NO: 3086 - protein, 620 aa, Arabidopsis thaliana
MALSLLRKNKHGFDIVISDVHMPDMDGFKLLEHVGLEMDLPVIMMSADDSKSVVLKGVTHGAVDYLIKPVRMEALKNIWQHVVRKRRSEWSVPEHSGSIEETGERQQQQHRGGGGGAAVSGGEDAVDDNSSSVNEGNNWRSSSRKRKDEEGEEQGDDKDEDASNLKKPRVVWSVELHQQFVAAVNQLGVEKAVPKKILELMNVPGLTRENVASHLQKYRIYLRRLGGVSQHQGNLNNSFMTGQDASFGPLSTLNGFDLQALAVTGQLPAQSLAQLQAAGLGRPAMVSKSGLPVSSIVDERSIFSFDNTKTRFGEGLGHHGQQPQQQPQMNLLHGVPTGLQQQLPMGNRMSIQQQIAAVRAGNSVQNNGMLMPLAGQQSLPRGPPPMLTSSQSSIRQPMLSNRISERSGFSGRNNIPESSRVLPTSYTNLTTQHSSSSMPYNNFQPELPVNSFPLASAPGISVPVRKATSYQEEVNSSEAGFTTPSYDMFTTRQNDWDLRNIGIAFDSHQDSESAAFSASEAYSSSSMSRHNTTVAATEHGRNHQQPPSGMVQHHQVYADGNGGSVRVKSERVATDTATMAFHEQYSNQEDLMSALLKQEGIAPVDGEFDFDAYSIDNIPV

SEQ ID NO: 3087 - protein, 660 aa, Glycine max
  unsure (1)..(660): unsure at all Xaa locations
KIKNSDPKSVFSFFLLRFLRCFWSWSNCELSSRRSSSIVSPQIRFELCKRHCRVGFVVSVFVAVLLFLGSDLRSMNLSNGKGSMSTLTASVVMXXSGDAVSDQFPAGLRVLVVDDDPTCLMILEKMLRTCLYEVTKCNRAETALSLLRENKNGFDIVISDVHMPDMDGFKLLEHIGLEMDLPVIMMSADDGKSVVMKGVTHGACDYLIKPVRIEALKNIWQHVVRKRKNEWKDAEQSGSAEEGDRQPKASDEADYSSSANEGSWRNSKKRRDEEEEAEDRDDXXSTLKKPRVVWSVELHQQFVAAVDQLGIDKAVPKKILELMNVPGLTRENVASHLQKYRLYLRRLSGVSQHQNNMNNSFLSPQEATFGTISSINGIDLQTLAVAGQLPAQSLATLQAAGLGRPTGKAGVPXXPLMDQRNLFSFENPRLRFGEGQQQHLSTSKXXMNLLHGIPTNMEPKQLANLHQSTQSIGSLNMRVNASATQGSPLLMQMAQSQPRGQSPRVPRLPSSLGQPTVSNGISNGLLGRNGIAGNNRGXXAYNPVPPSSSLLSFPMNQTSEMSVNNSFPLGSTPGISSITTKGSFQEEVTSGIKGSGGFPSYDIFNELHHQKPHDWEITNPNLTYNASQHANXFTGNIDVTPSVLVHKGFLLHTDWXSRDA

SEQ ID NO: 3088 - protein, 741 aa, Glycine max
  unsure (1)..(741): unsure at all Xaa locations
LELRFLSCVGLGGVTNSAAEEEAPQLFNLKFDSNYVNATFVSGLLSLLCCLALLLFLSSDLPSMNLSNGKGSMSTLTASVVMXXSGDAVSDQFPAGLRVLVVDDDPTCLMILEKMLRTCLYEVTKCNRAETALSLLRENKNGFDIVISDVHMPDMDGFKLLEHIGLEMDLPVIMMSADDGKXSVVMKGRVHGACDYLIKPVRIEALKNIWQHVVRKRKNEWKDAEQSGSAEEGDRHPKASDESXDYSSSANEGSWRNSKKRRDEEEEAEDRDDXXSTLKKPRVVWSWELHQHFVAAVDQLGIDKAVPKKILELMNVPGLTRENVASHLQKYRLYLRRLSGVSQHQNNLNNSFLGPQEATFGTISSINGIDLQTLAVAGQLPAQSLATLQAAGLGRSTAKAGVPIXXLMDQRNLFSFENPRLRFGEGQPQHLSTSKXXMNLLHGIPTNMEPKQLANLHQSTQSIGGLNMRVNASATQGNPILMQMAQSQPRGPGPRVPRLPSSLGQPTVSNGISNGLLGRNGIAGNNRGXXAYNPVPPSSSLLSFPMNQTSEMSVNNSFPIGTTPGISSITTKGSFQEEVTSGIKGSSGFPSYDIFNELHHQKSHDLEITNPGLTYNASHHVNPLQGNIDVAPSVLVHQGFSSTQQTGQSRDGALIGKAMFSMGEGLEQNNLQNANFNPLLVDNSIRIKAERIPDASSQTNLFPEHYGQEDLMTALLKQQEGMGPAENEFEFDGYSLDNIPV

SEQ ID NO: 3089 - protein, 329 aa, Glycine max
  unsure (1)..(329): unsure at all Xaa locations
NSRVRPTRPHTLHIVLRFSDSEFSPKRRRFMAPCAAAAEFPVGLRVLVVDDDATTLKIIEQMSIRCRYRVTTCTEATVALNLLRERKGCFDVVLSDVHMPDMDGYKLLEHVGLEMDLPVIMMSGDSTTSAVMKGIRHGACDYLIKPVREEELRNIWQHVVRKFWNDSKEQDNSGSMEDSDQNKRGNDDAEYTSSVADAAEVXXKAPKKRSSLKEEDIELESDDPAASKKPRVVWSVELHQQFVSAVNQLGLDKAVPKRILELMNVPGLTRENVASHLQKFRLYLKRLTGVAQHQNGMLYTXXLGLLESNLGTNGRFDXHALAAAAHVPX

SEQ ID NO: 3090 - protein, 691 aa, Oryza sativa (japonica cultivar-group)
MAPVEDGGGVEFPVGMKVLVVDDDPTCLAVLKRMLLECRYDATTCSQATRALTMLRENRRGFDVIISDVHMPDMDGFRLLELVGLEMDLPVIMMSADSRTDIVMKGIKHGACDYLIKPVRMEELKNIWQHVIRKKFNENKEHEHSGSLDDTDRTRPTNNDNEYASSANDGAEGSWKSQKKKRDKDDDDGELESGDPSSTSKKPRVVWSVELHQQFVNAVNHLGIDKAVPKKILELMNVPGLTRENVASHLQKFRLYLKRIAQHHAGIANPFCPPASSGKVGSLGGLDFQALAASGQIPPQALAALQDELLGRPTNSLVLPGRDQSSLRLAAVKGNKPHGEREIAFGQPIYKCQNNAYGAFPQSSPAVGGMPSFSAWPNNKLGMADSTGTLGGMSNSQNSNIVLHELQQQPDAMLSGTLHSLDVKPSGIVMPSQSLNTFSASEGLSPNQNTLMIPAQSSGFLAAMPPSMKHEPVLATSQPSSSLLGGIDLVNQASTSQPLISAHGGGNLSGLVNRNPNVVPSQGISTFHTPNNPYLVSPNSMGMGSKQPPGVLKTENSDALNHSYGYLGGSNPPMDSGLLSSQSKNTQFGLLGQDDITGSWSPLPNVDSYGNTVGLSHPGSSSSSFQSSNVALGKLPDQGRGKNHGFVGKGTCIPSRFAVDEIESPTNNLSHSIGSSGDIMSPDIFGFSGQM

SEQ ID NO: 3091 - protein, 793 aa, Dictyostelium discoideum
MNNKQEEIDQFLSSTSTSPSPSSSSSPSNNDSTSLKSMISGIENLNVHSKGNDNKNNNNNNNNNNSNNNEKQKDIVSLENNSSSNNTTTTTTTTTTSNHNSNNNSNNNNNNINNNNINNNNYEPLVNGHNNGFGDKLNDQPSPSSHRVSDFSDEYSPSKVRILVADDDDVQRKILNNLLKKFHYNVTLVPNGEIAWEYINKGQQKYDLVLTDVMMPHITGFDLLQRINDHPVHRHIPVILMSGTAVDYKYANDTIKIGGQDFLTKPIAKELLKKKIDTVLQSIWQRRKEEEYKATLAQEREKGNKLAKEMELKEHEIEELTKKVSKMSSISKEAMESPLVSVTRNIEELLKQSSWSHYESEIKEKLSSILKELGSSNIYRPSFEKLIKNDSVDPVTKSFLVSEFSSTTSRRNSIPTFPQTTYNRDTKEVIKGWEFDVFKYSEDDLMPLLVDMFENFQLPEIFKIPIEKLQRFIMTVNALYRKNNRYHNFTHAFDVTQTVYTFLTSFNAAQYLTHLDIFALLISCMCHDLNHPGFNNTFQVNAQTELSLEYNDISVLENHHAMLTFKILRNSECNILEGLNEDQYKELRRSVVQLILATDMQNHFEHTNKFQHHLNNLPFDRNKKEDRQMILNFLIKCGDISNIARPWHLNFEWSLRVSDEFFQQSHYETICGYPVTPFMDKTKTTRARIAADFIDFVASPLFQSMAKFLKESQFLLKVISKNRENWQAYMELQKEGKCNDDDLQFMEDPTILVKSKLPKIDEEENRDKVSSSSSSSTAPLTSTSSSNNETSSS

SEQ ID NO: 3092 - protein, 689 aa, Oryza sativa
MAPVEDGGGVEFPVGMKVLVVDDDPTCLAVLKRMLLECRYDATTCSQATRALTMLRENRRGFDVIISDVHMPDMDGFRLLELVGLEMDLPVIMMSADSRTDIVMKGIKHGACDYLIKPVRMEELKNIWQHVIRKKFNENKEHEHSGSLDDTDRTRPTNNDNEYASSANDGAEGSWKSQKKKRDKDDDDGELESGDPSSTSKKPRVVWSVELHQQFVNAVNHLGIDKAVPKKILELMNVPGLTRENVASHLQKFRLYLKRIAQHHAGIANPFCPPASSGKVGSLGGLDFQALAASGQIPPQALAALQDELLGRPTNSLVLPGRDQSSLRLAAVKGNKPHGEREIAFGQPIYKCQNNAYGAFPQSSPAVGGMPSFSAWPNNKLGMADSTGTLGGMSNSQNSNIVLHELQQQPDAMLSGTLHSLDGPPSRSRPPVRSLNTFSASEGLSPNQNTLMIPAQSSGFLAAMPPSMKHEPVLATSQPSSSLLGGIDLVNQASTSQPLISAHGGGNLSGLVNRNPNVVPSQGISTFHTPNNPYLVSPNSMGISKQPPGVLKTENSDALNHSYGYLGGSTPMDSGLLSSQSKNTQFGLLGQDDITGSWSPLPNVDSYGNTVGLSHPGSSSSSFQSSNVALGKLPDQGRGKNHGFVGKGTCIPSRFAVDEIESPTNNLSHSIGSSGDIMSPDIFGFSGQM

SEQ ID NO: 3093 - protein, 620 aa, Oryza sativa
MAPVEDGRGVEFPVGMKVLVVDDDPTCLAVLKRMLLECRYDATTCSQATRALTMLRENRRGFDVIISDVHMPDMDGFRLLELVGLEMDLPVIMMSADSRTDIVMKGIKHGACDYLIKPVRMEELKNIWQHVIRKKFNENKEHEHSGSLDDTDRTRPTNNDNEYASSANDGAEGSWKSQKKKRDKDDDDGELESGDPSSTSKKPRVVWSVELHQQFVNAVNHLGIDSQIPPQALAALQDELLGRPTNSLVLPGRDQSSLRLAAVKGNKPHGEREIAFGQPIYKCQNNAYGAFPQSSPAVGGMPSFSAWPNNKLGMADSTGTLGGMSNSQNSNIVLHELQQQPDAMLSGTLHSLDVKPSGIVMPSQSLNTFSASEGLSPNQNTLMIPAQSSGFLAAMPPSMKHEPVLATSQPSSSLLGGIDLVNQASTSQPLISAHGGGNLSGLVNRNPNVVPSQGISTFHTPNNPYLVSPNSMGISKQPPGVLKTENSDALNHSYGYLGGSTPMDSGLLSSQSKNTQFGLLGQDDITGSWSPLPNVDSYGNTVGLSHPGSSSSSFQSSNVALGKLPDQGRGKNHGFVGKGTCIPSRFAVDEIESPTNNLSHSIGSSGDIMSPDIFGFSGQM

SEQ ID NO: 3094 - protein, 412 aa, Triticum aestivum
  unsure (1)..(412): unsure at all Xaa locations
XGWKQEHEHSGSLDDTDRNRLTNNDNEYASSANDGAEDSWKSQKKKRDKEEDDSELESGDPSNNSKKPRVVWSVELHQQFVNAVNHLGIDKAVPKKILELMNVPXLTRENVASHLQKFRLYLKRIAQHHAGMTNPYGVPASSAQVASLGGLDFQALAASGQIPPQALAALQDELLGRPTNSLVLPGRDQSSLRLAAVKGNKPHGEQIAFGQPIYKVQNNSYAALPQNSPAAGRMPSFSAWPNNKLGMSDSMSALGNVNNSQNSNMVLHELQQQPDTMLSGTLHTLDVKPSGIVMPSQSLNTFPASEGLSPNQNSLIIPSQSSGFLTGIPPSMKPELVLPTSQSSNSLLGGXIDLINQASTSQPFISSHGGNLPGLMNRNSNVMPSQGISSFQTGNTPYLVNQNSMGMGSKPP

SEQ ID NO: 3095 - protein, 139 aa, Desulfovibrio desulfuricans G20
MPTILIVEDDPITRGILRDIVTSYGHKVLDVADGRTAWERLQNDPDIDLMITDVRMPGLDGMELVGMLRSNDRLQGLPVIITSGVVGLRQIARLLRRGASSFIAKPIDPKELQHCIQNTLAAGTGVPHSSRPDDVSARS

SEQ ID NO: 3096 - protein, 140 aa, Helicobacter pylori
  unsure (1)..(140): unsure at all Xaa locations
EEPNLXAILIRRSALKLKLLVVDDSSTMRRIIKNTLSRLGYEDVLEAEHGVEAWEKLDANADTKVLITDWNMPEMNGLDLVKKVRSDSRFKEIPIIMITTEGGKAEVITALKAGVNNYIVKPFTPQVLKEKLEVVLGAND

SEQ ID NO: 3097 - protein, 124 aa, Helicobacter pylori
MKLLVVDDSSTMRRIIKNTLSRLGYEDVLEAEHGVEAWEKLDANADTKVLITDWNMPEMNGLDLVKKVRSDSRFKEIPIIMITTEGGKAEVITALKAGVNNYIVKPFTPQVLKEKLEVVLGAND

SEQ ID NO: 3098 - protein, 368 aa, Thermotoga maritima
MTVLIVEDDDITREAMGQYLKLSGFNVIEAENGEKAVELSENVDVALVDVMLPGMSGIEVVNKIKAKNPSCVVFVVTAYDDTEIVKKCVEAGADDFIKKPVNLELLRLKITHALRNRVFHMYRNSYLKSLKKKLFLLEKTAEEFFTEYEDFLFEVLEILNMLSEYRDMETHRHTERVGWLSGRIAEEMGMSEVFVTEIQFAAPLHDIGKIGIPDRILLKPGILTPEEFEIMKQHTTIGFRILSRSNSPILQLGAEIALTHHERWDGSGYPRGLKEREIPISGLIVAVADSFDAMVSRRPYKNPKPLEEAFREIESLSGKLYSPEVVEAFLKLEKEITDVYRREKDEDTSHNGGRSHQSSPGEGVEGIR

SEQ ID NO: 3099 - protein, 727 aa, Arabidopsis thaliana
MNANEEGEGSRYPITDRKTGETKFDRVESRTEKHSEEEKTNGITMDVRNGSSGGLQIPLSQQTAATVCWERFLHVRTIRVLLVENDDCTRYIVTALLRNCSYEVVEASNGIQAWKVLEDLNNHIDIVLTEVIMPYLSGIGLLCKILNHKSRRNIPVIMMSSHDSMGLVFKCLSKGAVDFLVKPIRKNELKILWQHVWRRCQSSSGSGSESGTHQTQKSVKSKSIKKSDQDSGSSDENENGSIGLNASDGSSDGSGAQSSWTKKAVDVDDSPRAVSLWDRVDSTCAQVVHSNPEFPSNQLVAPPAEKETQEHDDKFEDVTMGRDLEISIRRNCDLALEPKDEPLSKTTGIMRQDNSFEKSSSKWKMKVGKGPLDLSSESPSSKQMHEDGGSSFKAMSSHLQDNREPEAPNTHLKTLDTNEASVKISEELMHVEHSSKRHRGTKDDGTLVRDDRNVLRRSEGSAFSRYNPASNANKISGGNLGSTSLQDNNSQDLIKKTEAAYDCHSNMNESLPHNHRSHVGSNNFDMSSTTENNAFTKPGAPKVSSAGSSSVKHSSFQPLPCDHHNNHASYNLVHVAERKKLPPQCGSSNVYNETIEGNNNTVNYSVNGSVSGSGHGSNGPYGSSNGMNAGGMNMGSDNGAGKNGNGDGSGSGSGSGSGNLADENKISQREAALTKFRQKRKERCFRKKVRYQSRKKLAEQRPRVRGQFVRKTAAATDDNDIKNIEDS

SEQ ID NO: 3100 - protein, 720 aa, Arabidopsis thaliana
MNANEEGEGSRYPITDRKTGETKFDRVESRTEKHSEEEKTNGITMDVRNGSSGGLQIPLSQQTAATVCWERFLHVRTIRVLLVENDDCTRYIVTALLRNCSYEVVEASNGIQAWKVLEDLNNHIDIVLTEVIMPYLSGIGLLCKILNHKSRRNIPVIMMSSHDSMGLVFKCLSKGAVDFLVKPIRKNELKILWQHSSGSGSESGTHQTQKSVKSKSIKKSDQDSGSSDENENGSIGLNASDGSSDGSGAQSSWTKKAVDVDDSPRAVSLWDRVDSTCAQVVHSNPEFPSNQLVAPPAEKETQEHDDKFEDVTMGRDLEISIRRNCDLALEPKDEPLSKTTGIMRQDNSFEKSSSKWKMKVGKGPLDLSSESPSSKQMHEDGGSSFKAMSSHLQDNREPEAPNTHLKTLDTNEASVKISEELMHVEHSSKRHRGTKDDGTLVRDDRNVLRRSEGSAFSRYNPASNANKISGGNLGSTSLQDNNSQDLIKKTEAAYDCHSNMNESLPHNHRSHVGSNNFDMSSTTENNAFTKPGAPKVSSAGSSSVKHSSFQPLPCDHHNNHASYNLVHVAERKKLPPQCGSSNVYNETIEGNNNTVNYSVNGSVSGSGHGSNGPYGSSNGMNAGGMNMGSDNGAGKNGNGDGSGSGSGSGSGNLADENKISQREAALTKFRQKRKERCFRKKVRYQSRKKLAEQRPRVRGQFVRKTAAATDDNDIKNIEDS

SEQ ID NO: 3101 - protein, 495 aa, Arabidopsis thaliana
MCFNNIETGDEVETERQVFGSSEEDEFRVEDTARNTNNVQISQQQQQPLAHVVKWERYLPVRSLKVLLVENDDSTRHIVTALLKNCSYEVTAVPDVLEAWRILEDEKSCIDLVLTEVDMPVHSGTGLLSKIMSHKTLKNIPVIMMSSHDSMVLVFKCLSNGAVDFLVKPIRKNELKNLWQHVWRRCHSSSGSGSESGIHDKKSVKPESTQGSENDASISDEHRNESGSSGGLSNQDGGSDNGSGTQSSWTKRASDTKSTSPSNQFPDAPNKKGTYENGCAHVNRLKEAEDQKEQIGTGSQTGMSMSKKAEEPGDLEKNAKYSVQALERNNDDTLNRSSGNSQVESKAPSSNREDLQSLEQTLKKTREDRDYKVGDRSVLRHSNLSAFSKYNNGATSAKKAPEENVESCSPHDSPIAKLLGSSSSSDNPLKQQSSGSDRWAQREAALMKFRLKRKERCFEKKVRYHSRKKLAEQRPHVKGQFIRKRDDHKSGSEDN

SEQ ID NO: 3102 - protein, 750 aa, Glycine max
  unsure (1)..(750): unsure at all Xaa locations
IRLEGCSCSSKDLLCVCSYCFDVLDFQVVQMSVDGDSKELKELNQRLRDGKKIAGGEHGLCEEVKCNGIAEEVRTVESSSVQQHIPQPQGAIICWERFLHIRSLKVLLVEIDDSTRHVVTALLRNCSYEVIEAANGLQAWKILEDLTNHIDLVLTEVAMPGLSGIGLLYKIMGHKTRKNIPVVMMSSHDSMGLVFKCLSKGAVDFLVKPIRKNELKNLWQHVWRRCHSSSGSGSESGTQTQKSIKSKSLEKSDNNSGSNDEDDNESIGLNNVDGSDNGSGTQSSWTKRAVEVDSHKPVSQWDQIAECPDSTCAQVVHSNAEMGGNKVVPLAAKDCAEXXNEQLVKTAGSQHSNAPDVGPSKFSEQINRGQLDLNCENQSSKLRCKGLSLSDAITSTCDSQREFEALNKKPKSSDIENKGTNNDEELPSLELSLKRLRGVEDADITIQDDRNVLRRSDQSAFSRYNAASNTKKSPTGCVGSNSPYNNSLEVTKKDSSRDIQSHSCGNPPNQNSNGASNNIDMGSTTNNAYAKSGEPAGASTTKCLYQTSAFQPVKNSLHQLPPDHDAESIKKMATAAPHCGSSNVEEVLVEGNVGNHSINRSVSGSNNGSNGQNGSSTAVNAGGTNTESNNGLTGNSGSGDASGSGSANRVDQNKTSQREVALTKFRQKRKERRERCFHKKVRYQSRKRLAEQRPRFRGQFVRQTSNENASEAXQQIADSEHWPQWHNDGDMRKKVEESSCRIWELFCVLC

SEQ ID NO: 3103 - protein, 686 aa, Glycine max
  unsure (1)..(686): unsure at all Xaa locations
TGGDCGVLLCPASIPEFPVPQPQGAIICWERFLHIRSLKVLLVEIDDSTXRHVVTALLRNCSYEVIEVANGLQAWKILEDLTNHIDLVLTEVAMPGLSXGIGLLYKIMGHKTRKNIPVVMMSSHDSMGLVFKCLSKGAVDFLVKPIRKNELKNLWQHVWRRCHSSSGSGSESGTQTQKSIKSKSLEKSDNNSGSNDEDDNESIGLNNVDGSDNGSGTQSSWTKRAVEVDSHKPVSQWDQIAECPDSTCAQVVHSNAEMGGNKVVPLAAKDCAEXXNEQLVKTAGSQHSNAPDVGPSKFSEQINRGQLDLNCENQSSKLRCKGLSLSDAITSTCDSQREFEALNKKPKSSDIENKGTNNDEELPSLELSLKRLRGVEDADITIQDDRNVLRRSDQSAFSRYNAASNTKKSPTGCVGSNSPYNNSLEVTKKDSSHDIQSHSCGNPPNQNSNGASNNIDMGSTTNNAYAKSGEPSGASTTKCLYQTSAFQPVKNSLHQLPPDHDAESIKKMATAAPHCGSSNVEEVLVEGNVGNHSINRSVSGSNNGSNGQNGSSTAVNAGGTNTESNNGLTGNSGSGDASGSGSANRVDQNKTSQREVALTKFRQKRKERRERCFHKKVRYQSRKRLAEQRPRFRGQFVRQTSNENASEAXQQIADSEHWPQWHNDGDMRKKVEESSCRIWELFCVLC

SEQ ID NO: 3104 - protein, 461 aa, Glycine max
  unsure (1)..(461): unsure at all Xaa locations
XPRPEKNCFRRSNKRKEKKNGLGEEKKKKAYGSLQISQQPPQEPAVCWERFLPLRSIKVLLVEDDDSTRHVVRALLQNCSYKVTAVSNGLQAWKVLEDPENGIDLVLTEVAMPILSGIGRPRVXLLCKIMSHKTLKNIPVIMMSSHDSMGIVFKCLSKGAVDFLVKPIRRNELKNLWQHVWRRCHSSSGSGSESATLTRKFAKSRSNDAYENNSDSSDENDYGSRGLSIRDGSDNGSGTQSSWTKCLAQVGSPPPHKQLVDAPDSTCAQVMQTKTEKVSSRWVHXXTEKECHELIDPLDDVARGKDLAMGISLNMQLALEELSSNPIVGKGANKMSDVDDMQIIKRKSNVCEKGQLEYNGDKTGTQENQAMNVIDVTDSNSPHAESRDLNTPNGFSGFSQSKANCCXXKEHPSLELTLKRLGEVGDAKNVTGEECNVLRHSDQSAFSKYNTVSAXPAQTGX

SEQ ID NO: 3105 - protein, 693 aa, Glycine max
  unsure (1)..(693): unsure at all Xaa locations
IVRLREDDRRGPRHDESSDDLGSRMDELNGAXXTTENSNAEVVRWERFLPRMVLRVLLVEADHSTRQIIAALLRKCSYTVIAVPDGLKAWETLKKKAPELDLILTEVELPAISGFALLSLIMEHDICKNIPVIMMSSHDSVSLALKCMLKGAVDFLIKPIRKNELRNLWQHVWRRHAISTPTQNTTFSPKKLKTASEDNSASNKSSGSVASSKKNNECSERLSEGTSPIFEAESTYVENMQDVPQYVHCQVMQTLVQSTCTSPIFEAKSTYVENMQDVXPAEKESAEHNDETEDKSVTXXVSDAARCDKTSELTELRPEQDCGVAEPETENEDEILKSELDGDNSHVSMMQGCSAERVKPSKGAIDLIATVGNLPKHLDENCSLNGGNTTKFDCETQLELSLRSDFPGSSGNQASEATEESQRLNHSNTSAFSWYSNSSGSNQNLENMIGTVICQYGQVTPKLSNSQCGLLPVSGVISNLKSEGHGNVFTSLFYAQSGIHPMSSPKPVCQNESSPFPTSTSTQSYPESHNSDQLHDCSNDATCLNQNVKDNTDSDHARHDSPVADQSAGNSLCHDAANHVNSSAYGSMDSGNDGNATSAIXXSKNAPDGFSDSGCHNYDGFRVTDPHRSSQREAVLVKFRLKRKERCFEKKVRYQSRKRLAEQRPRVKGQFVRQQAAAHQSGNNRNXFDMTVS

SEQ ID NO: 3106 - protein, 365 aa, Glycine max
  unsure (1)..(365): unsure at all Xaa locations
XHASDGIDLVLTEVAMPILSGIGLLCKIMSHKTLKNIPVIMMSSHDSMGIVFKCLSKGAVDFLVKPIRRNELKNLWQHVWRRCHSSSGSGSESATHTRKFAKSKXSNDACENNSDSSDENDYGSRDLSVRDGSGDGSGTQSSWTKCLAQVGSPPPHKQLVDAPDSTCAQVMQTKTEKVSSRWVHXXTEKECHELIDPLDDVAMGKDLAMGISLNXCDXSIHSRNCPAIQCKGANKMSDVDDRSXKRQSNACEKGQLEYNGDKTRTRENQAMNVIDVTDSNSPLAESRDLNTPNGFSGFSQSKANCCXXKEHPSLELTLERLGEVRDGKNFTGEECNVLRHSDQSAFSKYNTASANQQILGTVMFC

SEQ ID NO: 3107 - protein, 235 aa, Glycine max
  unsure (1)..(235): unsure at all Xaa locations
MNNNVGKGKKGLAEQNHMFFDKKSLKNGVVNGGVASGSSTEDDTRFNKVVEDGNNLQISQQXXPQEPVVCWERFLPLRSIKVLLVEDDDSTRHVVRALLRNCSYEVTAVSNGLQAWKXALEDPENGIDLVLTEVAMPILSGIGLLCKIMSHKTLKNIPVIMMSSHDSMGIVFKCLSKGAVDFLVKPIRRNELKNLWQHVWRRCHSKKXSEMLSPKSDPANPNCYSTLFLDRETAX

SEQ ID NO: 3108 - protein, 235 aa, Glycine max
  unsure (1)..(235): unsure at all Xaa locations
MNNNVGKGEKGLAEQNHMFFNKKSLNNGVVNEGVASGSSTEDDTRFNKVAEDGNNLQISQQPPQEPAVCWERFLPLRSIKVLLVEDDDSTRHVVRALLRNCSYEVTAVSNGLQAWKVLEDPENGIDLVLTEVAMPILSGIGLLCKIMSHKTLKNIPVIMMSSHDSMGIVFKCLSKGAVDFLVKPIRRNELKNLWQHVWVWRRCHSKKXSEMLSPKSDPANPNCYSTLFLDRETAX

SEQ ID NO: 3109 - protein, 789 aa, Oryza sativa (japonica cultivar-group)
MGSACEAGTDEPSRDDVKGTGNGILENGHSHKPEEEEWRNGMGEDLPNGHSTPPEPQQTDEQKEHQVQIVRWERFLPVKTLRVLLVENDDSTRQVVSALLRKCCYEVIPAENGLHAWQCLEDLQNHIDLVLTEVVMPRLSGIGLLSKITSHKICKDIPVIMMSSNDSMGTVFKCLSKGAVDFLVKPIRKNELKNLWQHVWRRCHSSSGSGSESGIRTQKCTKPKVDDEYENNSGSNNDNEDDDDNDEDDDDLSVGHNARDGSDNGSGTQFSLNVGQLCQCILMPSACFKTQSSWTKRAVEIDSPQQMSPDQPSDLPDSTCAQVIHPTSEICSNRWLPTANKRSGKKHKENNDDSMGKYLEIGAPRNSSMEYQSSPREMSVNPTEKQHETLMPQSKTTRETDSRNTQNEPTTQTVDLISSIARSTDDKQVVRINNAPDCSSKVPDGNDKNRDSLIDMTSEELGLKRLKTTGSATEIHDERNILKRSDLSAFTRYHTTVASNQGGAGFGGSCSPQDNSSEALKTDSNCKVKSNSDAAEIKQGSNGSSNNNDMGSSTKNAITKPSSNRGKVISPSAVKATQHTSAFHPVQRQTSPANVVGKDKVDEGIANGVNVGHPVDVQNSFMQHHHHVHYYVHVMTQQQQQPSIERGSSDAQCGSSNVFDPPIEGHAANYSVNGSFSGGHNGNNGQRGPSTAPNVGRPNMETVNGIVDENGAGGGNGSGSGSGNDLYQNGVCYREAALNKFRQKRKVRNFGKKVRYQSRKRLAEQRPRIRGQFVRQSGQEDQAGQDEDR

SEQ ID NO: 3110 - protein, 491 aa, Triticum aestivum
  unsure (1)..(491): unsure at all Xaa locations
DDDADDDFSVGPNARDGSDNGSGTQSSWTKRAVEIDSPQLLSSDHLAESPDSTCAQVIHPRSEIGSNRWLPTANKRNINNQKENNDDSMGKYLEIGAPRNSSLGYQSSPNEMSVNPTEKQHENLTSQNKSVNKIVIDKPTCQTADLISSIARNTESKQAARITDAPDCSSKMPNGNEMKNDSPINMPSQELGLKISETTRCXXTEIHDERSIPKRSNLSAFTRYHTPMASDQGGATFRGSCSPQDNSSEAVKTNSTCKMESNSDAAQIKQGSNGSSNNNDMGSSTKNAIAKPCTDRERVMSPSLVKHSSEAQQSSVQHHHHAHYYRHVIAQQQTLIDRASNARCGSSNASDLPLEGHAANYGVNGSISGSNNGSNTQNASSSAPNIARPNMGGAMDKTEAGGGNGSGSGPSGSGNDMVCQNQLSQREAAVNKFRQKRKERNFGKKVRYQSRKRLAEQRPRVRGQFVRQSGQEDEAGQAEDXDDATLPSGPL

SEQ ID NO: 3111 - protein, 277 aa, Triticum aestivum
IGSNRWLPTANKRNINNQKENNDDSMGKYLEIGAPRNSSLGYQSSPNEMSVNPTEKQHENLTSQNKSVNKIVIDKPTCQTADLISSIARNTESKQAARITDAPDCSSKMPNGNEMKNDSPINMPSQELGLKISETTRCETEIHDERSIPKRSNLSAFTRYHTPMASDQGGATFRGSCSPQDNSSEAVKTNSTCKMESNSDAAQIKQGSNGSSNNNDMGSSTKSAIAKPCSDRERGFMVPSTWLNRTSRLQHSIRCSTKCHQLMWHARTKLLKKLPMQ

SEQ ID NO: 3112 - protein, 171 aa, Triticum aestivum
  unsure (1)..(171): unsure at all Xaa locations
XNDDCTRHVVRALLRKCGYEVISAENGLHAWQYLEDVQNRIDLVLTEVAMPCLSGIGLLSKITSHSICKGIPVIMMSKNDSMSTVFRCLSKGAVDFLVKPIRKNELKTLWQHIWRRCHSSSGSESGIHTQKCSKPKAGSHDDDDDDDDDADDDFSVGPNARDGSDNGSGXX

SEQ ID NO: 3113 - protein, 191 aa, Triticum aestivum
  unsure (1)..(191): unsure at all Xaa locations
XGHQAWAYLQDMQSNIDLVLTEVFMHGGLSGIDLLGRIMNHEVCKDIPVIMMSSHDSMGTVLSCLSNGAADFLAKPIRKNELKNLWAHVWRRSHSSSGSGSGSAIQTQKCTKSKSADDSNNNSNNRNDDASMGLNARDGSDNGSGTQSSRTKRAVEIDSPQDMSPDQSVDPPDSTCAHVSHLKSEICSNRX

SEQ ID NO: 3114 - protein, 114 aa, Triticum aestivum
FGTRARPNIESVNGTVSHNIAGGGIVSGSGSGNDVYQNRFPQREAALNKFRLKRKDRNFGKKVRYQSRKRLAEQRPRVRGQFVRQSGQEDQEHKVQKDDTDLLIRTTWHLHRQI

SEQ ID NO: 3115 - protein, 104 aa, Brassica rapa subsp. pekinensis
YSSMFHPFNGSMDAEERRHISSTTEHSAIDNHCSANSSSVGRTQQSLQREAALNKFRMKRKDRCFDKKVRYESRKKLAEQRPRIKGQFVRQVQSTETSTQEAPQ

SEQ ID NO: 3116 - protein, 124 aa, Helicobacter pylori 26695
MKLLVVDDSSTMRRIIKNTLSRLGYEDVLEAEHGVEAWEKLDANADTKVLITDWNMPEMNGLDLVKKVRSDSRFKEIPIIMITTEGGKAEVITALKAGVNNYIVKPFTPQVLKEKLEVVLGTND

SEQ ID NO: 3117 - protein, 124 aa, Helicobacter pylori J99
MKLLVVDDSSTMRRIIKNTLSRLGYEDVLEAEHGVEAWEKLDANADTKVLITDWNMPEMNGLDLVKKVRADNRFKEIPIIMITTEGGKAEVITALKAGVNNYIVKPFTPQVLKEKLEVVLGTND

SEQ ID NO: 3118 - protein, 312 aa, Magnetococcus sp. MC-1
MVTMSKAQILLVDDQPINLEILSEYLRDEGYRLCIARDGQEAWELLEKNPLNFHALLLDRMMPRMDGMEVLARMKQHDELRMVPVIMQTAKASQEEIVEGLEGGAHYYLTKPYRKEMLRAIVRTAVDDYNNYRAIRDRSREAQDKAVDSVLSMRLMDSGQFRFQTIKQAQDLAALLSHSCPDPERVVLGLSELLINAVEHGNLGITYEDKSRLLKNRDDWWQEVHRRQSLPENCQKWGRIRFTKSEDRLEILIQDEGNGFDWRGFLEFDQARAFDSHGRGIAMAKMLSFDRLEYHDPGNTVVVRVNLPPKSE

SEQ ID NO: 3119 - protein, 878 aa, Magnetococcus sp. MC-1
MELDADFLNELLATFRAELEDQTAIMGDGLLALEKGQDEQARQETIHQIFRAAHNVKGAARGVEIRPLADLSHRLESLFSALQKQNATPNPGVISLALAAVDQMRQLGMVLIPGEPTPAEITALLDQLDQAAQGRLAGQNVEASVAASPSPPPTKAPTARFEQQTEPMLPTALAAPLSQENRTQPSPQAEPQPQAEYREQEPSPPHTSAPSSGENHKPHDAITETAIPAAPQQLHERSVEVAEPISAMDEEIPKQVEEPHSPAGVAGQASAAPTGEQSQAPIRHQTPVMKSAVHHEMVRVSATKINEAIGLAEEIQISKVQMEGLQAGVRRLEGNLLNLLHQITCLGDFSEDGMGMPDPALWRDFAQNAPDLMVQLKEDLRATRYGVKERAKRLGLLSNNLQSNLRMMRLVPLSTMTRPMARTARDLCVELGKLADFKVVGDEIELDRAVLEQLKDPLTHLLRNAVDHAIETPQARLAAGKPERGVIQLEIIADGGTIRLVLEDDGRGLDLQRIKEKAIRERLIGAEDAHMMDDEAITELIFMPGFSSRDEVTSVSGRGVGLDVVRANLRHINGQVRVRTQHGKGTQFVLTVPLTLATERGLLVELAGEVFALSISHVERIRSVPRSAVRTLEAGPAVVLDGRPMPLHSLADLLNISGSRALSLNPMPVVILSKGWHQMAVVVDDVVGEQEIVVKPFQPPLCSVKHLKGGNLDRNGNIVVVLDSASLVDAALENRTAPLPLEGQEAGTSINRPKVPHILVVDDSITTRTLEKNILEAKGFLVTTAVNGQKGWETLQEGQFDLVISDVEMPIMNGFEFARTIRDDSRYDDLPVIIVSSLDSQENKRRGMEAGADAYIVKGSFETATLLQTVRQLLAIEN

SEQ ID NO: 3120 - protein, 484 aa, Magnetococcus sp. MC-1
MPPPQVTTSYWLATALQAVDAPCLLLNTDLHLLGWNHAMVAWLVHLPDLYTNTTLSDLLAPQDKQVLYQGLQTLREGRHFTAKVEGLHWLTETGPKQVTLHFSTMATQNGLPPMMLCHLLLTQEGNPSPKERHTASQLSEQVGRLEQALNDKNHFFTLIQRNLREPLASTINLLEAINAEQLLPRDLHEACAQAQLNLNTLVEMAGYRNRSSHQPADALSPAFGYLNTHHLMQRVLRSLANLAQEQHITVLNQINPSQRLHGDPYLLDEALRHLLTLAMDLSSSGDTLHILQVGSKLSFRSLGLAKHIPGLEQTLLRPTDPNRQGTITEYDTHCRAIIAAHKGEIRFSTLPALGGEIAILLPHTDPVVLLVDDNDAERMLLRKPLEEIGLQVCEAKDGQEALEMLGQQHVDMVLTDVRMPRMDGFSLLRQIQSNPLYESIPTLLLTVDQESDSRTQAFQLGAVDFVNKPIQFHDLIPRIRRFLG

SEQ ID NO: 3121 - protein, 123 aa, Methanosarcina mazei Goe1
MMMKEILIVEDNPMNMELILDLLEFYGHRVTEAEDGIKALERLAEKKFDLILLDMQLPKMDGLEVLERIKKNPATSEIPVIAVTAHAMKGSEEHFIEMGCVDYISKPIDIHRFRSLIDKYLGE

SEQ ID NO: 3122 - protein, 871 aa, Thermosynechococcus elongatus BP-1
MTLDAADLDAITQEARHCFLYEDAPEYLLLLEQWAEQVVTDPERHYTAEDYNTLMRAAHSLKGGAGIAQLSELQALSHRLEDILEALKEGRLGDRPRAHHLLVQGIEQAQELLAAAKQNHSLTPTPPYQALLAALTELLSTVSDPSSPPTVAPPDLRTALTQTLEESLQLLEASATDAERETALAQLIATAHTLGKQYPLPWLQQLAAELPKLAADLPLGELVPAIVAECRQLQQAELVKLLPPEPTPPPPAETAPPQDSYLRIPVSRLDRLGNTVSELLIGQERLTLYQQQFLRANRELKQRLDQFRPIRDQVQTFYDRLATPLGGPGRPTNGHNDFDALEFDRYTELHTALQDFQELLVRIQETGADIDLLSRDLQEALDLNRQHLNSLYAELTNSRLVPFRQLAQMFVTAVQALGDRHHKPVQLVIEGGDTLVDQVILQQLKAPLTHLVRNAFDHGLEPPKQRQQLGKSPTGTIWLRARLRGNAVEIQVADDGRGIDLQRVSQKAVELRLCSAEQVPHLSREQILEFLFVPGFSTAKQVSDLSGRGVGLDVVREQVQRSRGHLQITTEPQRGTTFTLTLPLTLSLLPMVLCQVGELTLAIPDLSIREVIALKEYTDIRHPSATIDWQGQSIPLYPLHQLLPYQRPLSGPTRPLGVGVVVDVAGQAVALAVNYLIAERELVVKPFDQTVPVPPYVMGCTVLGSGEVVPVLAPDNFTVLLRPVEVRASPMESPQQPITPQVLIVDDSITVRRLLDRVLRQAGYNVVQCRDGKEALDFLLAAGDQVSLVITDIEMPRLDGYDLLEAIRLSARLRHLPVAMLTSRGGDTHRQKALQLGANGYITKPFQPQGILQTVTQLLTGRHGGVATLSQ

SEQ ID NO: 3123 - protein, 123 aa, Desulfovibrio desulfuricans G20
MSKHILIVDDSKTVRNLVAFIMKKEGFRVTMAEDGLDGLEKLYSAEETVDLIISDVNMPRMDGFTFIKTVREQDTYRDLPIVVLSTEGQEKDIQMGMSLGANLYMVKPAQPDKMVKNIKMLLG

SEQ ID NO: 3124 - protein, 667 aa, Arabidopsis thaliana
MWQTWPRQPILLDIFSNPNTLSTTVRSWSVRHPLSIITVKTFARFFLDIFFSPHYYRKNKVLFFALFSFISPLTNILICFVTVSLSLELSSSSSIIDLGFSKLSVCVVIMTSSEEVVEVTVVKAPEAGGGKLSRRKIRKKDAGVDGLVKWERFLPKIALRVLLVEADDSTRQIIAALLRKCSYRVAAVPDGLKAWEMLKGKPESVDLILTEVDLPSISGYALLTLIMEHDICKNIPVIMMSTQDSVNTVYKCMLKGAADYLVKPLRRNELRNLWQHVWRRQTSLAPDSFPWNESVGQQKAEGASANNSNGKRDDHVVSGNGGDAQSSCTRPEMEGESADVEVSARDAVQMECAKSQFNETRLLANELQSKQAEAIDFMGASFRRTGRRNREESVAQYESRIELDLSLRRPNASENQSSGDRPSLHPSSASAFTRYVHRPLQTQCSASPVVTDQRKNVAASQDDNIVLMNQYNTSEPPPNAPRRNDTSFYTGADSPGPPFSNQLNSWPGQSSYPTPTPINNIQFRDPNTAYTSAMAPASLSPSPSSVSPHEYSSMFHPFNSKPEGLQDRDCSMDVDERRYVSSATEHSAIGNHIDQLIEKKNEDGYSLSVGKIQQSLQREAALTKFRMKRKDRCYEKKVRYESRKKLAEQRPRIKGQFVRQVQSTQAP

SEQ ID NO: 3125 - protein, 558 aa, Arabidopsis thaliana
MTSSEEVVEVTVVKAPEAGGGKLSRRKIRKKDAGVDGLVKWERFLPKIALRVLLVEADDSTRQIIAALLRKCSYRVAAVPDGLKAWEMLKGKPESVDLILTEVDLPSISGYALLTLIMEHDICKNIPVIMMSTQDSVNTVYKCMLKGAADYLVKPLRRNELRNLWQHVWRRQTSLAPDSFPWNESVGQQKAEGASANNSNGKRDDHVVSGNGGDAQSSCTRPEMEGESADVEVSARDAVQMECAKSQFNETRLLANELQSKQAEAIDFMGASFRRTGRRNREESVAQYESRIELDLSLRRPNASENQSSGDRPSLHPSSASAFTRYVHRPLQTQCSASPVVTDQRKNVAASQDDNIVLMNQYNTSEPPPNAPRRNDTSFYTGADSPGPPFSNQLNSWPGQSSYPTPTPINNIQFRDPNTAYTSAMAPASLSPSPSSVSPHEYSSMFHPFNSKPEGLQDRDCSMDVDERRYVSSATEHSAIGNHIDQLIEKKNEDGYSLSVGKIQQSLQREAALTKFRMKRKDRCYEKKVRYESRKKLAEQRPRIKGQFVRQVQSTQAP

SEQ ID NO: 3126 - protein, 568 aa, Glycine max
  unsure (1)..(568): unsure at all Xaa locations
CDSMGEVVIMSGEKKSESGGGGEGRXWWRSKAGEFKGLMRWEKFLPKMVLRVLLVEADDSTRQIIAALLRKCSYKVVAVPDGLKAWELLKGRPHNVDLILTEVDLPSISGYALLTLIMEHEICKNIPVIMMSSQDSISTVYKCMLRGAADYLVKPIRKNELRNLWQHVWRRQSSTTGINGLQDESVAQQKVEATAENNAASNRSSGDAACKGSDAQSSCTKPDCEAESDPVEHAGIFSAEMWGSISKWNRDTTGXNKLSLRPDEAMDLIGAFHTRSLKNSTVNCTGNFDHSPQLDLSLRRSCPGSFENKLTEERHTLMHSNASAFKRYTTRQLQISMPAVLIISDQQREQITNCEKNISHIATGSNSDSSTPMQRCIVSPTTVQSKXXSELATSHPPQGHSLPIPVKGVRFNDLCTAYGSVLPSVFHTQSGPPAMPSPNSVVLLEPNFQVNAFYQSNMKESSSEQLYESRGPNGNTTQNHIVYTQEHKSEHADLTNNANSHRSIQREAALNKFRLKRKERCYEKKVRYESRKKLAEQRPRVKGQFVRQVHPDPLVAEKDGKEYDHSDF

SEQ ID NO: 3127 - protein, 595 aa, Glycine max
  unsure (1)..(595): unsure at all Xaa locations
KLRNSLSLSLPPLNLANFSDIFTAQLKTKHEQQQQQQQIVXEWVKCRLXCRRRRGNRATMPPXVHWERFLPRMVLRVLLVEADDSTRQIIAALLRKCGYKVVAFCDGLKAWETLKNKAFDLDLILTEVDLPSISGFSLLTLIMEHDICKNIPVIMMSSHDSVSMVFKCMLKGAADFLIKPVRKNELRNLWQHVWRRHAISRPPQNLTLPEIVGFAAENHAASNDSSGSVEDDECSEKTSEAHSTCPSPFLEAESTYMENMQDILQLKSSSNLSNNIHRCSDELVDPSTGAIDLIATFKNXFQRALMKNVVXSSGNTAKFDFDTQLELSLRRDFPGSSCKAAFKERQILNHSNASAFSRYSNRLLQPLFPTPSTISAKLTNASQNSHESLKLSKNTSTSHQYSEKSQNQEEKIITSVIGQSGQVDPKLPNSQLGLFPATGVTSDHKSKGNGNVFPSKLYAKSGVHPISTPKSVCQKESSPFPTSTSSQSNPQSHNSERHHWLEDATHASDQNVNDQSNLECETHDSPAASQSAAHRTSQREAALTKFRLKRKDRCYEKKVRYQSRKRLAEQRPRVKGQFVRQVHDDHPVADVGGGS

SEQ ID NO: 3128 - protein, 553 aa, Glycine max
  unsure (1)..(553): unsure at all Xaa locations
XRPTRPRLEGQVEGAVHWERFLPRMVLRVLLVEADDSTRQIIAALLRKCGYKVVAFCDGLKAWETLKNKAFDLDLILTEVDLPSISGFSLLTLIMEHDICKNIPDIMMSSHDSVSMVFKCMLKGAADFXLIKPVRKNELRNLWQHVWRRHALSRPPQNLTLTEIVGXVAENHDAINDSSGSMDSTPKDDDCSKTTSETNCTCISPFLEAESTXMENMQGILQLRSSSSLSNIDTVKHENSTKCERESDNHNDEAGEKSLLISEDASTAKFDFDTQLELSLRRDFPGSSCKAAFKERQILNHSNASAFQLNTYSDAELQYTIIDVIVNKVKKVXXNQEEKIITSVIGQSGQVDPKLPNSQLGLFPATGVTSDHKSKGNGNVFPSKLYXQNQVSIPYRLQNQCARKRVLHFPQALPPSPIXQSHNSERHHWLEDATHASDQNVNDXSNLECETHDSPAASQSAASFFHDTANHNSSGVYRSDGNATSAKVAKESHEIQREAALTKFRLKRKDRCYEKKVRYQSRKRLAEQRPRVKGQFVRQVHDDHPVADVGGGS

SEQ ID NO: 3129 - protein, 492 aa, Oryza sativa
  unsure (1)..(492): unsure at all Xaa locations
PPIPSPGLRWTARREEGRTARALLKERSFNIHLVLTEVELPLMSGFLLLSTIMEHDACKNIPVIMMSSNDSVSMVFKCMLKGAADFLVKPIRKNELRNLWQHVWRKQLSSGVLDVPQQEDNLTERHEQKTGVTKAEHVTENVVHKNMGDAQSSCTRSELEADSRQTKMTCSNDINCEKASRDMELVHIIDNQQKNNTHMEMDVARANSRGNDDKCFSIPAHQLELSLRRSDYSRLESQEKNERRTLNHSTSSPFSLYNCRTASSTINAGDAQACSTSATHIDLENKNGDSKTPSQDKRETNQPPIRVVPFPVPVGGLTFDGQPFWNXVHLWHPFSIHXSAPPIWNSKTSTWQDATTQAISLQQNGPKDTDTKQVENVEEQTARSHLSANRKHLRIEIPTDEPRHVSPTTGESGSSTVLDRIAPTESSNVVPENPDGLRHLSQREAALNKFRLKRKDRCFEKKVRYQSRKLLAEQRPRVKGQFVRQDHGVQGS

SEQ ID NO: 3130 - protein, 207 aa, Oryza sativa
MISLFVHLDNLTYWLTCSFTQFYQEPTYEISHFRSFLVHRYNCRTASSTINAGDAQACSTSATHIDLENKNGDSKTPSQDKRETNQPPIRVVPFPVPVGGLTFDGQPFWNGAPVASLFYPQSAPPIWNSKTSTWQDATTQAISLQQNGPKDADTKQVENVEEQTARSHLSANRKWYNSNGRLVCFPLVLRGSFGISIMRTRGRRGFD

SEQ ID NO: 3131 - protein, 131 aa, Oryza sativa
LDPLLQSSCTRSELEADSRQTNNLLEYKQPMGRHFSKPDHKNTEKNGGTKIHASNDGNLIPRREEDASLRRMTCSNDINCEKASRDMELVHIIDNQQKNNTHMEMDVARANSRGNDDKCFSIPAHQLELSL

SEQ ID NO: 3132 - protein, 181 aa, Triticum aestivum
CLNDNNSERASKDMDLVHIMDNQQKHNTQREVDTMRTTSRGNDEKGSIPAHQLELSLRRTDYGKLENHDKNDRRTLNHSTSSAFSLYNCRAVSTSGNAGDGQLCSTSETLMDVENKNGDSAAPSQDMTETNRPPIRVVPFPVPVQGLTFDGQPFWNGTPMASLFYHSQLLPFGIAKHPCGK

SEQ ID NO: 3133 - protein, 276 aa, Triticum aestivum
DIEVVHIIDDEPKPSTPMEVDIVRTNPQGNGDKWFSIPAHQLELSLRRSDYGRSEDQEKNDTRTLNHSTSSAFSLYNCRPISSFGNAGDAQPCSTSATHADLQNKNGDSAAPFQDKADPICHPIRVVALPVPVGGLTFDGQPFWSGAPVAPLLYPQSGPPIWNGRTPVSQEVDTQATSSQQSDPTEMDCQQTESTQRQEVLPSPTANEKHLHVEIPSDSNPQQVSPMASESGTGSSTVLNNSGNALSGSACGSSSNRIATPTEQCNASDGATENPS

SEQ ID NO: 3134 - protein, 164 aa, Triticum aestivum
GGRAPASGDNQTEPPGMVRGGQGQEGGLGEREVVNVVDQDGREEEVRRALPMMPVRVLLAEGDDSTRHVISALLRKCGYHVSAASDGVKAWELLKEKSFKIDLVLTEVELPLMSGFLLLSTIMEHDACKNIPVIMMSSNDAVSMVFKCMLEGASDFLVKPIRKN

SEQ ID NO: 3135 - protein, 525 aa, Bacillus halodurans
MYKVLLADDEFFVRHGLKSLIEWEKCGYEVAAEADNGEDAFKLVQEIKPDLVITDIRMPVFDGLQLIQKVNETLSFNTKFIIISGYNDFSYAQKAVRFGAVDFVLKPIDQDELEAALIKLAATLDQEKATNSDQEKVLLDQIFIHSLGENKKENEVRRWAAKLNINNRHFYYYLLLEVNNLSLDKGFINEQYKEPIRKVIRETVARQAATEEYTAIYEQLDHAYGLLITSEHLKKFNGQIEPLAEKLRKDIQDFTNIPLTVYVGAKTDDLSTIKKSYETANSLRNYKYIFNEKNVFIHEQTESVDTTYDELNNHLFVTLMEQMEENNSDRIVNIIDKIFSEFQTKKFVPSAVKTSVNRCVHKVMQTVQAMEGDTGKIISAQAMTNWESYNLTFDQLKQVFTKFVLEAAVIIQELRKENMKSDIYKVKTYIENHYHENISLKSIASLFYMNPVYMGQLFKKTFGVYFKEYLLKLRMNEAKKLLRQTDMRVYEVAERVGFGSTDYFVTQFEKINKMTPTEYRNKLLK

SEQ ID NO: 3136 - protein, 237 aa, Magnetococcus sp. MC-1
  unsure (1)..(237): unsure at all Xaa locations
MQTHRFLSGRRFSMGAKILIIEDDPTLNRLMVNHLSRLGHHVTGTHSRAEAEHYFNQHEPLLIIMDLRLPDVNGIDYLPQIPVPAPVIMLTAYSSVTSAVKAMKAGAFEYLVKPVNVEELELVVSRGLEHANMLHDRQFFSQQQPQQQRMIGTSVAMLHLQQQIQQMLEHEQPVWVFGEPGTGKSLVARTIHEKSLRRGGHFGILHCDSLPESLLEAELFGHEKGFSPXMLVANWVF

SEQ ID NO: 3137 - protein, 296 aa, Rhodococcus ruber
GSGHDATLPLPGHPGREWPGPLRSDGPAWHDGPAVNETTDTLTVLAVDDEPPALDELAYLLRRREEIGHVHTAGEATTALRLLRDGGIDAVFLDINMPGLDGLELAGILRNFANPPAVVFVTAHDDRAVAAFDLGAVDYLLKPLREERLAEAVRRIAERRRTRETESAAAGAAASDEVIPVELGGVTTLVPRSSVQWVEADGDYARLHTGTGSHLVRIPISTLESRWADAGFLRVHRSYLVALPLVTGIRSVGSGLVVCLRAEEGKPAVELPVSRRHTRELKDRLIRGPMQTWTSR

SEQ ID NO: 3138 - protein, 265 aa, Thermobifida fusca
MMLPSPRGLRVLAVDDVPLALTELCRLLRAAPEVGEVVAADDPISALRNIQADRFDAVFLDISMPGLDGVELANLLSKLSDPPVIVFVTAHEEHAVTAYGIGAVDYLLKPVRAERLAMALTKVVRMLSAGTAPVTPHRVRRPDAMAVLPVETAGRTRYVRRSDVRFVEANGDYVRLHTPEGVHLVRMPISRLEEYWADSGFLRVHRGYLVALSAIRELRSDSSGGLLAHTDLGDVPVSRRHARELREQLLHAAQTGMFDDPTRGA

SEQ ID NO: 3139 - protein, 226 aa, Bacillus subtilis subsp. subtilis str. 168
MARKEWKVLLIEDDPMVQEVNKDFITTVKGVTVCATAGNGEEGMKLIKEEQPDLVILDVYMPKKDGIKTLQEIRKQKLEVDVIVVSAAKDKETISLMLQNGAVDYILKPFKLERMRQALEKYKQYKQKIEANDTLSQEQLDAILNIPQQAVQDLPKGLNHFTMNEVTAFLKQQTASLSAEEVAKALGIARVTARRYLDYLEKTGIIKLDVQYGGVGRPVNRYVLKG

SEQ ID NO: 3140 - protein, 573 aa, Arabidopsis thaliana
MTVEQNLEALDQFPVGMRVLAVDDDQTCLKILESLLRHCQYHVTTTNQAQKALELLRENKNKFDLVISDVDMPDMDGFKLLELVGLEMDLPVIMLSAHSDPKYVMKGVTHGACDYLLKPVRIEELKNIWQHVVRSRFDKNRGSNNNGDKRDGSGNEGVGNSDPNNGKGNRKRKDQYNEDEDEDRDDNDDSCAQKKQRVVWTVELHKKFVAAVNQLGYEKAMPKKILDLMNVEKLTRENVASHLQKFRLYLKRISGVANQQAIMANSELHFMQMNGLDGFHHRPIPVGSGQYHGGAPAMRSFPPNGILGRLNSSSGIGVRSLSSPPAGMFLQNQTDIGKFHHVSSLPLNHSDGGNILQGLPMPLEFDQLQTNNNKSRNMNSNKSIAGTSMAFPSFSTQQNSLISAPNNNVVVLEGHPQATPPGFPGHQINKRLEHWSNAVSSSTHPPPPAHNSNSINHQFDVSPLPHSRPDPLEWNNVSSSYSIPFCDSANTLSSPALDTTNPRAFCRNTDFDSNTNVQPGVFYGPSTDAMALLSSSNPKEGFVVGQQKLQSGGFMVADAGSLDDIVNSTMKQV

SEQ ID NO: 3141 - protein, 552 aa, Arabidopsis thaliana
MTMEQEIEVLDQFPVGMRVLAVDDDQTCLRILQTLLQRCQYHVTTTNQAQTALELLRENKNKFDLVISDVDMPDMDGFKLLELVGLEMDLPVIMLSAHSDPKYVMKGVKHGACDYLLKPVRIEELKNIWQHVVRKSKLKKNKSNVSNGSGNCDKANRKRKEQYEEEEEEERGNDNDDPTAQKKPRVLWTHELHNKFLAAVDHLGVERAVPKKILDLMNVDKLTRENVASHLQKFRVALKKVSDDAIQQANRAAIDSHFMQMNSQKGLGGFYHHHRGIPVGSGQFHGGTTMMRHYSSNRNLGRLNSLGAGMFQPVSSSFPRNHNDGGNILQGLPLEELQINNNINRAFPSFTSQQNSPMVAPSNLLLLEGNPQSSSLPSNPGFSPHFEISKRLEHWSNAALSTNIPQSDVHSKPDTLEWNAFCDSASPLVNPNLDTNPASLCRNTGFGSTNAAQTDFFYPLQMNQQPANNSGPVTEAQLFRSSNPNEGLLMGQQKLQSGLMASDAGSLDDIVNSLMTQEQSQSDFSEGDWDLDGLAHSEHAYEKLHFPFSLSA

SEQ ID NO: 3142 - protein, 390 aa, Glycine max
  unsure (1)..(390): unsure at all Xaa locations
MTVEKKMNAGDEFPVGMRVLAVDDDPTCLLVLETLLRRCQYHATTTNQAIKALALLREHKDKFDLVISDVHMPDMDGFKLLELVGLEMDLPVIMLSANGDTKLVMKGISHGACDYLLKPVRMEELKNIWQHVIRRKKFDSKEKNNNIDKRNGLGSSGTGNSDHNEKLTKKRKDQDEDEDEDQENDLDNEDPSAQKKPRVVWSVDLHRKFVAAVNQLGIDKAVPKKILDLMNVEKLTRENVASHLQKYRLYLKRISCVANQQANMVAALGVADPSYLRMSSVSGVGHVQTLSGSGQLHNNXXFRSFPPSGIINRLNTPAGLNVHGFPSGVLQLSQSQNLNNANDHHXXIPVSHSANQNGVQGMTVSVGLDQLQNNKGKKKKKKKKKKKGGR

SEQ ID NO: 3143 - protein, 389 aa, Glycine max
  unsure (1)..(389): unsure at all Xaa locations
MTVEKKMNAGDEFPVGMRVLAVDDDPTCLLVLETLLRRCQYHATTTNQAIKALALLREHKDKFDLVISDVHMPDMDGFKLLELVGLEMDLPVIMLSANGDTKLVMKGISHGACDYLLKPVRMEELKNIWQHVIRRKKFDSKEKNNNIDKRNGLGSSGTGNSDHNEKLTKKRKDQDEDEDEEQENDHDNDDPSAQKKPRVVWSVELHRKFVAAVNQLGIDKAVPKKILDLMNVEKLTRENVASHLQKYRLYLKRISCVANQQTNMVVALGGADPSYLRMNSVSGVGHIQSISGSGQLHNNAFRSFPPSGIINRLNTPAGLNVHGFPSXXSTSIESITKFKKHQXXSXVPVSHSANQNGVHGMTVSVGLDQLQNNKGKKKKKKKKKKKGGR

SEQ ID NO: 3144 - protein, 384 aa, Glycine max
  unsure (1)..(384): unsure at all Xaa locations
MTVEKKMNAGDEFPVGMRVLAVDDDPTCLLVLETLLRRCQYHATTTNQAIKALALLREHKDKFDLVISDVHMPDMDGFKLLELVGLEMDLPVIMLSANGDTKLVMKGISHGACDYLLKPVRMEELKNIWQHVIRRKKFDSKEKNNNIDKRNGLGSSGTGNSDHNEKLTKKRKDQDRNEQQXNDHDNDDPSAQKKPRVVWSVELHRKFVAAVNQLGIDKAVPKKILDLMNVEKLTRENVASHLQKYRLYLKRISCVANQQTNMVVALGGADPSYLRMNSVSGVGHIQSISGSGQLHNNAFRSFPPSGIINRLNTPAGLNVHGFPSXXSTSIESITKFKKHQXXSXVPVSHSANQNGVHGMTVSVGLDQLQNNNGCYVCSKPDYCF

SEQ ID NO: 3145 - protein, 604 aa, Glycine max
  unsure (1)..(604): unsure at all Xaa locations
MAVENQREDGGCDRFPVGMRVLAVDDDPICLKVLENLLRKCQYHVTTTNQAVEALTMLRENRNKFDLVISDVNMPDIDGFKLLELVGLEMDLPVIMLSAHGDTKLVMKGVTHGACDYLLKPVRIEELKNIWQHVVRRKNFDSRDQNNNEEKAPNFAGGGSQGLRSENSADQNKRLGKKRKDQSDEEEEGGEENEDDEDPSAQKKARVVWSVELHRKFVAAVNQLGLDKAVPKKILDLMNVEGLTRENVASHLQKYRLYLKKAAQQANMVAALGGSDSYLRIGSIDGYGDFCTSSGSGRITNAXXLPSYASTGIFSRLNSPAALNMRGISSSALIRPVQSQNINSSLNTLGNIQLPANQSSSLLQGIPTSIELNQSKQRNCTTGISQLSQVDSSGFTVASGFPDHSNGPNNSLPCVSNNHIMLQGNPQTHGPGAFSNQSSVRAASFCEAFSNDQLPPTSINDSNSSTHIGNNSPLDYNQNMSCPFNSVNSHASSSGVTSSMGHVLNQNNTICSNRVDASSLVGQLNGASPSISRCTEVEKFSSDIRLKPNEAYILEQMKSQDGFMQNTFGTLDDIMGVMVKREQNESTLLDGEMGFDAYPVGSCN

SEQ ID NO: 3146 - protein, 308 aa, Glycine max
  unsure (1)..(308): unsure at all Xaa locations
MAVENQREDGGCDRFPVGMRVLAVDDDPICLKVLENLLRKCQYHVTTTNQAVEALTMLRENRNKFDLVISDVNMPDIDGFKLLELVGLEMDLPVIMLSAHGDTKLVMKGVTHGACDYLLKPVRIEELKNIWQHVVRRKNFDSMGSEQGLPMRSGGGSQGLRSENSADQNKRLGKKRKDQSDEEEXGGEENEDDEDPSAQKKARVVWSVELHRKFVAAVNQLGLDKAVPKKILDLMNVEGLTRENVASHLQKYRLYLKKAAQQANMVAALGGSDSYLRMGSIDGYGDFCTSSGSGRITNTSPFFKIYKT

SEQ ID NO: 3147 - protein, 346 aa, Glycine max
  unsure (1)..(346): unsure at all Xaa locations
XNSARGEKTXQKGREHKDKFDLVISDVHMPDMDGFKLLELVGLEMDLPVIMLSANGDTKMVMKGISHGACDYLLKPVRMEELKNIWQHVIRRKKFDSKEKNNNLDKRNGLGSSGTGNSDQNEKLTKKRKDQDEDEDEDQENDLDNEDPSAQKKPRVVWSVDLHRKFVAAVNQLGIDKAVPKKILDLMNVEKLTRENVASHLQKYRLYLKRISCVANQQANMVAALGVADPSYLRMSSVSGVGHVQTLSGSGQLHNNXXFRSFPPSGIINRLNTPAGLNVHGFPSGVLQLSQSQNLNNANDHHXXIPVSHSVNQNGVQGMTVSVGLDQLQNNKKKKKKKKKKKAAAX

SEQ ID NO: 3148 - protein, 487 aa, Oryza sativa
  unsure (1)..(487): unsure at all Xaa locations
LRTIWQHVIRRKNCDAKNRGNDDDAGQKAQGMNNEGESIGANRNKRQSRKSRDENGDDGDDSGGNSARGGDSSTQKKPRVVWSVELHRKFVAAVNQLGIEKAVPKKILDLMNVENITRENVASHLQKYRLYLKRLSTDASRQANLAAAFGGRNPAYINMNSFGNYNAYGRYRTVPTAGHTQANNILTRMNSPSAFGVHGLLHSQPIQLGHAQNNLSTSLNDLGGLNNGNMIRGAQMSTXXLTGPSGNSFPNISNGAPLATANRXXLQPLESSNQQHLSRVHSSSADPFSTLVGESPQFPDLGRTTNTWQTAVXXSNIQDRGHNDNIMNGPKIEPVSSFTSSNQIPLLGNEMQGQVASLASNVPIAFNQDTSPFNYGSSTNSRDMLNNSHVFSNSSINTSLPNLSLDNPAVPRQTLDRGNTGIVSPMQDGRIHHQAVSNQLNYNDDLMRTTGLQRGLSGGLDDIVVDMFRPDREDDGVPYIDGDWELV

SEQ ID NO: 3149 - protein, 344 aa, Triticum aestivum
  unsure (1)..(344): unsure at all Xaa locations
XRNPAYSNMNLDVFRHYSNTYGRYRPVPTSNHSQSNNLVARMNSPSAYGMHGLLSPQSQPLHLGHAQNNLGTSLNDLGVNNGNPSGGAHMSTMGTGTSGNSFANISNGAPLAPTNRXXVQSLESNNRQHLGRINSSSTDSFSSFASDSPHFPDLGRSSNTWQTAVXXSNIQQLGQNGSIGNGPRMEPVSSYTPPSNQITSLGNDMQXXQVAPLASNTLPMVFNQGAAPFTFGNSTNSREALNSNLAFSNSGINTSLPNLRIDNSVVPRQTLDGGNTGGVPSLQDGKIDQQAVGNQLNYNNNDLVGTSGLQRELSGGLDDIVVDMFRPDXXDNGGIFIDTDWGLV

SEQ ID NO: 3150 - protein, 201 aa, Triticum aestivum
GRGGDFSGVVVLMRTDVRRGAAAAGRDQFPVGMRVLAVDDDPVCLKVLETLLRRCQYHVTATNQAVIALRMLRENRDMFDLVISDVHMPDMDGFKLLELVGLEMDLPVIMLSVNGETKTVMKGITHGACDYLLKPVRIEELRNIWQHVVRRKFSTRDSVNLDTYEECNKPPSADSDYVYGQVTCGSRLARRGRNTNMRRKI

SEQ ID NO: 3151 - protein, 617 aa, Magnetospirillum magnetotacticum
MTARDEVLAAFDAGATDVIHKPFDPRELVSRVSVHTANALMSRAMRLDNTRMVNELAEAALLMTSVLPRTETLKAIRTAAGIAFDWFSRPCSAVGGDLWQAWLLGGGKVALFFGDVSGHGIGAALRAFSTHSVLSPLPSFADDPLKMAALLDCRLVSVDRDHHHFVAGVYGVFDRVEGCFSYVAAGLRNAVLLRADGRREALKLSGLPFGLTEDAGRQLGRVAIGKGDRLLIYSDALVEQAAEGSMTETALAGWIEEQVARAGETGEAEVARHLGKTFLASNPDCADDLLLVSATFPDYPVLVNGRPLHPFTGPAELLPGHGASLLVVDDMPMNRKLLDTMLKAEGYAIAEAEDGLVALERLQAEPERFDAILLDRQMPRMDGMTLLRHLKSDIRLAQIPVIMQTAFGSSEDIAEGIQAGVFYYLVKPLQLQILSSVVKAAVADHRRAQKLRTDLRRQSGTLALLEQGEFAFRTLAEADWLAVALASLCPWAPDVVTGLSELMVNAIEHGNLEISYQEKTEFLTSGRLIEEIEARLARPDLGDRRASIAVSREPQGLRFTVRDQGPGFDWRPYMDISPERAFHSHGRGIAIARRLSFDTLAYHEPGNVVEVAVAMPS

SEQ ID NO: 3152 - protein, 457 aa, Arabidopsis thaliana
MEKSGFSPVGLRVLVVDDDPTWLKILEKMLKKCSYEVTTCGLAREALRLLRERKDGYDIVISDVNMPDMDGFKLLEHVGLELDLPVIMMSVDGETSRVMKGVQHGACDYLLKPIRMKELKIIWQHVLRKKLQEVRDIEGCGYEGGADWITRYDEAHFLGGGEDVSFGKKRKDFDFEKKLLQDESDPSSSSSKKARVVWSFELHHKFVNAVNQIGCDHKAGPKKILDLMNVPWLTRENVASHLQKYRLYLSRLEKGKELKCYSGGVKNADSSPKDVEVNSGYQSPGRSSYVFSGGNSLIQKATEIDPKPLASASLSDLNTDVIMPPKTKKTRIGFDPPISSSAFDSLLPWNDVPEVLESKPVLYENSFLQQQPLPSQSSYVANSAPSLMEEEMKPPYETPAGGSSVNADEFLMPQDKIPTVTLQDLDPSAMKLQEFNTEAILKKLELGNFQNHIILFL

SEQ ID NO: 3153 - protein, 521 aa, Arabidopsis thaliana
MEKSGFSPVGLRVLVVDDDPTWLKILEKMLKKCSYEVTTCGLAREALRLLRERKDGYDIVISDVNMPDMDGFKLLEHVGLELDLPVIMMSVDGETSRVMKGVQHGACDYLLKPIRMKELKIIWQHVLRKKLQEVRDIEGCGYEGGADWITRYDEAHFLGGGEDVSFGKKRKDFDFEKKLLQDESDPSSSSSKKARVVWSFELHHKFVNAVNQIGCDHKAGPKKILDLMNVPWLTRENVASHLQKYRLYLSRLEKGKELKCYSGGVKNADSSPKDVEVNSGYQSPGRSSYVFSGGNSLIQKATEIDPKPLASASLSDLNTDVIMPPKTKKTRIGFDPPISSSAFDSLLPWNDVPEVLESKPVLYENSFLQQQPLPSQSSYVANSAPSLMEEEMKPPYETPAGGSSVNADEFLMPQDKIPTVTLQDLDPSAMKLQEFNTEAILRSLNWELPESHHSVSLDTDLDLTWLQGERFLANTGLQFQDYSSSPSLLSELPAHLNWYGNERLPDPDEYSFMVDQGLFIS

SEQ ID NO: 3154 - protein, 444 aa, Arabidopsis thaliana
MEKSGFSPVGLRVLVVDDDPTWLKILEKMLKKCSYEVTTCGLAREALRLLRERKDGYDIVISDVNMPDMDGFKLLEHVGLELDLPVIMMSVDGETSRVMKGVHTGACDYLLKPIRMKELKIIWQHVLRKKLQEVRDIEGCGYEGGADWITRYDEAHFLGGGEDVSFGKKRKDFDFEKKLLQDESDPSSSSSKKARVVWSFELHHKFVNAVNQIGCDHKAGPKKILDLMNVPWLTRENVASHLQKYRLYLSRLEKGKELKCYSGGVKNADSSPKDVEVNSGYQSPGRSSYVFSGGNSLIQKATEIDPKPLASASLSDPNTDVIMPPKTKKTRIGFDPPISSSAFDSLLPWNDVPEVLESKPVLYENSFLQQQPLPSQSSYVAISAPSLMEEEMKPPYETPAGGSSVNADEFLMPQDKIPTVTLQDLDPSAMKLQEFNTEGDSEEA

SEQ ID NO: 3155 - protein, 292 aa, Glycine max
MDNGCFSSSPRHDAFPAGLRVLVVDDDLTWLRILEKMLKKCLYEVTTCCLATEALKKLRERKEAYDIVISDVNMPDMDGFKLLEQVGLEMDLPVIMMSVDGETSRVMKGVQHGACDYLLKPIRMKELRNIWQHVFRKRMHEARDFESHEGFDFEGIHLMRNGSDHYLFAVEETTSIKKRKDADNKHDDKEFGDHFPTKKARVVWSVDLHQKFVKAVNQIGFDKVGPKKILDLMNVPWLTRENVASHLQKYRLYLSRLQKENDQKSSSSGIKHSDSPSKDLKQNLVFVRAGRF

SEQ ID NO: 3156 - protein, 515 aa, Glycine max
  unsure (1)..(515): unsure at all Xaa locations
EFGSSDMDGFKLLEHVGLEMDLPVIMMSVDGETSKVMKGVQHGACDYLLKPIRMKELRNIWQHVFRKKIHEAKEFESFESIHLMRNGSELSDDGNLFAVEDVTSSKKRKDADSKHDDKECLDPSSTKKARVVWSVDLHQKFVKAVNQIGFDKVGPKKILDLMNVPWLTRENVASHLQKYRLYLSRIQKENDQRSSSSGMKHSDFPSKDMGSFGFQNSGGRXVIKQQNDVAIDNYNHSDGSLQLQNVETKSHEADPKGIVSQSTIAKKGRILTGNIADTNMRESLRVGLNQTFPPLESEGNHAVFDCSMPTPYSWTEVPHMQLKEEHKSLVYLEDSFNQLPLHGKQQQHIHVDQSQSVASISSAPSITEEEAAACIEPKPLFADYNNDYASSVSSTGNAVATFPIQPGSLIMNGQSSERISTTTSGLKTQEYNNLSSISDQEIYQRNLLGCEAASASLDEDLHFYWLEGECYNNMNFGLQNIGMSEYYDPGLISEAPIHLYDSADYSVMDQGLFIA

SEQ ID NO: 3157 - protein, 455 aa, Oryza sativa (indica cultivar-group)
MLAVSPAMCPDIEDRAAVAGDAGMEVVGMSSDDMDQFDFSVDDIDFGDFFLRLEDGDVLPDLEVDPAEIFTDFEAIATSGGEGVQDQEVPTVELLAPADDVGVLDPCGDVVVGKENAAFAGAGEEKGGCNQDDDAGEANADDGAAAVEAKSSSPSSSTSSSQEAESRHKSSSKSSHGKKKAKVDWTPELHRRFVQAVEQLGIDKAVPSRILEIMGIDSLTRHNIASHLQKYRSHRKHMIAREAEAASWTQRRQIYAAGGGAVAKRPESNAWTVPTIGFPPPPPPPPSPAPMQHFARPLHVWGHPTMDPSRVPVWPPRHLVPRGPAPPWVPPPPPSDPAFWHHPYMRGPAHVPTQGTPCMAMPMPAARFPAPPVPGVVPCPMYRPLTPPALTSKNQQDAQLQLQVQPSSESIDAAIGDVLSKPWLPLPLGLKPPSVDSVMGELQRQGVANVPPACG

SEQ ID NO: 3158 - protein, 122 aa, Triticum aestivum
  unsure (1)..(122): unsure at all Xaa locations
DTRRKMTVEGRVSGGGDGGGKDKFPVGMRVLAVDDDPTCLKVLENLLRRCVSDVTTTGQAATALRMLRENKDQFDLVISDVHMPDMDGFKLLELVGLEMDLPVIMLVLLGKMENLCSFVXGX

SEQ ID NO: 3159 - protein, 123 aa, Triticum aestivum
  unsure (1)..(123): unsure at all Xaa locations
VGRSSENMATMGGDRRQMMEDAADDKFPEGLRILVVDDDRVCLTVLEALLHRCKYQPTTVMDAKTALRMLMAGKQQFDLVITDVRMPDMDGFKLLELIRLQMDLPVIILQKRKPYQTSLRGEX

SEQ ID NO: 3160 - protein, 170 aa, Triticum aestivum
  unsure (1)..(170): unsure at all Xaa locations
AATPSFPASAGXTLPQDFPAGMRVLVVEDDPNDLEHLTQILERCGYKVTAKASPREALKEVEENGEGFHFDIIMTVVHGGEEGDGFDGFDLLGVRDRYPVIIFSADYSKEMVMRTINEGACDFLPKPMCYQEVRNIWFHVDMQRFSGLEVDDPDEGVEGPSNHENPPEIK

SEQ ID NO: 3161 - protein, 224 aa, Desulfitobacterium hafniense
MIKVLIIEDDPMVAELNRYYLEQIGGFQLVASAGTAADALKVLKKKKVDLILLDIFMPGINGLEFLTQLRKSEIESDVIIVSASTDSQSIRKALQHGAVDYLIKPFEYERFRDALNVYKKRELLMKNKQTLSQKDLDKQIFNMEEEETVDKKSDLPKGISGDTLKLVWDHILATQGTAFTTEEMALRVGISRVSMSKYIGFLREQEVVNTEISYGAVGDGSARI

SEQ ID NO: 3162 - protein, 645 aa, Deinococcus radiodurans
MRSAHSGEQTPVPPMSAAAPVVAPVPAPAPAAATSIRVPAARLEGLMDQLGELVTARARMTQLLSRLDELQGSMTASQERFQRTVRDFEERYLNPDMVREEGAAPTTRMGGLDLSQQFAELEFDTYNDLNILSRSITELSADFAEVRRRLSDTAAELSEENEQLGKLVRRLRLDVNQTSRVAFSQTTARLRRWAREQQADLTLQVEGEDVLIESGILQRISDPLLHLLTNAAYHGLASESAESRRAAGKNPQGTVWIRAAEQGNFLEVTVADDGQGLDYARIRERALERGLRSAQELEQLSSDELGRLILLPGFSTAREVGNVAGRGVGLDVVATAVRQLGGELLISSERGVGTAFTLRVPTTQRIMDVLHLDLGAGHHAALPVGSVRSLRDVPLGDLRRDDGQLWLDFGGQPVPVVDARPIWGHAPQDTDTEAHLAVVSSISGLLALRVHDFGDIEEVAVTAPSGLLAPLDYLAGMAVSGTGQVLAILDPAGVLRLSRRPATWLGQAQRQVQATGNQRLLLVDDSLSVRRLVGRMLERGGYQVVTASDGQEALDLLQQDADFGAVVTDLEMPRVNGYELLSAVRARPATAGLPMLVMTTRAGEKHQRLAFQLGADDYFTKPVNEALLLRRLGTLQQAQQAGVSA

SEQ ID NO: 3163 - protein, 129 aa, Anopheles gambiae str. PEST
EGILDKNMKILIVDDFSTMRRIIKNLLRDLGFNNTHEADDGNTALPMLKNGDFQFVVTDWNMPGMQGIDLLKAIRVDDKLKHLPVLMVTAEAKREQIIEAAQAGVNGYIVKPFTAATLKEKLDKIFERI

SEQ ID NO: 3164 - protein, 430 aa, Agrobacterium tumefaciens str. C58 (U. Washington)
MQDKILLIEDSVALSMLLRTRLSDETEAEVVHCASMAEADALMQANNFTLALTGLNLPDAPKGEILTLLSERKVPAIVFTATVDEEARKRYAEKKIIDYIVKDGHRTVDAVVKTVDRIMTNKRFSVLVVDDARTARSGLVEILERQNFKVSEAHSGNRALEILSQDPSIQLVITDYHMPDMDGYELTRRIRDSRSSEDLRVIGISSSTDRLLSASFLKAGASDFVYRPFVPEELQCRIDNNIETLKQLKRLRELAERDHLTGLPNRRSFFERTRALMDVINDNDESGAVAILDIDHFKKINDTLGHDAGDRALKKLAELLQGMCDEQRHIPARLGGEEFAVFLRGLDARAAYAFCEELREQVEKNGRQLSGSSLALTISLGVVEIEKGEPFDNQLNAADQLLYLAKANGRNRVYSDIMIQEGLQKIGLNG

SEQ ID NO: 3165 - protein, 445 aa, Agrobacterium tumefaciens str. C58 (Cereon)
MRKDWGDGPGGLGTAMQDKILLIEDSVALSMLLRTRLSDETEAEVVHCASMAEADALMQANNFTLALTGLNLPDAPKGEILTLLSERKVPAIVFTATVDEEARKRYAEKKIIDYIVKDGHRTVDAVVKTVDRIMTNKRFSVLVVDDARTARSGLVEILERQNFKVSEAHSGNRALEILSQDPSIQLVITDYHMPDMDGYELTRRIRDSRSSEDLRVIGISSSTDRLLSASFLKAGASDFVYRPFVPEELQCRIDNNIETLKQLKRLRELAERDHLTGLPNRRSFFERTRALMDVINDNDESGAVAILDIDHFKKINDTLGHDAGDRALKKLAELLQGMCDEQRHIPARLGGEEFAVFLRGLDARAAYAFCEELREQVEKNGRQLSGSSLALTISLGVVEIEKGEPFDNQLNAADQLLYLAKANGRNRVYSDIMIQEGLQKIGLNG

SEQ ID NO: 3166 - protein, 304 aa, Agrobacterium tumefaciens str. C58 (Cereon)
MLAKVLLMILKNEPDMFSSHTIGDRGRMNFLGITGMQYSGVPFTNNRILLAEDSNVFTQMVSMRLNEMLGVSVEVCRSFEELQACYEHSPEPVTLAISNINLPGAEKGEALEYLIDLSIPTIVFTSTFHEATRETLIAKDVVDYILKDNIFAVDMLTESVCRFLTNHRHHVLIVDDSPTARALLSSRLKRYNFRVSLADSGAKALEILRANPDIGLVVTDYNMPDIDGFELTRRIRTVRGSHELRIIGVSSSTNRLLSARFLKAGGNDFMLRPFIDEEFYCRVNQNLDTLVQIQLAKAGIRPAA

SEQ ID NO: 3167 - protein, 127 aa, Shewanella oneidensis MR-1
MDKNMKILIVDDFSTMRRIIKNLLRDLGFNNTQEADDGSTALPMLQKGDFDFVVTDWNMPGMQGIDLLKAIRADDSLKHLPVLMVTAEAKREQIIAAAQAGVNGYVVKPFTAATLKEKLDKIFERLA

SEQ ID NO: 3168 - protein, 126 aa, Vibrio parahaemolyticus RIMD 2210633
MNKNMKILIVDDFSTMRRIVKNLLRDLGFNNTQEADDGLTALPMLKKGDFDFVVTDWNMPGMQGIDLLKHIRADAELKHLPVLMITAEAKREQIIEAAQAGVNGYIVKPFTAATLKEKLEKIFERL

SEQ ID NO: 3169 - protein, 225 aa, Arabidopsis thaliana
MVMETESKFHVLAVDDSLFDRKMIERLLQKSSCQVTTVDSGSKALEFLGLRVDDNDPNALSTSPQIHQEVEINLIITDYCMPGMTGYDLLKKVKESAAFRSIPVVIMSSENVPARISRCLEEGAEEFFLKPVKLADLTKLKPHMMKTKLKKESEKPVAIEEIVVSKPEIEEEEEESSVIEILPLHQEIESEQLEPMLSSNKRKAMEEVVSTDRSRPKYNDITTSV

SEQ ID NO: 3170 - protein, 232 aa, Oryza sativa; identical to SEQ ID NO: 3075

SEQ ID NO: 3171 - protein, 234 aa, Triticum aestivum
  unsure (1)..(234): unsure at all Xaa locations
MPSAHTSCLXTLPSLLSPHSILLHHTKHTLSLSSPMAVAIAEAPFHVLAVDDSVLDRKLIERLLKTSSFQVTTVDSGTKALEFLGLHGEDASISSVHADQLDVEVNVNLIITDYCMPGMTGYDLLKKIKESSSFRDIPVVIMSSENIPSRINRCLEEGANEFFLKPVRLSDMSKLKPHIMKSRCKEHCHQDEDLLSNSETNPTNNSSSSSDNIRKRKAADDEILTKTSRPNHNC

SEQ ID NO: 3172 - protein, 152 aa, Triticum aestivum
  unsure (1)..(152): unsure at all Xaa locations
XVNLIITDYCMPGMTGYDLTRPVKGSSSLKDIPVVIMSSENVPARISRCLEDGAEEFFLKPVKLADMKKLKSHLVRRKQQQPNKPQAEQQLPKKAEQAPAEPTEEVAAKVSSTGMTSDCGGGSRKRKAVMMEQDXXTSASLSSGGSGLAVET

SEQ ID NO: 3173 - protein, 104 aa, Triticum aestivum
  unsure (1)..(104): unsure at all Xaa locations
XVNLIITDYCMPGMTGYDLLRRVKGSSSLKDIPVVIMSSENVPARISRCLEDGAEEFFLKPVKLADMKKLKSHLVRRKQPQLQPPQPQEKPPQQQKAELAPTEX

SEQ ID NO: 3174 - protein, 223 aa, Triticum aestivum
  unsure (1)..(223): unsure at all Xaa locations
MPSAHTSCLXTLPSLLSPHSILLHHTKHTFSLSSPMAVAIAEAPFHVLAVDDSVLDRKLIERLLKTSSFQVTTVDSGTKALEFLGLHDEDASISSVHADQLDVEVNVNLIITDYCMPGMTGYDXLKKIKESSSFRDIXRCLEEGANEFFLKPVRLSDMSKLEPYIMKSRCNQHCHQDKPLLSNSARNPTWSTSHRXXNHKIRGGRLTKFLPQTMHTDPHFLVE

SEQ ID NO: 3175 - protein, 377 aa, Desulfitobacterium hafniense
ERGTRIAFTLPLAAKDSCSAPASVRPPEKYPMDEPWGRTELPQGGTGKFTLLAVDDDSANLQVLARLFANEPYNVLWATNGLEALELLKSRSDIDLVLLDVMMPRMSGYEVCREIRRQFSLFELPVILLTVRHSPGDIAAGFKAGANDFMIKPFDALEVRARTETLLQLKQSVAAALKAEMDFLQSQIKPHFLFNALNAIITLCGTDGLRAEQLITHLSYYLRRCFEPRTDSFLLLQDELRLVEAYVEIEKARFEDRLTVLYEVDPGALLKRILPLTIQPLVENAIRHGVMKREEGGTIRLTIQLAGDRVHVEVWDNGVGIREEQLKNLWLSDNSSSERRGVGLANIQRRLKHFCGEELHVTSREGEWTKVQFCFRG

SEQ ID NO: 3176 - protein, 924 aa, Synechocystis sp. PCC 6803
MFDAATLAAITAEARQAFLEEDAPECLAQLTVGFQSLERVLGPAGDSQQRQKLIQDMGRAAHSLKGGAGMSALTPLQTLCHRLEDLFEALEQGRVEDKSMAVGLIAMTIEETQAMVELANSGRLQDTDEPPELALALGEFLETCQPQPSQEEAIAGDVSQFVRTSLTVELEACLERVERRLERGGTATELRESFSLLLEECTLLGQALSCDWLEEAGNRWRGELVRPQVDLLTLLPTAIAELRSLREQFLAGELTPPAPEIVAEPDPEPLPEVKPVTAVIAPPVPGVPIPAVVTAKASPAPSTRQTLRIPLDRLNKLSNTVSELLINQERLLEYDKQLRQASRNLKRRGQQLIPMREQVESLYDELSFSDQTKISPSNGGGNQNGDSQSSLGIAGLVDFDALEMDSYTAVHGILQRFQELMVQVQEIQEDVDLVERDLQETLIQMSQSLHQLDSELTQSRLVPFRGLAQSFAQPLEKLGDRHKKPVQFVIEGENTLVEVAILDQLRTPLTHLIRNAFDHGLEFVPERQAQGKLPEGTITLSASTANNQVLITVSDDGRGIDPEKISRKAMELGWLTPEQLGTIGEAQMLDFLFQPGFSTAAEVSNLSGRGLGLDIVKQMIESLRGTLTVETKLGQGSRFLIRIPLSLNIVPLLLVRYQQRLLAFPSESVLRILPLDDYPIKNGRVEWQSQIMEACPLDEVLPQIYPQGFSPSPGLPHKVGLMVNLGDRSALLTVEQIVDERTLVVKALDAITPIPSYVAGCTVLGTGEVVPVLIPNNFAVLWRTEPTLPQDAAGSAGGQTTILVIDDSVTVRRTLQRVLGGSFRLIQCRDGKEAWDLLNRQNQGIDLALCDIEMPNMDGFSLLQLVRAHRVWHSLTVVMLTSRENPLHRNRAKALGADGYLTKPFQPNQLLSTIDQFLAESAQR

SEQ ID NO: 3177 - protein, 380 aa, Bacillus anthracis str. A2012
MSILIVDDNPVNIFVIKKILKQAGYQDLVSLNSAQELFEYIHFGKDSSRHNEIDLILLDIMMPEIDGLEVCRRLQKEEKFKDIPIIFVTALEDANKLAEALDIGAMDYITKPINKVELLARMRVALCLKSELNWHKEQEENLRNELDLATQVQRNLLSSPLREEHIKIEASYLPSFKLAGDMYYWYKIDENRYGIILLDVMGHGVSASLVCMFISSVLRETIKCLIDPELVMKDLNKYMTLLHNENDNIPYYFTAIYLVVNTEDRTIEYVNAGHPSGYVLVDETNVVELNRGSCAVGFFDEIKVEKTVIPFEKNAQIVLFTDGVLEAIANDEFEAEEKLRTFTERKWGELEEEIEGFYKEEQKQAQSDDMCLIMIQTNAK

SEQ ID NO: 3178 - protein, 123 aa, Pseudomonas fluorescens PfO-1
MKILIVDDFSTMRRIIKNLLRDLGFTNTVEADDGTTAIPVLNSGSIDFLVTDWNMPGMTGIDLLRHVRADEKLKHLPVLMVTAEAKREQIIEAAQAGVNGYVVKPFTAQALKEKIEKIFERIG

SEQ ID NO: 3179 - protein, 323 aa, Vibrio parahaemolyticus RIMD 2210633
MKILICDDSAVARKLIARTIVQDTSLHLIEAQDGNEALKILAEQNIDVLFLDLTMPIMDGFEVLESLPVSHYPTQIVIVSGDVQQEAKQRCLELGAMDFIAKPLSEEQVIPLYERLGLHYAQRTSMELNSAQSQEELSSLAKFREIANIALGKGAAIMADHLHEFIQLPVPHVGPLSYGELHMTLVDVIGRDSSVAVSQRFVGGGIHGEALVCLRGKDINQIGERLGYLLEFTPHNEIILNVSNLLVSSFLTSLGNQLDKQFSLRQPGIVDTITPYNEEQGESGELFTIEYTYMAEALDFECEVLFLIDKPSVEIIYEIMELI

SEQ ID NO: 3180 - protein, 124 aa, Pseudomonas fluorescens
MKILIVDDFSTMRRIIKNLLRDLGFTNTVEADDGLTAIPILNSGSIDFLVTDWNMPGMTGIDLLRHVRADEKLRSLPVLMVTAEAKREQIIEAAQAGVNGYVVKPFTALALKEKIEKIFERIHG

SEQ ID NO: 3181 - protein, 148 aa, Mesorhizobium loti
MSQAGKPVTIVMIEDDEGHARLIEKNIRRAGVNNDVVAFTNGSSALAYLLGPDGSGDASVGRHLLVLLDLNLPDMTGLDILQQIKANQHLKRIPVVVLTTTDDSREIQRCYDLGANVYITKPVNYEGFANAIRQLGLLFTVIQVPETA

SEQ ID NO: 3182 - protein, 131 aa, Oryza sativa
  unsure (1)..(131): unsure at all Xaa locations
LATRISASLLSLFALPSSSPLVVVVVVGEGEMEGGRGVTRVLLVDDSPVDRRVVQLLLXXSSACAGSFHVIAVDSAKKAMEFLGLKEEGKEQXXIDMVLTDYCMPEMTGYELLKAIKALSPLKPIPVIVMX

SEQ ID NO: 3183 - protein, 277 aa, Triticum aestivum
  unsure (1)..(277): unsure at all Xaa locations
FSLASFLPLVLVGGPPPVAAGVVACVVERRGEGDGRRRXADGVTRVLLVDDSPVDRKVVELVLGSNTFAGSFHVVAVDSAKKAMEFLGLKDGKEQAVDMVLTDYCMPEMTGYDLLKAIKAMSPLKPIPVIVMSSENEPQRISRCLKAGAEDYIVKPLQSKDVPRLRSCSNVKPKDPPCSTVSKSSDHIAAVDGKSSLRRRAHLTDIAMVLHSSSAGLSHYFPFLFKFILLVYAILCVGELLHRWSNGCFLSYLRXWCRGPVTCCSSARSSSCVVAYE

SEQ ID NO: 3184 - protein, 159 aa, Triticum aestivum
  unsure (1)..(159): unsure at all Xaa locations
FSLASFLPLVLVGGPPPVAAGVVACVVERRGEGDGRRRXADGVTRVLLVDDSPVDRKVVELVLGSNTFAGSFHVVAVDSAKKAMEFLGLKDGKEQAVDMVLTDYCMPEMTGYDLLKAIKVQISLHTCPFFXIHICDVKEDVQCSQNLITNFHGHFQAMX

SEQ ID NO: 3185 - protein, 708 aa, Chloroflexus aurantiacus
SVITVWNRSQSKSGARPAGVKSFEQIAHHIEHIFAALRQNQLTLTADICDVIYQALDVIGALMEQAVPGQIDDQDALDDLLAHLMAIGQNMRDGDATSLSPSSFTPEDHTRQSAPSLAAETSVRVDVAVLDNLMSEMGELLTSTLRTRQLARDLQELARLPERWQRAWRRTAPFLRHGSSLHANGQLIPQSQQQIVIDMLRQANDVISALGTRLSQLAYQARDNHDLLADISTRMQAQVQRTRMSPLSRIVGSLRLHVRDLARSAGKEVTFVVEDSGAEADRQVLDQVYEICLHLLRNAVDHGIEPPEVRKARGKPPTGLIRLTANASSDRLNLVISDDGAGIDREDIKRHALQLGLLSQHDSEHADDAMVLDLIFTPGFSTKSHVSELSGRGVGLDVVRTTVERMGGSVTVMSVPGQDTTFTLALPLTLMRTRGLLMYVNNQVFALPVDSLRRVVQVNRTQLHTLEGRPVVLVDGRPLQLISMARLIGFSSETVIDFPGPKPALLIGSNERQIACIVDSIGEEIDLVVHRLPPPLQRVRFVSGAAILADGSVAPILDAVDLLRAALTVEHAVMLPTANPTPAHSPTILVVDDSITTRTLEKNILEAAGYRVVLATDGQEALERLHNLQNQGGCQLVLSDIDMPRLNGFDLTRQIRTDPAFRHLPVVLVTSLDSPADRERGLAAGADAYIVKRAFDQQALLETIARLL

SEQ ID NO: 3186 - protein, 234 aa, Arabidopsis thaliana
MGMAAESQFHVLAVDDSLFDRKLIERLLQKSSCQVTTVDSGSKALEFLGLRQSTDSNDPNAFSKAPVNHQVVEVNLIITDYCMPGMTGYDLLKKVKESSAFRDIPVVIMSSENVPARISRCLEEGAEEFFLKPVRLADLNKLKPHMMKTKLKNQKLEEIETTSKVENGVPTAVADPEIKDSTNIEIEILPLQQDLLLVQQEEQTLSINNKRKSVEEGISTDRARPRFDGIATAV

SEQ ID NO: 3187 - protein, 238 aa, Glycine max
MGMAAAESQFHVLAVDDSIIDRKLIERLLRTSSYQVTTVDSGSKALEFLGLRENDESNPSIPSVCPNNHQPQEVEVNLVITDYCMPGMTGYDLLKKINESSSLRNIPVVIMSSENVPSRINRCLEEGAEEFFLKPVRLSDLNKLKPHMKKTKFKDQKQETVERFEDSEVQQQQSQQQIIIQNEHHQAPKLQVLQPDIEQQQQILQQANNNNKRKTMEQGLSPETDRTRPRYSGIATVV

SEQ ID NO: 3188 - protein, 210 aa, Glycine max
  unsure (1)..(210): unsure at all Xaa locations
XGMAAEAQFHVLAVDDSLIDRMLIERLLKTSSFHVTAVDSGSKALKFLGLVEEKRNEEPPPCIALXXSHQDVDINLIITDYCMPGMTGYDLLRKIKESKSLKNIPVVIMSSENVPSRINRCLEEGAEEFFLKPVQQADVNKLRPHLMKSRAKEEQDQPFNNKRKDMEEIHSPNKTRINNNHAKGIKSTSHLCKXPEKEFHSILVIKYHFI

SEQ ID NO: 3189 - protein, 249 aa, Oryza sativa
  unsure (1)..(249): unsure at all Xaa locations
FGVTCSIIKEQAPQSLSCQAHTPSASSLLPFLLSPCSLFLLFFQSSSMAVAIEAPFHVLAVDDSLPDRKLIERLLKTSSFQVTTVDSGSKALEFLGLHDHEDSPISTXXSDQQEVGVNLIITDYCMPGMTGYDLLKKIKESSYLRDIPVVIMSSDNIPSRINRCLEEGADEFFLKPVRLSDMSKLKPHILKSRCKEHYQQEQHLQSNSESNNSSNPTSENSSSSTSTNSHKRKAVDEEILPHTIRPRHS

SEQ ID NO: 3190 - protein, 243 aa, Oryza sativa
  unsure (1)..(243): unsure at all Xaa locations
QSLSCQAHTPSASSLLPFLLSPCSLFLLVFQSSSMAVAIEAPFHVLAVDDSLPDRKLIERLLKTSSFQVTTVDSGSKALEFLGLHDHEDSPISTQSDQQVRREVGVNLIITDYCMPGMTGYDLLKKIKESSYLRDIPVVIMSSDNIPSRINRCLEEGADEVFLKPVXRLSDMSKLKPHILKSRCTEHYQREQHLQSHSESYTSSYPTGENSSSSTSTNSHNRKAGEDSLSDRKLIERLLKTSS

SEQ ID NO: 3191 - protein, 515 aa, Rhodobacter sphaeroides
MPGQRGPTCREADPEDAPVNARSLPLAETGAHGASAPVRHVLIVDDSRAQRRLVALSLARWGYRVSEAATASEALALCQGGDVDIVLSDWMMPGMSGLELCRRIRALPGEAYCYFILLTSRSGTGEVVDGLDCGADDYLVKPAAPDELRARLRAGERVLSMQAELVDKNQLLERAFSELRTIYESLDRDLIEARRLQQSFARDRSRRFGRSTVTLLLRPSGHVGGDLAGSLDLGTGRIALYSIDVSGHGVASALMTARLAGLLSGLSTDGGVARSDGACRQCAGHDSWPPEILAARLNRMMIADLGVEQYFTMAYAEIDLRSGALALVQAGHPHPVVLRAGGRVELLGQGRTARGSPPRRHLRAVGDAASAGRPALSAVGRGDGMPGSLGARAGRGRAGAPACRTCGPRIRGTDGGSRLGAPRADGRRRLPGRCLGRALRLPAVRSARPRPEAVSAGLPPEAPGRPHCRAAQAPPRPAARRRDGPVRWAGQGGGSDARDRPCRASRPRDRIPACR

SEQ ID NO: 3192 - protein, 121 aa, Synechocystis sp. PCC 6803
MKTVLVVEDTKSDQLLVQGLLKSMGTEAVICNNADEALEWLNKNTVPDLIMLDIVMPDISGYDLCRKIRGELALEDVPIVFCSTKNEDYDRFWALRQGGNAYLIKPYSPIELMKTVKPYIS

SEQ ID NO: 3193 - protein, 267 aa, Thermoanaerobacter tengcongensis
MEKGKETKDILVVDDSVLIRLMVKDILGGEGYNVVAAATSEEAVRKIKSRKELFDLIIVDINLPDQNGFEFIRNLKSEEKYRHIPVIILSIDATVPSIKRAVEAGAVDYLVKPFKAEELVKRVVKLVGSVKKEDRYPELKDLLKKEVNRARRSNTNLSLILAHCEGKIAGEISKIAGKIRSKLRDIDAVFEINENTLALVLPVTGREGAEVVVKKIQGELRGSWRYAISIYPDNGKDEEELIGFAKESLMKEESNSSQEDDKEKEEK

SEQ ID NO: 3194 - protein, 125 aa, Burkholderia fungorum
MIRHILAIDDSASMRQILAATLTTAGYEVTLAADGNEGLENALAMSFDLVLTDQYMPGKTGLDLIAALRNNPAYQATPILVLTTESGEPFKEAARAAGATGWIEKPLDPDMLTELVAALAEPDHA

SEQ ID NO: 3195 - protein, 160 aa, Pseudomonas fluorescens PfO-1
MPGDRIENVENAMSDHDILSDAEREALSAVMLEPDLPPQRVLIVDDDKDARELLSEILALDGIRCLTAASGETALKMLAEKPSIGLVITDLRMGNVDGLELIRQVRESVRAALPIIIVSGDADVKDAIAAMHLSVVDFLLKPIDTAKLLGLVRHELGIEP

SEQ ID NO: 3196 - protein, 120 aa, Desulfovibrio desulfuricans G20
MAPTIMTVDDSASVRQMVSFTLRNEGYEVIEASDGKDALAKIRPDVKMVITDLNMPNMDGIELIRNIRAKSGFKFIPIIMLTTESQAAKKQDGKAAGATGWIVKPFKPEQLLAVVKKVLR

SEQ ID NO: 3197 - protein, 292 aa, Desulfovibrio desulfuricans G20
MVEGVRGRFFRVLHIPQGFGMMNDMEALYAAQTVLIIEDSPVQSKIIRNQIMALSQFDTLAAYTLEEARALLTTHKERIFVAVIDLNLPDAPNGEGVDLCLDFGVPTVVLTATFNEDIRRRFIERNVADFFFKGTIQDMDPMVRSLERLFKNQFVKALVVEDSRMSRAHLRHLLEVQRFQVLEAADGLEAVDRLAENPDIGLIITDYNMPNMDGFELVKTVRARYKVDRIAIVGVSAAGSGSLTAQFLKNGANDFLTKPFEVEEFYWRVNQTVSVLEVMKDLRTCQDTLPEG

SEQ ID NO: 3198 - protein, 124 aa, Pseudomonas aeruginosa PAO1
MKILIVDDFSTMRRIIKNLLRDLGFTNTAEADDGTTALPMLHSGNFDFLVTDWNMPGMTGIDLLRAVRADERLKHLPVLMVTAEAKRDQIIEAAQAGVNGYVVKPFTAQVLKEKIEKIFERVNG

SEQ ID NO: 3199 - protein, 121 aa, Bacteroides thetaiotaomicron VPI-5482
MKKKILLVDDKATIGKVASIYLGKDYDVMYLENPIKAIDWLNEGNVPDLIISDIRMPLMRGDEFLRYMKANELFKSIPIVMLSSEESTTERIKLLEEGAEDYILKPFNPLELKIRIKKIID

SEQ ID NO: 3200 - protein, 137 aa, Ralstonia solanacearum
MSEKHILVVDDSTSIRRMIATCLRACGFAVTEATDGAAALEAVQRQADGSHHLVITDQVMPAMDGLTLIRALRTLPAYADTPILMLTTEADSTIRDQARAAGATGFLPKPFDPDGLTDSVMQLLEWHAQTHGSASTH

SEQ ID NO: 3201 - protein, 135 aa, Glycine max
  unsure (1)..(135): unsure at all Xaa locations
MTSFKGLVGEGSTALPHVLAVDDSSVDRAVISGILRSSKFRVTAVDSGKRALELLGSETNVSMIITDYWMPEMTGYELLKKVKGSSKLREIPVVIMSSENVPTRINRCLEEGAEDFLLKXVQPSDVSRLCSRVLR

SEQ ID NO: 3202 - protein, 206 aa, Oryza sativa (japonica cultivar-group)
MRVPAAVTGGCGCGVDGGGGCCRGGGKLADWEEGKDDEMKSVVVKGWTRMAQVVPLHDNASAEDDDDDEEDDDEDDDDDDDEDDEEEAAPPYVMAVDDSSVDRAVITALLRRSKYRDSGKRALEILGSEPNVSMIITDYWMPEMTGYDLLKKIKESSELKQIPVVIMSSENVPTRISRCLEEGAEDFLLKPVRPADISRITSRMLQ

SEQ ID NO: 3203 - protein, 248 aa, Oryza sativa
  unsure (1)..(248): unsure at all Xaa locations
VDQWRQRRXAPAAAKVVVATSPRAGGGGGGGGDRKVVPVVVAAAAGDEAQSEMHVLAVDDNSVDRAVIAKILRSSKYRVTTVESATRAFELLCLGLVPNVNMIITDYWMPGMTGYELLKRVKESSQLKEIPVVIMSSENVPNRISRCLEEGAEDFLLKPTEIERTGDSDSLREKPNQTHRSRVRGELMAEAVCRYETATGARNTARVGRVACVRECVAARVGTRRDRIPCVLGVLNYGVRGSGSSDVN

SEQ ID NO: 3204 - protein, 204 aa, Triticum aestivum
MHQQVNPSDEFFAVPYFCSCCSGEFDLLMAAAAPTQAPAMTLPAAMAAKVAPSPKPAPAGDRKVVPVMTDADEVVVQVQVQAELHVLAVDDSVVDRAVIAKILRSSKYRVTTVDSATRALELLGLGLITDVNMIITDYWMPGMTGYELLKRVKESSELREIPVVIMSSENVPNRITRCLEEGAEDFLLKPVRPSDVSRLCNRIR

SEQ ID NO: 3205 - protein, 618 aa, Arabidopsis thaliana
MDLNGECKGGDGFIDRSRVRILLCDNDSTSLGEVFTLLSECSYQVTAVKSARQVIDALNAEGPDIDIILAEIDLPMAKGMKMLRYITRDKDLRRIPVIMMSRQDEVPVVVKCLKLGAADYLVKPLRTNELLNLWTHMWRRRRMLGLAEKNMLSYDFDLVGSDQSDPNTNSTNLFSDDTDDRSLRSTNPQRGNLSHQENEWSVATAPVHARDGGLGADGTATSSLAVTAIEPPLDHLAGSHHEPMKRNSNPAQFSSAPKKSRLKIGESSAFFTYVKSTVLRTNGQDPPLVDGNGSLHLHRGLAEKFQVVASEGINNTKQARRATPKSTVLRTNGQDPPLVNGNGSHHLHRGAAEKFQVVASEGINNTKQAHRSRGTEQYHSQGETLQNGASYPHSLERSRTLPTSMESHGRNYQEGNMNIPQVAMNRSKDSSQVDGSGFSAPNAYPYYMHGVMNQVMMQSAAMMPQYGHQIPHCQPNHPNGMTGYPYYHHPMNTSLQHSQMSLQNGQMSMVHHSWSPAGNPPSNEVRVNKLDRREEALLKFRRKRNQRCFDKKIRYVNRKRLAERRPRVKGQFVRKMNGVNVDLNGQPDSADYDDEEEEEEEEEEENRDSSPQDDALGT

SEQ ID NO: 3206 - protein, 618 aa, Arabidopsis thaliana
MDLNGECKGGDGFIDRSRVRILLCDNDSTSLGEVFTLLSECSYQVTAVKSARQVIDALNAEGPDIDIILAEIDLPMAKGMKMLRYITRDKDLRRIPVIMMSRQDEVPVVVKCLKLGAADYLVKPLLTNELLNLWTHMWRRRRMLGLAEKNMLSYDFDLVGSDQSDPNTNSTNLFSDDTDDRSLRSTNPQRGNLSHQENEWSVATAPVHARDGGLGADGTATSSLAVTAIEPPLDHLAGSHHEPMKRNSNPAQFSSAPKKSRLKIGESSAFFTYVKSTVLRTNGQDPPLVDGNGSLHLHRGLAEKFQVVASEGINNTKQARRATPKSTVLRTNGQDPPLVNGNGSHHLHRGAAEKFQVVASEGINNTKQAHRSRGTEQYHSQGETLQNGASYPHSLERSRTLPTSMESHGRNYQEGNMNIPQVAMNRSKDSSQVDGSGFSAPNAYPYYMHGVMNQVMMQSAAMMPQYGHQIPHCQPNHPNGMTGYPYYHHPMNTSLQHSQMSLQNGQMSMVHHSWSPAGNPPSNEVRVNKLDRREEALLKFRRKRNQRCFDKKIRYVNRKRLAERRPRVKGQFVRKMNGVNVDLNGQPDSADYDDEEEEEEEEEEENRDSSPQDDALGT

SEQ ID NO: 3207 - protein, 121 aa, Glycine max
  unsure (1)..(121): unsure at all Xaa locations
XMLKYIARDKEFRRIPVIMMPAQDEVSIVVKCLRLGAADYLVKPLRTNELLNLWTHMWRRRRMLGLVEKNILNYDFDLVVSDPSDANTXSTTLFSDDTDDKSKRSTNPEAGISVQQEQEST

SEQ ID NO: 3208 - protein, 514 aa, Oryza sativa
  unsure (1)..(514): unsure at all Xaa locations
XVRILLCDSDPSSSREVLRLLCNCSYQVTCAKSPRQVINVLNCEAGEIDIILAEVDLPVSKCFKARGLVPRSARGRHIPIIMMSNRDEVSVVVKCLRLGAAEYLVKPLRMNELLNLWTHVWRRRRMLGLSEKNFFNDNFELALSEPSDANTNSTTLLSDDTDDKPKENINQETSTSNQHEYESNPSDAEPKQKGTPEGLLVSTEGGDQASSPGVMFSRPIKTNLRVAESSAFLAYVKSSTPTTSSFDSELQKGGNRLDYHRGNFSSTTDRSDTGTDVNIRDKEAFEMPVQYPVVCFSSSNLHLERSNEGQNDASGTPPVYHFPFYYPGMMDHGMTHPPVQNFQGNINNAQVHTPQTLLPQYNVYPQXXHGVXXMMPPFQYNPAGMSIQSNQLPTQNMWPQASSTPMPEETCSRSERRAAALAKFRLKRKERCFDKKVRYVNRKKLAETRPRVRGQFVRQANYTDITSTGDDISEDEDDDPSSREVEMVSSPEXFERFSYMXNRVQMITAHFATH

SEQ ID NO: 3209 - protein, 377 aa, Oryza sativa
  unsure (1)..(377): unsure at all Xaa locations
MGLSCSQLLPIGLDRELFLVSSLKGNILVAVTLKIFYSSAQPPPYRHAAHQGLYYVKTTTTVARLPGVRSLAPSSRAWRLPYRTATAPPRPPPLIASAIKIFPCQSRRRQLLLAAVLFVLIRTRRQLVTRGGQQFVDRSKVRILLCDSDPSSSREVLRLLCNCSYQVTCAKSPRQVINVLNCEAGEIDIILAEVDLPVSKCFKMLKYIARNKELRHIPIIMMSNRDEVSVVVKCLRLGAAEYLVKPLRMNELLNLWTHVWRRRRMLGLSEKNFFNDNFELALSEPSDANTNSTTLLSDDTDDKPKENINQETSTSNQHEYESNPSDAEPKQKGTPEGLPLVSTVHCSASSIPHRRXHLLQSLPKPRATPPPPASLIX

SEQ ID NO: 3210 - protein, 198 aa, Oryza sativa
  unsure (1)..(198): unsure at all Xaa locations
MVGAGEGDRVGGGAAVGGGQQFVDRSKVRILLCDSDPSSSREVLRLLCNCSYQVTCAKSPRQVINVLNCEAGEIDIILAEVDLPVSKCFKMLKYIARNKELRHIPIIMMSNRDEVSVVVKCLRLGAAEYLVKPLRMNELLNLWTHVWRRRRMLGLSEKNFFNDNFELALSEPSSPAIASATIITEAKSDAATTGITDX

SEQ ID NO: 3211 - protein, 267 aa, Triticum aestivum
  unsure (1)..(267): unsure at all Xaa locations
MVGAGEGVRAGGSGAGVGAGAGAGQPFVDRSKVRILLCDSDPDSSQDVLRLLCNCSYQVTCAKSPRQVINVLNCEGAEIDIILAEVDLPVSKCFKLLKYIGRNKELRHIPIIMMSNRDEVSVVVKCLRLGAAEYLVKPLRMNEXLLNLWTHVLRRKQMLCFGPEKLLDXQFRLVRVEPSDANANSTTLLSDETDDKPKGNRNHETNISSQHEYESPAMDPPKHMTDKLENLPSIAEDDDKASSPGGMFSRPIKTNLRIAESSAFLAY

SEQ ID NO: 3212 - protein, 251 aa, Triticum aestivum
  unsure (1)..(251): unsure at all Xaa locations
YRAQPTGGQPSSSVLRNSRGPELTGGLQRPHAWCRKHDASYHATFAQPPRPATSVLYCCGACXVIILPEVDPPVSLGFKVLEDVGSNGGLRHSVGVRAAERDAVSVGGKCLRLRAEEYLVNSXLRMNELLNLWTHVWRRKRMLGLAEKNFFIDNLELVLSEPSDANTNSTTLLSDETDDKPKGNRNHETNISSQHEYESPAMDPPKHMTDKLENLPSIAEDDDKASSPGGMFSRPIKTNLRIAESSAFLAY

SEQ ID NO: 3213 - protein, 168 aa, Triticum aestivum
  unsure (1)..(168): unsure at all Xaa locations
XFSSKFPRYHKHCSSSYTXPTMLHQSNVYHQSHGASMQSYQYSPAGMNVHSSHLSTRKCXWSSVSSTPIPEERHSRSGRRAAALAKFRQKRKDRCFDKKVRYVNRKKVAETRPRVRGQFVRQASNTDIISTGDDISEYEDDDPSSRDVELVSSPEXLKGHIICGVVCG

SEQ ID NO: 3214 - protein, 117 aa, Triticum aestivum
  unsure (1)..(117): unsure at all Xaa locations
XSFQFNPAGMNMHSSHLPTQMCGHRHQAHQXAXGNMQSLXKGAAALAKFRQKRKERCFDKKVRYVNRKKLAETRAXVRGQFVRQASNTDITSTGDYISEDEDDDPSSREVDIVSSPE

SEQ ID NO: 3215 - protein, 91 aa, Triticum aestivum
  unsure (1)..(91): unsure at all Xaa locations
LEVYKCFRMLKYIVRNNELRHISINMMSNIDDVSVGLKCLRHGAAVXLVKPLRMTHLLELWTHVWPVRQQLGXVHKDFVNVNRDLGLSVTN

SEQ ID NO: 3216 - protein, 329 aa, Oryza sativa
MAASAAAAAAVSQALRDRDVLDAVGTSAAALSLAGSSFIVLCYLLFRELRKFSFKLVYFLAVSDMFCSLFTIMGGPSNAFYCFAHDYSAHFFCVASFLWTTTIAFTLHRTVVKHKTDVEEFGSIFHLYVWGTSLATTVLRSIGSDYGRPGTWCWIQQGSMGKALHLVTFYLPLWGAILYNGYTYFQVNRMINNATRMAVGISDRSIQSDVRADKKAFNRWGYYPLILIGSWAFATINRVHDFANPGHKIFWLSILDVGFAGLMGLFNSIAYGLNSSVRRAIAERLDMFLFPELSRYLPERFKRSLPTLTRFKSQQENELTSLIVDASNT

SEQ ID NO: 3217 - protein, 159 aa, Oryza sativa
YSAHFFCVASFLWTTTIAFTLHRTVVKHKTDVEEFGSIFHLYVWGTSLATTVLRSIGSDYGRPGTWCWIQQGSMGKALHLVTFYLPLWGAILYNGYTYFQVNRMINNATRMAVGISDRSIQSDVRADKKAFNRWGYYPLILIGSWAFATINRVHDFANP

SEQ ID NO: 3218 - protein, 485 aa, Arabidopsis thaliana
MTLSIVSFPICGRFTLIWFLTALVSVSCNPGVFNVKYRYPRLQGSLTALKEHDDRRQLTILAGIDLPLGGTGRPDIPGLYYAKIGIGTPAKSYYVQVDTGSDIMWVNCIQCKQCPRRSTLGIELTLYNIDESDSGKLVSCDDDFCYQISGGPLSGCKANMSCPYLEIYGDGSSTAGYFVKDVVQYDSVAGDLKTQTANGSVIFGCGARQSGDLDSSNEEALDGILGFGKANSSMISQLASSGRVKKIFAHCLDGRNGGGIFAIGRVVQPKVNMTPLVPNQPHYNVNMTAVQVGQEFLTIPADLFQPGDRKGAIIDSGTTLAYLPEIIYEPLVKKITSQEPALKVHIVDKDYKCFQYSGRVDEGFPNVTFHFENSVFLRVYPHDYLFPHEGMWCIGWQNSAMQSRDRRNMTLLGDLVLSNKLVLYDLENQLIGWTEYNCSSSIKVKDEGTGTVHLVGSHFISSALPLDTSMCLLFSLLLLMTLFLL

SEQ ID NO: 3219 - protein, 488 aa, Arabidopsis thaliana
MDLRRRQWFLSAILLSAALLIDPQFSTAATASENLVFEVRSKFAGKRVKDLGALRAHDVHRHSRLLSAIDIPLGGDSQPESIGLYFAKIGLGTPSRDFHVQVDTGSDILWVNCAGCIRCPRKSDLVELTPYDVDASSTAKSVSCSDNFCSYVNQRSECHSGSTCQYVIMYGDGSSTNGYLVKDVVHLDLVTGNRQTGSTNGTIIFGCGSKQSGQLGESQAAVDGIMGFGQSNSSFISQLASQGKVKRSFAHCLDNNNGGGIFAIGEVVSPKVKTTPMLSKSAHYSVNLNAIEVGNSVLELSSNAFDSGDDKGVIIDSGTTLVYLPDAVYNPLLNEILASHPELTLHTVQESFTCFHYTDKLDRFPTVTFQFDKSVSLAVYPREYLFQVREDTWCFGWQNGGLQTKGGASLTILGDMALSNKLVVYDIENQVIGWTNHNCSGGIQVKDEESGAIYTVGAHNLSWSSSLAITKLLTLVSLLIPFFCNVAL

SEQ ID NO: 3220 - protein, 478 aa, Arabidopsis thaliana
MDPSRISRIVAVVFVLVIQVVSGNFVFNVTHKFAGKEKQLSELKSHDSFRHARMLANIDLPLGGDSRADSIGLYFTKIKLGSPPKEYYVQVDTGSDILWVNCAPCPKCPVKTDLGIPLSLYDSKTSSTSKNVGCEDDFCSFIMQSETCGAKKPCSYHVVYGDGSTSDGDFIKDNITLEQVTGNLRTAPLAQEVVFGCGKNQSGQLGQTDSAVDGIMGFGQSNTSIISQLAAGGSTKRIFSHCLDNMNGGGIFAVGEVESPVVKTTPIVPNQVHYNVILKGMDVDGDPIDLPPSLASTNGDGGTIIDSGTTLAYLPQNLYNSLIEKITAKQQVKLHMVQETFACFSFTSNTDKAFPVVNLHFEDSLKLSVYPHDYLFSLREDMYCFGWQSGGMTTQDGADVILLGDLVLSNKLVVYDLENEVIGWADHNCSSSIKVKDGSGAAYQLGAENLISAASSVMNGTLVTLLSILIWVFHSFTS

SEQ ID NO: 3221 - protein, 475 aa, Arabidopsis thaliana
MELRRKLCIVVAVFVIVIEFASANFVFKAQHKFAGKKKNLEHFKSHDTRRHSRMLASIDLPLGGDSRVDSVGLYFTKIKLGSPPKEYHVQVDTGSDILWINCKPCPKCPTKTNLNFRLSLFDMNASSTSKKVGCDDDFCSFISQSDSCQPALGCSYHIVYADESTSDGKFIRDMLTLEQVTGDLKTGPLGQEVVFGCGSDQSGQLGNGDSAVDGVMGFGQSNTSVLSQLAATGDAKRVFSHCLDNVKGGGIFAVGVVDSPKVKTTPMVPNQMHYNVMLMGMDVDGTSLDLPRSIVRNGGTIVDSGTTLAYFPKVLYDSLIETILARQPVKLHIVEETFQCFSFSTNVDEAFPPVSFEFEDSVKLTVYPHDYLFTLEEELYCFGWQAGGLTTDERSEVILLGDLVLSNKLVVYDLDNEVIGWADHNCSSSIKIKDGSGGVYSVGADNLSSAPRLLMITKLLTILSPLIVMAFTSLA

SEQ ID NO: 3222 - protein, 388 aa, Arabidopsis thaliana
MTLSIVSFPICGRFTLIWFLTALVSVSCNPGVFNVKYRYPRLQGSLTALKEHDDRRQLTILAGIDLPLGGTGRPDIPGLYYAKIGIGTPAKSYYVQVDTGSDIMWVNCIQCKQCPRRSTLGIELTLYNIDESDSGKLVSCDDDFCYQISGGPLSGCKANMSCPYLEIYGDGSSTAGYFVKDVVQYDSVAGDLKTQTANGSVIFGCGARQSGDLDSSNEEALDGILGFGKANSSMISQLASSGRVKKIFAHCLDGRNGGGIFAIGRVVQPKVNMTPLVPNQPHYNVNMTAVQVGQEFLTIPADLFQPGDRKGAIIDSGTTLAYLPEIIYEPLVKKEPALKVHIVDKDYKCFQYSGRVDEGFPNVTFHFENSVFLRVYPHDYLFPHAHQA

SEQ ID NO: 3223 - protein, 449 aa, Arabidopsis thaliana
MELRRKLCIVVAVFVIVIEFASANFVFKAQHKFAGKKKNLEHFKSHDTRRHSRMLASIDLPLGGDSRVDSVGLYFTKIKLGSPPKEYHVQVDTGSDILWINCKPCPKCPTKTNLNFRLSLFDMNASSTSKKVGCDDDFCSFISQSDSCQPALGCSYHIVYADESTSDGKFIRDMLTLEQVTGDLKTGPLGQEVVFGCGSDQSGQLGNGDSAVDGVMGFGQSNTSVLSQLAATGDAKRVFSHCLDNVKGGGIFAVGVVDSPKVKTTPMVPNQMHYNVMLMGMDVDGTSLDLPRSIVRNGGTIVDSGTTLAYFPKVLYDSLIETILARQPVKLHIVEETFQCFSFSTNVDEAFPPVSFEFEDSVKLTVYPHDYLFTLEEELYCFGWQAGGLTTDERSEVILLGDLVLSNKLVVYDLDNEVIGWADHNFFFYRSYTTIYRHLHICYRGWERR

SEQ ID NO: 3224 - protein, 320 aa, Arabidopsis thaliana
MYGDGSSTNGYLVKDVVHLDLVTGNRQTGSTNGTIIFGCGSKQSGQLGESQAAVDGIMGFGQSNSSFISQLASQGKVKRSFAHCLDNNNGGGIFAIGEVVSPKVKTTPMLSKSAHYSVNLNAIEVGNSVLELSSNAFDSGDDKGVIIDSGTTLVYLPDAVYNPLLNEILASHPELTLHTVQESFTCFHYTDKLDRFPTVTFQFDKSVSLAVYPREYLFQVREDTWCFGWQNGGLQTKGGASLTILGDMALSNKLVVYDIENQVIGWTNHNCSGGIQVKDEESGAIYTVGAHNLSWSSSLAITKLLTLVSLLIPFFCNVAL

SEQ ID NO: 3225 - protein, 537 aa, Glycine max
  unsure (1)..(537): unsure at all Xaa locations
PFLYYNRPNTTTAPIQLYFIPKHQSGNLHYSSIESTLSCAGSLLLLLLSPXATELMDPRGVLILVAVLVAEIGSVANGNLVFPVERRKRSLSAVRAHDVRRRGRILSAVDLNLGGNGLPTETGLYFTKLGLGSPPRDYYVQVDTGSDILWVNCVECSRCPRKSDLGIDLTLYDPKGSETSEVVSCDQDFCSATFDGPIPGCKSEIPCPYSITYGDGSATTGYYVQDYLTYNHVNGNLRTAPQNSSIIFGCGAVQSGTLSSSSEEALDGIIGFGQSNSSVLSQLAASGKVKKIFSHCLDNIRGGGIFAIGEVVEPKVSTTPLVPRMAHYNVVLKSIEVDTDILQLPSDIFDSGNGKGTIIDSGTTLAYLPAIVYDELIPKVMARQPRLKLYLVEQQFSCFQYTGNVDRGFPVVKLHFEDSLSLTVYPHDYLFQFKDGIWCIGWQKSVAQTKNGKDMTLLGDLVLSNKLVIYDLENMAIGWTDYNCSSSIKVKDEATGIVHTVVAHNISSASTLFIGRILTFFLLLTAMLNNXINLVLI

SEQ ID NO: 3226 - protein, 537 aa, Glycine max
  unsure (1)..(537): unsure at all Xaa locations
PFLYYNRPNTTTAPIQLYFIPKHQSGNLHYSSIESTLSCAGSLLLLLLSPXATELMDPRGVLILVAVLVAEIGSVANGNLVFPVERRKRSLSAVRAHDVRRRGRILSAVDLNLGGNGLPTETGLYFTKLGLGSPPRDYYVQVDTGSDILWVNCVECSRCPRKSDLGIDLTLYDPKGSETSEVVSCDQDFCSATFDGPIPGCKSEIPCPYSITYGDGSATTGYYVQDYLTYNRINGNLRTSPQNSSIIFGCGAVQSGTLGSSSEEALDGIIGFGQANSSVLSQLAASGKVKKIFSHCLDNVRGGGIFAIGEVVEPKISTTPLVPRMAHYNVVLKSIEVDTDILQLPSDIFDSVNGKGTVIDSGTTLAYLPAIVYDELIQKVLARQPGLKLYLVEQQFRCFLYTGNVDRGFPVVKLHFKDSLSLTVYPHDYLFQFKDGIWCIGWQRSVAQTKNGKDMTLLGDLVLSNKLVIYDLENMVIGWTDYNCSSSIKVKDEATGIVHTVVAHNISSASTLFIGRILTFFLLLTAMLNNXINLVLI

SEQ ID NO: 3227 - protein, 489 aa, Glycine max
  unsure (1)..(489): unsure at all Xaa locations
MEMLRRSSRRIFVSACVWLLLSLSPSPPSVVNASHGVFNVKCKYQDXXSLSALKAHDYRRQLSLLAGVDLPLGGSGRPDAVGLYYAKIGIGTPPKNYYLQVDTGSDIMWVNCIQCKECPTRSSLGMDLTLYDIKESSSGKLVPCDQEFCKEINGGLLTGCTANISCPYLEIYGDGSSTAGYFVKDIVLYDQVSGDLKTDSANGSIVFGCGARQSGDLSSSNEEALDGILGFGKANSSMISQLASSGKVKKMFAHCLNGVNGGGIFAIGHVVQPKVNMTPLLPDQPHYSVNMTAVQVGHTFLSLSTDTSAQGDRKGTIIDSGTTLAYLPEGIYEPLVYKMISQHPDLKVQTLHDEYTCFQYSESVDDGFPAVTFFFENGLSLKVYPHDYLFPSGDFWCIGWQNSGTQSRDSKNMTLLGDLVLSNKLVFYDLENQAIGWAEYNCSSSIKVRDERTGTVHLVGSHYISFACVFNINWVVILSLLALLHKLIY

SEQ ID NO: 3228 - protein, 493 aa, Glycine max
  unsure (1)..(493): unsure at all Xaa locations
MDLRESLVLLLVGSFVVVQLCCHANANLVFPVVRKFKGPAENLAAIKAHDAGRRGRFLSVVDLALGGNGRPTSTGLYYTKIGLGPKDYYVQVDTGSDTLWVNCVGCTTCPKKSGLGMDLTLYDPNSSKTSKAVPCDDEFCTSTYDGPISGCTKGMSCPYSITYGDGSTTSGSYIKDDLTFDRVVGDLRTVPDNTSVIFGCGSKQSGTLSSTTDTSLDGIIGFGQANSSVLSQLAAAGKVKRIFSHCLDSISGGGIFAIGEVVQPKVKTTPLLQGMAHYNVVLKDIEVAGDPIQLPSDILDSSSGRGTIIDSGTTLAYLPVSIYDQLLERTXLAQRSGMELYLVEDQFTCFHYSDEVDDAFPTVKFTFEEGLTLTAYPHDYLFPFKEDMWCIGWQKSTAQTKDGKDLILLGDLVLTNKLFIYDLDNMSIGWPDYNCSSSIKLKDNKTGTVYTRGAQDLSSASTVLIGKILTFFVLLITMLSTXLNDIIVSRDGI

SEQ ID NO: 3229 - protein, 563 aa, Glycine max
  unsure (1)..(563): unsure at all Xaa locations
VETAKIPSFLSFSFTRLCFTKRLRFIFVFVSSPFPLLCFHRPLFSIWVGKWFSISVSVLFLHCCFLSKLAQPEMDLRESLVLLLVGSFVVQFCCNANANLVFPVVRKFKGPVENLAAIKAHDAGRRGRFLSVVDLALGGNGRPTSTGLYYTKIGLGXNDYYVQVDTGSDTLWVNCVGCTACPKKSGLGMDLTLYDPNSSKTSKAVPCDDEFCTSTYDGPISGCKKDMSCPYSITYGDGSTTSGSYIKDDLTFDRVVGDLRTVPDNTSVIFGCGSKQSGTLSSTTDTSLDGIIGFGQANSSVLSQLAAAGKVKRVFSHCLDTVNGGGIFAIGEVVQPKVKTTPLVPRMAHYNVVLKDIEVAGDPIQLPTDIFDSTSGRGTIIDSGTTLAYLPVSIYDQLLEKTLAQRSGMELYLVEDQFTCFHYSDEIDDAFPTVKFTFEEGLTLTAYPHDYLFPFEDMWCIGWQKSTAQTKDGKDLILLGDLVLTNKLFIYDLDNMSIGWTDYNCSSSIKLKDNKTGTVYTRGAQDLSSASTVLIGKILTFFVLLITMLSTXLNDIIVSRDGI

SEQ ID NO: 3230 - protein, 438 aa, Glycine max
  unsure (1)..(438): unsure at all Xaa locations
XKAHDYRRQLSLLSGVDLPLGGSGXPDAVGLYYAKIGIGTPPKNYYXLQVDTGSDIMWVNCIQCKEXPTRSNLGMDLTLYDIKESSSGKFVPCDQEFCKEINGGLLTGCTXNISCPYLEIYGDGSSTXGYFVKDIVLYDQVSGDLKTDSANGSIVFGCGARQSGDLSSSNEEALGGILGFGKANSSMISQLASSGKVKKMFAHCLNGVNGGGIFAIGHVVQPKVNMTPLLPDQPHYSVNMTAVQVGHAFLSLSTDTSTQGDRKGTIIDSGTTLAYLPEGIYEPLVYKIISQHPDLKVRTLHDEYTCFQYSESVDDGFPAVTFYFENGLSLKVYPHDYLFPSGDFWCIGWQNSGTQSRDSKNMTLLGDLVLSNKLVFYDLENQVIGWTEYNCSSSIKVRDERTGTVHLVGFHYISFACGLNINLVMILSLLALLHKWVY

SEQ ID NO: 3231 - protein, 483 aa, Glycine max
  unsure (1)..(483): unsure at all Xaa locations
LVVSLFVVVQLCCHANANMVFPVVRKFKGPAENLAAIKAHDAGRRGRFLSVVDLALGGNGRPTSTGLYYTKIGLGXNDYYVQVDTGSDTLWVNCVGCTTCPKKSGLGMELTLYDPNSSKTSKVVPCDDEFCTSTYDGPISGCKKDMSCPYSITYGDGSTTSGSYIKDDLTFDRVVGDLRTVPDNTSVIFGCGSKQSGTLSSTTDTSLDGIIGFGQANSSVLSQLAAAGKVKRVFSHCLDTVNGGGIFAIGEVVQPKVKTTPLVPRMAHYNVVLKDIEVAGDPIQLPTDIFDSTSGRGTIIDSGTTLAYLPVSIYDQLLEKTLAQRSGMELYLVEDQFTCFHYSDEIDDAFPTVKFTFEEGLTLTAYPHDYLFPFEDMWCIGWQKXSTAQTKDGKDLILLGDLVLTNKLFIYDLDNMSIGWTDYNCSSSIKLKDNKTGTVYTRGAQDLSSASTVLIGKILTFFVLLITMLSTXLNDIIVSRDGI

SEQ ID NO: 3232 - protein, 419 aa, Glycine max
  unsure (1)..(419): unsure at all Xaa locations
CYVVGLYFTKLGXGSPPKDYYVQVDTGSDILWVNCVKCSRCPRKSDLGIDLTLYDPKGSETSELISCDQEFCSATYDGPIPGCKSEIPCPYSITYGDGSATTGYYVQDYLTYNHVNDNLRTAPQNSSIIFGCGAVQSGTLSSSSEEALDGIIGFGQSNSSVLSQLAASGKVKKIFSHCLDNIRGGGIFAIXEVVEPKVSTTPLVPRMAHYNVVLKSIEVDTDILQLPSDICDSGNGNGTIIDSGTSLAYLAGILYDELIPKVMGRQPRLKXYLVSNNXXLFQYTGNVDRGFPVVKLHFEDSLSLTVYPHDYLFQFKDGIWCIGWQKSVAQTKNGKDMTLLGDLVLSNKLVIYDLENMAIGWTDYNCSSSIKVKDEATGIVHTVGAHNISSATTLFMGRILTFFLLLTTMLNNXINLVLI

SEQ ID NO: 3233 - protein, 538 aa, Glycine max
  unsure (1)..(538): unsure at all Xaa locations
FGSSHTRAARVDPYFPSPTAFVESSPNLPTPTPSLSLSRLHQTNKLHSSREDDDDGDATQKQQKNLRLRVCVVASVTVTVTAQCCSSHGVFNVKCKYXXDRSLSALKAHDYRRQLSLLAGVDLPLGGSGRPDAVGLYYAKIGIGTPPKNYYLQVDTGSDIIWVNCIQCKECPTRINLGMDLTLYDINYXPYRKIYPCDRATCGYFVEDIVLCDQVYGDFKTDSANGSIVFGCGARQSGDLSSSNEEALGGILGFGKANSSMISHLASSGKXKRCLLHCLNGVNGGGIFAIGHVVQPKVNMTPLLPDQPHYSVNMTAVQVGHTFLSLSTDTSAQGDRKGTIIDSGTTLAYLPEGINVSLIYMMISQQDLKVQTLHDEYTCFQYSESVDDGFPAVTFFFENGLSLKVYPHDYLFPSGDFWCIGWQNSGTQSRDSKNMTLLGDLVLSNKLVFYDLENQAIGWAEYNCSSIIKVRDERTGTVHLVGSHYISSAXXVFNINWVMILSLLVYFINXFIEMEQQIHIPKSKLWSKKEDKKCYVRN

SEQ ID NO: 3234 - protein, 539 aa, Glycine max
  unsure (1)..(539): unsure at all Xaa locations
PFLYYNRPNTTTAPIQLYFIPKHQSGNLHYSSIESTLSCAGSLLLLLLSPXATELMDPRGVLILVAVLVAEIGSVANGNLVFPVERRKRSLSAVRAHDVRRRGRILSAVDLNLGGNGLPTETGLYFTKLGLGSPPRDYYVQVDTGSDILWVNCVECSRCPRKRDLGIDLTLYDPKWSDTSKLVSCDQEFCSFTFDGPISGCKSEFLCPYSITYVDGSLTTGYYVGDFVTYNRMEPKVSTTPLVPRMAHYNVVLKSIEVDTDILQLPSDIFDSGNGKGTIIDKWNNLGXNLTAIVYDELIPMLIGRQPRLRLFLEQQLSXMLAVXPGIAHYSVVLMNIDFDTDILQLPSDIFDSVNGKGTVIDSGTTLAYLPAIVYDELIQKVLARQPGLKLYLVEQQFRCFLYTGNVDRGFPVVKLHFKDSLSLTVYPHDYLFQFKDGIWCIGWQRSVAQTKNGKDMTLLGDLVLSNKLVIYDLENMVIGWTDYNCSSSIKVKDEATGIVHTVVAHNISSASTLFIGRILTFFLLLTAMLNNXINLVLI

SEQ ID NO: 3235 - protein, 492 aa, Dictyostelium discoideum
MKLSNILLVIFLLSINIIKGSTTELNSNNLNIDDIEHDQDGDFGIDLPLTIESRYSVEFDRNIENGMMTLKPTQPSNYKRNPLSKNIDIDMQGNFYQINVNVLIGQQKFILQVDTGSTLTAIPLKGCNSCKDNRPVYDPALSSSSQLIPCSSDKCLGSGSASPSCKLHQNAKSTCDFIILYGDGSKIKGKVFSDEITVSGVSSTIYFGANVEEVGAFEYPRADGIMGLGRTSNNKNLVPTIFDSMVRSNSSIKNIFGIYLDYHGQGYLSLGKINHHYYIGSIQYTPIQPAGPFYAIKPTSFRVDNTSFPANSMGQVIVDSGTSDLILTSRVYDHLIQYFRKHYCHIDMVCSYPSIFSSRVCFEKEEDFATFPWLHFGFEGGVRIAIPPKNYMIKTESNQQGVYGYCWGIDRGDDMTILGDVFMRGYYTIFDNIENRVGFAIGKNSKNSNVGDITDINQFDSTYYRNDGNKNNFNYLSFSFISIILIINLILL

SEQ ID NO: 3236 - protein, 410 aa, Hordeum vulgare
MAAMWSPIIGLLLLLLPLGPSSAIKFPLEGNVYPVGHFYATLNIGEPAKPYFLDVDTGSNLTWLECHHPVHGCKGCHPRPPHPYYTPADGNLKVVCGSPLCVAVRRDVPGIPECSRNDPHRCHYEIQYVTGKSEGDLATDIISVNGRDKKRIAFGCGYKQEEPADSPPSPVDGILGLGMGKAGFAAQLKGHKMIKENVIGHCLSSKGKGVLYVGDFNPPTRGVTWAPMRESLFYYSPGLAEVFIDKQPIRGNPTFEAVFDSGSTYTHVPAQIYNEIVSKVRGTLSESSLEEVKGRALPLCWKGKKPFGSVNDVKNQFKALSLKITHARGTNNLDIPPQNYLFVKEDGETCLAILDASLDPVLKELNFILIGAVTMQDLFVIYDNEKKQLGWVRAQCDRVQELESVIDSRL

SEQ ID NO: 3237 - protein, 410 aa, Hordeum vulgare
MAAMWSPIIGLLLLLLPLGPSSAINFPLEGNVYPVGHFYATLNIGEPAKPYFLDVDTGSNLTWLECHPPVHGCKGCHPRPPHPYYTPADGKLKVVCGSPLCVAVRRDVPGIPECSRNDPHRCHYEIQYVTGKSEGDLATDIISVNGRDKKRIAFGCGYKQEEPPDSPPSPVNGILGLGMGKAGFAAQLKGLKMIKENVIGHCLSSKGKGVLYVGDFNPPTRGVTWAPMRESLFYYSPGLAEVFIDKQPIRGNPTFEAVFDSGSTYTHVPAQIYNEIVSKVRGTFSESSLEEVKGRALPLCWKGKKPFGSVNDVKNQFKALSLKITHARGTNNLDIPPQNYLFVKEDGETCLAILDASLDPVLKELNFILIGAVTMQDLFVIYDNEKKQLGWVRAQCDRVQELESVIDSRL

SEQ ID NO: 3238 - protein, 289 aa, Oryza sativa
  unsure (1)..(289): unsure at all Xaa locations
MDRPPAPAPAVALLLVVVVVAAAVMLAAVEGAGAEATGVFHVRRSLPAGGAGAAAEAYRAHDGSRRGRLLGXAADIPLGGLGLPTDTGLYYTEIGIGTPTKRYYVQVDTGSDILWVNCISCDRCPRKSGLGLELTLYDPKDSSTGSKVSCDQGFCAATYGGLLPGCTTSLPCEYSVTYGDGSSTTGYFVSDLLQFDQVSGDGQTRPANSTVTFGCGSQQGGDLGSSNQALDGIIGFGQSNTSMLSQLSAAGKVKKIFAHCLDTINGGGIFAIGNVVQPKVKTTPLVPNX

SEQ ID NO: 3239 - protein, 378 aa, Oryza sativa
  unsure (1)..(378): unsure at all Xaa locations
NSIKYKKGRDSTYFAEEMAAPLLLSTIILALVVVASSTHGTMANGVFQVRRKFHIVDGVYKGSDIGALQTHDENRHRRRNLMAAELPLGGFNIPYGTGLYYTDIGIGTPPVKYYVQLDTGSKAFWVNGISCKQCPHESDILRKLTFYDPRSSVSSKEVKCDDTICTXXRPPCNMTLRCPYIPGYADGGLTMGILFPDLLPYHQLYGNGQTQPTSPRVPFGCGLQQSGSLNNSAVAIDGIIGFGNSNQTALSQLAAAGKTKKIFSHCLDSTNGGGIFAIGEVVEPKVKTTPIVKNNEVYHLVNLKSINVAGTTLQLPANIFGTTKTKGTFIDSGSTLVYLPEIIYSELILAVWQKYCYSFLVVELFAITFTYNSQPIAX

SEQ ID NO: 3240 - protein, 243 aa, Oryza sativa
MDRPPAPAPAVALLLVVVVVAAAVMLAAVEGAGAEATGVFHVRRSLPAGGAGAAAEAYRAHDGSRRGRLLAAADIPLGGLGLPTDTGLYYTEIGIGTPTKRYYVQVDTGSDILWVNCISCDRCPRKSGLGLELTLYDPKDSSTGSKVSCDQGFCAATYGGLLPGCTTSLPCEYSVTYGDGSSTTGYFVSDLLQFDQVSGDGQTRPANSTVTFGCGSQQGKVKKIFAHCLDTINGGGIFAIGNV

SEQ ID NO: 3241 - protein, 276 aa, Triticum aestivum
  unsure (1)..(276): unsure at all Xaa locations
PRLLSVGFPLSRCLNAETSVASLPSPRCRSGVFEVRRKFPRHHGGGAGGGKHLADLREHDARRRCSLAAAVDLPLGGNGLPTETGLYFTQIGIGTPAKSYYVQVDTGSDILWVNCVSCDTCPRKSGLGIELTLYDPSGSSSGTGVTCGQEFCVATHGGVLPSCVPAAPCQYSISYGDGSSTNGFFXVTDFLQYNQVSGNSQTTLANTSITFGCGAKIGGDLGSSSQALDGILGFGQSNSSMLSQLAAAGKVRKVFAHCLDTINGGGIFAIGDVVQP

SEQ ID NO: 3242 - protein, 162 aa, Triticum aestivum
  unsure (1)..(162): unsure at all Xaa locations
XVVYNAIMSKVFAQYGEMPLKXXDQDFQCFRYSGSVDDGFPIITFHFEGGLPLNIHPHDYLFQNGELYCMGFQTGGLQTKDGKDMVLLGDLAFSNRLVLYDLENQVIGWTDYNCSSSIKIKDDKTGSIYTVNAHDISSGWRFQWHKPLFVLLVTALCSYTMF

SEQ ID NO: 3243 - protein, 535 aa, Arabidopsis thaliana
MFSKYSFILCLIFFFVTAFSGDSRALAGNNEQKNISGFSGIDFPNPMRFGSASSSTSNDCGFSSPEKEPTKERTGENKTVKFHLKRRETTTTEKATTNSVLELQIRDLTRIQTLHKRVLEKNNQNTVSQKQKKNDKEVVTTTPVASSVEEQAGQLVATLESGMTLGSGEYFMDVLVGSPPKHFSLILDTGSDLNWIQCLPCYDCFQQNGAFYDPKASASYKNITCNDQRCNLVSSPDPPMPCKSDNQSCPYYYWYGDSSNTTGDFAVETFTVNLTTNGGSSELYNVENMMFGCGHWNRGLFHGAAGLLGLGRGPLSFSSQLQSLYGHSFSYCLVDRNSDTNVSSKLIFGEDKDLLSHPNLNFTSFVAGKENLVDTFYYVQIKSILVAGEVLNIPEETWNISSDGAGGTIIDSGTTLSYFAEPAYEFIKNKIAEKAKGKYPVYRDFPILDPCFNVSGIHNVQLPELGIAFADGAVWNFPTENSFIWLNEDLVCLAMLGTPKSAFSIIGNYQQQNFHILYDTKRSRLGYAPTKCADI

SEQ ID NO: 3244 - protein, 527 aa, Arabidopsis thaliana
MSTKLSIFLLGLILFSVSPFSGDCRTLSGKHEHYSSSLNMFNSQDTMRFSSASSSTSNDCGFSSKEHDPSKEHTRESVKPQSRIKQETKRTTHSVVDLQIQDLTRIKTLHARFNKSKKQKNEKVRKKITSDISLVGAPEVSPGKLIATLESGMTLGSGEYFMDVLVGTPPKHFSLILDTGSDLNWLQCLPCYDCFHQNGMFYDPKTSASFKNITCNDPRCSLISSPDPPVQCESDNQSCPYFYWYGDRSNTTGDFAVETFTVNLTTTEGGSSEYKVGNMMFGCGHWNRGLFSGASGLLGLGRGPLSFSSQLQSLYGHSFSYCLVDRNSNTNVSSKLIFGEDKDLLNHTNLNFTSFVNGKENSVETFYYIQIKSILVGGKALDIPEETWNISSDGDGGTIIDSGTTLSYFAEPAYEIIKNKFAEKMKENYPIFRDFPVLDPCFNVSGIEENNIHLPELGIAFVDGTVWNFPAENSFIWLSEDLVCLAILGTPKSTFSIIGNYQQQNFHILYDTKRSRLGFTPTKCADI

SEQ ID NO: 3245 - protein, 481 aa, Arabidopsis thaliana
MRFSSASSSTSNDCGFSSKEHDPSKEHTRESVKPQSRIKQETKRTTHSVVDLQIQDLTRIKTLHARFNKSKKQKNEKVRKKITSDISLVGAPEVSPGKLIATLESGMTLGSGEYFMDVLVGTPPKHFSLILDTGSDLNWLQCLPCYDCFHQNGMFYDPKTSASFKNITCNDPRCSLISSPDPPVQCESDNQSCPYFYWYGDRSNTTGDFAVETFTVNLTTTEGGSSEYKVGNMMFGCGHWNRGLFSGASGLLGLGRGPLSFSSQLQSLYGHSFSYCLVDRNSNTNVSSKLIFGEDKDLLNHTNLNFTSFVNGKENSVETFYYIQIKSILVGGKALDIPEETWNISSDGDGGTIIDSGTTLSYFAEPAYEIIKNKFAEKMKENYPIFRDFPVLDPCFNVSGIEENNIHLPELGIAFVDGTVWNFPAENSFIWLSEDLVCLAILGTPKSTFSIIGNYQQQNFHILYDTKRSRLGFTPTKCADI

SEQ ID NO: 3246 - protein, 165 aa, Brassica oleracea
FTPISTITDGTSFYGLDIVGISVGGQKLAIPQTVFSTPGALIDSGTVISRLPPKAYAALRGAFKAKMSQYKNTSAVSILDTCFDLTGFKTVTIPTVSFYFNGGAVVELGSKGVLYAFKMSQVCLAFAGNSDDNNAAIFGNVQQQTLEVVYDGAAGRVGFAPNGCS

SEQ ID NO: 3247 - protein, 144 aa, Cicer arietinum
GVRVPISEDVFRLNELGEGGVVMDTGTAVTRLPTAAYDAFRDAFIGQTTNLPRSSDVSIFDTCYDLYGFVSVRVPTISFYFLGGPILTLPARNFLIPVNDVGTFCFAFAPSPSGLSIIGNIQQEGIEISVDGVNGFVGFGPNIC

SEQ ID NO: 3248 - protein, 110 aa, Cicer arietinum
QAYESVRDAFKRLTQNLRSAEGVAIFDTCYDLSSLRSVRVPTVSFHFGNDRVWDLPAKNYLIPVDSDGTFCFAFAPTSSSLSIIGNVQQQGTRVSFDIANSLVGFSPNKC

SEQ ID NO: 3249 - protein, 369 aa, Glycine max
  unsure (1)..(369): unsure at all Xaa locations
XFPSPKPHKNSVKLHLKHRSGSKGAEXXKNSVIDSTVRDLTRIQNLHRRVIENRNQNTISRLQRLQKEQPKQSSPAASSTSPVSGQLVATLESGVSLGSGEYFMDVFVGTPPKHFSLILDTGSDLNWIQCVPCIACFEQSGPYYDPKDSSSFRNISCHDPRCQLVSSPDPPNPCKAENQSCPYFYWYGDGSNTTGDFALETFTVNLTTPNGKSELKHVENVMFGCGHWNRGLFHGAAGLLGLGKGPLSFASQMQSLYGQSFSYCLVDRNSNASVSSKLIFGEDKELLSHPNLNFTSFGGGKDGSVDTFYYVQINSVMVDDEVLKIPEETWHLSSEGAGGTIIDSGTTLTYFAEPAYENIKEAFVKENKX

SEQ ID NO: 3250 - protein, 504 aa, Oryza sativa (japonica cultivar-group)
MQPPILLPLLLLLLLLAAASPRPVLSRRHASPPLATETLDVAASLSRARAAVSAEAVPLHQSAAAAVSTEVVGEEHEEGRLALRLHSRDFLPEEQGRQRHASYRSLVLARLRRDSARAAAVSARAAMAADGVSRFDLVPANVTAFEASAAEIQGPVVSGVGLGSGEYFSRVGVGSPARQLYMVLDTGSDVTWVQCQPCADCYQQSDPVFDPSLSTSYASVACDNPRCHDLDAAACRNSTGACLYEVAYGDGSYTVGDFATETLTLGDSAPVSSVAIGCGHDNEGLFVGAAGLLALGGGPLSFPSQISATTFSYCLVDRDSPSSSTLQFGDAADAEVTAPLIRSPRTSTFYYVGLSGLSVGGQILSIPPSAFAMDSTGAGGVIVDSGTAVTRLQSSAYAALRDAFVRGTQSLPRTSGVSLFDTCYDLSDRTSVEVPAVSLRFAGGGELRLPAKNYLIPVDGAGTYCLAFAPTNAAVSIIGNVQQQGTRVSFDTAKSTVGFTTNKC

SEQ ID NO: 3251 - protein, 155 aa, Triticum aestivum
  unsure (1)..(155): unsure at all Xaa locations
XKSVLVGGEAVNIPSDTWGGAKDGSGGTIIDSGTTLSYFPEPAYRAIRQAFIDRMSPSYPLIAGFPVLSPCYNVSGAGKIEVPELSLVFADGAAWEFPAENYFIRLAEGVMCLAVLGTPRSGMSIIGNYQQQNFHVLYDLERNRLGFAPRRCAEV

SEQ ID NO: 3252 - protein, 473 aa, Triticum aestivum
  unsure (1)..(473): unsure at all Xaa locations
MPMAPPPLLPLSALLLLLAAASHASAKPVQIQALLATPLSPDRVSAPSELAREDDTNVFAGNLAAADDAAASTVRFRVVHRDDFSKNATAAELLAHRLERDERRAARLSAAAGAANGTRRGGGGXXVAPVVSGLAQGSGEYFTKIGVGTPATPALMVLDTGSDVVWLQCAPCRRCYEQSGQVFDPRRSRSXYGAVGCAAPLCRRLDSGGCALRRSACLYQVAXYGDGSVTAGDFATETLTXFAGGARVARVALGCGHDNEGLFVAAAALLGLGRGSLSFPTQISRRYGRSFSYCLVDRTSSANSASRSSTVTFGSGALGSTVASSFTPMVKNPRMETFYYVQLIGISVGGARVPGVANSDLRLDPSSGRGGVIVDSGTSVTRLARPAYSALRDAFRGAXRXGLXXYXGGFFXVXTXCYXXSGAXWXKXXPTXXRXXFXXXXXRXXXXXXXNTXXXXXTXXXGXFXFXRYXXNX

SEQ ID NO: 3253 - protein, 474 aa, Arabidopsis thaliana
MSINRNLLNIIIILCICLNLGCNDGAQERETDSHTIQVSSLLPSSSSSCVLSPRASTTKSSLHVTHRHGTCSRLNNGKATSPDHVEILRLDQARVNSIHSKLSKKLATDHVSESKSTDLPAKDGSTLGSGNYIVTVGLGTPKNDLSLIFDTGSDLTWTQCQPCVRTCYDQKEPIFNPSKSTSYYNVSCSSAACGSLSSATGNAGSCSASNCIYGIQYGDQSFSVGFLAKEKFTLTNSDVFDGVYFGCGENNQGLFTGVAGLLGLGRDKLSFPSQTATAYNKIFSYCLPSSASYTGHLTFGSAGISRSVKFTPISTITDGTSFYGLNIVAITVGGQKLPIPSTVFSTPGALIDSGTVITRLPPKAYAALRSSFKAKMSKYPTTSGVSILDTCFDLSGFKTVTIPKVAFSFSGGAVVELGSKGIFYVFKISQVCLAFAGNSDDSNAAIFGNVQQQTLEVVYDGAGGRVGFAPNGCS

SEQ ID NO: 3254 - protein, 446 aa, Arabidopsis thaliana
MELKKERLILILSKSALSSLHHHHLVFFLPESSLHVTHRHGTCSRLNNGKATSPDHVEILRLDQARVNSIHSKLSKKLATDHVSESKSTDLPAKDGSTLGSGNYIVTVGLGTPKNDLSLIFDTGSDLTWTQCQPCVRTCYDQKEPIFNPSKSTSYYNVSCSSAACGSLSSATGNAGSCSASNCIYGIQYGDQSFSVGFLAKEKFTLTNSDVFDGVYFGCGENNQGLFTGVAGLLGLGRDKLSFPSQTATAYNKIFSYCLPSSASYTGHLTFGSAGISRSVKFTPISTITDGTSFYGLNIVAITVGGQKLPIPSTVFSTPGALIDSGTVITRLPPKAYAALRSSFKAKMSKYPTTSGVSILDTCFDLSGFKTVTIPKVAFSFSGGAVVELGSKGIFYVFKISQVCLAFAGNSDDSNAAIFGNVQQQTLEVVYDGAGGRVGFAPNGCS

SEQ ID NO: 3255 - protein, 464 aa, Arabidopsis thaliana
MSIMRNFLSMIIMLCVCLNWCFAEGAEKSDSGKVLDSYTIQVSSLFPSSSSCVPSSKASNTKSSLRVVHMHGACSHLSSDARVDHDEIIRRDQARVESIYSKLSKNSANEVSEAKSTELPAKSGITLGSGNYIVTIGIGTPKHDLSLVFDTGSDLTWTQCEPCLGSCYSQKEPKFNPSSSSTYQNVSCSSPMCEDAESCSASNCVYSIGYGDKSFTQGFLAKEKFTLTNSDVLEDVYFGCGENNQGLFDGVAGLLGLGPGKLSLPAQTTTTYNNIFSYCLPSFTSNSTGHLTFGSAGISESVKFTPISSFPSAFNYGIDIIGISVGDKELAITPNSFSTEGAIIDSGTVFTRLPTKVYAELRSVFKEKMSSYKSTSGYGLFDTCYDFTGLDTVTYPTIAFSFAGGTVVELDGSGISLPIKISQVCLAFAGNDDLPAIFGNVQQTTLDVVYDVAGGRVGFAPNGC

SEQ ID NO: 3256 - protein, 464 aa, Arabidopsis thaliana
MSIMRNFLSMIIMLCVCLNWCFAEGAEKSDSGKVLDSYTIQVSSLFPSSSSCVPSSKASNTKSSLRVVHMHGACSHLSSDARVDHDEIIRRDQARVESIYSKLSKNSANEVSEAKSTELPAKSGITLGSGNYIVTIGIGTPKHDLSLVFDTGSDLTWTQCEPCLGSCYSQKEPKFNPSSSSTYQNVSCSSPMCEDAESCSASNCVYSIVYGDKSFTQGFLAKEKFTLTNSDVLEDVYFGCGENNQGLFDGVAGLLGLGPGKLSLPAQTTTTYNNIFSYCLPSFTSNSTGHLTFGSAGISESVKFTPISSFPSAFNYGIDIIGISVGDKELAITPNSFSTEGAIIDSGTVFTRLPTKVYAELRSVFKEKMSSYKSTSGYGLFDTCYDFTGLDTVTYPTIAFSFAGSTVVELDGSGISLPIKISQVCLAFAGNDDLPAIFGNVQQTTLDVVYDVAGGRVGFAPNGC

SEQ ID NO: 3257 - protein, 482 aa, Glycine max
  unsure (1)..(482): unsure at all Xaa locations
MHIQMSSFLLASLALLFCIXLLGEELCLSSNKGKQQSSXXYHSVHLNSLFPSSSCSSSAKGPKRKASLEVVHKHGPCSQLNHSGKAEATISHNDIMNLDNERVKYIQSRLSKNLGGDRVKELDSTTLPAKSGRLIGSGDYYVVVGLGTPKRDLSLTFDTGSYLTWTQCEPCAGSCYKQQDPIFDPSKSSSYTNIKCTSSLCTQFRSAGCSSSTDASCIYDVKYGDNSISRGFLSQERLTITATDIVHDFLFGCGQDNEGLFRGTAGLMGLSRHPISFVQQTSSIYNKIFSYCLPSTPSSLGHLTFGASAATNANLKYTPFSTISGENSFYGLDIVGISVGGTKLPAVSSSTFSAGGSIIDSGTVITRLAPTAYAALRSAFRQGMEKYPVAYGTRLFDTCYDFSGYKEISVPRIDFEFAGGVKVELPLVGIFYGESAQQLCLAFAANGNGNDITIFGNVQQKTLEVVYDVEGGRIGFGAAGCN

SEQ ID NO: 3258 - protein, 493 aa, Glycine max
  unsure (1)..(493): unsure at all Xaa locations
AWLFLTSWHGHSNVFFCLCFSYNFILLLFLVCLSNNKGGHRKQQSSSXXTHLVHLSSLLPSSSCSSSAKGPKRKASLEVVHKHGPCSQLNNHDGKATTTPHSEILNQDKERVKYINSRISKNLGQDSSVSELDSVTLPAKSGSLIGSGNYFVVVGLGTPKRDLSLIFDTGSDLTWTQCEPCARSCYKQQDAIFDPSKSTSYSNITCTSTLCTQLSTATGNEPGCSASTKACIYGIQYGDSSFSVGYFSRERLSVTATDIVDNFLFGCGQNNQGLFGGSAGLIGLGRHPISFVQQTAAVYRKIFSYCLPATSSSTGRLSFGTTTTSYVKYTPFSTISRGSSFYGLDITGISVGGAKLPVSSSTFSTGGAIIDSGTVITRLPPTAYTALRSAFRQGMSKYPSAGELSILDTCYDLSGYEVFSIPKIDFSFAGGVTVQLPPQGILYVASAKQVCLAFAANGDDSDVTIYGNVQQKTIEVVYDVGGGRIGFGAGGCK

SEQ ID NO: 3259 - protein, 470 aa, Oryza sativa (japonica cultivar-group)
MAAAGLNHGGASPSARGKWLGGPVAPGVVELPADRDCWAEEFWGGIEDGTSSVTLSHRYGPCSPADPNSGEKRPTDEELLRRDQLRADYIRRKFSGSNGTAAGEDGQSSKVSVPTTLGSSLDTLEYVISVGLGSPAVTQRVVIDTGSDVSWVQCEPCPAPSPCHAHAGALFDPAASSTYAAFNCSAAACAQLGDSGEANGCDAKSRCQYIVKYGDGSNTTGTYSSDVLTLSGSDVVRGFQFGCSHAELGAGMDDKTDGLIGLGGDAQSPVSQTAARYGKSFFYCLPATPASSGFLTLGAPASGGGGGASRFATTPMLRSKKVPTYYFAALEDIAVGGKKLGLSPSVFAAGSLVDSGTVITRLPPAAYAALSSAFRAGMTRYARAEPLGILDTCFNFTGLDKVSIPTVALVFAGGAVVDLDAHGIVSGGCLAFAPTRDDKAFGTIGNVQQRTFEVLYDVGGGVFGFRVGAC

SEQ ID NO: 3260 - protein, 411 aa, Oryza sativa
  unsure (1)..(411): unsure at all Xaa locations
MALPSAVLRLTHRHGPCAPAGKASALAPSFLDTLRADQRRAEYIQRRVSGAAAAAPVAGSKAATVPANLGFSIGTLQYVVTVSLGTPAVAQTLEVDTGSDVSWVQCKPCPSPPCYSQRDPLFDPTRSSSYSAVPCAAASCSQLALXXSNGCSGGQCGYVVSYGDGSTTTGVYSSDTLTLTGSNALKGFLFGCGHAQQGLFAGVDGLLGLGRQGQSLVSQASSTYGGVFSYCLPPTQNSVGYISLGGPSSTAGFSTTPLLTASNDPTYYIVMLAGISVGGQPLSIDASVFASGAVVDTGTVVTRLPPTAYSALRSAFRAAMARYPSAPATGILDTCYDFTRYGTVTLPTISIAFGGGAAMDLGTSGILTSGCLAFAPTGGDSQASILGNVQQRSFEVRFDGSTVGFMPASCX

SEQ ID NO: 3261 - protein, 282 aa, Triticum aestivum
  unsure (1)..(282): unsure at all Xaa locations
XFGTRNDPKSDQTATGEHHATASQTVVVDTSSDIPWVQCLPCPIPQCHLQKDPFYDPAKSSTFAPIPCGSPACKELGSSYGNGCSGSTDQCKYTVNYGDGRATSGTYVTDTLTMSPTILVKDFRFGCSHXLXGAPSATRPPAFWPLGGGGGSLLEQTAGAYGNAFSYCIPXXPSSSGFLSLGGAGGGXSSKFARTPLFKNKHAPTFYIVHLEAITMAGKRLGVPPATCAGGAXMDSGAVVTQLPPAAYAALRAAFRSAMAAYALAAPVRNLDTCYDFTRFPX

SEQ ID NO: 3262 - protein, 307 aa, Triticum aestivum
  unsure (1)..(307): unsure at all Xaa locations
XCRVSCHRQSGPVFDPKXSSSYAAVSCSTPQCNDLSTATLNPAACSSSDVCIYQASYGDSSFSVGYLSKDTVSFGSNSVPNFYYGCGQDNEGLFGRSAGLMGLARNKLSLLYQLAPTLGYSFSYCLPSSSSSGYLSIGSYNPGQYSYTPMVSSTLDDFYFIKLSGMTVAGKPLAISSSEYSSLPTIIDSGTVITRLPTTVYDALSKAVAGAMKGTKRADAYSILDTCFXXGQASSLRVPAVSMAFSGGAALKLSAQNLLVDVDSSTTCLAFAPARSAAIIGNTQQQTFSVVYDVKSNRIGFAAGGCR

SEQ ID NO: 3263 - protein, 216 aa, Triticum aestivum
  unsure (1)..(216): unsure at all Xaa locations
SFSDQTAGVLALGGGAGSLLAQTAETFGNAFSYCVPXXPSSDGFLSLGGPVGNSSQFTSTPLIKNQHAPTFYIVRLEAITVAGRRLDVPPATFAGGAVMDSGAVVTQLPPSAYAALRAAFRSAMTAYALADPVRNLDTCYDLTRFPEVNVPKVSLVFAGGATLELEPASIMLDGCLAFTASPGDGSIGFIGNVQQQTYEVLYDVGSGSVGFRSGAC

SEQ ID NO: 3264 - protein, 904 aa, Mus musculus
MEVNCLTLKDLISPRQTRLDFAIEDAENAQKENIFVDRSRMTPKTPMKNEPIDLSKQRIFTPDRNPITPVKPVDRQPQVEPWTPTANLKMLISAASPDIRDREKKKELFRPIENKEDAFVNSLQLDVAGDGAVDEYEKQRPSRKQKSLGLLCQKFLARYPSYPLSTEKTTISLDEVAVSLGVERRRIYDIVNVLESLHLVSRVAKNQYGWHGRHSLPKTLRTLQRLGEEQKYEEQMACLQQKELDLMGYRFGERRKDGSPDPRDPHLLDFSEADYPSSSANSRKDKSLRIMSQKFVMLFLVSKTKIVTLDVAAKILIEESQDTPDHSKFKTKVRRLYDIANVLTSLALIKKVHVTEERGRKPAFKWIGPVDFSSIDEELLDVSASILPELKKEAYGQIRVCAKERLVRYGSFNTVHTSEKIQRKVSSEPSSPQGERQGSAYSLEIGSLAAIYRQKVEDNSQEEAFVSNTAVPPASILDPALSMDSEYCVKPLAQPVFSVAQTDLPAFSAQNGPSGQVGVPVPSAASDTENLKPALLAGQPLVYVPSTQLFMLYGSVQEGLSPESRSEEDGGGSDVPADLSVTPSAQKRLCEERDPQEEEDEPAMKRQSQEFEDSPLSLVMPKKPSSSTDLACPVTMGNGSSPPLEDACVKGQLPAAEEVTGKAAPNCYVASECGNPARNPDTEKPSNENEITKDPSLMQYLYVQSPAGLNGFNMVLPGTQTPHTVAPSPAQLPSFGVPCMFLQSPGLGPFPVLYSPAIPGPISSAHGTHPNPGPMNFGLSTLASASHLLISPAAMVNPKPSTLPCTDPQLRCQPSLNLNPVMPGSHGVIHPESPCYVRHPVSMVKAEQSPAPATPKSIQRRHRETFFKTPGSLGDPVFRRKERNQSRNTSSAQRRLEISSSGPD

SEQ ID NO: 3265 - protein, 421 aa, Mus musculus
MEVNCLTLKDLISPRQTRLDFAIEDAENAQKENIFVDRSRMTPKTPMKNEPIDLSKQRIFTPDRNPITPVKPVDRQPQVEPWTPTANLKMLISAASPDIRDREKKKELFRPIENKEDAFVNSLQLDVAGDGAVDEYEKQRPSRKQKSLGLLCQKFLARYPSYPLSTEKTTISLDEVAVSLGVERRRIYDIVNVLESLHLVSRVAKNQYGWHGRHSLPKTLRTLQRLGEEQKYEEQMACLQQKELDLMGYRFGERRKDGSPDPRDPHLLDFSEADYPSSSANSRKDKSLRIMSQKFVMLFLVSKTKIVTLDVAAKILIEESQDTPDHSKFKTKVRRLYDIANVLTSLALIKKVHVTEERGRKPAFKWIGPVDFSSIGKEMRSFDKDLWYIPFPSSTCRQQNWPFPVLPVTRNLRLMTSLLEQ

SEQ ID NO: 3266 - protein, 904 aa, Mus musculus
MEVNCLTLKDLISPRQTRLDFAIEDAENAQKENIFVDRSRMTPKTPMKNEPIDLSKQRIFTPDRNPITPVKPDDRQPQVEPWTPTANLKMLISAASPDIRDREKKKELFRPIENKEDAFVNSLQLDVAGDGAVDEYEKQRPSRKQKSLGLLCQKFLARYPSYPLSTEKTTISLDEVAVSLGVERRRIYDIVNVLESLHLVSRVAKNQYGWHGRHSLPKTLRTLQRLGEEQKYEEQMACLQQKELDLMGYRFGERRKDGSPDPRDPHLLDFSEADYPSSSANSRKDKSLRIMSQKFVMLFHVSKTKIVTLDVAAKILIEESQDTPDHSKFKTKVRRLYDIANVLTSLALIKKVHVTEERGRKPAFKWIGPVDFSSIDEELLDVSASILPELKKEAYGQIRVCAKERLVRYGSFNTVHTSEKIQRKVSSEPSSPQGERQGSAYSLEIGSLAAIYRQKVEDNSQEEAFVSNTAVPPASILDPALSMDSEYCVKPLAQPVFSVAQTDLPAFSAQNGPSGQVGVPVPSAASDTENLKPALLAGQPLVYVPSTQLFMLYGSVQEGLSPESRSEEDGGGSDVPADLSVTPSAQKRLCEERDPQEEEDEPAMKRQSQEFEDSPLSLVMPKKPSSSTDLACPVTMGNGSSPPLEDACVKGQLPAAEEVTGKAAPNCYVASECGNPARNPDTEKPSNENEITKDPSLMQYLYVQSPAGLNGFNMVLPGTQTPHTVAPSPAQLPSFGVPCMFLQSPGLGPFPVLYSPAIPGPISSAPGTHPNPGPMNFGLSTLASASHLLISPAAMVNPKPSTLPCTDPQLRCQPSLNLNPVMPGSHGVIHPESPCYVRHPVSMVKAEQSPAPATPKSIQRRHRETFFKTPGSLGDPVFRRKERNQSRNTSSAQRRLEISSSGPD

SEQ ID NO: 3267 - protein, 878 aa, Mus musculus
MEVNCLTLKDLISPRQTRLDFAIEDAENAQKENIFVDRSRMTPKTPMKNEPIDLSKQRIFTPDRNPITPVKPVDRQPQVEPWTPTANLKMLISAASPDIRDREKKKELFRPIENKEDAFVNSLQLDVAGDGAVDEYEKQRPSRKQKSLGLLCQKFLARHPSYPLSTEKTTISLDEVAVSLGVERRRIYDIVNVLESLHLVSRVAKNQYGWHGRHSLPKTLRTLQRLGEEQKYEEQMACLQQKELDLMGYRFGERRKDGSPDPRDPHLLDFSEADYPSSSANSRKDKSLRIMSQKFVMLFLVSKTKIVTLDVAAKILIEESQDTPDHSKFKTKVRRLYDIANVLTSLALIKKVHVTEERGRKPAFKWIGPVDFSSIDEELLDVSASILPELKKEAYGQIRVCAKERLVRYGSFNTVHTSEKIQRKVSSEPSSPQGERQGSAYSLEIGSLAAIYRQKVEDNSQEEAFVSNTAVPPASILDPALSMDSEYCVKPLAQPVFSVAQTDLPAFSAQNGPSGQVGVPVPSAASDTENLKPALLAGQPLVYVPSTQLFMLYGSVQEGLSPESRSEEDGGGSDVPADLSVTPSAQKRLCEERDPQEEEDEPAMKRQSQEFEDSPLSLVMPKKPSSSTDLACPVTMGNGSSPPLEDACVKGQLPAAEEVTGKAAPNCYVASECGNPARNPDTEKPSNENEITKDPSLMQYLYVQSPAGLNGFNMVLPGTQTPHTVAPSPAQLPSFGVALHVPAIPRPGPFSSSLFSRNTRAHFFSPRHSPKPRTHGLRLVHPGICFSPSHQPGSHGQSKAIHPPLYRPSASLSALTQPEPRDARLTRRHPPRVPLLRETSGIDGKGRAVPCTGDSQEHPTETSGDVLQDSRQPRRSGL

SEQ ID NO: 3268 - protein, 308 aa, Mus musculus
MENQKENLFSEPHKRGLMKSPLHPSSKANMVLAEIQPDLGPLTTPTKPKEVSQGEPWTPTANLKTLISAVSPEIRSRDQKRGLSDNRSALPEARDCLHEHLSGDEFEKSQPSRKEKSLGLLCHKFLARYPKYPNPAVNNDICLDEVAEELNVERRRIYDIVNVLESLHMVSRLAKNRYTWHGRHNLTKTLGTLKSVGEENKYAEQIMMIKRKEYEQEFDFIKSCGIEDHVIKSHTGQNGHSDMCFVELPGVEFRAASVNSRKDKSLRVMSQKFVMLFLVSTPQIVSLEIAAKILIGEDHVEDLDKSKY

SEQ ID NO: 3269 - protein, 209 aa, Mus musculus
MENQKENLFSEPHKRGLMKSPLHPSSKANMVLAEIQPDLGPLTTPTKPKEVSQGEPWTPTANLKMLISAVSPEIRSRDQKRGLSDNRSALPEARDCLHEHLSGDEFEKSQPSRKEKSLGLLCHKFLARYPKYPNPAVNNDICLDEVAEELNVERQRIYDIVNVLESLHMVSRLAKNRYTWHGRHNLTKTLGTLKSVGEENKYAEQIMMT

SEQ ID NO: 3270 - protein, 985 aa, Rattus norvegicus
MPGFQVCSLKAIRVFKEELKQKENIFVDRSRMTPKTPMKNEPIDLSKQRIFTPERSPITPVKLVDRQPQVEPWTPTANLKMLISAASPDIRDREKKKELFRPIENKGDAFVNSLQGMLPRFLSFCILRIVQREIYQALFSESVERIRSPFSLGVFIESLLFSSETCLKLDVVGDSAVDDYEKRRPSRKQKSLGLLCQKFLARYPSYPLSTEKTTISLDEVAVSLGTIFLSDHLLALSLNPLLPPGLARPPFTQSCAGFETAMSRICCDTALTLVLMTEHLKTWKGMVRFVGRRCCCVSTDWREEPDSSAQRLLPEPSSRAAGTEPGVAVSRVRYLRHVRRLVPRKNKQGVERRRIYDIVNVLESLHLVSRVAKNQYGWHGRHSLPKTLRTLQRLGEEQKYEEQMACLQQKELDLMEYRFGERRKDGSPDPRDQHLLDFSESDYPSSSANSRKDKSLRIMSQKFVMLFLVSKTKIVTLDVAAKILIEESQDTPDHSKFKTKVRRLYDIANVLTSLALIKKVHVTEERGRKPAFKWIGPVDFSSIGPAYSLEIGSLAAIYRQKVEDSSQGEAFVNKRAAPPASVLDPTLPVDSEYCVKPLAQPVFSVAQTDLQAFSAQNGLNGQVGVPVPSAASDAETLKSALLASQPLVYVPSTSLFMLYGSVQEALSPESRSEEDGSGSDVPADLSLAPTAQKRLCEERNPLEDDEPAVKRQSREFEDSPLSLVMPKKPSNSTDLAFPVTTGNGRATPLEDACVKGQLPAAEDASGRAVPNGFIASECGNPSRNPDTEKSSNDNEITKDPSLLQYLYVQSPAGLNGFNMLLPGGQTPHAVAPSSAAMPSFGLGPFPVLYSPAIPGPISSAPGTLPNTGPMNFGLSTLASASHLLISPAAMVNPKSSTLPSADPQLRCQPPLNPNPVMPGSHGVIHPESPGYMRHPVSMVKAEQRLPRASNGDIGRRSSRLLAASVIRPLEEKGTNPGTLAQPRGD

SEQ ID NO: 3271 - protein, 881 aa, Rattus norvegicus
MPESLSNMFPPQACASAVDTTTVGTSTVSTSTVGTTTVSTSTVGTSAVDTTTVGTSTVDTTTVDTSTVDTNTVGTTTVDTSTMGTTTVGTTTVDTSTMGTTIVDTTTVNTGTVGTTIVDTSTVDTSTVSTGTVDTNTEAPLHCEHAVKVCAFLADVERRRIYDIVNVLESLHMVSRLAKNRYTWHGRHNLTKTLGTLKSVGEENKYAEQIMMIKRKEHEQEFDFIKSCGLEDHVIKGDHVIKSTAGQNGHSDMCFVELPGVEFRAASANSRKDKSLRVMSQKFVMLFLVSTPQIVSLEIAAKILIGEDHVEDLDKSKFKTKIRRLYDIANVLSSLDLIKKVHVTEERGRKPAFKWTGPEISPNNSGSSPVMPLTASLEAEQSAKENCAKNLFSTRGKPSFTRHPSLIKLVKSIENDRRKISSAPSSPVKSSKAESSQNSPPVPNKMAQLAAICKMQLEEQSSEPRKRVKVNLTRSGHYKPLAPLDPAVNTELELLAPSLIQPLGMVPLIPSPLSSAVPVILPQAPSGPSYAIYLQPAQAQMLTPPHGLSPTVCPTQSSNATGSKDPTDAPTEKTATDATKSSASCRPGSLQPAPERQGAKNRSKETTGDRGTKRTGALEDGGPGPIKKPKEDLKALENVPTPTTLFPSGYLIPLTQCPSLGPDPMLSNTENSGTLSPNHRIYGSPIAGVIPVASSELTAVNFPPFHVTPLKLMVSPTSMAAVPVGNSPALSSSHPAPTQNPSSAIVNFTLQHLGLISPGVQMSASPGPGAGTVPLSPRVEAASVIPDNLSSRQGRATIHDSPVLGQSQLNGQPVAGTGAQQPVPVTPKGSQLVAESFFRTPGGPTKPTSSSFMDFDGANKTSFGTLFVPQRKLEVSTEDVH

SEQ ID NO: 3272 - protein, 403 aa, Arabidopsis thaliana
MSDLSPERFKLAVTSPSSIPESSSALQLHHSYSRKQKSLGLLCTNFLALYNREGIEMVGLDDAASKLGVERRRIYDIVNVLESVGVLTRRAKNQYTWKGFSAIPGALKELQEEGVKDTFHRFYVNENVKGSDDEDDDEESSQPHSSSQTDSSKPGSLPQSSDPSKIDNRREKSLGLLTQNFIKLFICSEAIRIISLDDAAKLLLGDAHNTSIMRTKVRRLYDIANVLSSMNLIEKTHTLDSRKPAFKWLGYNGEPTFTLSSDLLQLESRKRAFGTDITNVNVKRSKSSSSSQENATERRLKMKKHSTPESSYNKSFDVHESRHGSRGGYHFGPFAPGTGTYPTAGLEDNSRRAFDVENLDSDYRPSYQNQVLKDLFSHYMDAWKTWFSEVTQENPLPNTSQHR

SEQ ID NO: 3273 - protein, 379 aa, Arabidopsis thaliana
MSDLSPERFKLAVTSPSSIPESSSALQLHHSYSRKQKSLGLLCTNFLALYNREGIEMVGLDDAASKLGVERRRIYDIVNVLESVGVLTRRAKNQYTWKGFSAIPGALKELQEEGVKDTFHRFYVNENVKGSDDEDDDEESSQPHSSSQTDSSKPGSLPQSSDPSKIDNRREKSLGLLTQNFIKLFICSEAIRIISLDDAAKLLLGDAHNTSIMRTKVRRLYDIANVLSSMNLIEKTHTLDSRKPAFKWLGYNGEPTFTLSSDLLQLESRKRAFGTDITNVNVKRSKSSSSSQENATERRLKMKKHSTPESSYNKSFDVHESRHGSRGGYHFGPFAPGTGTYPTAGLEDNSRRAFDVENLDSDYRPSYQNQGAYILFTSI

SEQ ID NO: 3274 - protein, 323 aa, Arabidopsis thaliana
MVGLDDAASKLGVERRRIYDIVNVLESVGVLTRRAKNQYTWKGFSAIPGALKELQEEGVKDTFHRFYVNENVKGSDDEDDDEESSQPHSSSQTDSSKPGSLPQSSDPSKIDNRREKSLGLLTQNFIKLFICSEAIRIISLDDAAKLLLGDAHNTSIMRTKVRRLYDIANVLSSMNLIEKTHTLDSRKPAFKWLGYNGEPTFTLSSDLLQLESRKRAFGTDITNVNVKRSKSSSSSQENATERRLKMKKHSTPESSYNKSFDVHESRHGSRGGYHFGPFAPGTGTYPTAGLEDNSRRAFDVENLDSDYRPSYQNQGAYILFTSI

SEQ ID NO: 3275 - protein, 354 aa, Arabidopsis thaliana
MSSAIVVSQDAESLGLQIYSRKEKSLGVLVSNFLRLYNRDDVDLIGLDDAAGQLGVERRRIYDVVNILESIGIVARRGKNQYSWKGFGEIPRSLDELKEEGMRERLGYSSSNNSDKVSNGCEREEPLTLTPDDQENSSSSKMDQKKEKSLWLLAQNFVKMFLCSDDDLITLDSAAKALLSDSPDSVHMRTKVRRLYDIANVFASMNLIEKTHIPVTRKPAYRWLGSKSIAERGLSLFNSGEPKRVFGTEITNLRAKRNKTYCSSIRKQIGYKKHDEENTEQESKPAASKYVFGPFSPIGASKTNNDKVGKGRLLEIEALASTYQPQYCNQEITGLLGHFTEAWKKWYAEVDRNK

SEQ ID NO: 3276 - protein, 339 aa, Arabidopsis thaliana
MSSAIVVSQDAESLGLQIYSRKEKSLGVLVSNFLRLYNRDDVDLIGLDDAAGQLGVERRRIYDVVNILESIGIVARRGKNQYSWKGFGEIPRSLDELKEEGMRERLGYSSSNNSDKVSNGCEREEPLTLTPDDQENSSSSKMDQKKEKSLWLLAQNFVKMFLCSDDDLITLDSAAKALLSDSPDSVHMRTKVRRLYDIANVFASMNLIEKTHIPVTRKPAYRWLGSKSIAERGLSLFNSGEPKRVFGTEITNLRAKRNKTYCSSIRKQIGYKKHDEENTEQESKPAASKYVFGPFSPIGASKTNNDKVGKGRLLEIEALASTYQPQYCNQGNNHTLIVS

SEQ ID NO: 3277 - protein, 359 aa, Arabidopsis thaliana
MDSLALAPQVYSRKDKSLGVLVANFLTLYNRPDVDLFGLDDAAAKLGVERRRIYDVVNILESIGLVARSGKNQYSWKGFGAVPRALSELKEEGMKEKFAIVPFVAKSEMVVYEKEGEESFMLSPDDQEFSPSPRPDNRKERTLWLLAQNFVKLFLCSDDDLVTFDSATKALLNESQDMNMRKKVRRLYDIANVFSSMKLIEKTHVPETKKPAYRWLGSKTIFENRFIDGSASLCDRNVPKKRAFGTELTNVNAKRNKSGCSKEDSKRNGNQNTSIVIKQEQCDDVKPDVKNFASGSSTPAGTSESNDMGNNIRPRGRLGVIEALSTLYQPSYCNPELLGLFAHYNETFRSYQEEFGREK

SEQ ID NO: 3278 - protein, 200 aa, Arabidopsis thaliana
MSSAIVVSQDAESLGLQIYSRKEKSLGVLVSNFLRLYNRDDVDLIGLDDAAGQLGVERRRIYDVVNILESIGIVARRGKNQYSWKGFGEIPRSLDELKEEGMRERLGYSSSNNSDKVSNGCEREEPLTLTPDDQENSSSSKMDQKKEKSLWLLAQNFVKMFLCSDDDLITLDSAAKALLSDSPDSVHMRSTSIFPVLDLF

SEQ ID NO: 3279 - protein, 261 aa, Oryza sativa
  unsure (1)..(261): unsure at all Xaa locations
FGSSYLYESSSLHGFFIPISSRHYTYNRKQKSLGLLCTNFLSLYNRDTVHLIGLDDAATRLGVERRRIYDIVNVLESIGVLSRKAKNQYTWRGFAAIPLTLQDLKEEGLKENSNSLRGPGNHDKVSDDEDDEETQSNPAATGSQSDKLNPNSTLPKPLKNENRREKSLALLTQNFVKLFVCSNVELISLDEAAKLLLGDAHNTSVMRTKVRRLYDIANVLSXMNLIEKTHTMDTRKPAFRWLXSEGKTWDETLHISNLNDS

SEQ ID NO: 3280 - protein, 397 aa, Oryza sativa
  unsure (1)..(397): unsure at all Xaa locations
MAAAADAPPPPPEVAPPAPAPAPAPAPYQPPRLAVADGAGGGGGGGGKPCRHHAYSRKQKSLGLLCTNFVALYDREDVESVGLDDAARRLGVERRRIYDIVNVLESIGEMSLRAVSSVASPSLDETSAAXXVSDDEDDDKLDDAEGDAESEKLSLSQSIDNPSDKPDAPPCKPEHRKEKSLGLLTQNFVKLFLTMEIETISLDEAAKRLLGEGQANNMRTKVRRLYDIANVLSSLNLIEKTQQADSRKPAFRWLGQAKRNEGVTVALPPTKTLPNKRAFGTDLTNIDNKRGKLDSTMENRGKPTQDGGNLFNNLQRQLGQENRSDFVYGPFHPAVARKQEHGNRTVQEKERKSIQDWENLASSFRPQYQNPGLNDLFGHYMEAWRSWYSDLRRDRAS

SEQ ID NO: 3281 - protein, 394 aa, Oryza sativa
  unsure (1)..(394): unsure at all Xaa locations
MLPRLLRRSPRPRPRPPPRRRHISRRGWRWPTEREVAAAAAGSRGHHAYSRKQKSLGLLCTNFVALYDREDVESVGLDDAARRLGVERRRIYDIVNVLESIGMLVRRAKNRYTWIGFGGVPAALAKLKXSRMMRMMTSXMMLRAMRRARSSASASPLTXPSDKPDAPPCKLRSEHRKEKSLGLLTQNFVKLFLTMERNLYLIQIETISLDEAAKRLLGEGHAANNMRTKVRRLYDIANVLSSLNLIEKTQQADSRKPAFRWLGQAKRNEGVTVAFKTLPNKRAFGTDLTNIDNKRGKLDSTMENRGKPTQDGGNLFNNLQRQLGQENRSDFVYGPFHPAVARKQEHDKRRRGRALDWENLASSFRPQYQNPGELHSLYISISPNECCFKNPFCI

SEQ ID NO: 3282 - protein, 317 aa, Oryza sativa
  unsure (1)..(317): unsure at all Xaa locations
SVGLDDAARRLGVERRRIYDIVNVLESIGMLVRRAKNRYTWIGFGGVPAALAKLKVRRIRIFYILGFVNYDYKSSDDEDDDKLDDAEGDAESEKLSLSQSIDNPSDKPDAEHRKEKSLGLLTQNFVKLFLTMEVIETISLDEAAKRLLGEGHAANNMRTKVRRLYDIANVLSSLNLIEKTQQADSRKPAFRWLGQAKRNEGVTVALPPTKTLPNKRAFGTDLTNIDNKRGKLDSTMEKEASPRRMVATYSIICRGNXGQENRSDFVYGPFHPAVARKQEHGIQEKERKSIQDWENLASSFRPQYQNPGELQLSLYIY

SEQ ID NO: 3283 - protein, 297 aa, Triticum aestivum
  unsure (1)..(297): unsure at all Xaa locations
XHNASDKPNVPMCPPRSDHRKEKSLGLLTQNFVKLFLTMEVETVSLDEAARLLLGERHAESNMRTKVRRLYDIANVLSSLNLIEKTQQVDSRKPAFRWLGQXQSERKVPLSRLLYQIMSSKRAFGTDITNIDNKRGKLVLETENXXPKLMQGGSSMLKTFESXXLGQGKSSGFVYGPFHPGKETYDQTVRENEMKNIQDWENLAVSFRPQYQNHALNDLFGHYVEAWKSWYLDLTRESTSXRMVXFRQVCCKSVLVGRSTHLPRTLERIRPVQDVIKAQRLISPLLDVFTQCKKETE

SEQ ID NO: 3284 - protein, 200 aa, Triticum aestivum
  unsure (1)..(200): unsure at all Xaa locations
MSAAPPSSTAAETTATAPAPLPRLPIPNPLPLFAERGGGARLRHHAYSRKPKSLGLRCSNFVALYDWDGVESIGLDDASRRLGVERRRIYDIVNVLESVGILARKAKNRYSWIGFGGVPMALRELKERALREKSGLAPLPADANMSDDEDDDKLGDPEAEREGEKLNQTVDNPSDMPDAXSLPAEIXDHRKEMSLGLLTX

SEQ ID NO: 3285 - protein, 444 aa, Zea mays
  unsure (1)..(444): unsure at all Xaa locations
MPPPPPPPPGLPSLAPSPPRPPPSRRRRLRSCASTAPAAAAASREPXRHHAYSRKQKSLGLLCSNFVALYDREDVEVIGLDDAAKRLGVERRRIYDIVNVLESVGILVRRAKNRYTWLGFGGVPAALKELKERALRKMYHRCYCQWRXSSTANLSDDEDDDDEDAESEKLSQPVDNTSDKPDAPSCRLRSDHRKEKSLGLLTQNFVKLFLNMEVGTISLDEAARLLLGEGHADSNMRTKVRRLYDIANVLSSLNLIEKTQQADTRKPAFRWLGQXQSESKITMSSPSMKAMPNKRAFGTDLTNIDNKRGKLDSAAENKVKLMQGAXXNIVKTFXXRQLVQGKRSDFVYGPFHPAGAKKHETDDQTVKQQERKNIQDWENLAVSFRPQYQNQALNDLFGHYVEAWKSWYVDLTQXNGIMKQNVGRSVVTCKPFPVVRSTELLMLA

SEQ ID NO: 3286 - protein, 417 aa, Zea mays
  unsure (1)..(417): unsure at all Xaa locations
YFQEFSPLPRPAPHHAKSSPAKASRLPHGGGANGRHHAYSRKDKSLGLLCSNFVVLYNRDDVESIGLDEAAKCLGVERRRIYDIVNVLESVGILVRKAKNRYTWIGFGGVSISLRELKERALREKSGLAPLQTEQQSAATISEDEDDDTLANQTERLSQTVDKPSGKPGASGCRLRSDHRKEKSLGLLTQNFVKLFLTMEVDTISLDEAAKLLLGEGHEETNMRTKVRRLYDIANVLSSLNLIEKIHQGDSRKPAFRWLGRATLNTENGVTVAATREDRESKKRAFGTELTNIDMHRSNLDSKNKKKAXXLVQSGGDVLTNCKLDVRSRRQGKQSGFVYGPFHPSGARKPGGNKPGQRERAEDWESLSASFRPQYKNQALSDLFAHYVDAWKTWYSEFAQGSSIMQQHFGHLGNHFL

SEQ ID NO: 3287 - protein, 207 aa, Zea mays
  unsure (1)..(207): unsure at all Xaa locations
ARGFLXRLVQTQQADTRKPAFRWLGQXQSESKITMSSPSMKAMPNKRAFGTDLTNIDNKRGKLDSAAENKVKLMQGAXXNIVKTFXXRQLVQGKRSDFVYGPFHPAGAKKHETDDQTVKQQERKNIQDWENLAVSFRPQYQNQALNDLFGHYVEAWKSWYVDLTQXNGIMKQNVGREPPCTRWNKNTKAILSFDCIYSNARSEAIFS

SEQ ID NO: 3288 - protein, 101 aa, Zea mays
  unsure (1)..(101): unsure at all Xaa locations
AVFLDHRKEKSLGLLTQHFLKLFLTMEVVETISLDEAARLLLGEGHAESNMRTKVRRLYDIANVLSSLNFIEKTQQVDTRKPVFRWLGQAKRKQENNAAGX

SEQ ID NO: 3289 - protein, 657 aa, Caenorhabditis elegans
MTTIFGSSNAMFLNIEANKENIPPGTEFKKESFVLPEPRVNRTTDPDHENLLPSPVPRPSPAMSQLSDASFLSQDGGAVNTSADEADDDLEVTSRKEKSLGLLCQRFLIAINEETVGSSTREVHLETVARKMNVEKRRIYDIVNVMEALDAMQKTNKSYYQWQGLESLPKLMFDLQNEAVEEGLPERVLRVEQAMCSFTELSSPRGKQGFKDIVGSFVSCTSTPTTPSTSFDSVTVKMEPAGLLEKRSRVDTRDRQGRNSLAQLCRRFLMVLLSNPKNIRKVSLDVASTVLIKDPETEGFEPPSRSRCRRLYDIANVLVALGLIKKVHYLFGTKKIPLFVYCGPEPDQTGSFDVFQSVERLLSSSQNVPQTPIIKAQTDKIVQQIAGFGKRTLSEQNLTKPSGNTPKIAKIKSAAVRSSPMYMENNLFMFAEVVTAEAAAEKMRYDAFAQLSRTILGSVASINSLNAPLTSSQHPMTSRLPPLPMAPLQLPKLPEIPKPQAQKQFTFPATSRPRFNFPDYTPVQSTIRPLVSQMTFPQESSQLHNLDVKPKHLMSNILGESKKFKNNQNTFEHTTSSAFQVVKKGETRPKFFIFTNNCSLPRISSRYVHRFSEIIWCTVEMKGFGEKTFRRWRDLIEVGAAEKIRSAPLPSPRFLSD

SEQ ID NO: 3290 - protein, 911 aa, Homo sapiens
MEVNCLTLKDLISPRQPRLDFAVEDGENAQKENIFVDRSRMAPKTPIKNEPIDLSKQKKFTPERNPITPVKFVDRQQAEPWTPTANLKMLISAASPDIRDREKKKGLFRPIENKDDAFTDSLQLDVVGDSAVDEFEKQRPSRKQKSLGLLCQKFLARYPSYPLSTEKTTISLDEVAVSLGVERRRIYDIVNVLESLHLVSRVAKNQYGWHGRHSLPKTLRNLQRLGEEQKYEEQMAYLQQKELDLIDYKFGERKKDGDPDSQEQQLLDFSEPDCPSSSANSRKDKSLRIMSQKFVMLFLVSKTKIVTLDVAAKILIEESQDAPDHSKFKTKVRRLYDIANVLTSLALIKKVHVTEERGRKPAFKWIGPVDFSSSDEELVDVSASVLPELKRETYGQIQVCAKQKLARHGSFNTVQASERIQRKVNSEPSSPYREEQGSGGYSLEIGSLAAVYRQKIEDNSQGKAFASKRVVPPSSSLDPVAPFPVLSVDPEYCVNPLAHPVFSVAQTDLQAFSMQNGLNGQVDVSLASAASAVESLKPALLAGQPLVYVPSASLFMLYGSLQEGPASGSGSERDDRSSEAPATVELSSAPSAQKRLCEERKPQEEDEPATKRQSREYEDGPLSLVMPKKPSDSTDLASPKTMGNRASIPLKDIHVNGQLPAAEEISGKATANSLVSSEWGNPSRNTDVEKPSKENESTKEPSLLQYLCVQSPAGLNGFNVLLSGSQTPPTVGPSSGQLPSFSVPCMVLPSPPLGPFPVLYSPAMPGPVSSTLGALPNTGPVNFSLPGLGSIAQLLVGPTAVVNPKSSTLPSADPQLQSQPSLNLSPVMSRSHSVVQQPESPVYVGHPVSVVKLHQSPVPVTPKSIQRTHRETFFKTPGSLGDPVLKRRERNQSRNTSSAQRRLEIPSGGAD

SEQ ID NO: 3291 - protein, 879 aa, Sulfolobus tokodaii
MIIRRIDIENFLSHDRSLIEFKGTVNVIIGHNGAGKSSIIDAISFSLFRKSLRDAKKQEDLIKRGAGRATVTLYLENKGKIYVIKRNAPNQYTSEDTISELTNDTRRTIARGATTVSQKIKELLNLDEEVLKSTIIVGQGKIESVFENLPDVTKKILKIDKIEKLRDSNGPIKEVMDKINNKIIELQSLEKYKNESENQKIQKEKELENIKRELEDLNIKEEKERKKYEDIVKLNEEEEKKEKRYVELISLLNKLKDDISELREEVKDENRLREEKEKLEKDILEKDKLIEEKEKIIEAQNKIKLAQEKEKSLKTIKINLTDLEEKLKRKRELEEDYKKYIEIKGELEELEEKERKFNSLSDRLKSLKIKLSEIESKISNRKISINIEELDKELQKLNEDLNNKNQEREKLASQLGEIKGRIEELNKLLGNLNQVKGNVCPVCGRELSDDHKRKIQNEIIEKLKELDELNKKFKLEINKINGLISELNQIINKKSKEKDIAIRNLADYNNLLTQQQELRKEIEEIENEIERLSIYHEKYIRLKEEEKNLKPKYEEYLKYYDVTEEKIRELERQKIELEKEIEEIMNKVREYYNTDLTQKIRDIEKRIQEIKGKENKLRELDTLLAKIETAKQKIKQNEEEIKKLTDELQLLNFDPNRFQQIKREKEVLEKILGEINSKKGELLGKKEVLENDIKRLEEQIKDYEEKLKNKQKLITAYDKLKKLREHLAEDKLQAYLMNTVKSLVEDSLNSILSRFELSFTRVEVDFNDKNGIYAYTTSGQRLPVNLLSGGERVSIALALRLAIAKSLMNEVGFLILDEPTVNLDEYRKKELIDIIRSTVEVVPQIIVVTHDEELLQAGDYIIRLEKRGDSSKVEVINND

SEQ ID NO: 3292 - protein, 882 aa, Sulfolobus tokodaii
MLKMIIRRIDIENFLSHDRSLIEFKGTVNVIIGHNGAGKSSIIDAISFSLFRKSLRDAKKQEDLIKRGAGRATVTLYLENKGKIYVIKRNAPNQYTSEDTISELTNDTRRTIARGATTVSQKIKELLNLDEEVLKSTIIVGQGKIESVFENLPDVTKKILKIDKIEKLRDSNGPIKEVMDKINNKIIELQSLEKYKNESENQKIQKEKELENIKRELEDLNIKEEKERKKYEDIVKLNEEEEKKEKRYVELISLLNKLKDDISELREEVKDENRLREEKEKLEKDILEKDKLIEEKEKIIEAQNKIKLAQEKEKSLKTIKINLTDLEEKLKRKRELEEDYKKYIEIKGELEELEEKERKFNSLSDRLKSLKIKLSEIESKISNRKISINIEELDKELQKLNEDLNNKNQEREKLASQLGEIKGRIEELNKLLGNLNQVKGNVCPVCGRELSDDHKRKIQNEIIEKLKELDELNKKFKLEINKINGLISELNQIINKKSKEKDIAIRNLADYNNLLTQQQELRKEIEEIENEIERLSIYHEKYIRLKEEEKNLKPKYEEYLKYYDVTEEKIRELERQKIELEKEIEEIMNKVREYYNTDLTQKIRDIEKRIQEIKGKENKLRELDTLLAKIETAKQKIKQNEEEIKKLTDELQLLNFDPNRFQQIKREKEVLEKILGEINSKKGELLGKKEVLENDIKRLEEQIKDYEEKLKNKQKLITAYDKLKKLREHLAEDKLQAYLMNTVKSLVEDSLNSILSRFELSFTRVEVDFNDKNGIYAYTTSGQRLPVNLLSGGERVSIALALRLAIAKSLMNEVGFLILDEPTVNLDEYRKKELIDIIRSTVEVVPQIIVVTHDEELLQAGDYIIRLEKRGDSSKVEVINND

SEQ ID NO: 3293 - protein, 1177 aa, Thermoanaerobacter tengcongensis
MKPIRLKISGVNSFTEEQVINFELLTEKGLFGIFGPTGSGKSTIIDAITLSMYGKIPRNSKDFINTDSLSTSVVYEFEIGVGTERRRYIVERNIKKDLKNGGYKTTLARLREITAEGEKVLAEKEREVHQKIVEIIGLTAEDFTRSVVLPQGKFSEFLKLSGRERRDMLERIFGLERYGNDLMEKVRKVKNEKALLLGMVNGELSRYEGVTEEALKEALAKLELLKEEEKNLSAEREELLKEREKLKEIWERQKELNQFLEKKRLLDEKASEIEVKRGKIEKARKALSVKPYIDSVEETEKKLLLNKKELEKHAKELEEVSAQLEKIEKDYEITFREKEEKIPLLIEKEERLKRAVQIEDEIKRLSEEREKLLTEYKNLESNIKRLEEEKEKLFLSIENLKKNIAEKEEKIVSIRISTEEKENVFKAFELEKEFERVKREREEKAYKIEEIEKLVEKQKGEYERIKVELTEKEEELQKEESSFNLLEVQKPLSSEELFNFQKELESKRLKLIEAQRNKELEEKLEKTLKEVLEEREKLVGELEKTEREYVEKGKALDALQKEIEEIVRKNMAGELAEGLEEGMPCPVCGSFHHINLAKKVDEKLIEEKKKLERGLRTEREVLQEKLIMLKSQLSGFTAKEEISRAELEKAKENLRGIDLEILRKEIEEMEVKFKEEKEKLEDWAKEKEEKEKVLKRLKEEKGQLALEEARIKERLQKDLKLLEEYKLSFEGIEREYQSLLKELENWKEKLGYANFSEKVEEINQKEKLIEKLREEVESLKKNLEELNIKREKVLEDLNQLIVRKTQVVEVGKEKRSVLEKMQKELYSYSEGKDVKKYLEDVQKERAEILQRESFLKNRLEEERRKKQEIESKKVSTLENQILLTNMLKEQIEKLELSLSKEGFKTKEEALSFVISSEEMSEIEIEVKRFENEYTSLVANIERLEGFLKGRQIEEEHWNRLEERIRELEEILTGKRKEIGATEKAIHDMKENLKKVEELTKKKKELEHVIDMLEELDKLFQGNKFVDFIASKQLKYITFSASKRLKEISRGRYALEIDSENNFVMRDDFNGGVRRSVDTLSGGETFLTSLSLALALSSHIQLKGKAPLEFFFLDEGFGSLDSELLDVVMTSLERLKKDKMVVGIISHVEELKDRVPVKLIVTPPTVSGEGSKVRIEYT

SEQ ID NO: 3294 - protein, 739 aa, Streptococcus pneumoniae
MFASKSERKVHYSIRKFSIGVASVVVASLVMGSVVHATENEGITQVATSYNKANESQTEHRKAAKQVDEDIKKMLSEIQEYIKKMLSEIQLDKRKHTQNVNLNRKLSAIQTKYLYELRVLKEKSKKEELTSKTKKELDAAFEKFKKEPELTKKLAEAKQKAKAQKEEDFRNYPTNTYKTLELEIAEFDVKVKEAELELVKEEAKPRNEEKIKQAKAKVESKKAEATRLEEIKTERKKAEEEAKRKAEESEKKAAEAKQKVDTKEQGKPKRRAKRGVSGELATPDKKENDAKSSDSSVGEETLPSPSLNMANESQTEHRKDVDEYIKKMLSEIQLDRRKHTQNVNLNIKLSAIKTKYLYELSVLKENSKKEELTSKTKAELTAAFEQFKKDTLKPEKKVAEAEKKVEEAKKKAKDQKEEDRRNYPTNTYKTLELEIAESDVKVKKAELELVKEEANESRNEEKIKQAKEKVESKKAEATRLEKIKTDRKKAEEEAKRKAEESEKKAAEAKQKVDAEEYALEAKIAELEYEVQRLEKELKEIDESDSEDYLKEGLRAPLQSKLDTKKAKLSKLEELSDKIDELDAEIAKLEVQLKDAEGNNNVEAYFKEGLEKTTAEKKAELEKAEADLKKAVDEPETPAPAPQPAPAPEKPAEKPAPAPAPEKPAPAPEKPAEKPAEKPAEEPAEKPAPAPEKPAPTPEKPAPTPETPKTGWKQENGMWYFYNTDGSMATGWLQNNGSWY

SEQ ID NO: 3295 - protein, 558 aa, Streptococcus pyogenes
MARENTNKHYSLRKLKKGTASVAVALTVLGAGLVVNTNEVSARVRYTRHTPEDKLKKIIDDLDDLDAKEHELQQQNEKLSTQKQALESQKQALESQKQALESQKQALESQKQALESQKQALEGRTQDLEGQTQDLESQKQAPESHIQALESQTQDLESQTQALESQKQALESRKQALEEQNKQLSTQKETLERQVQEAQHNNNELTEKLDETQKKLVNKQQESEETKKTLNELLDKTVKDKLAKEQENQETIGTLKKILDETVKDKIAKEQKSKQDIGALKKILDETVKDKIAKEQKSKQDIGALKQELAKKEEHNKISDASRKGLRRDLDASREAKKQLEAEHQKLEEQNKISEASRKGLRRDLDASREAKKQVEKDLANLTAELNKVKEEKQTSDASRQGLRRDLDASREAKKQVEKALEEANSKLAALEKLNKELEESKKLTEKEKAELQAKLEAEAKALKEQLAKQAEELAKLRAGKASDSQTPDTKPGNKAVPGKGQAPQAGTKPNQNKAPMKETKRQLPSTGEATNPFFTAAALTVMATAGVAAVVKRKEEN

SEQ ID NO: 3296 - protein, 1163 aa, Clostridium acetobutylicum
MKPIRVRIKGLNSFENEQEINFEKLTKRGLFGIFGPTGSGKTTILDSITLSLYGEVARKSSNFMNTNCNSLNVSFEFQISGKEIKRYLVEREFRRDNKTGSVRSKSAKIVDITGDEVEVLEEGAKSVNEKCQEIIGLSLDDFTRTVVLPQGKFSEFLKLEGKERRNMLERLFNLQEYGDELSFKLARKIRKEREKENVLVGELKGYENINEDVLKERRELLKENNDFFNEASKEYLKAEEEYNEGKEVWGLQIEIEEKNRVRKDLMEKKDEIDLKEKRARLGESSSKVKPYIDNYENTLKQIDILKEQILSRENTMKAISLEKEDMEKKLSIAKDNKEKALPKFMIKHHIILDAIKEKDLLDNIKLEKKRLQGKIEKLSLEASNKEELIKQNIKDIDSLTLKIQNLESKIDNLKVPEEYKNKINEGIFLLRNYDEKLKHKNKLGLDCDKFQVDFEKAKSKKEMLFNKLEEERSKLDTYTKKLQDLNKDFPKDDVLLTFQEKLNDSRQKWAKYSEYNESLKASLRVVENSEQVLRTKKEEMTKLEDKISKVNIKIESLETENMAHVLREKLKSGEACPVCGSVHHIKEGFKEVDLKALETLKSELEGFEKKRKFENEEIVMCEASIKVEEKNIKKLNESINNLGEEFKEVSLESMEKKFNYLKEKVNKFNLEKIQLDDNIKDLSERSNKIEVEYQKEKTVEKQCEKRIVDLKSELEEAIKEFNEVAYTIENLKAELKIQDFKFEMKEILEKERVRVEAEGEIKDLRNLLNIRHTEKEQLMDKCSRLKEELSKNKAELKEKDKIINEKIELIKNKVGVLDNLYELKEKIEGTIKKIEEQYNLCDKKMNEIEDKYRKCSDEIIKYHSNLSSLKDRKVNDIDKLNKILMEEKFENIEKAKENYLNDKEINLLKSDVEKYKNELSKVNGAVEVLSKKLKNRKLTEEKWIEIQNNRVEKASKAKALQERSIKLEEEVKNIEIKLKELGKLLKTKQELEHKLSLLDDLEKLFKGKKFVEFVALNQLKYISIEASKRLKEITGGNYGLEVDDNGKFIIRDYKNGGAKRDASTLSGGETFVTSLALALSLSNQIQLRGSAPLELFFLDEGFGTLDSNLLEVVMDSLEKIHSERLSVGIISHLEVIKERMPVRLIVSPAEAGVGGSKVKLEIS

SEQ ID NO: 3297 - protein, 1606 aa, Anopheles gambiae str. PEST
AVLTADTDSFIIGQRVWVGGIRPGQIAYIGETHFAPGEWAGVVLDEPNGKNDGSVAGKRYFQCEAKKGVFSRLTRLTREPLANAGGGGGDSTASTPLDASFRSLTSPARSGTVSPTHSVQSYASKSPAMAGKAASLNVGDRVIVSSGFGSRPGMLKFIGETQFASGTWCGVQLDEASGKNDGTVDGVRYFECPAKYGIFVPIAKVTLSPSARKTSARLSRANSKESLNSLATMSSIATTATSRLRMSAQVSLAAWKSTVSAVPSTPKSSFSLQDVLREKQNHIEQLMQEREIDREETANQSIMYQKNIQQLKEKVTLLEKSLADEKRRNEDLQFSVDEATFCGEELNAQTQVFKEKIADLEAQLAAGGTAGKPNEPTQPGVPPEEINECLKEQINYLEHRVDEQSDQLTVKDAELEKQYLALKNAESEQEERLAALQDELRSKKDLLAERDQQVQLLEQTVEELRADVRQRDLKTVELESDLRAKLQEQGTSSSKLAEKLSELEVALVEVNASKTHLERDLTNATQTIKVLEEDRSVKEKAAQEVESKLTASEAALKAEIAARQEQESLAQKLQRDLQSLATSGESSAALLAAKQDELSNQAKQLQELEAEKVKVQQELSSLQQKFEQSRTEHEQLIAEVHALADAERNTIAELRKQLQTSEQENLAKDKQLEENEVLVSALQNELKELNVSKASLNQELTAIKASFADKDGTLANILQEKTALEKQLEESKQELASKVKQLEEDLRNREDTLRKELELSASTAQQQLSAKEEELTRLSQAREELQKQLETAQQQMKDVSDKMKQAEDTIATQTNESQSLNQQLSSLRSELSSKDEQLAKLNAVLAETAAREEAGGKKLGEAAEQYGKLEIEHADLRRKMDAQEQKSAQVQQQKLDLERELDLQRSSTLDSNSELAKLTDELKTKQRALDELRDSYDTLKIETERRADESAQAHAALQEQVERVRQEMQQISDQKIIQENELNTELRKIKELAEQEQDNLVRTIAELKVSFEQERQRIDSEHAAELAKSVSEREQQMAAMKSELESALGELKAQLEDARTESKKLQELNETAVRAAKEQEESLQKQLQQSRDESSTLQQRLDELRQSMEQGSQDLTVQIDQKAQRIVELEQELDEQRTLQQKRSAEVAEMVAKLEENGKSYAEMLQQLQDSYTQIEALKKAKSESEEACQQVQQRLQDLNSSYSEMEEEQVDLVSREETLRKELAQLQEQMQQAAGEQKERQTTSSDAKIVEKEEELKQLQTASASKDTQLKDLQQQLEAMQKTLADSTELSKRTAVEASELQAALEKSRTTVKEQEDRQKEQQRRIAELETKLAAQATQFDELLDRKKSAETEYSHRTHDLSQKLLELESAKKQEIDELQQRLAELMQRVETQVSETAQTVSSKRAVEKRQHELECAKKDLELRETELQLANRRLEKDNEQLRSQLVLKESELTKLAKAATAAATAADNSGSVPNRAVGVTSDSKEDDSGAQIDFLNSIIVDMQRKNEKLTLRIQALESTSADSHNMSFDIQKRKPAPRVFCDICDEFDLHETEDCPKQCSDSPPESLKHPSDGKERKVPPPRKYCESCEVFGHEIGECPDDETY

SEQ ID NO: 3298 - protein, 1432 aa, Anopheles gambiae str. PEST
MFKKLKDKIAEEVKQSPQRFEQISKGLQAAVSSASSTTSEVSGSENFFSITEDDTPQNSPQRGTTTTSTSTPVQPNSSNVANASSASSSILQQQQPRTRRLSNSSMASDVSFRLPVYDSPAIYHLETDVDISASETESVSGSANANQLDLVSKDKLFQAYKKALDRYQKYRERYTELARRYRELEKDNNKARAVLVETQDKALRRMSELREQCVLEQQAKAHLDSALRMEIDELQCVVKTLRSKLEMVGENGNVSGGEKDLISLAGEDGTNGNTDGHVPVRDTGPLEDRIKALESKLNDELRQKAVLSLEVSELKKREEEHTITIAENKMAIHSELEAKEAEVRKLKEQLASLEKNMKQTLLEKDGLGKELSEVRKVAGKVRELESALGTCNEQKNKLESKFIDFERTIMELEKDKQQLKATNLTLDYEKGELQKKGSEMDARLVGMEKEKADLLVQVQELQKTAQSLDRKAEIETLQQELDEAKKSVEESAQKVAAVEQQLNEKEQQLSEARTTRESLEKQVKQTEARLAESEKEIERLQNQQSEQHSKDREESVKKLQQAEEELAAFRKSQSLDQEKLLELTKALDAANELHDRDRKSSEASLKELLERNNQLTEQLEQLQEKLDKTSGKQKKIQEEKNGLRAANDDLAKELKQVRQEMKQLTAQKQTLTEEVRNLKIINENSESEALRSLQESMRASMAAAETKLLETTRDLNHVLELKSDENRRLGEERDELVEKLEGAHKEKADLETEGTSLRAKIETVRGEKRDLEKTLEREIREKTELKAQVENILQEIGRLEEQLKDIKEAHSKLQEEKQTLEEKIERLQREHCEARVKLEKDTVGKLAAKVKDHETKLQQVECENSQLAEKNCLLEESSRRTAEELKRLTAALRAAEQGAREGQEKCGKLEEQLSQCTGDHARLYNEKELLDHQHRSLQDAMEAREKEKLCVLDTNKCLEEELAKVRSENDYLKGKHHELKALLESDKRRLMDQNDALQRQMEELAKEKQSLGRNATDLEKRLASYEEVKIENEYLNTFNKQLQGELQEAKGRVAAKETELTTLRTKQSQTESMLEERDKEITKLINEFVAKEKKQEADHKQRLEELEQRLRAELDGVAERVRSECDATLAKEKKTLRDEQTALEGRLEEMRKEKQTLREEQTALEGRLEEMSKEKQTLEQKLEELSRKEDAEKELRLENANFARDLDELKNELNAAIVEKLSQVKEHEQAQQELRAQKDRLETDNEQLRTRLAAFTAETEQNVRRFEAEIEQLKTASSSAASAPHDGTDGAGPGATAELQQSYEELRNKKEELENKLKKIMHEVQDVSNRNLFLEQKCENYLILEQSNERLKLANDKLSRQLDETLVSMHHNEGIAANTEFEYLRNILFQYLSGSVTGNNSTLVKVIAAVLKFSPQQTQVVIEKEAHRRSLV

SEQ ID NO: 3299 - protein, 1035 aa, Giardia lamblia ATCC 50803
MPLADSSPAAPMATDISRKDREIARLSHEVTTLTLTVMHLQSDIDVRDAQIRTLKSSSGGSSTDDEVKELMELLGGLQQETQLLRQQLAQKDALVDALSAKVEGRVIDFVAVVKEKDLEIAELHADLSRLRADHIRTKRTQDGTGSGAKTPTTPVSIKRSSLRESFGNTLEFNKLNDDLASRDEEIAQLTTSVARYRRELEEIQAADDSKARELLEKDREIEAFKQSIEIMANDLDRKSTEIAKLTEQCKTLEAELVKLSEATQNNLRSSRTLEGKVEELEELNMNLDLQLSQAKDDYASMNSSITAELTQRCSELELLRKEVDSLKEINKTQASEVDTLLSDTSVLRKNNEQLQLKLRDSLTRLDSQQDHIAAISAEKQASDEEMALVKAQLNSLQAQEIDNRNEITSLSSSLNKKDEQIAVLQKQVEVIPSLLAEKEGLALDLRKSTDSLKAATDTIDRLTEELVDKKNKICAYKHDNESMFEDLRMRNNSMAQLQNDLKRLSESASQREADLAEQAQKLKAALSDGEHLTCINIGLTEDLQAKTEQVEKLENNLTAEKAITLEKSQELERVSALLDQREHDLEVAAETISTMKSTTDSLEKKANGHETRVLELTVENDRLMRELTECRGTLEQAEQQIRELEIAQAAKHEKIDTLEKELQRSTELYSSKDAELLHASQRLSSLEEENKALEATAKDSLNQVAAKTEQLDALQRSVAEYDRSARERDLELEALKNEAEVSSTRLASLLAQENSNNDLIEGLKRQVNEFSNKLLEAKQAQQESSRRCAELETDYYTLQCSLEEKQASLQLETEKCTNMAHKLSEATYLAEKYEGEKAQLISQLQQTREDLKEAEKEAELVRTNLKEKITECDGLAVKLSLLEDEHEVLKVNYARDKGELKEKERQMEDLENELLVAEDNVRELTNEMDEMRRQLESVLHEKQLQEVEVNRVTNTLNVTTDTMKKQSAERTLLMEKLRLKEEEYRIPQESLIKMAFYLREKGDEVTKLNELLAEKQKTIDDLLLRIETTNDPAIA

SEQ ID NO: 3300 - protein, 882 aa, Pyrococcus furiosus DSM 3638
MKLERVTVKNFRSHSDTVVEFKEGINLIIGQNGSGKSSLLDAILVGLYWPLRIKDIKKDEFTKVGARDTYIDLIFEKDGTKYRITRRFLKGYSSGEIHAMKRLVGNEWKHVTEPSSKAISAFMEKLIPYNIFLNAIYIRQGQIDAILESDEAREKVVREVLNLDKFETAYKKLSELKKTINNRIKEYRDILARTENIEELIKENEQELIQVLQEISKIEEVLPSKRSKVDMLRKEVLRLEETKVEIENSERLLEKRRGDKRTLEERIKNTEEYLEKLKEKEKELEEQVKEITSIKKDVDAYLALKEFKNEYLDKKYKIEKELTRVEELINEIQKRIEELNEKESEKEKLENEKKEILNKLAILEKDHQLYEEIKAKKENLRQLKEKLGDKSPEDIKKLLEELETKKTTIEEERNEITQRIGELKNKIGDLKTAIEELKKAKGKCPVCGRELTDEHREELLSKYHLDLNNSKNTLAKLIDRKSELERELRRIDMEIKRLTPLLTVAEQIRSIEEELNVVNLEKIEKNATEYEKLLEELRTLEGRIRGLAEDLKKLAPLEKKLAALIHKKQELEKELKELNTKLESFGFKSVEDLDSKLRELEEIYKRYLTLLNSKKELEITQREIAKAKETLEMSFEELAEVEADIERIEKKLSQLKQKYNEEEYKKKREEKEELEKELARLEAQKKELEKRRDTIKSTLEKLKAEKENRERVKKEIKDLEKAKDFTEELIEKVKKYKALAREAALSKIGELASEIFAEFTEGKYSEVVVRAEENKVRLFVVWEGKERPLTFLSGGERIALGLAFRLAMSLYLAGEISLLILDEPTPYLDEERRRKLITIMERYLKKIPQVILVSHDEELKDAADHVIRISLENGSSKVEVVS

SEQ ID NO: 3301 - protein, 1137 aa, Leptospira interrogans serovar lai str. 56601
MGIELLLPFIASVGITILLRRLDKSNYKLSQIKRFTGKVQEELNGIALEKIGSVKDAGIDLEISLKQTRKLANEVHSLNEESRQLLESIKTNRDFLDSVARDLKEVVQLSSEIREESNAIQQGLLRMESGKKEIQLLDQKILDLRSEAEAILEVFSDKVNLRSDELLQSLASKIVELEELLEIKNDKIDQGLNSIAVNYKEGLEAHSNSLMRESVGRVEQLRSEITSLFETIRNKEEDWDLRSEKLQTIFLTVSDKLERLDLRIEEKTEAADHKLEEMAKLAEKSSQEKLDRILEQVTHSKEAFINGVKLEVDSIRREIEGMSLETMTRRDEILNETRRQAESINESIQFFQEKYLEAENKLLRQADARKSELLRQIDTFEEEFNRISSNLRNDSDVLKKEILLGFKEFHSTLEVAKEDAKEKTIQGIVSLKEEFDLELSKLHSERSALIRQDLEVVRQSIETLDKQISTRIKDVDSYLGDLQAALESSAGDLVAQVEEKIDLLSGTVDEEVRKIDQRFENLSRYWEEELGNIRLNAQDQMGRLQEKLGDVHIEGKGLLEEFKNEYSIQKDKIEEFVSRYKSNFQKEGDLVSDRLGESLRHIKEEGNEILQTLRVEFSGTIDKMEQIVKKNEKVLEIHAEKIKNNVESSLENSSRDAERVLDRLRDSAEVFFEKQEEKISRLNETIDSKISKQLTSLMDKGQLQLGQLEDRISKYILDVKKNLEESLKNSRKDNDDQMKGFQQQLQNQLYEMETAAQEILRSGKEEFDGSMMEYKELQMNLKRDLEEIRNSKQNLISEIQEESENLRSSVEEITDKMDEFGEKMELFQKASEIVDRTDSYIQTMEELLSKADEQTPLLNELGQKLNELQNLKYSLVHETEDLKLKLDSFHSIKESSDLLRSDFEELQRRSSEWQDTFTKLLEAGEKALEMEETFGDLSSRLETLESVREEVKILFEETETHKESAKGIANKLYSLQNDVEILEAREKEIAETVRKTDDRIESLFRKKEEIRSVEAKFEKIEDLMVDLSERHKQISTLQHRMEDLKNGAMVVKDDLEGLLGEADDKFEKLSGFLDAVDNVTSGKSKDSSKDHLIQRKKATVLNLYHNFQWPAETIAEKLNLETGLVNTILQSESIKKK

SEQ ID NO: 3302 - protein, 1175 aa, Clostridium perfringens str. 13
MKKMKPIKLEVKGLNSFIDKQVVEFDKLTERGLFGIFGPTGSGKSTILDGITLALYGDIARKSSNYINTNCDGVYVSYEFQITGNEVKRYRVDREFKRDNKSGGIRNKSSKIIDITGGVENVLEEKAKAVTSKCEEIIGLKLDDFMRTVVLPQGKFSEFLKLEGKERRNMLERLFNLRKYGDDLSSKLSFEIRKEKDKMNVLEGQLKGYEGISEEALKAKEEEIKEINLSIKSKEELLNKIKKEFEEAEKVWNTQKELYDKRIEEESLVSRSEEIKSFKERVEISNKADKVIVFINNLEEILKEINKEDLKFSELNKKLEELINLREENKLKFEEFTKKKEEKLPDLRLKKEKLLESQKERDILFQIKADGVKLKEACKKIFEDRSKCDTKLNSIEENEKRLNEELKEKEERKEELFVHEEFKNKINSGLFILNSYESLDKQFNEIKSEEVELKKYIKNLTEDKEKSEKDLKVKVESLSKIRDKLESLLKETPGDSNSILEKQIKLGEYREKLNKYKEIKNSLEESLKTKNNFEEKLKTFENQKLLLEKEVRELKDYINKVKVEELAHKLRENLVEGECCPVCGSTHHELNKVEKINLEESNEKTILLESKEEKLKELILEFSKIEATLEYENKKIEELNISIEEVGEVNEERLKFLEEEFNTLKDKIEEFNLKKENLEKDLEKLKEEKNNLENIFNKAEVILCEKIVREKEIASKIKELDKELKLKNSELNSIKNELKIEDIKLENELILKKEKEKNLLEKEIRILRTQLEESNKIKDELREKRDALKENYLSQKSLLDGKVEVYREKERMIKGSLKGLIDEALPIEKIDIKGLLEDLQLEIDYIEKAYLNLSEAKEKLEKAFNNMNQEVSVTKERVNSLKLRKENEEKKVNLALEEEGFKTILEVKEGILSKDEKEKLKTLIEEYDNNLIKIKANIELLIKKLNGKSLTEEEWTRVLQEKNNTEKELKEVEELKIRLVTESESIKKKLEEQRDILHIKAKQEHKLALLSDLEKLFKGKKFVEFIAANQLKYISIEASKKLKDITNGVYGLEVDENGKFIIRDYKNGGAERDASTLSGGETFLASLALALSLSSQIQLKGTAPLELFFLDEGFGTLDDNLLDVVMSSLERLHHERLSVGIISHVESIKNRVPVKLILTPAEAGIGGSKVKIERS

SEQ ID NO: 3303 - protein, 1805 aa, Mycoplasma genitalium
MKPFDKKPSLQPIYDIGFDDGYLQSEYEKNRSKTDVDKIENQLLKEIKSLEDELKNLKGLKNQAEDNPELDKKINHLEVDLNRLVNEYKNFQFQKNHMVDKVSELDNLTRFYKNELTRLQQENADFLNSKYANLANFQANYHNKLNDFHRLIENQNQTINRLNQKINGNQNLIDNNVALLQNPNITVEKKNYLLNVIDQLYNELDQLENQKRLLSIEYENTYRELVSADNELQNVYENIDQNQIQFKHQYQTYRDELSQLERKIQLTKQELVDKESALRVKIDDADFYINARLAELDDVAKQLSFQDGITKQNAQHVEDKLVALNKEKDRLNTQKEAFFNLRQSALIDINKLQQENELFAKHLEHQQNEFEQKQSDSLLKLETEYKALQHKINEFKNESATKSEELLNQERELFEKRREIDTLLTQASLEYEHQRESSQLLKDKQNEVKQHFQNLEYAKKELDKERNLLDQQKKVDSEAIFQLKEKVAQERKELEELYLVKKQKQDQKENELLFFEKQLKQHQADFENELEAKQQELFEAKHALERSFIKLEDKEKDLNTKAQQIANEFSQLKTDKSKSADFELMLQNEYENLQQEKQKLFQERTYFERNAAVLSNRLQQKREELLQQKETLDQLTKSFEQERLINQREHKELVASVEKQKEILGKKLQDFSQTSLNASKNLAEREMAIKFKEKEIEATEKQLLNDVNNAEVIQADLAQLNQSLNQERSELQNAKQRIADFHNDSLKKLNEYELSLQKRLQELQTLEANQKQHSYQNQAYFEGELDKLNREKQAFLNLRKKQTMEVDAIKQRLSDKHQALNMQQAELDRKTHELNNAFLNHDADQKSLQDQLATVKETQKLIDLERSALLEKQREFAENVAGFKRHWSNKTSQLQKIYELTKKQESEQTQKETELKIAFSDLQKDYQVFELQKDQEFRQIEAKQRELDKLAEKNNQVKLELDNRFQALQNQKQDTVQAQLELEREQHQLNLEQTAFNQANESLLKQREQLTKKIQAFHYELKKRNQFLALKGKRLFAKEQDQQRKDQEINWRFKQFEKEYTDFDEAKKRELEELEKIRRSLSQSNVELERKREKLATDFTNLNKVQHNTQINRDQLNSQIRQFLLERKNFQRFSNEANAKKAFLIKRLRSFASNLKLQKEALAIQKLEFDKRDEQQKKELQQATLQLEQFKFEKQNFDIEKQRQLVAIKTQCEKLSDEKKALNQKLVELKNLSQTYLANKNKAEYSQQQLQQKYTNLLDLKENLERTKDQLDKKHRSIFARLTKFANDLRFEKKQLLKAQRIVDDKNRLLKENERNLHFLSNETERKRAVLEDQISYFEKQRKQATDAILASHKEVKKKEGELQKLLVELETRKTKLNNDFAKFSRQREEFENQRLKLLELQKTLQTQTNSNNFKTKAIQEIENSYKRGMEELNFQKKEFDKNKSRLYEYFRKMRDEIERKESQVKLVLKETQRKANLLEAQANKLNIEKNTIDFKEKELKAFKDKVDQDIDSTNKQRKELNELLNENKLLQQSLIERERAINSKDSLLNKKIETIKRQLHDKEMRVLRLVDRMKLAEQKYQTEINRLRTQTFDSEKQDIKNFFPPLFKINGNDMAFPYLYPWLYPQQKQDDNTLQIRQLFEQQLQFMQQRYENELNELRRQRNLLEKKLDQIQLESQLNNKQSEFSKVESMMEKLLEKTESRLNDFDQKINYLTKKVNQHNTYQPSSYQPTPSYQDSDKQQLLFRIQELEKQNLFQQQFQPAPAVVQQPTSFAAPNITKQQQIAQLNAEINNIKRLIAQKAASK

SEQ ID NO: 3304 - protein, 1404 aa, Mycoplasma hominis
MKKKLNILLSISLIAAAASTAAIASVCASKNNKFRKQRKYNKETEKQEINQAKENLKKLLELIKSSDIDKTNESKVLDNSKIDENSSIEDIQNKTQEIEKAIESLTKKINDKNKKHEEDQKIVQAMQEFKKSQKALGDLINSDDGQRVDNSNAKQSLQNNTVNNKSSIEQIIQAISKINEAKKELQSQINNARNQEKEVFEEKKQQLNKLIKSNEIDNSKKADETAILKNTNVVVGDSIKTIETKTKEIEKAIESLTNKINEFKKEQEKANVKAVFSKKSKQLKDLIDSEDGKKVDSSNESQVLTKTKIDENSSIEDIQNKTKDIEKAIESLTNKINDQKQQKNMLNEVINKAKELVKKLVDSDSEIQQAKTQLDQEIQKASQVVASNDTKAINSSKTSLDAKITDITKKLEAFNATKKLEFTKLQETRSNIDKFLTPEVKANPNYTTLVNELEVAKKAKEWVSESSNKSDIVAANNELKQAFQTAQSSKNDADKTSNEEKAKLSASLSNAKKLDKNLTDSDGEIQQAKAELAEEVEKANQAITSNNTKEIQNSNTSLLNKISEVKNKLDKFSNEKEAEFNKLEASRSAIKEFINENNTNPNYTALIQKLQAKLDAKNSITKSSNKSDIIATNQALQEALAIEKTEKESANSQNQAVKNTLNETIGKAKELDKNLTDSDGEIQQAKAELTNEIEKANQTIASNNTALMENSNTSLLNKISEVQNKLDKFNNDKKAEFNKLQELKNKIDDFEKKNKNNEIYSKFNLDELINKSVQIKNSLGSINESSNKKDIVDANKKMQDALNELQAKMAEIHKKTFQEFNEHKNELENLIKKEDAKEVGTDEANTAITNNDVKENSSIEEITKATKALDEAKSKLDQKINTQKATELNSLNESKEKLNNLITSSSNQVSAEEISKAKKVLEEINNLSLNNDSSIKSLKEATQKIKDAETQLTKEIEKAKIEKTDKLKKFNEVKKSLEDLIKDDDAIQVGTDDAPKLLEDNNNINENSSIEEIINATKTLEDGKSKLDKKIKTKKQPLIRDLKRKVDDLSRWLEYSSNSEEHFAALDPDKRPKNITLDTIKKDLEDARRLLQEANKLNDDSKIANINKKIDEIKELNKKTNLWVFAIEYAFEYLARKIENSEKSIDWYLKEFKSKEKNREFVTKLREKVEKIKKLSKENKIPNLKKAAEYLENLAIIPLLLFQYNFYYELPATLQEKLIKEFENILDKETIPSDSEITELENKSIELMIAQDPKIAFTILQKQSKDLSFELRNFIELHDNGYNNFRTWMNNSLKTIEDKYNLALEKNDLDALKKEIIKMENFYKLIKTFHLYLCEIGFIKSMFYYDDKKEEVSKQAFECAKNALNDLASQDISNKELISKKVTDIKNEFYKAYINVWRKFCLND

SEQ ID NO: 3305 - protein, 921 aa, Fusobacterium nucleatum subsp. vincentii ATCC 49256
MIIKKVQLENYRSHSNTTIEFTKGINLILGKNGRGKTSILEAISTVMFNTKDRSGKETGKSYIKFGEKSSKVDIDFIANDGREYNLKTEFFKTKPKKQTLKDMIGSEYDGDIQEKLEELCGIKKGFEETYENIVIAKQNEFINIFKAKPKDREEIFNKIFNTQIYKEMYDSFLKEAIDKYKSEKENLDSKINSLKENMEDKEQITNFLKEEKEVEKNLQDRFKNINVVSKNLENEIKDYETTEIELNNLIKNIKDEENKIKKYLNILKENIIEAKQAKKSKIIVKETEKSYFEYLEIENRLKDLRENLDNLLDEQKLNIQYQNNIEKLELSNKNLKVDISNLEENISKNSEKKENLESEISNLKIKEEDLDLKLKKYTTLLDELEKLEKIKKEKSDDKLKTTAEINIFQKNLSLKKDLFKAINIEIIEKKLSDFQELEKELKLLEEQKIIFETEIKTLKKSSKELSNKICPFLNEKCQNLEDKEAEDYFSSKISIKTEDLENLKKNIEEKTQILVEKVVFEDRKKQYFELEKSIKDLELSSKNEEINLKEIELDIKNLDMNIKKLIENQEFQNSQMLREKKKELEVELRNLNLDEKRENLKNLLENLETEKEKILKNQNSIESNLKKIDEFSKKIKVDTNKNIESIKSEIKTFENKLDDLKNPYNEYLKNNVLAEDLENLLLKVDKNIKELYSLRTDKNLLKEKVSILEEKIKNIKIDELKEKYDIIKEELNEINKKLGSSQEKIENYKKILEKISSQEEKEKKLLIEFKKLENKFNKANLIRNEVGQMGRAISKYMLSGISNIASVNFNKITGRTERIEWSNEEKDKYAVYLVGQERKIAFEQLSGGEQVSVAIAIRGTMTEYFTNSKFMILDEPTNNLDTERKKLLAEYMGEILNNLEQSIIVTHDDTFREMAEKIIEL

SEQ ID NO: 3306 - protein, 1818 aa, Mycoplasma pneumoniae
MNDTDKKFPLQPVYDTGFDDGYLQRDYEKCLESAAANDAQTVELQTQLLAEIKNLENEIKALKAQESRQPDPHNNARIQSLEASLNRLVNEYNNFEFQKNYMVDRVAELNNKARFFKDELKRLQQENAAFVNSRYANWADFQSNYQLKLDQFQALIDQQNQTIKQLNEQIAANQGLIDQNVQRLQQNHSLDQQERDALLYEVDHLYNELYELENQKRLVGIEYEATYQDLVSADAELQNVYETIAQNQANFQKQCDAYWAQLKQVEQQIQTTKQELVDEESTLKVRLNDADFYINSRLAELDDLTSKINERDFVSKEQAQDVKASLANLTKEKERLSAEKDSFERLRNTALNDINRMEQENALFAKHLEQQQYEFERKQQESLLKLETEHKQLQKRIGEFKIESEAKSEALLIQERELLEKRREIDDLLTQASLEYEQQRRTNQVLKEKHRQVQQHFQNLVHAKKKLDQKRHYLAEQKRIDEEQIFKLKEKIATERRELEKLYLVKKQKQDQKENDLLIFEKQLRQYQADFENEIEEKQNELFASQKSLQKSFTQLKNKEAELNQKAQKIAEDWAHLKQNKHHHADLEIFLEGEFNHLQQEKHKLLEARTQFDNRVSLLSARFKQKQAELVKQKQSLEQLTAAFNKEQEAVERDWKDRLANLEKQKEMLGDKVHQFDENSLNISKKLAERELAIKFKEKELEAAQKQLSLDNNNNAGLKLQLDKLSESLKTERLELEASKERILDFYDESSRRIADYESDLQARLAEVKTLEKNQQETAAKSERELKVALEKLNQAKKAFLQIRKQQLLEIASVKQQLAQKANLLKNQQAELDKQTEELEAAFLEQDTDKKELEKALHSVKSKQELLERERSFLLQKQREFAEHVAGFKRQVHFKTTQMQRLSEFNKQQQSEQIKRETELKIAFADLKKDYQLFELQKNQEFQQIEQKHKELELLAQKQAELKQELEQKATALASQDQDTVQAKLDLARQQHELELRQNAFNQASLSLNKQREQLTNQVKVLHGELKKRHEKLTLKDRLLAEKEKDQHKKDAEINQRFKQFENEYADFDQAKKRELQELNQIRRNLEQSNASLLKKRNQLTLDFALLRKVQHNTQTNRVQLNTQIKEFLLEKKNFQKASDEAALQKALLIKRLRSFASKLQLQREALAIQKLEFDKRDEQQKSEINNAKLQLEQFKLEKQNFDEAKQKQLIEFKDQCQRLDVEKRLLKQKLVQLKNLSKSYLTYKNRADLSQQQLQHKYANLLELKEKLQTAKRALDKKHRAIYGKMAQFVSELRQEKKQLLSAQKQVDDKSRLLEQNQRHLQNLSSETKKKRQSLEHDINKFDQRRKEAVSSILNSHKKLKQKEGELQGILQKLSLKKTQIEQEFSKLYQQREKLDRQRTTLSKLHRELKAQNEATAHKNREVLEIENYYKKELQRLTTEKSEFDNNKNRLFEYFRKIRNEIEKKEAHIKTVLEETQKKRHLVETEAVKLHLQKQSIISKGQELKEIKERVSRDISHTNKQREELNSLLHQNKLLQKNLAEREREINNKDSLLTQKIQTAKQKLSEKEARILKLLEKMRAVEQQYQAEITRLKTRNADLEKNDNKHLFPPLFKINGNDMNYPYPYPWFYPQQKQEDSSNQIRHLFEQQLQFMQQRYENELTELRRQRALLEKKLDQIQLESQLSAKKNDFEKVEQMMQKLLEKTEQKLSAFDQKINALAEQINTQKAEHADSEKQQLLLRIEQLEKQNLAQAVQTPQPVQPVVQAPAVVPQVIQPQVVQSQPAFLATQQSISKQQQIAQLNAEINSIKKLIAQKAAK

SEQ ID NO: 3307 - protein, 1005 aa, Methanocaldococcus jannaschii
MSMILKEIRMNNFKSHVNSRIKFEKGIVAIIGENGSGKSSIFEAVFFALFGAGSNFNYDTIITKGKKSVYVELDFEVNGNNYKIIREYDSGRGGAKLYKNGKPYATTISAVNKAVNEILGVDRNMFLNSIYIKQGEIAKFLSLKPSEKLETVAKLLGIDEFEKCYQKMGEIVKEYEKRLERIEGELNYKENYEKELKNKMSQLEEKNKKLMEINDKLNKIKKEFEDIEKLFNEWENKKLLYEKFINKLEERKRALELKNQELKILEYDLNTVVEARETLNRHKDEYEKYKSLVDEIRKIESRLRELKSHYEDYLKLTKQLEIIKGDIEKLKEFINKSKYRDDIDNLDTLLNKIKDEIERVETIKDLLEELKNLNEEIEKIEKYKRICEECKEYYEKYLELEEKAVEYNKLTLEYITLLQEKKSIEKNINDLETRINKLLEETKNIDIESIENSLKEIEEKKKVLENLQKEKIELNKKLGEINSEIKRLKKILDELKEVEGKCPLCKTPIDENKKMELINQHKTQLNNKYTELEEINKKIREIEKDIEKLKKEIDKEENLKTLKTLYLEKQSQIEELELKLKNYKEQLDEINKKISNYVINGKPVDEILEDIKSQLNKFKNFYNQYLSAVSYLNSVDEEGIRNRIKEIENIVSGWNKEKCREELNKLREDEREINRLKDKLNELKNKEKELIEIENRRSLKFDKYKEYLGLTEKLEELKNIKDGLEEIYNICNSKILAIDNIKRKYNKEDIEIYLNNKILEVNKEINDIEERISYINQKLDEINYNEEEHKKIKELYENKRQELDNVREQKTEIETGIEYLKKDVESLKARLKEMSNLEKEKEKLTKFVEYLDKVRRIFGRNGFQAYLREKYVPLIQKYLNEAFSEFDLPYSFVELTKDFEVRVHAPNGVLTIDNLSGGEQIAVALSLRLAIANALIGNRVECIILDEPTVYLDENRRAKLAEIFRKVKSIPQMIIITHHRELEDVADVIINVKKDGNVSKVKING

SEQ ID NO: 3308 - protein, 1029 aa, Oceanobacillus iheyensis HTE831
MRPLYLKLTAFGPYKDTEIIDFTKLGDVQLFSISGNTGAGKTTIFDGIAFALYGRASGSDREDNRLLRSDFAEDHTHTSVELTFTIKERTYRVLRQPGHIKKGNKTKTGEKYELFELTEQKEISIVDRQIVSEVDKKIEELIGLTQDQFKQIVMLPQGEFRKLLTSETENKEAILRRLFKTEHYKYMNEILRQKKNTFEQSYNRVSDQLTQTMKQVSSTFPLRENSKLQYVFQTEYYNVQQVLEALNEEKTYYHQEIEKKTQQYTSSYKKHDIAQKEYYAAKHINEQFDQLQVKKQRSQELMNKQAEIRLIENQLKAAEQAQRIEPIEQFALNYQQQLQEKEIQLKTLTEKEQQAAEQLKLVTAKYKNEEEKSEQREKISIYISQLESYLPIVEQLDSESNEIQSLKNQNVQQEQKIREDGQLLERKEKEQESLSEEIKKLTKQVEKASDLNKRLTELRQVGKLLQRLISLQKEEAYIQNKYQQTKQDYENSEKQYQEIEQNWINNQAFVLASHLHDEEECPVCGSTTHPNKASIENQSVTKEALESFRIQKEEKNKNWQEQQVALSSTKTSLTEVSAELNEWGISLDNPSITFDEIVQEGKQLAEQKKNIQHAKEKRNNYEAKVEQQKREDKKNKEAFEQLKQKYQEQVSLLKSKQASHIEKKKQVPEEFHQLSKLKDSLRIQKQQKQEMEQAWKEIQQEYQQITQRHLEIRSEVKNYQTQITDLSKQVEKANKEFEQKISEAGFTRETYQEAKLEESILLQRKQQVENYKQEKQQIDNQVKELEAILAQQERQDLGFLEERLRDLKHDFEQNLNELNTLKKFDQEIRSIKERMEVLHNEVAETENKLMVITEVYDVLRGQNQKKVSFERYLQMEYLEQIIEAANYRLKDLSNGQFYLTRSDRQESHGRQSGLALDVYDTYTGQTRDVKTLSGGEKFNASLCLALGMSDVIQSFQGNVMIQTMFIDEGFGSLDEESLTKAIDTLVQLQKSGRLIGVISHVQELKDILPATIEVKKTKEGYSHTKLIVK

SEQ ID NO: 3309 - protein, 978 aa, Aquifex aeolicus VF5
MRPLKLEVKGFTVYKKPQVIDFTPLKFFVIQGKTGAGKTSIIDAITYALYGKVPRYGASVATKYVLSRGEKELKVALDFSLRGRNYRVERYYREFPEDSQVRVYEEGRRLNIKANEVEKWLFKISGLDYKTFTKVILLPQGEFDRFLKESSERKKILINLLGLEELEKVRQLASETFKNLEGKREALKKEYELLKDYTPTKKEVLEKTLKNLEEELKELKETEEKLRQELKKAEEKDSLERELSQVVTKLKELENLEKEVEKLREKLEFSRKVAPYVPIAKRIEEIDKKLTELKVRKNKLTKELAVLKDELSFAQEELNRIEAEKEKFKEEKEREKELEHRLKKLQEIKEILKELSQLSSSLKEKEREYEQAKQEFEDLSERVEKGKKLVAETEEKLEKIKELFSEEEYTSLKMKERLLVELQRKLKELKEKEGQLENLTQKYKEKKKVHEKVLNELKELERELKERELHYHAHMVASYLSPGDTCPVCGGIYRGKALENVDAEGISELKHAKELKEKEEREIDTTLKLYAQKINSLKEEMEKLRNEVEELRKEIPENLKERIKKLEELRIEKEKLEHKLNKYRKALEDRQKQKEEAQAKLHKAQTELELLKEKIREKSRLVKEFKELYRVERLEDYEESLKEEINYINSKLQEIEEKEKKLRKHFEELSSRKSKLEGELSALNESINSLEEERKEKLKELANIYEVAKSPREVVELYLGDKEAELERKIKEFEESFQSLKLKKSEIEEKLKEYEGIRELSDIKGEYESVKTQLEEKHKKLGEVKRELEHLGERLKRKEELQKEISELEKKLEVYRVISNDFRGDRFQKYVSEIMLQKVVDRASEYFYKFTGNYFFELERATKGRDKDIVVVESSTSQRRPVSSLSGGETFLASLSFAFAVSDLLSGSANLESLFIDEGFGSLDQDMRERVSEILEAIKTNVNKMIGIVSHIPDFAERFTERIVVEKKGDYSEVRVIY

SEQ ID NO: 3310 - protein, 886 aa, Archaeoglobus fulgidus DSM 4304
MILLKELQIKNFRSHSDSKIEFDTGINLIAGRNGAGKSSILEAILVAFYGLKPATLRKNDLVRVNSSGYSLSLTFSLNGDDYTISRKSNGESILTGKEIVEGDSNITEWVERHLCPAHVFTGAIYVRQGEIDSIIRDDESRERIIRQITRIEDYENAWKNLGAVIRMLEREKERLKEFLSQEEQIKRQKEEKKAEIERISEEIKSIESLREKLSEEVRNLESRLKELEEHKSRLESLRKQESSVLQEVRGLEEKLRELEKQLKEVVERIEDLEKKAKEVKELKPKAERYSILEKLLSEINQALRDVEKREGDLTREAAGIQAQLKKAEEDNSKLEEITKRIEELERELERFEKSHRLLETLKPKMDRMQGIKAKLEEKNLTPDKVEKMYDLLSKAKEEEKEITEKLKKLIAKKSSLKTRGAQLKKAVEELKSAERTCPVCGRELDEEHRKNIMAEYTREMKRIAEELAKADEIEKKLKERLEKVEKALEKQETVLKYRQMVDELKALENELSSHDAEKLSAESEEYRKVKERLDGLRGQQKILLSSASRIKELKSSLREIEEALKNVESERGELHRKIREEGFESLEELEREVQSLRPFYNKWLELKDAESRLESELKRREKLEDEISEAIAKLEEANGKAEEIRGQIDELLRIYSEEEHRRLSDEHLRKSKELAGLKSRLETLRESLQSAEKDLKFLEEQLAKMDEYRKKVEVFEKIAIPELTRIREKFRKYRNLVAENSMREVERYASQIFEELTEGKYSGVRLKKTTERGKEKLKVFVVYQGEEREIGFLSGGEIIALGLAFRLALSMFMIRGKIPLLILDEPTPFLDEERRRKLVDITTNYLRKIPQVIIVSHDEELKDAADKVIFVESQGGVSRVRYVEAQ

SEQ ID NO: 3311 - protein, 886 aa, Sulfolobus acidocaldarius
MIIREIRLQNFLSHEDTTVKFEGSINVIIGNNGAGKSSIIDGILFGLFKRTNRDIGKNEELIKKGKKSGQVSIKFEINGDTYLIDRNVGETSRDTISLLKEGKIITLARQSTTVNNKIKEILGFDHKILMSTTIIGQGSVESVFSDFPEVMKELLKINKLEMLRESNGPIHSLIKVLTDRIRSLQSIKDILKREEAEIDRLKKEIEEIKVKLENIEREAKEKEDELNQYNTEFNRIKEIKVQYDILSGELSVVNKKIEEIALRLKDFEEKEKRYNKIETEVKELDENREKINTISSFKSILVQIDSLKSQINVVENDLKRKKEKLKRKKELEEKEKQYEEIEKRKKELEEKEKQYEEIEKRLTYVLKNIERQKNEIEKLNYVDTQDLENKIKDVSDRINQIDNELKGLLDRRGDLNGRKEQTLKIYNNLNSIEDDRCPICGRPLDSEHKAKIREEIKVQLLELNKQITALQARINSLIKEREELEATRNKLQLELQKRSKEKGIYEAKLKELQRLEEEKNKLQNEILSLLSYHQEFENIAEKEKELIDYHEEYLKNSDILEEDIQEQEQRLNELNSKLSELEKSYNDYKAKYQFLPADLKSLVSLEERIRRRISELEKLKIEYERLKEEITRMKGLKEEYEKLKEEEDALLNRISELGYSEKRYKQLEEIIDKLSKILSGIEADKGKIKGSLEEKIKNIEEKERNIEELRNKMNEESKLNLGISKLQKLREVLDNKHLQSHIMNIVRNQIENNVNEVIAKFDLSFSAVEIDFVGKSELYVYTASGQKIHINALSGGERISIALALRLAIAKALMNQFSTLILDEPTVNLDEYRRKELIDVIRSAIEIVPQIILVTHDQELIQAGDYIIRVEKKGDTSKVEVSSYDR

SEQ ID NO: 3312 - protein, 864 aa, Sulfolobus solfataricus
MRIDKITLTNFLSHEHSEIQFMGEINVIVGQNGAGKSSIIDGIVFSLFRTHSRGNNDNLIRKGSNRGSVTLYLSNEKDKIEIIRDIRSTTEDRLIRNQFPIARSATVVSNEIEKILGIDKDIALSTIIVRQGELDKILENFQEIMGKILKLELIEKLIDSRGPIVEFRKNLENKLRELDRIEQDYNNFKKTVEEKRARVLELKKDKEKLEDEIKNLEKRIKDIKDQFDEYEKKRNQYLKLTTTLKIKEGELNELNRSIEELRKQTENMDQLEKEINELENLRNIKLKFEKYEVLAKSHTEMSANVINLEKEIEEYEKAIRRKEELEPKYLKYKELERKLEELQPKYQQYLKLKSDLDSKLNLKERLEKDASELSNDIDKVNSLEQKVEETRKKQLNLRAQLAKVESLISEKNEIINNISQVEGETCPVCGRPLDEEHKQKIIKEAKSYILQLELNKNELEEELKKITNELNKIEREYRRLSNNKASYDNVMRQLKKLNEEIENLHSEIESLKNIDEEIKKINEEVKELKLYYEEFMRLSKYTKEELDKKRVKLDEMKKKKEEIEKEMRGLESELKGLDRKALESKILDLENKRVKLDEMKKKKGILEDYIRQVKLLQEEVKNLREEVNIIQFDENRYNELKTSLDAYNLSLKEKENRKSRIEGELESLEKDIEEISNRIANYELQLKDREKIINAINKLEKIRSALGERKLQSYIIMTTKQLIENNLNDIISKFDLSIKNVEMEIMPKTGRGRSSSGDILVYTNSGDTLPIVSLSGGERIALSIALRLAIAKALMSNTNFFILDEPTIHLDDQRKAYLIEIIRAAKESVPQIIVVTHDEEVVQAADYVIRVEKRGNKSFVREET

SEQ ID NO: 3313 - protein, 852 aa, Thermotoga maritima
MRPERLTVRNFLGLKNVDIEFQSGITVVEGPNGAGKSSLFEAISFALFGNGIRYPNSYDYVNRNAVDGTARLVFQFERGGKRYEIIREINALQRKHNAKLSEILENGKKAAIAAKPTSVKQEVEKILGIEHRTFIRTVFLPQGEIDKLLISPPSEITEIISDVFQSKETLEKLEKLLKEKMKKLENEISSLQALYTAIWKYLEENDLEVLKSELKTVSEKKKELLKKREELQKEEEQLKRLLEKYRELVKKKERLRVLSLRRNELQKEVIYEQKVKKAKELEPLFREIYLRQREFERFSQELNSREKRYKELESEKEAISKEIPVHRERLSKLEEIGEKIKEELDLLEKVLKASRPLLEQRIRLKENLTRLEEEFRRLVGEKEKREKELLSIEKTENETKNELEKLLDELSILKKDHMKWLAYQIASSLNEGDTCPVCGGVFHGKVEAVEFNIDEFEKLDQKRSELENTLNVLKERKKSLSSLIEDLLMKIEEGKKNLKSIRNQIEKIEEELHRLGYSEDLEEKLDEKRKKLRKIEEERHSISQKITAADVQISQIENQLKEIKGEIEAKRETLKEQREEMDQLKSDFFDRLRKIGIGFEEFRILVKEEVKDAEKELGVVETEIRLLEESLKELESENVRDVSEDYEKVRNQLEALSQEISDLERKEGRLNHLIEETLRRERELKSLEKKLKEMSDEYNNLDLLRKYLFDKSNFSRYFTGRVLEAVLKRTKAYLDILTNGRFDIDFDDEKGGFIIKDWGIERPARGLSGGERALISISLAMSLAEVASGRLDAFFIDEGFSSLDTENKEKIASVLKELERLNKVIVFITHDREFSEAFDRKLRITGGVVVNE

SEQ ID NO: 3314 - protein, 880 aa, Pyrococcus abyssi
MKIEEVKVYNFRSHEETVVRFRKGINLIIGQNGSGKSSLLDAILVGLYWSKKLRLRGLKKDEFRRIGGKGGTRIEIKFENDDSKYVLFRDFSRNVAYLKVQENGKWRHASEPSMESVSSYIERILPYNVFLNAIYIRQGQIDAILESDETRDKVVREILNLDKLESAYENLKRIKTNINLLIESKKSFIARTENIEELIKANEDELTKKLSEINEISSKLPPIRGELEKVRENVKELESIKGKISELKIQVEKLKGRKKGLEEKIVQIERSIEEKKAKISELEEIVKDIPKLQEKEKEYRKLKGFRDEYESKLRRLEKELSKWESELKAIEEVIKEGEKKKERAEEIREKLSEIEKRLEELKPYVEELEDAKQVQKQIERLKARLKGLSPGEVIEKLESLEKERTEIEEAIKEITTRIGQMEQEKNERMKAIEELRKAKGKCPVCGRELTEEHKKELMERYTLEIKKIEEELKRTTEEERKLRVNLRKLEIKLREFSVMRDIAEQIKELESKLKGFNLEELEQKEREFEGLNEEFNKLKGELLGLERDLKRIKALEGRRKLIEEKVRKAKEELENLHRQLRELGFESVEELNLRIQELEEFHDKYVEAKKSESELRELKNKLEKEKTELDQAFEMLADVENEIEEKEAKLKDLESKFNEEEYEEKRERLVKLEREVSSLTARLEELKKSVEQIKATLRKLKEEKEEREKAKLEIKKLEKALSKVEDLRKKIKDYKTLAKEQALNRISEIASEIFSEFTDGKYSNVIVRAEENKTKLFVVYEGKEVPLTFLSGGERIALGLAFRLALSMYLVGRIDLLILDEPTPFLDEERRRKLLDIMERHLRRISQVIMVSHDEELKDAADYVIRLRLEGGKSKVEVVS

SEQ ID NO: 3315 - protein, 1132 aa, Arabidopsis thaliana
MSTPLKVWQRWSTPTKATNPDSNGSSHGTGLDMVTPVSGRVSEIQFDDPRILPEKISELEKELFEYQHSMGLLLIEKKEWSSQYEALQQAFEEVNECLKQERNAHLIAIADVEKREEGLRKALGIEKQCALDLEKALKELRAENAEIKFTADSKLTEANALVRSVEEKSLEVEAKLRAVDAKLAEVSRKSSDVERKAKEVEARESSLQRERFSYIAEREADEATLSKQREDLREWERKLQEGEERVAKSQMIVKQREDRANESDKIIKQKGKELEEAQKKIDAANLAVKKLEDDVSSRIKDLALREQETDVLKKSIETKARELQALQEKLEAREKMAVQQLVDEHQAKLDSTQREFELEMEQKRKSIDDSLKSKVAEVEKREAEWKHMEEKVAKREQALDRKLEKHKEKENDFDLRLKGISGREKALKSEEKALETEKKKLLEDKEIILNLKALVEKVSGENQAQLSEINKEKDELRVTEEERSEYLRLQTELKEQIEKCRSQQELLQKEAEDLKAQRESFEKEWEELDERKAKIGNELKNITDQKEKLERHIHLEEERLKKEKQAANENMERELETLEVAKASFAETMEYERSMLSKKAESERSQLLHDIEMRKRKLESDMQTILEEKERELQAKKKLFEEEREKELSNINYLRDVARREMMDMQNERQRIEKEKLEVDSSKNHLEEQQTEIRKDVDDLVALTKKLKEQREQFISERSRFLSSMESNRNCSRCGELLSELVLPEIDNLEMPNMSKLANILDNEAPRQEMRDISPTAAGLGLPVTGGKVSWFRKCTSKMLKLSPIKMTEPSVTWNLADQEPQSTEQANVGGPSTTVQAATTYSFDVQKAESETGTKEVEVTNVNSDGDQSDINSKAQEVAADSLSNLDVDGQSRMKGKGKARTRRTRSVKDVVDDAKALYGESINLYEPNDSTENVDDSTKASTGETGRSDKAISKNGRKRGRVGSLRTCTTEQDGNESDGKSDSVTGGAHQRKRRQKVASEQQGEVVGQRYNLRRPRRVTGEPALSKKNEDIGGVQQEEGIHCTQATATASVGVAVSDNGVSTNVVQHEATADSEDTDAGSPKRTDESEAMSEDVNKTPLRADSDGEDDESDAEHPGKVSIGKKLWTFLTT

SEQ ID NO: 3316 - protein, 1166 aa, Arabidopsis thaliana
MSTPLKVWQRWSTPTKATNPDSNGSSHGTGLDMVTPVSGRVSEIQFDDPRILPEKISELEKELFEYQHSMGLLLIEKKEWSSQYEALQQAFEEVNECLKQERNAHLIAIADVEKREEGLRKALGIEKQCALDVYDTLVLLQLEKALKELRAENAEIKFTADSKLTEANALVRSVEEKSLEVEAKLRAVDAKLAEVSRKSSDVERKAKEVEARESSLQRERFSYIAEREADEATLSKQREDLREWERKLQEGEERVAKSQMIVKQREDRANESDKIIKQKGKELEEAQKKIDAANLAVKKLEDDVSSRIKDLALREQETDVLKKSIETKARELQALQEKLEAREKASPHSLYLSLWIKSDTYKQCLHVDKMAVQQLVDEHQAKLDSTQREFELEMEQKRKSIDDSLKSKVAEVEKREAEWKHMEEKVAKREQALDRKLEKHKEKENDFDLRLKGISGREKALKSEEKALETEKKKLLEDKEIILNLKALVEKVSGENQAQLSEINKEKDELRVTEEERSEYLRLQTELKEQIEKCRSQQELLQKEAEDLKAQRESFEKEWEELDERKAKIGNELKNITDQKEKLERHIHLEEERLKKEKQAANENMERELETLEVAKASFAETMEYERSMLSKKAESERSQLLHDIEMRKRKLESDMQTILEEKERELQAKKKLFEEEREKELSNINYLRDVARREMMDMQNERQRIEKEKLEVDSSKNHLEEQQTEIRKDVDDLVALTKKLKEQREQFISERSRFLSSMESNRNCSRCGELLSELVLPEIDNLEMPNMSKLANILDNEAPRQEMRDISPTAAGLGLPVTGGKVSWFRKCTSKMLKLSPIKMTEPSVTWNLADQEPQSTEQANVGGPSTTVQAATTYSFDVQKAESETGTKEVEVTNVNSDGDQSDINSKAQEVAADSLSNLDVDGQSRMKGKGKARTRRTRSVKDVVDDAKALYGESINLYEPNDSTENVDDSTKASTGETGRSDKAISKNGRKRGRVGSLRTCTTEQDGNESDGKSDSVTGGAHQRKRRQKVASEQQGEVVGQRYNLRRPRRVTGEPALSKKNEDIGGVQQEEGIHCTQATATASVGVAVSDNGVSTNVVQHEATADSEDTDAGSPKRTDESEAMSEDVNKTPLRADSDGEDDESDAEHPGKVSIGKKLWTFLTT

SEQ ID NO: 3317 - protein, 1128 aa, Arabidopsis thaliana
MTPRSETHKIGGVTNPRNADRKGKAVAFSDDLVIPTLPPPPIGTLTGQGVSRGHTDDMDMGDWRRFREVGLLNEASMEKKDQEALLEKISTLEKELYGYQHNMGLLLMENKELVSKHEQLNQAFQEAQEILKREQSSHLYALTTVEQREENLRKALGLEKQCVQELEKALREIQEENSKIRLSSEAKLVEANALVASVNGRSSDVENKIYSAESKLAEATRKSSELKLRLKEVETRESVLQQERLSFTKERESYEGTFQKQREYLNEWEKKLQGKEESITEQKRNLNQREEKVNEIEKKLKLKEKELEEWNRKVDLSMSKSKETEEDITKRLEELTTKEKEAHTLQITLLAKENELRAFEEKLIAREGTEIQKLIDDQKEVLGSKMLEFELECEEIRKSLDKELQRKIEELERQKVEIDHSEEKLEKRNQAMNKKFDRVNEKEMDLEAKLKTIKEREKIIQAEEKRLSLEKQQLLSDKESLEDLQQEIEKIRAEMTKKEEMIEEECKSLEIKKEEREEYLRLQSELKSQIEKSRVHEEFLSKEVENLKQEKERFEKEWEILDEKQAVYNKERIRISEEKEKFERFQLLEGERLKKEESALRVQIMQELDDIRLQRESFEANMEHERSALQEKVKLEQSKVIDDLEMMRRNLEIELQERKEQDEKDLLDRMAQFEDKRMAELSDINHQKQALNREMEEMMSKRSALQKESEEIAKHKDKLKEQQVEMHNDISELSTLSINLKKRREVFGRERSRFLAFVQKLKDCGSCGQLVNDFVLSDLQLPSNDEVAILPPIGVLNDLPGSSNASDSCNIKKSLDGDASGSGGSRRPSMSILQKCTSIIFSPSKRVEHGIDTGKPEQRLSSSVAVGMETKGEKPLPVDLRLRPSSSSIPEEDEEYTDSRVQETSEGSQLSEFQSSRRGRGRPRKAKPALNPTSSVKHASLEESSKDELSGHVSVTSKKTTGGGGRKRQHIDDTATGGKRRRQQTVAVLPQTPGQRHYNLRRKKTVDQVPADVEDNAAAGEDDADIAASAPSKDTVEETVVETLRARRIETNADVVSAENNGDVPVANVEPTVNEDTNEDGDEEEDEAQDDDNEENQDDDDDDDGDDDGSPRPGEGSIRKKLWTFLTT

SEQ ID NO: 3318 - protein, 1085 aa, Arabidopsis thaliana
MFTPQRNRWPETDRKGKAIAFSDEIITPPPQRVLLREDDDWQKFKEVGLLDEASLERKDRDALIEKILKLEKELFDYQHNMGLLLIEKKQWTSTNNELQQAYDEAMEMLKREKTSNAITLNEADKREENLRKALIDEKQFVAELENDLKYWQREHSVVKSTSEAKLEEANALVIGMKEKALEVDRERAIAEEKFSVMNRKSSELERKLKEVETREKVHQREHLSLVTEREAHEAVFYKQREDLQEWEKKLTLEEDRLSEVKRSINHREERVMENERTIEKKEKILENLQQKISVAKSELTEKEESIKIKLNDISLKEKDFEAMKAKVDIKEKELHEFEENLIEREQMEIGKLLDDQKAVLDSRRREFEMELEQMRRSLDEELEGKKAEIEQLQVEISHKEEKLAKREAALEKKEEGVKKKEKDLDARLKTVKEKEKALKAEEKKLHMENERLLEDKECLRKLKDEIEEIGTETTKQESRIREEHESLRITKEERVEFLRLQSELKQQIDKVKQEEELLLKEREELKQDKERFEKEWEALDKKRANITREQNEVAEENEKLRNLQISEKHRLKREEMTSRDNLKRELDGVKMQKESFEADMEDLEMQKRNLDMEFQRQEEAGERDFNERARTYEKRSQEELDNINYTKKLAQREMEEMQYEKLALEREREQISVRKKLLKEQEAEMHKDITELDVLRSSLKEKRKEFICERERFLVFLEKLKSCSSCGEITENFVLSDLRLPDVEDGDKRFGKQKLKAEEALNISPSAENSKRTSLLGKIASKLLSISPIGKTDKVTDLGITVKLPESSQPDDSLDRVSGEDHEPSATEQSFTDSRIQEGPEGSLQSEMKSDKPRRGRGRGRGRGKSVRGRSQATKAVSRDSKPSDGETPRKRQREQTSRITESEQAAGDSDEGVDSITTGGRRKKRQIAVPVSQTPGQTRYQLRRHRNVGTEEDKAQASKGATEKQERVNDDIRKVPSPKETRTPPEGENRENGKAEVLVETVTHEEIVTVETETVFKVNNTGKNPVEDPQLEVGGSGEIREHGEEDDENISMIEEENEGEEEEETERQGNDASIGKKIWVFFTT

SEQ ID NO: 3319 - protein, 1003 aa, Human herpesvirus 8
MAPPGMRLRSGRSTGAPLTRGSCRKRNRSPERCHLGDDLHLQPRRKHVADSVDGRECGPHTLPIPGSPTVFTSGLPAFVSSPTLPVAPIPSPAPATPLPPPALLPPVTTSSSPIPPSHPVSPGTTDTHSPSPALPPTQSPESSQRPPLSSPTGRPDSSTPMRPPPSQQTTPPHSPTTPPPEPPSKSSPDSLAPSTLRSLRKRRLSSPQGPSTLNPICQSPPVSPPRCDFANRSVYPPWATESPIYVGSSSDGDTPPRQPPTSPISIGSSSPSEGSWGDDTAMLVLLAEIAEEASKNEKECSENNQAGEDNGDNEISKESQVDKDDNDNKDDEEEQETDEEDEEDDEEDDEEDDEEDDEEDDEEDDEEDDEEDDEEEDEEEDEEEEDEEEEEEDEEDDDDEDNEDEEEDKKEDEEDGGDGNKTLSIQSSQQQQEPQQQEPQQQEPQQQEPQQQEPLQEPQQQEPQQQEPQQQEPQQQEPQQQEPQQQEPQQQDEQQQDEQQQDEQQQDEQQQDEQEQQDEQQQDEQQQDEQQQQDEQEQQEEQEQQEEQEQQEEQEQELEEQEQELEEQEQELEEQEQELEEQEQELEEQEQELEEQEQELEEQEQELEEQEQELEEQEQELEEQEQELEEQEQELEEQEQELEEQEQELEEQEQELEEQEQELEEQEQELEEQEQELEEQEQELEEQEQELEEQEQEQELEEVEEQEQEQEEQELEEVEEQEQEQEEQEEQELEEVEEQEEQELEEVEEQEEQELEEVEEQEQQGVEQQEQETVEEPIILHGSSSEDEMEVDYPVVSTHEQIASSPPGDNTPDDDPQPGPSREYRYVLRTSPPHRPGVRMRRVPVTHPKKPHPRYQQPPVPYRQIDDCPAKARPQHIFYRRFLGKDGRRDPKCQWKFAVIFWGNDPYGLKKLSQAFQFGGVKAGPVSCLPHPGPDQSPITYCVYVYCQNKDTSKKVQMARLAWEASHPLAGNLQSSIVKFKKPLPLTQPGENQGPGDSPQEMT

SEQ ID NO: 3320 - protein, 1047 aa, Glycine max
  unsure (1)..(1047): unsure at all Xaa locations
XEKECVLDLEKALREMRSEHAKIKFTADSKLAEANALVASIEEKSLEVEAKLRSADAKFAEISRKSSEFDRKSLDLESQESALRRDRYGCEKTTEGHESTLSKQREDLREWEKKLQEGEERXLAKGQRIINEREQRANENDRLCRQKEKDLEEAQKKIDATNVTLRNKEDDVNNRFANITLKEKEYDSLRINLDIKEKELSAWEEKLNAREKVEMQKLLDEQNTILDVKKQEFEVELDEKRKSFEDGLKNKLVEVEKKEAEITHMEEKVAKRKQALGKKAEKLKEKEIEYEQKVKALREKEKLIKSEEKSLVTEKGKIESEREELLTHKAEVEKIRANNEEESLRINEEIDRLKVTEEERSEYLRLQSQLKHEVDQYRHQKELLLKEAEDLRQQKETFEREWDELDLKRTDVEKELKSVIQQKEEILKLQQYEEEKLRNEKQDTQAYVQRELETLKLAKESFAAEMELEKSSLAEKAQSERNQILLDFELQKKELEADMQNQLEQKEKDLIERKKLFEEKRESELNNINFLREVANREMDEMKLERSKSEKEKQEADENKKHLERQRMEMQEDIDVLVDLNRKLKNQREEFIVERRRFIEFVEKLRSCQNCGEMISEFVLSDLQSSVDIENLEVPSHPKLAADIVRVSNENLASSRQNTGVSPATDPKSPVSGGTVSWLRKCTSKIFKISPIRKIESEDSGTLRDVVTLSVEKTNVEDSPGRIPDAENEAELSFAVVNDSFDVQRVQSGNDIVEVEADHEPSVENLNNVDSKAXXEDLQAPDSKVGQQKSRKGGGRPRVKRTHTVKAVIKEARGILGESAEALPGESVDDHENEFPNGNAEDSANVNSETANVRKRNRVQTSSQMTVSGHGGDASEGHSDSLIPGQRKRRRQKAAAPPAQTAGESRYNLRRPKIGATTSSVRAMSGGGKESQGEVDRVKDTGEGIVDSKTSHSHSVGITXXRMVEAYILSSLXKVRXTRDGYGGDTIGTFVNNMALSEEVNGTADDVEGSESHGEDAAGGVENEDDEDYLQPGEASIGKKLWNFFTT

SEQ ID NO: 3321 - protein, 1119 aa, Daucus carota
MGRVEDMGLNAKLMKLETELFDYQYNMGLLLIEKKEWTSKFEELQQVYTETKDALKQEQEAHLIAISDAEKREENLTKALGVEKQCVLDLEKALRDMRSDYAEIKFTSDSKLAEASALITKVEEKSLEVESKLHSADAKLAELSRKGSDIERKSHELEARESALRRERLALNAEREALTDNISRQREDLREWERKLQEDEERLAEVRRLLNQREERANENDRLYQQKQSELDGEQKKIEIIMVSLKNKEDDISSRIAKLNIKEKEADAVKHSLEVKEKDLTEFEQKLNAREQSEIQKLLDEHKAILEVKKQSFEMEMDKRKNDFENDLQNRAVEVEKKEVEVKHLEAKLAKREHALDQKHEKLKEKEQYLASKLQDLNEREKSMKLEENKIEDERNQLLSDKQEMLCLKAEIEKDRASTEEQRLKLSEEIERLKITEEERLELARLQSELKQEIENCRHQRELLLKEEDELKQEKMRFEKEWEDLDERRTALMKDLKDITVQKENFEKLKHSEEDRLNNKKLDTESYVQKELDALRLTKDSFAATMEHEKAVLAERTSSEKKQMLNDFELWKRELETKLFNEREDMENALRLREKQFDEEREKELNNINYIKEVISKEREDIKLERSRIAKEKQEILMHQKHLDEQHVVMQKDIGQLVSLSEKLKDQREQFFKERECFIRFVESQKSCKNCGEMTSEFVVSDLQSLAELENLKALSVPQLAENYLRQDLQGTPDKNLSTVTPGAVGLGSPASGGTKSWLQKCTSKIFIFSASKKNNSPDQNTSRRLHVEASPNKLLNTEVIPELPSGVAGETLEMQNMQVSNSNREMESNLNLSGTEQSNIDSKALDVEDSQQSDVRAGNRKPGKRAKGRVRRKRSAKEVAEEAKTVLADPIELNENEHSNGLASAYTNESRGDSSLVGKRTRNSRKRNPSQPSQSAAGDVGADSEGHSDSVTAGGRQKRRRKVVPAVQAPTGRYNLRRHKTAAPLVANGALSDPNKGKEKEIDDGGGIGEEIPDEVDGNTHLVQVTTLKKRINVVNEFSSAGFHGINATSESQDRDAANQLVSDTMLSEEVNGTPEQSRGYQNQGDTSGAEGEDEDGDEVEHPGEVSMRKKVWKFLTT

SEQ ID NO: 3322 - protein, 1127 aa, Oryza sativa
  unsure (1)..(1127): unsure at all Xaa locations
QRENRERRDTHIEETRCAYAFPKSSRTTHQPTPEPEPGRRATSSASPRRRERAGRLPTPXLHEYQYNMGLLLIEKKEWTAKLDEINQALTQKEEILKREQAAHLNAISEYERREESMRKALGVEKQCVTDLEKALREIRGEIAEVKFMSEKKITDAQSLEASLEEKRLEIEGKLHAADAKLAEANRKKSQADRDLEEVEARQRRLEKEKLYFENERKAGEDRIKRQEDSLRDWDKKLKESQNRILDLQRSLNDREERANENDKLFKIKQEELEEAKKALEHTKATLKIKEDDINKRLAELHLQEKEAESKNRKLEEREKKIAEREEKVSAREKVGLQKLLEDHNVKLESKRRDFDLQLENEKKSFDAMLVQKEADLVQREKDVRSSEEKLSKKEQVLNESKKKLEEWQNDLDTKSNALKKWEESLQNDEKQLSEQKLQIENERKQAEMYKLELESLKATVVAEKEKILQEQNNLKLTEEERQEHIMLTAQLKKEIDEYRMRSNSLSEETEDLRKQRQKFEEEWEQLDEKRTHLEEEAKKLNNEKKNLERWHDNEEKRLKDREDELDIKYKEQGENLALKEKSLIDNIDHQRLENEELLKRERADLQRNLQLHRHELEMEMEKKQASKERELEEKENELNRKMDFVENELKRAAELNESKIQKILLEKKQLQKEKEVLVEDRQKLETDKADIRRDIDSLNTLSKSLKERREAYNRDRNNLIDIFEKYKVCKNCGXXIIFEGLDALALKDSTDIEYPSLAXXEADDRSPNPDTLAQETGALVNSGGRLSLLQKCSRIFKFSPRKKAEQSSEQQSGAFENEESERQDIADDVQMESSLGVADNCVDIHGTQSFDGNTDMVVDTTIVDVDQNGKDSAVLPVVDLEPETSKQGRRQQNRKGRAKGGVKRTRSVLAVVEDAKEILGENLEVKKDDGQGDSVTVGGTRKRRFAGATISEQDXXDSEAHSESVSLGGQRRKRRQTAAAVTQAPGEKRYNLRRTTVANAATAAQTNKKKAAKKGSKQTVEATADDTEGTSKAEEPATGSKGASQSADDASQLPEYSQAEAGDTHGPVEVTSAEGVDIVDGIDAAPDAMPMTPSGSELGAEQDDEEDDDSERRNQSIGKKLWSFFTT

SEQ ID NO: 3323 - protein, 461 aa, Oryza sativa
  unsure (1)..(461): unsure at all Xaa locations
DDINKRLAELHLQEKEAESKNRKLEEREKKIAEREEKVSAREKVGLQKLLEDHNVKLESKRRDFDLQLENEKKSFDAMLVQKEADLVQREKDVRSSEEKLSKKEQVLNESKKKLEEWQNDLDTKSNALKKWEESLQNDEKQLSEQKLQIENERKQAEMYKLELESLKATVVAEKEKILQEQNNLKLTEEERQEHIMLTAQLKKEIDEYRMRSNSLSEETEDLRKQRQKFEEEWEQLDEKRTHLEEEAKKLNNEKKNLERWHDNEEKRLKDREDELDIKYKEQGENLALKEKSLIDNIDHQRLENEELLKRERADLQRNLQLHRHELEMEMEKKQASKERELEEKENELNRKMDFVENELKRAAELNESKIQKILLEKKQLQKEKEVLVEDRQKLETDKADIRRDIDSLNTLSKSLKERREAYNRDRNNLIDIFEKYKVCKNCGQAVRTQLWCKLEEASQSX

SEQ ID NO: 3324 - protein, 431 aa, Triticum aestivum
LLVSFVMMYQDLSLKDDADIVLPSLAVEGDDRSPNTDTLAQDTGTLVNSAGRFSLLQKCSRLFKFSPRTKAEQSSEQEAEINIPFGARLEEASPSEVDYEPTPVYQAANNSFDAEGLPSDSGARGNEESERLDIADDIQIESSVGVADNCIDVHGTQPFAAANDMAVDTTIASVDQNGKDSTAAPEVDLQPEASNPPKRRGRPRGVKKTKSVRAVLEDAKVILGENLDEKNDDQEEFSYCWVVHGKRRLGWTRYQVMKKISEAQSGSVSVGGQRRKRRQPAGPSTQAPGEKRYNLRRTTVANAAAAAPPAPEKKKGGRTGKKRTVETTADDTEGTSKAADSKRTGPSESADGASQLQEFSQAETVDAHATAGEEYGDIVVDGEQGEDAMPMTPSGSERGGVEDDDEDDDDDDDSERQNKSIGKTLWSFFTT

SEQ ID NO: 3325 - protein, 171 aa, Triticum aestivum
  unsure (1)..(171): unsure at all Xaa locations
XRHEEASAREKMGLQKLIEDHEVKLEARRRDFELELESERKSFDEKMKHREADLVKKEKDLSSRENKISKREQALNESKKKLEELQNDLDTKSKALKKWDESLKLEKDKLSEEKLQVDHERKQAEMYRSDVERLKATIEAEKKQILEEQNNLKVTEEERQEHSMLTAQLKK

SEQ ID NO: 3326 - protein, 122 aa, Triticum aestivum
  unsure (1)..(122): unsure at all Xaa locations
MFTPQGKGWNGWSTPSPGNQRAGGGAPPASAPLGKAKGTSQRAAELEQELHEYQYNMGLLLIEKKEWAAKFDEVTHVLTQKEEILKRXQAAHLNAISEYERREXNMRKSLGVEKHCGADLEX

SEQ ID NO: 3327 - protein, 101 aa, Triticum aestivum
  unsure (1)..(101): unsure at all Xaa locations
ERKAREKQLKEQEESLQDWEKKLKESQNRLVDLQRSVNDREERANENDKLCKIKQEELEEAKKTVESTKIILKTKEDDIAKRLNELRSQEKDADAKHKILX

SEQ ID NO: 3328 - protein, 1957 aa, Schizosaccharomyces pombe
MSNQSSSGSNTSDLDEESASSLVSSAASPFIDSDLETPRPNISRASTGQLAEDGDTSSQHEDSSEELKRQEVRGMRRHSDLSIDAKLGSSEGSTASSALPLTPRSPSNASWLLVRGGLLDSPILDINSVTQKSNLLNELKQVRSKLAALEHENGILSLQLSSSNKKDKNTSSVTTLTSEEDVSYFQKKLTNMESNFSAKQSEAYDLSRQLLTVTEKLDKKEKDYEKIKEDVSSIKASLAEEQASNKSLRGEQERLEKLLVSSNKTVSTLRQTENSLRAECKTLQEKLEKCAINEEDSKLLEELKHNVANYSDAIVHKDKLIEDLSTRISEFDNLKSERDTLSIKNEKLEKLLRNTIGSLKDSRTSNSQLEEEMVELKESNRTIHSQLTDAESKLSSFEQENKSLKGSIDEYQNNLSSKDKMVKQVSSQLEEARSSLAHATGKLAEINSERDFQNKKIKDFEKIEQDLRACLNSSSNELKEKSALIDKKDQELNNLREQIKEQKKVSESTQSSLQSLQRDILNEKKKHEVYESQLNELKGELQTEISNSEHLSSQLSTLAAEKEAAVATNNELSESKNSLQTLCNAFQEKLAKSVMQLKENEQNFSSLDTSFKKLNESHQELENNHQTITKQLKDTSSKLQQLQLERANFEQKESTLSDENNDLRTKLLKLEESNKSLIKKQEDVDSLEKNIQTLKEDLRKSEEALRFSKLEAKNLREVIDNLKGKHETLEAQRNDLHSSLSDAKNTNAILSSELTKSSEDVKRLTANVETLTQDSKAMKQSFTSLVNSYQSISNLYHELRDDHVNMQSQNNTLLESESKLKTDCENLTQQNMTLIDNVQKLMHKHVNQESKVSELKEVNGKLSLDLKNLRSSLNVAISDNDQILTQLAELSKNYDSLEQESAQLNSGLKSLEAEKQLLHTENEELHIRLDKLTGKLKIEESKSSDLGKKLTARQEEISNLKEENMSQSQAITSVKSKLDETLSKSSKLEADIEHLKNKVSEVEVERNALLASNERLMDDLKNNGENIASLQTEIEKKRAENDDLQSKLSVVSSEYENLLLISSQTNKSLEDKTNQLKYIEKNVQKLLDEKDQRNVELEELTSKYGKLGEENAQIKDELLALRKKSKKQHDLCANFVDDLKEKSDALEQLTNEKNELIVSLEQSNSNNEALVEERSDLANRLSDMKKSLSDSDNVISVIRSDLVRVNDELDTLKKDKDSLSTQYSEVCQDRDDLLDSLKGCEESFNKYAVSLRELCTKSEIDVPVSEILDDNFVFNAGNFSELSRLTVLSLENYLDAFNQVNFKKMELDNRLTTTDAEFTKVVADLEKLQHEHDDWLIQRGDLEKALKDSEKNFLRKEAEMTENIHSLEEGKEETKKEIAELSSRLEDNQLATNKLKNQLDHLNQEIRLKEDVLKEKESLIISLEESLSNQRQKESSLLDAKNELEHMLDDTSRKNSSLMEKIESINSSLDDKSFELASAVEKLGALQKLHSESLSLMENIKSQLQEAKEKIQVDESTIQELDHEITASKNNYEGKLNDKDSIIRDLSENIEQLNNLLAEEKSAVKRLSTEKESEILQFNSRLADLEYHKSQVESELGRSKLKLASTTEELQLAENERLSLTTRMLDLQNQVKDLSNIKDSLSEDLRTLRSLEDSVASLQKECKIKSNTVESLQDVLTSVQARNAELEDEVSRSVDKIRRRDDRCEHLSGKLKKLHSQLEEQHETFFRAEQQRMTQLGFLKETVKKQEKLLKKLNLRQEQLIPRSSILVYESYIRDIEKEIIVLQERLNGIELSQQLPKGYFGYFFKTNRVEMEVLDSFKQQVAKLQFLAGAEFIVKFKEDLEKCAAEEKEKQATFDNYSEKVENLGKSIEALYFALNREISFRKSLALSKSAYHNLLVRDSPKFNPDSQITYSIPVTNTKQSLLRSAILCVISLQRLRLLGQRHSFCEEVIENLSCV

SEQ ID NO: 3329 - protein, 1015 aa, Saccharomyces cerevisiae
NSSHSSLKENFSILETELKNVRDSLDEMTQLRDVLETKDKENQTALLEYKSTIHKQEDSIKTLEKELETILSQKKKAEDGINKMGKDLFALSREMQAVEENCKNLQKEKDKSNVNHQKETKSLKEDIAAKITEIKAINENLEKMKIQCNNLSKEKEHISKELVEYKSRFQSHDNLVAKLTEKLKSLANNYKDMQAENESLIKAVEESKNESSIQLSNLQNKIDSMSQEKENFQIERGSIEKNIEQLKKTISDLEQTKEEIISKSDSSKDEYESQISLLKEKLETATTANDENVNKISELTKTREELEAELAAYKNLKNELETKLETSEKALKEVKENEEHLKEEKIQLEKEATETKQQLNSLRANLESLEKEHEDLAAQLKKYEEQIANKERQYNEEISQLNDEITSTQQENESIKKKNDELEGEVKAMKSTSEEQSNLKKSEIDALNLQIKELKKKNETNEASLLESIKSIESETVKIKELQDECNFKEKEVSELEDKLKASEDKNSKYLELQKESEKIKEELDAKTTELKIQLEKVTNLSKAKEKSESELSRLKKTSSEERKNAEEQLEKLKNEIQIKNQAFEKERKLLNEGSSTITQEYSEKINTLEDELIRLQNENELKAKEIDNTRSELEKVSLSNDELLEEKQNTIKSLQDEILSYKDKITRNDEKLLSIERDSKRDLESLKEQLRAAQESKAKVEEGLKKLEEESSKEKAELEKSKEMMKKLESTIESNETELKSSMETIRKSDEKLEQSKKSAEEDIKNLQHEKSDLISRINESEKDIEELKSKLRIEAKSSSELETVKQELNNAQEKIRVNAEENTVLKSKLEDIERELKDKQAEIKSNQEEKELLTSRLKELEQELDSTQQKAQKSEEESRAEVRKFQVEKSQLDEKAMLLETKYNDLVNKEQAWKRDEDTVKKTTDSQRQEIEKLAKELDNLKAENSKLKEANEDRSEIDDLMLLVTDLDEKNAKYRSKLKDLGVEISSDEEDDEEEEDDEEDDEEDEEEGQVA

SEQ ID NO: 3330 - protein, 1790 aa, Saccharomyces cerevisiae
MDIIQGLIQQPKIQSVDETIPTLCDRVENSTLISDRRSAVLGLKAFSRQYRESVIASGLKPLLNTLKRDYMDEDSVKAILETILILFIRGDGHDDLTRGWISQQSRLQNGKYPSPLVMKQEKEQVDQFSLWIADALTQSEDLIHLLVEFWEIDNFHIRLYTIQLLEAVMATRPLKARSALISLPTSISTMVSLLDDMHEPIRDEAILLLMAVVNDSPHVQKLVAFENIFERLFSIIEEEGGLRGSLVVNDCLSLINNILKYNTSNQTLFLETGNLPKLAHLLSEPISQDEVFFWNDQRIVNINTALDIVSLTVEPGNTVTTKHQNALLDSSVLMVVLRLAFFHNIPKKVRPVALLTAANMVRSNEHAQLEFSKIDVPYFDPSLPVNSTANGGPIKLIPVVSILINWMLYANSVHTFDTRVACSRLLKAYFMDNFDLQRDFLLKQVQLCNNSTNNVGDNAKENGGSNKSDKESDSDKDTDGKDGTEYEGSFKANLFEVLLNYDAELNLNPFKLFFTTDIFMFFFQQDHKYSEELREITRNVTTGNDLEDEEPLKAIQTISELLTTSLTAADIRIPISYLTFLIYWLFGDFKATNDFLSDKSVIKSLLSFSYQIQDEDVTIKCLVTMLLGVAYEFSSKESPFPRKEYFEFITKTLGKDNYASRIKQFKKDSYFSKVDMNEDSILTPELDETGLPKVYFSTYFIQLFNENIYRIRTALSHDPDEEPINKISFEEVEKLQRQCTKLKGEITSLQTETESTHENLTEKLIALTNEHKELDEKYQILNSSHSSLKENFSILETELKNVRDSLDEMTQLRDVLETKDKENQTALLEYKSTIHKQEDSIKTLEKGLETILSQKKKAEDGINKMGKDLFALSREMQAVEENCKNLQKEKDKSNVNHQKETKSLKEDIAAKITEIKAINENLEEMKIQCNNLSKEKEHISKELVEYKSRFQSHDNLVAKLTEKLKSLANNYKDMQAENESLIKAVEESKNESSIQLSNLQNKIDSMSQEKENFQIERGSIEKNIEQLKKTISDLEQTKEEIISKSDSSKDEYESQISLLKEKLETATTANDENVNKISELTKTREELEAELAAYKNLKNELETKLETSEKALKEVKENEEHLKEEKIQLEKEATETKQQLNSLRANLESLEKEHEDLAAQLKKYEEQIANKERQYNEEISQLNDEITSTQQENESIKKKNDELEGEVKAMKSTSEEQSNLKKSEIDALNLQIKELKKKNETNEASLLESIKSVESETVKIKELQDECNFKEKEVSELEDKLKASEDKNSKYLELQKESEKIKEELDAKTTELKIQLEKITNLSKAKEKSESELSRLKKTSSEERKNAEEQLEKLKNEIQIKNQAFEKERKLLNEGSSTITQEYSEKINTLEDELIRLQNENELKAKEIDNTRSELEKVSLSNDELLEEKQNTIKSLQDEILSYKDKITRNDEKLLSIERDNKRDLESLKEQLRAAQESKAKVEEGLKKLEEESSKEKAELEKSKEMMKKLESTIESNETELKSSMETIRKSDEKLEQSKKSAEEDIKNLQHEKSDLISRINESEKDIEELKSKLRIEAKSGSELETVKQELNNAQEKIRINAEENTVLKSKLEDIERELKDKQAEIKSNQEEKELLTSRLKELEQELDSTQQKAQKSEEERRAEVRKFQVEKSQLDEKAMLLETKYNDLVNKEQAWKRDEDTVKKTTDSQRQEIEKLAKELDNLKAENSKLKEANEDRSEIDDLMLLVTDLDEKNAKYRSKLKDLGVEISSDEEDDEEDDEEDEEEGQVA

SEQ ID NO: 3331 - protein, 1790 aa, Saccharomyces cerevisiae
MDIIQGLIQQPKIQSVDETIPTLCDRVENSTLISDRRSAVLGLKAFSRQYRESVIASGLKPLLNTLKRDYMDEDSVKAILETILILFIRGDGHDDLTRGWISQQSRLQNGKYPSPLVMKQEKEQVDQFSLWIADALTQSEDLIHLLVEFWEIDNFHIRLYTIQLLEAVMATRPLKARSALISLPTSISTMVSLLDDMHEPIRDEAILLLMAVVNDSPHVQKLVAFENIFERLFSIIEEEGGLRGSLVVNDCLSLINNILKYNTSNQTLFLETGNLPKLAHLLSEPISQDEVFFWNDQRIVNINTALDIVSLTVEPGNTVTTKHQNALLDSSVLMVVLRLAFFHNIPKKVRPVALLTAANMVRSNEHAQLEFSKIDVPYFDPSLPVNSTATAGPIKLIPVVSILINWMLYANSVHTFDTRVACSRLLKAYFMDNFDLQRDFLLKQVQLCNNSTNNVGDNAKENGGSNKSDKESDSDKDTDGKDGTEYEGSFKANLFEVLLNYDAELNLNPFKLFFTTDIFMFFFQQDHKYSEELREITRNVTTGNDLEDEEPLKAIQTISELLTTSLTAADIRIPISYLTFLIYWLFGDFKATNDFLSDKSVIKSLLSFSYQIQDEDVTIKCLVTMLLGVAYEFSSKESPFPRKEYFEFITKTLGKDNYASRIKQFKKDSYFSKVDMNEDSILTPELDETGLPKVYFSTYFIQLFNENIYRIRTALSHDPDEEPISKISFEEVEKLQRQCTKLKGEITSLQTETESTHENLTEKLIALTNEHKELDEKYQILNSSHSSLKENFSILETELKNVRDSLDEMTQLRDVLETKDKENQTALLEYKSTIHKQEDSIKTLEKGLETILSQKKKAEDGINKMGKDLFALSREMQAVEENCKNLQKEKDKSNVNHQKETKSLKEDIAAKITEIKAINENLEEMKIQCNNLSKEKEHISKELVEYKSRFQSHDNLVAKLTEKLKSLANNYKDMQAENESLIKAVEESKNESSIQLSNLQNKIDSMSQEKENFQIERGSIEKNIEQLKKTISDLEQTKEEIISKSDSSKDEYESQISLLKEKLETATTANDENVNKISELTKTREELEAELAAYKNLKNELETKLETSEKALKEVKENEEHLKEEKIQLEKEATETKQQLNSLRANLESLEKEHEDLAAQLKKYEEQIANKERQYNEEISQLNDEITSTQQENESIKKKNDELEGEVKAMKSTSEEQSNLKKSEIDALNLQIKELKKKNETNEASLLESIKSVESETVKIKELQDECNFKEKEVSELEDKLKASEDKNSKYLELQKESEKIKEELDAKTTELKIQLEKITNLSKAKEKSESELSRLKKTSSEERKNAEEQLEKLKNEIQIKNQAFEKERKLLNEGSSTITQEYSEKINTLEDELIRLQNENELKAKEIDNTRSELEKVSLSNDELLEEKQNTIKSLQDEILSYKDKITRNDEKLLSIERDNKRDLESLKEQLRAAQESKAKVEEGLKKLEEESSKEKAELEKSKEMMKKLESTIESNETELKSSMETIRKSDEKLEQSKKSAEEDIKNLQHEKSDLISRINESEKDIEELKSKLRIEAKSGSELETVKQELNNAQEKIRINAEENTVLKSKLEDIERELKDKQAEIKSNQEEKELLTSRLKELEQELDSTQQKAQKSEEERRAEVRKFQVEKSQLDEKAMLLETKYNDLVNKEQAWKRDEDTVKKTTDSQRQEIEKLAKELDNLKAENSKLKEANEDRSEIDDLMLLVTDLDEKNAKYRSKLKDLGVEISSDEEDDEEDDEEDEEEGQVA

SEQ ID NO: 3332 - protein, 1268 aa, Saccharomyces cerevisiae
FQQDHKYSEELREITRNVTTGNDLEDEEPLKAIQTISELLTTSLTAADIRIPISYLTFLIYWLFGDFKATNDFLSDKSVIKSLLSFSYQIQDEDVTIKCLVTMLLGVAYEFSSKESPFPRKEYFEFITKTLGKDNYASRIKQFKKDSYFSKVDMNEDSILTPELDETGLPKVYFSTYFIQLFNENIYRIRTALSHDPDEEPINKISFEEVEKLQRQCTKLKGEITSLQTETESTHENLTEKLIALTNEHKELDEKYQILNSSHSSLKENFSILETELKNVRDSLDEMTQLRDVLETKDKENQTALLEYKSTIHKQEDSIKTLEKGLETILSQKKKAEDGINKMGKDLFALSREMQAVEENCKNLQKEKDKSNVNHQKETKSLKEDIAAKITEIKAINENLEEMKIQCNNLSKEKEHISKELVEYKSRFQSHDNLVAKLTEKLKSLANNYKDMQAENESLIKAVEESKNESSIQLSNLQNKIDSMSQEKENFQIERGSIEKNIEQLKKTISDLEQTKEEIISKSDSSKDEYESQISLLKEKLETATTANDENVNKISELTKTREELEAELAAYKNLKNELETKLETSEKALKEVKENEEHLKEEKIQLEKEATETKQQLNSLRANLESLEKEHEDLAAQLKKYEEQIANKERQYNEEISQLNDEITSTQQENESIKKKNDELEGEVKAMKSTSEEQSNLKKSEIDALNLQIKELKKKNETNEASLLESIKSVESETVKIKELQDECNFKEKEVSELEDKLKASEDKNSKYLELQKESEKIKEELDAKTTELKIQLEKITNLSKAKEKSESELSRLKKTSSEERKNAEEQLEKLKNEIQIKNQAFEKERKLLNEGSSTITQEYSEKINTLEDELIRLQNENELKAKEIDNTRSELEKVSLSNDELLEEKQNTIKSLQDEILSYKDKITRNDEKLLSIERDNKRDLESLKEQLRAAQESKAKVEEGLKKLEEESSKEKAELEKSKEMMKKLESTIESNETELKSSMETIRKSDEKLEQSKKSAEEDIKNLQHEKSDLISRINESEKDIEELKSKLRIEAKSGSELETVKQELNNAQEKIRINAEENTVLKSKLEDIERELKDKQAEIKSNQEEKELLTSRLKELEQELDSTQQKAQKSEEERRAEVRKFQVEKSQLDEKAMLLETKYNDLVNKEQAWKRDEDTVKKTTDSQRQEIEKLAKELDNLKAENSKLKEANEDRSEIDDLMLLVTDLDEKNAKYRSKLKDLGVEISSDEEDDEEDDEEDEEEGQVA

SEQ ID NO: 3333 - protein, 944 aa, Saccharomyces cerevisiae
MDEASHLPNGSLKNMEFTPVGFIKSKRNTTQTQVVSPTKVPNANNGDENEGPVKKRQRRSIDDTIDSTRLFSEASQFDDSFPEIKANIPPSPRSGNVDKSRKRNLIDDLKKDVPMSQPLKEQEVREHQMKKERFDRALESKLLGKRHITYANSDISNKELYINEIKSLKHEIKELRKEKNDTLNNYDTLEEETDDLKNRLQALEKELDAKNKIVNSRKVDDHSGCIEEREQMERKLAELERKLKTVKDQVLELENNSDVQSLKLRSKEDELKNLMNELNELKSNAEEKDTQLEFKKNELRKRTNELNELKIKSDEMDLQLKQKQNESKRLKDELNELETKFSENGSQSSAKENELKMLKNKIAELEEEISTKNSQLIAKEGKLASLMAQLTQLESKLNQRDSQLGSREEELKKTNDKLQKDIRIAREETVSKDERIIDLQKKVKQLENDLFVIKKTHSESKTITDNELESKDKLIKILENDLKVAQEKYSKMEKELKEREFNYKISESKLEDEKTTLNEKISNLAAENSQLKNKIEDNSTATHHMKENYEKQLESLRKDIEEYKESAKDSEDKIEELKIRIAENSAKVSEKRSKDIKQKDEQISDLTQNLKLQEDEISSLKSIIDRYKKDFNQLKSEQSNIQHDLNLQILNLENKLIESEDELKSLRDSQKIEIENWKRKYNNLSLENDRLLTEKESASDKEREISILNRKLDEMDKEKWNLQESKEKYKRELQKVITANDRLRREKEELNENSNNIRIMEDKMTRIKKNYLSEITSLQEENRRLEERLILNERRKDNDSTMQLNDIISYYKLKYHSEVRHNNDLKVINDYLNKVLALGTRRLRLDTRKGEHSLNISLPDDDELDRDYYNSHVYTRYHDYEYPLRFNLNRRGPYFERRLSFKTVALLVLACVRMKRIAFYRRSDDNRLRILRDRIESSSGRISW

SEQ ID NO: 3334 - protein, 1875 aa, Saccharomyces cerevisiae
MSDHDTPMESIQNGENSDERLNAIASFFGCSLEQVKSFDGDVVKHLNDKLLQFNELKSENLKVTVSFDELKASSLKKIDGLKTEMENVIRENDKIRKERNDTFVKFESVENEKMKLSSELEFVKRKLDDLTEEKKETQSNQQRTLKILDERLKEIELVRVENNRSNSECKKLRSTIMDLETKQQGYITNDLNSRTELERKTQELTLLQSNNDWLEKELRSKNEQYLSYRQKTDKVILDIRNELNRLRNDFQMERTNNDVLKQKNNELSKSLQEKLLEIKGLSDSLNSEKQEFSAEMSLKQALVDLLESQLNAVKEELNSIRELNTAKVIADDSKKQTPENEDLLKELQLTKEKLAQCEKECLRLSSITDEADEDNENLSAKSSSDFIFLKKQLIKERRTKEHLQNQIETFIVELEHKVPIINSFKERTDMLENELNNAALLLEHTSNEKNAKVKELNAKNQKLVECENDLQTLTKQRLDLCRQIQYLLITNSVSNDSKGPLRKEEIQFIQNIMQEDDSTITESDSQKVVTERLVEFKNIIQLQEKNAELLKVVRNLADKLESKEKKSKQSLQKIESETVNEAKEAIITLKSEKMDLESRIEELQKELEELKTSVPNEDASYSNVTIKQLTETKRDLESQVQDLQTRISQITRESTENMSLLNKEIQDLYDSKSDISIKLGKEKSSRILAEERFKLLSNTLDLTKAENDQLRKRFDYLQNTILKQDSKTHETLNEYVSCKSKLSIVETELLNLKEEQKLRVHLEKNLKQELNKLSPEKDSLRIMVTQLQTLQKEREDLLEETRKSCQKKIDELEDALSELKKETSQKDHHIKQLEEDNNSNIEWYQNKIEALKKDYESVITSVDSKQTDIEKLQYKVKSLEKEIEEDKIRLHTYNVMDETINDDSLRKELEKSKINLTDAYSQIKEYKDLYETTSQSLQQTNSKLDESFKDFTNQIKNLTDEKTSLEDKISLLKEQMFNLNNELDLQKKGMEKEKADFKKRISILQNNNKEVEAVKSEYESKLSKIQNDLDQQTIYANTAQNNYEQELQKHADVSKTISELREQLHTYKGQVKTLNLSRDQLENALKENEKSWSSQKESLLEQLDLSNSRIEDLSSQNKLLYDQIQIYTAADKEVNNSTNGPGLNNILITLRRERDILDTKVTVAERDAKMLRQKISLMDVELQDARTKLDNSRVEKENHSSIIQQHDDIMEKLNQLNLLRESNITLRNELENNNNKKKELQSELDKLKQNVAPIESELTALKYSMQEKEQELKLAKEEVHRWKKRSQDILEKHEQLSSSDYEKLESEIENLKEELENKERQGAEAEEKFNRLRRQAQERLKTSKLSQDSLTEQVNSLRDAKNVLENSLSEANARIEELQNAKVAQGNNQLEAIRKLQEDAEKASRELQAKLEESTTSYESTINGLNEEITTLKEEIEKQRQIQQQLQATSANEQNDLSNIVESMKKSFEEDKIKFIKEKTQEVNEKILEAQERLNQPSNINMEEIKKKWESEHEQEVSQKIREAEEALKKRIRLPTEEKINKIIERKKEELEKEFEEKVEERIKSMEQSGEIDVVLRKQLEAKVQEKQKELENEYNKKLQEELKDVPHSSHISDDERDKLRAEIESRLREEFNNELQAIKKKSFDEGKQQAMMKTTLLERKLAKMESQLSETKQSAESPPKSVNNVQNPLLGLPRKIEENSNSPFNPLLSGEKLLKLNSKSSSGGFNPFTSPSPNKHLQNDNDKRESLANKTDPPTHLEPSFNIPASRGLISSSSTLSTDTNDEELTSNNPAQKDSSNRNVQSEEDTEKKKEGEPVKRGEAIEEQTKSNKRPIDEVGELKNDEDDTTENINESKKIKTEDEEEKETDKVNDENSI

SEQ ID NO: 3335 - protein, 1875 aa, Saccharomyces cerevisiae
MSDHDTPMESIQNGENSDERLNAIASFFGCSLEQVKSFDGDVVKHLNDKLLQFNELKSENLKVTVSFDELKASSLKKIDGLKTEMENVIRENDKIRKERNDTFVKFESVENEKMKLSSELEFVKRKLDDLTEEKKETQSNQQRTLKILDERLKEIELVRVENNRSNSECKKLRSTIMDLETKQQGYITNDLNSRTELERKTQELTLLQSNNDWLEKELRSKNEQYLSYRQKTDKVILDIRNELNRLRNDFQMERTNNDVLKQKNNELSKSLQEKLLEIKGLSDSLNSEKQEFSAEMSLKQRLVDLLESQLNAVKEELNSIRELNTAKVIADDSKKQTPENEDLLKELQLTKEKLAQCEKECLRLSSITDEADEDNENLSAKSSSDFIFLKKQLIKERRTKEHLQNQIETFIVELEHKVPIINSFKERTDMLENELNNAALLLEHTSNEKNAKVKELNAKNQKLVECENDLQTLTKQRLDLCRQIQYLLITNSVSNDSKGPLRKEEIQFIQNIMQEDDSTITESDSQKVVTERLVEFKNIIQLQEKNAELLKVVRNLADKLESKEKKSKQSLQKIESETVNEAKEAIITLKSEKMDLESRIEELQKELEELKTSVPNEDASYSNVTIKQLTETKRDLESQVQDLQTRISQITRESTENMSLLNKEIQDLYDSKSDISIKLGKEKSSRILAEERFKLLSNTLDLTKAENDQLRKRFDYLQNTILKQDSKTHETLNEYVSCKSKLSIVETELLNLKEEQKLRVHLEKNLKQELNKLSPEKDSLRIMVTQLQTLQKEREDLLEETRKSCQKKIDELEDALSELKKETSQKDHHIKQLEEDNNSNIEWYQNKIEALKKDYESVITSVDSKQTDIEKLQYKVKSLEKEIEEDKIRLHTYNVMDETINDDSLRKELEKSKINLTDAYSQIKEYKDLYETTSQSLQQTNSKLDESFKDFTNQIKNLTDEKTSLEDKISLLKEQMFNLNNELDLQKKGMEKEKADFKKRISILQNNNKEVEAVKSEYESKLSKIQNDLDQQTIYANTAQNNYEQELQKHADVSKTISELREQLHTYKGQVKTLNLSRDQLENALKENEKSWSSQKESLLEQLDLSNSRIEDLSSQNKLLYDQIQIYTAADKEVNNSTNGPGLNNILITLRRERDILDTKVTVAERDAKMLRQKISLMDVELQDARTKLDNSRVEKENHSSIIQQHDDIMEKLNQLNLLRESNITLRNELENNNNKKKELQSELDKLKQNVAPIESELTALKYSMQEKEQELKLAKEEVHRWKKRSQDILEKHEQLSSSDYEKLESEIENLKEELENKERQGAEAEEKFNRLRRQAQERLKTSKLSQDSLTEQVNSLRDAKNVLENSLSEANARIEELQNAKVAQGNNQLEAIRKLQEDAEKASRELQAKLEESTTSYESTINGLNEEITTLKEEIEKQRQIQQQLQATSANEQNDLSNIVESMKKSFEEDKIKFIKEKTQEVNEKILEAQERLNQPSNINMEEIKKKWESEHEQEVSQKIREAEEALKKRIRLPTEEKINKIIERKKEELEKEFEEKVEERIKSMEQSGEIDVVLRKQLEAKVQEKQKELENEYNKKLQEELKDVPHSSHISDDERDKLRAEIESRLREEFNNELQAIKKKSFDEGKQQAMMKTTLLERKLAKMESQLSETKQSAESPPKSVNNVQNPLLGLPRKIEENSNSPFNPLLSGEKLLKLNSKSSSGGFNPFTSPSPNKHLQNDNDKRESLANKTDPPTHLEPSFNIPASRGLISSSSTLSTDTNDEELTSNNPAQKDSSNRNVQSEEDTEKKKEGEPVKRGEAIEEQTKSNKRPIDEVGELKNDEDDTTENINESKKIKTEDEEEKETDKVNDENSI

SEQ ID NO: 3336 - protein, 1363 aa, Podospora anserina
MVQPGIGGLDTPRTNIGDATYLGRQPDFDLSQELSDFQSPSKDANLLQQLRNGGRPTLKTPRGGRGPLRDRQNLPGFGGNEFTPLLKSATRNSARRYGAGKENGLGRASTLNFLNRIDEDMTPLPAGETSMYLGSRNTSSIEHTPLPEVDSSSVASTPLVMRRRDNSGKGPLEDGNQLSLREQENVIDRIEKENFGLKLKIHFLEEALRKAGPGFSEAALKENTELKVDKVTMQRELQRYKKHLTSAEKDLETYRQQIVEVQEKAKKKYATEDQGAELERLRQALEDKETEVDKLQRQIEEEQKEQDKLGNLQDEITDLEHDLRRKDDVITQQEDEIEDLKDKVTEFEEKLKETQRRMLEMEEKAKDSDRLHEAKDTIEDLEHNVRRLEQQVDDMKDKLQDAVAEKERAENDLEELQEEMANKSVVTKGLSRQVEEKVSRLQAEVDKARQECAVVAEEREVQQREMETLRAKLKEAREERDSAERLRLAIEGQLNEEQGSQRKEFDELRMQLKSARQERDDAERIRLSLEAKLDQAQADLNMRADEKNLLQTRHDALTNESVSLLGEVQSLQKAVEELEESLEREQQHALNMERDIQSQYKDEIDRLNDEISDLQAECREKDNLYDNDSEKWETERHQLQAEKQRAEERAAGLQKTIDKLRDTEGALSSKESKLQEALQSETERHKKDELLLKVQIEQLRSDLNARQSMLEELRHELSAVKDELRQSQLDCQAQQEKIEALEDEVEVLQVTIDEESERARVELEQHQDECDQLRHEINLLQIKADSAQASSPTTRESTKQTNDNVARLKFQLADATEKVSQLTKERRTLQERSTTLDAELRSVRAALEETRAERDELEAQINGLKGQQGADTFKIDQERLDLRVTRTKLEAELRRLKEENKALAERKQEVERSLESEIEKAAAEEDRLGDEIRQLQAKLRQSTDSQELASLRRTIREMERRVQDYETQLAAPQLPAQGLDGNSELSFLQKELSAARKKEIEQLKSEASQKDTIKSLKRQISELERKAHEAEIKRFASSPSSQGGSAQKSEISELRHQLSTAAQSVHDLKKALREAERKAEASARELATQLEEIEDEKLLLEQALDDAQLAAEESAAAHEEALKKHKAKMERYKSERDQLAAAIREQQHLNGNDTNHSEMSLEERRDLHKMLRESQLTADKLDRELREHREALDELMDVEISLRKKLERARNERAAYRTSAEKLQKDFKKLQAQKDKAVAEAMAATEERALVRVTKGSVDTDAIIRAAEAAERRHEKEIRGMVMQMEWLKACWDREAKLRKDAAFAKKYLLLEVQIRDAWYVSPLLALSLTNNANNKTATRLTWRSSTGYGLSLTLRIVMLFPS

SEQ ID NO: 3337 - protein, 1197 aa, Candida albicans
MSETKEAPKPTKQESQGILKKLTSGDTWVSPFRSQASEEDPKKKINLYKQFKESNKIEHIKVPVKFSYHPTLEAEAKKKKAAEAEAKKAKETKATVTSTEAKDAKEETETKAEKVEEKLETDAKEPLIEDETKEEAKVDTEAKEPLIEDEDKQEPANEAEEKEAELEDKAEEKLVTDQPKDEEIEVAEPKEVSAASEVEEQKLEKDAAEPEIQDGEALKGDDNIEKQIKENPIELVDQPSQFKYEPVELPNKETLDKLQDKPVLLKHYQELNAIGVGSIANRIEDPNKVIELGSGLRMTQQQLLDIAAKRVAPVITNINDEVSKTRQEDEIKRQQGLDNKVKKHESKLQSDFEKYLGKIGKKKDKFNKEIEEKLANFETMIKKSNNTAIEFEKTTKGEIETANKEYEEREAKAVEQHATDKETIEKNHEELLATKKQELEDAKTGQETATQEIEELKDKKTELDDKNSELADKIEQLTAQLNTELAKLDDLKANHKEHQDSIDANLTKKKELDDNLTIIRKDLSDKKEKHKGLSAEVGVLAGSAAAYAARLTSLHSDKEDRAKRLAEAKDKHASWLKEKRELAEQTARDHERKRLEATHEYETQKHLEELERQKQKEELERKEKEEAEERERQAKIEAEERERKEKEEAEEKARLEKEQAEKEAKEKELKEQQEKEEAQKKKNDVEYQVSQAILSRETDQKKFEEERAESERIYNERKAKEKEETDRLLKEIEDLKAEKEKAAELEREEAEKVAQAKLAQIEKLKQEHEAKTKLFNDKLEFENLQKQRLEEEVANLKKIRELREEKARLASEQYKDPELERVKKLIQERELEVDKLTKVIEFEKPEQTSSEGGHFLGISNDSKSGAIPVIKSKDVVVGNNENSHSKSVNTGNEAKTENESDDKKKDHHYGGAALGIAGGILAAAGAGALAAGSAGKNAVSGIASGVSNAVPSGNKDVQLPSNGSGTQGNTTTSAPGQSQSSSPLATTTEPSGSAASIPTSSNTSTISSKKNAASVTPTPVEAQRTNSLSDKFKGWGRKLSKKDKSKDVNSAAGETTAETGVIAKDDDKPVGGITALDAEKNTVVARDAKPIGGVTALDAEKNTVVARDTKPIGGINANDIEEKPSVGIFVSKNVSSNKTSTDADDESFEIQSVYEVVSDSEYEANKHNPNYFEVSPEEFEKHKNLENKVVLIEKISE

SEQ ID NO: 3338 - protein, 857 aa, Giardia intestinalis
MSEAMVFSKIDEYTLFMSRSLQKSLKTFAEQVMALIYQYKDTLVEDRLALTNTLDEAVQILVDSGKEEADKLGFNIYSAVSRYISEIWASQSGQTTAAPPATDIDGLHRQLVALKNSLGQNAELYEQRCQLQAELRELQEFSENPAAAVEEIMQLKAQIDELKYGASNHNALVQEKRDLERHLADLRLSRQDTNSRLPQEIDRLRAEIEDEKRNLPHMDDLQRQRDELQRQLDTIRRRGNTSGVMAEIENIQRQIDDANSSASSEHELRMLRAEVETLRAQKSIVTRLEAENADLRRELQDIRGRAQEMSASQRYSANQAQELQEKAMQAEELLQQKIELRRQLHEALERADAGEAALRDKRRLEDEIKGLQLRLTENDFTKERSILRNEIQAKTTEIDTLISDRRALETKLLNKEAEVDQLLYEKQLLKTELNSYRGTNEDIDKLTFEKRQLVEELNDLREKTIKYDQLAREKAALETELKENSYNFDQLLEQKQQMRSDLNALREKAADYERVDRELRLKDKELEEKNAEIERLLEDRRVMRTELLHSKESATDVDSLIQEKRLRDRELAHLRDRMSEYERVVEERIQKEKENNLLKQRITELEQQQRTATVRETEMSALREKANELDGYNRERQAREHEINMLRDKALESDKLRQDNRVMAMELTELREKVQLLEKLQYEKRARDVEMLELRHKAMDVDTLVEEKQRLEMRLAELKIKVNNYDQLADDKARLQEQLKEMSDKLIEFEMIMDDNRRLKLQVKELDLKTANMEKLYEEYKKLEDQLKATKAMTSTGMGVSAASPAFYKTKSMRLTQQNNQMKNTTDNLLTRDIPKLIDKLIERPAGTTTMGRSGKF

SEQ ID NO: 3339 - protein, 746 aa, Naegleria fowleri
RYRMEEELKIKNSEIDRLKKLSESSKDELTLQLNKTNDEKNELVNKLKKAEKDLKNLKKSKDDLQAEKDDSDNRIRKLEQDLREKEQLSENLAKRIADLENEARTKEAQKKSTEMELSSVKDDLNRTKQRAEQLQSDLEAQRERANELENLLSDTEGGKNQLDSQFKQLQNELQNERTNLQKMKSENERLQRELEEMKRSLSDKQNESTSLDSKVKSLEDKIRELTALLETERSSKTDLDKKRSKMDKEVKRLAQQLQETEQALKGETQKKNDADNRVKQLESELQGVKSERDRLNKDLNNTSGDMNGLKRQLDESNNLVAKLKAEIQKLQKDLSDHHGDREETEEQLDALRKQLQELTSRLSDANQKTQQEAASRQNLESENNRLKSEVSRLREDLQNENRRLKQEMERVQSESENEKSELLTQLQKLQEAYSEVKDELKDLSKNASRGGGVVGGVDSAEVEKLRREYEMQLAQLKARVEEVTQQRVDVENKKRSVEMDLTEMKTRLQTEERLRKKVEQQKKSVEMECDELRELAEEAEDLRDELNRTKLEHQALIQQLRQDLLQERHSRASAEESATRQKREIEELQQDLEQERAKLDEAARRLKQQYENEILDLNNQIAQAKKERSAASRDMKKADRDLREYQRRFQEEARAKQDLEQRLTKVERENKLLQSQSQSDASKYQKAEQEKQRLEAENRQQKDKILELQDDLEKLRQQVNSERKKTQRIARKASPFSAGELIDDLQ

SEQ ID NO: 3340 - protein, 1939 aa, Plasmodium chabaudi
MIFNLKKSKKNEDGSNKDSKKTNETSGIEKKEKSNKWYNKIVNNSTKKDKDKNNDSIVYDDESKVGENDHHMKEYELEDQLKETLKSITALSIKVKEYEVKIEELEKELKLEKEKQINKEYEKELNEKSEFIKRQMELLKEKELNINLKENKINNKEIITLKREEKLNDIESEYIEKNKEKEKLNYEVTNIKMSLDKLTCEVQEKKDNLEKINKKVIEKENNLRELKEFMKEKNEIIESLDGTINDKKNAYEKLEISFEEKRKMIEMLDSKLIEKEENFANKQAKLEKENEIIIEKLKDIESREKDFKSKEEKFASMENELNTLKSDLSKNACQMEVYKLEIKDLSQSLVEKEREIFEIKNEYDDKINNMKEKLSSINDKGIDNTVLHSEEEKINKLLKEKETELNEIHKKYNLEIETIKNELNEKEEELEKNKKAHTVEVTNLTKEIKLLEKKTEDAKEGHKNELNELNNQLSKLNKEKDNIKNENTELNDKISSLNSEVNILNKDKQTLGNDIKTLNDLINNLKNEINTSDNKMNKMKEDLAMLNEEMEGKCVVIDEIEKKYKNEIFMLEEKLKEKENYADLNDEISILRNSIYVKEKEFIEMKEFYENKINLFNKNFEEKKNIYENELNSLRLKYDNEQGLIKQIDELNIQKLKTEEKYLQLYNDNMHMFRSICTKIDMPYSENIKGSDLVDFVTAYIKRRDESSSDANPDTTHKEMVAELEKRHAAIVAELEEKHKEEIAKLGEGHKEVVLRLGEQHKEETIILEEKHKDVVTKLGEQHKENIIKLEEEHKDVVTKLGDQYKEEIAKLKEEHAVVVAELEEKHKLGEGHKEMVDELEKRHADFVEGLEEKHKAETAKLEEGHKSEMNEVEKRHADFVEGLEEKHKAETAKLGEGHREVVAGLEEKHKEVVAELEEKHKEEIAKLEEGHKEVMAELGEKHKEVVAGLEAKHNLEEGHKEMVAELEKRHADLVAVLEEQHKAEIIKLGEEHKEVVAGIEEKYKVEAIKLAEEHKDVVTKLGEQHKEEIAKLEDGHKEVVNEVEKKNASLLNMLEENHKNEMIKLKEEHKESASDLVEKLYQKDEEVKNSNNKIEELTNVIKDLNDSIMCYKKQILEEVEKRNEYNEEINKLKIVQNEMKDMNDKKILEKENEIKKLNKKLSNYKVFETKENTYKNSEMVVNENKERIIVDSVCKENISESDVEGKGGNLKMTLSLKKKERNIFSINDNKNESSELVDTIKSAYINKIEMYKKEIEDNGKNIEDLKNKILDLSNELINLENMKNVLTDENNNLKKEIEIKDNKLNEKEKNENTEILNLNDDIIKLKKEISEWKDEEEKLTKENIKLKNDIEQINKEYKIKEENLMIKFNENINEVTSLKNQIEIEKMKLEELNKNYELLLAEKRETNMSISNDDNKIVENNILEDTDSKQNNLNKNVEDKTGDDINCEKNNDQAKEISYLKDEIKKISMLYGEELNRKNSYDEKVKNLTNELKELKIRNKKGEEAIAELNKLKNIKEKNKSVKQNDESSSNNIITKDGDKTPEYVSNDDKIQKDWKANLVLKLKEKPDLWDNINSLEKENFRVMSIVKENKNVQNDKIVGIYSYFKKCEKELKNDMLVICLVLKDILSILFLNDNFVNLFEKIDKILWKQMYIPTEIRILFLRYFSFLDKLRNYVKCVNEEYVNNERYEYSWALFQTYLETASNLKKEMIYYVLEKAEKDSCENNSSNFDKPKITDILNFSKDSIRLKTIAQLRKELNFEREAKNILNYDYQIILNKYHECLRKLKIVKNMARELDFNYNVSSKFSIKKELEMCSDENDEFKYNNIKNNEEKNDTIKDPKHNNLIQKIINLQRNKKTEKKKNNLVNEINTMYPGDTTPKGKIFTTNDNSKQNEILKKKDNINNNITHKNVYTGQVKNIFNEPVERKVRISFIHKSPFN

SEQ ID NO: 3341 - protein, 1909 aa, Plasmodium falciparum
MKHILYISFYFILVNLLIFHINGKIIKNSEKDEIIKSNLRSGSSNSRNRINEEKHEKKHVLSHNSYEKTKNNENNKFFDKDKELTMSNVKNVSQTNFKSLLRNLGVSENIFLKENKLNKEGKLIEHIINDDDDKKKYIKGQDENRQEDLEEKAAKETLQGQQSDLEQERLAKEKLQEQQSDSEQERLAKEKLQEQQSDLEQERLAKEKLQEQQSDLEQERLAKEKLQEQQSDLEQERRAKEKLQEQQSDLEQERRAKEKLQEQQSDLEQERRAKEKLQEQQSDLEQERLAKEKLQEQQSDLEQERRAKEKLQEQQSDLEQERLAKEKLQEQQSDLEQERLAKEKLQEQQSDLEQERLAKEKLQGQQSDLEQERLAKEKLQEQQSDLEQDRLAKEKLQEQQSDLEQERLAKEKLQEQQSDLEQERRAKEKLQEQQSDLEQERLAKEKLQEQQSDLEQERRAKEKLQEQQSDLEQERRAKEKLQEQQSDLEQERLAKEKLQEQQSDLEQERLAKEKLQEQQSDSEQERLAKEKLQEQQSDLEQERLAKEKLQEQQSDLEQERLAKEKLQEQQSDLEQERLAKEKLQEQQSDLEQERLAKEKLQGQQSDLEQERLAKEKLQGQQSDLEQERLAKEKLQEQQSDLEQERLAKEKLQEQQSDLERTKASKETLQEQQSDLEQERLAKEKLQEQQSDLEQERRAKEKLQEQQSDLEQERRAKEKLQEQQSDLEQERRAKEKLQEQQSDLEQERRAKEKLQEQQSDLEQDRLAKEKLQEQQSDLEQERRAKEKLQEQQSDLEQDRLAKEKLQEQQSDLEQERRAKEKLQEQQSDLEQERLAKEKLQEQQSDLEQERRAKEKLQEQQSDLEQDRLAKEKLQEQQSDLEQERRAKEKLQEQQSDLEQERRAKEKLQEQQSDLEQERLAKEKLQEQQRDLEQERRAKEKLQEQQSDLEQERRAKEKLQEQQSDLEQERLAKEKLQEQQSDLEQERLAKEKLQEQQSDLEQERLAKEKLQGQQSDLEQERLAKEKLQGQQSDLEQERLAKEKLQEQQSDLEQERLAKEKLQEQQSDLEQERLAKEKLQGQQSDLEQERLAKEKLQGQQSDLEQERLAKEKLQGQQSDLEQERLAKEKLQGQQSDLEQERLAKEKLQEQQSDLEQERLAKEKLQEQQSDLEQERRAKEKLQEQQSDLERTKASKETLQEQQSDLEQERLAKEKLQEQQSDLEQERRAKEKLQEQQSDLEQERLAKEKLQEQQSDLEQERRAKEKLQEQQSDLEQERRAKEKLQEQQSDLEQERRAKEKLQEQQSDLEQERLAKEKLQEQQSDLEQERLAKEKLQEQQSDLEQERRAKEKLQEQQSDLEQERLAKEKLQEQQSDLEQERRAKEKLQEQQSDLEQDRLAKEKLQEQQRDLEQERRAKEKLQEQQSDLEQERRAKEKLQEQQSDLEQERRAKEKLQEQQSDLEQERRAKEKLQEQQSDLEQERLAKEKLQEQQRDLEQERRAKEKLQEQQSDLEQERRAKEKLQEQQSDLEQERLANEKLQEQQRDLEQERRAKEKLQEQQSDLEQERRAKEKLQEQQSDLEQERRAKEKLQEQQSDLEQERLAKEKLQEQQRDLEQERLAKEKLQEQQRDLEQRKADTKKNLERKKEHGDVLAEDLYGRLEIPAIELPSENERGYYIPHQSSLPQDNRGNSRDSKEISIIEKTNRESITTNVEGRRDIHKGHLEEKKDGSIKPEQKEDKSADIQNHTLETVNISDVNDFQISKYEDEISAEYDDSLIDEEEDDEDLDEFKPIVQYDNFQDEENIGIYKELEDLIEKNENLDDLDEGIEKSSEELSEEKIKKGKKYEKTKDNNFKPNDKSLYDEHIKKYKNDKQVNKEKEKFIKSLFHIFDGDNEILQIVDELSEDITKYFMKL

SEQ ID NO: 3342 - protein, 2910 aa, Plasmodium falciparum
MRIREKKLEDKDLPKNKKGSRNVKDEKCNRNIRNEEYIKSTTKKDKIENIVKKLDDIKNKVTDSTDGLKCVEILFNKAGTNCLLPVDNDIQNKLGKKRNTNLIKKENNNNNNNNKCDNLHNTYLFNGPVKNFEYLNVQNVHTFFHKYFYLKKNTDDTYDNIHFEDILKENKNNFSFLEKQPSDINPLFISLPYNIHMDEIAEYNKMMEQTSDYNNVDLGDKKEQTNDILLKKNTNIENNNNNKKNKMNVYQNDFYNLLNKKRKVNNNTDNVNLQMNEMVSLNMYKKNNLTSNFLLNHDNNIDNKELYYFNESINEIHENCTDSKILILKICNIIFEKKKTKNIHILKQLDLLFNLQKSYENRNIFYEKKSLYGMENISSKDNINNDNNNNNNYHQNFSFGKENYVFLDNNNTSINIVREDESKEKSISNYNFDKTLFLFYNVLLKVSVHISGLYNTFMDILNYNSSDALNNHINSNNNNNNNNNNNNNNNNNDYFISYELRKLIESINIYQRAVNAALYLFHYILHMLEITSQKNNNMLIIENEISTIRNFIKIINKWKKVDSNILINIVQYKNYPNTQNNDNTYKSNKQLNIQQNENKKYKVNLINKELVRHNFEIRKIIICKYNNKIIKWMKKIHNLYIMHVYKSYKNDQNGYINEEEKNETKTETKNEKKNETKREINNEKKNETKREINNETKKERNDERNDERNDERNNERNNERNNERNNERNNERNNERKSETNKWTCQYRDNYQTPYCCNIYTKDKIENKKNNYNIPCEVESLSFFFHCCNINTYYWYKKEIDINNMKIIFYLSNLLTKEVQNSEFIKRQMNSYFKEINNLFFDIKDIYDILLCYNNMRNLNKEDNINIPTCQLNNSTCQLNNSTCELNNSTNQLNNFIYNKDLCSKEIEDLLSDMSKYNNINVDKIMHKYNTYNDEILLKMSNMKNVDMLLLLLSNNIYNKIMSTTLYNNFDIIKFIMKWIFVHVIKIFVKDTYMLYINNNQGKINESNEDHNLNKNKDSHIDNNIEGENFLMNQKLIDEEVEKRVNIIKVELENEKNIIINNIKEELQNEEKIKYNDIKTNLEREKKINMHMNIELEKERKINDEMMIKFEKKNKMYDDINKELENEKKQNKEIYMELQNIKNINSDMNFALEDKSVQYDQKCIDFEKLNKMYEDTCKELNNKNVLYEQMNTQLYKEKINNDEICTELEKIKNINKNIQINLENEKKTNEQKDKQIEKQKMNIKEMVIQLEKEKIINNEIITQLENEKLNNKIIYEDIEKKNKLNSELEENYENQQKKINEMIIQLEKEKIINNEIIIQLENEKGSVKKINTELENIKKMNDEMNEKLNKEQKINNDLQLDLENEKNEKDHINKEFEKEKIKNIQLKKNMDEEKKTNESLNVEIDRLYKINEHVLLNLEEEKKIIDQFTIDLENERKRNHILQLHFDDEKKKNDQNYEDLLKEREKNKKLQILYDDGKNNISQLNIDLENERTRNNDLKILLDQEKKKNEQINDDLENERKRNNQLQNILNEEQKKKEQLNVSYEEQKNINHQLENELQKQRITYKKMIAKFERKFLMKNTNDTQKIKDTQQIIDTQKIIDTQKIIDTQKIIDTSNNVNQMNDEHKHVDQMNDAESEDNTFLELQLEKVKQVNIDMIIQLKKDKKRIDELNLELEKEKEVNDKIIIQMEEYKMKIEHINEELEKEKEINHNLNIRIEKDNEKNEQLNIQLDTEKKMNNQMSIELDEEKKMNHQRRIELDEEKKMNHEMNIELDEEKKINKEINILLEENKNKIIQINSCLQKEKEINELLNIQLEDKKNNIQELNIKLEDEKKLNEQINVTLENKINNIQELNIKLEDEKKLNEQINITLENKINNIQELNIKLEDEKKMNQQINIQLEEEKNKIIQINSHLKKEKEINEELNILLENKKNNIQEITIKLEEQKKINEEQYIQLEKDKEIINSMVVEMEKEKIINNEIKQKLEKEKKQNDQLVIHLENEKQANKKLNILLDQNKKINEELNIQVEQEKLINNEIIVQLKKENEENNKINSLLEEQNGLNKKVTLQLEKEKEENGKLKLQLENEKQENGNLRFELENEKKDIANLILQLQEEKENTKNVMVQMDKEKEKTKNVMVEMDKEKENTKNVMIELERERENNQNLNIKLEEGKNIMNQISIQLVEKQKIINQLNVKLENEKEENEKLKLEIDEEKKYNKQMSVELESEKEENEKLKLEIDEEKKYNNQMSVELESEKEENEKLKLEIDEEKKYKNQMSIELENEKEENEKLKLEIDEEKKYNKQMSVELESEKEENEKLKLEIDEAKKYNNQMNVELESKKEENEKLKLEIDEEKKNLNKVIYELDGEKIKYNDVCIILDNEKNKMKELNEKLINQEKELENIKKKLEEETLNFKKYREINYKEKNGSNDYTMENGKNVVTRNKINNEMNILDILDKNKKTKKTISKSNNNDNDDNNMKDEKYNKLYYSYVEIVIKKEELENEFNEQMKYFNDKVDIFDKKVQYFNKKITHYKNVCNMYIKNNGKISTCIKKLEEILYSIEKVHIKDKIILDGKIYNIKIIIKEINECIHMKIQETEDTDVLLYDEVINEKNILLEKILNNEKDKNIYHIEKDSELEKYMKELNFKNINDLFTFHLSMLDELCIIKKCYQQAVEENAMKIKEYDNNILILNKQIELKEKKNYINEKNCKSLLLEVDNLKFILNDLLSYVDHKDGKRNKRQRKMSIKNELKYINMEIKNIENEEQNMLINSEIENDGNHNEVPCAVINVHENIRNNHNRKMDNNSNIHENIETKKTLELHDSIEKMNTFENSFERNNTLNEENNLRNVQSLYPNFLEYKENSSFKSSTLKSNNLSELDILSNELNSNTTSKRKYSRNKNKKRDSVRQYELRSRRKE

SEQ ID NO: 3343 - protein, 980 aa, Plasmodium falciparum
MKELRKELILKKKNYEELRLKLNHLECVERDSVKINSEKEKGEKVIYELKEKLDNDEKIINDLKKKNSYQVYKMKDYEKRENNLINEINKLKLFIEENKMTVERGNEMNNKKLEEMKQKNKELINNLNDISDELKNCIEQVNSVSRNMANVEKEKENIINELQILRMKNDTMRKRISKFVEQEKVLKFKLYTLNNDIFSKNEKLNDMQKKLNDVNEKYKNIVECLNNYKTEHKEQIEKKIERINTLKQNYYYLKKEYDLKNKELEKNIEHGKKLEHELSHCYEENQKLNEEIKRRNSFIKNKDRKIDLLTNIENELLKKKEINNIKLMEKQNVIKNNEQLLKDIKDENEKMNEHVNKLQNELIKRELQNKCISKDIEFCKKEKEDKIKNLEDDLLEKKKCIENLKDELINIKKKMEDKMHMTNEMDLLSNKVEELNRINKTYEKNIVELNNELDVIKKKLNDEEFLKEEEKKKNIDMVYKIKEYEIQIKEKENEIDSLKKNEQNLHVLKNEELNEKEIILKNKYDKEINMIIEQYNKKIQEEKDMLNNKIKSMDQTHKNQIEEMQEENKKELKRLKNVCDMNLQSQILIKENEKHMQEKVEEYKNLLKQKDQELKNIIQEYDERIEIQNKEMEDIVNDCEEKLKQAKINNKKLTTATNMANNNNMLMDENLKEKDKKINDLMKDMEKKKEEINKLVEEKSKLEHSHVKIQNEMSLLVEQNEKLKEEMGLSRIAIKDMEEIKKDMEKYEEEKKKNEEERKKNEEERKKNEEERKKNEEEKKKNEEERKKNEEEKKKLEKDKHQFEEEKERMEIYEHQKEDRKRKDKKKKGHSSDKEEKYNKKEKTKEKSSNILFDEEYIIQLEELRDTGENCFIYLKSLSKELDVIINKLKSKDDALLNDAFNKINLAITSWNIFNEENKEGDNITTVENTATEGNITIDENTTEVEMNNEEVYKIFSVEKYDMLKKEVGEKVECIQKLIG

SEQ ID NO: 3344 - protein, 1164 aa, Tetrahymena pyriformis
MMSDAENDHVKRSKKNLEDQHNLVIQERDRMILQLKELTVKITEFQSLIASRDVQINTLKVQNEALSIRLVLTTAELERISKERVEAEPLRRKVSDLEGYLVVQEKTIEELRIKLGQQDQVISQLRIFEIRCTQYEQDINALKMKLEEFLRTLQLKSQECDELRGKLSQYDLLVIRYQQLEQKLQESEQNSLLLIKKIEELQALLNDEGVKRSKNRNDLDVSLRDKQALEEKLVMMTQQIEFLTRKCQQQEQDINNYRLRISELEILAGKVAGYEQQIQLLSQQIERLNQLLREKDNQIGQLTVELNNLKLANGQIVQLQEQIAQQNQVIVLRTAEIESLRKRLAELEVLLPQLKMFESRCAEYEQIINALRQRLAELEGQLGDENVKRSQKDGELAISLRDKQALEEKLVMMTQQIEFLSQKVNQLTAQLQERDNIIAQLRVYEVRVKEYENVINALRQRVAELEGQLGDENVKRSKKDGELAISLRDKQALEEKLVHLTQQIEFLTQKVAQYERMIQDLQGQLGDENLKRSKKDGELAISLRDKQALEEKLVHMTQQIEFLTQKVSQYERMIQELQGQLGDENVKRSKKDGELAISLRDKQALEEKLVHMTQQIEFLSVKVTQYEKLIGELQAQLQDRDSPYRLVDIRIKEYENIINALKQRNAELENNLGDESTKRSKRDGELAISLRDKQALEEKLVHMTQQIEFLTQKVAQYERMIQDLQGQLGDENVKRSKKDGELAISLRDKQALEEKLVHMTQQIEFLTQKVSQYEKLLAEQQAQLQERDNIISQLRVYEIRVKEYENVINALRQRLAELEGQLGDENVKRSKKDGELAISLRDKQALEEKLVMMTQQIEFLDQKVNSWSAQPQERDNIIAQLRVFEIRVKEYGNVINALRQRVAELEAMLGDENVKRSKRDGELAISLRDKQALEEKLVHLTQQIEFLDMKVASYEKQIQEKDALINQLRIEISRLQINLQQLSNADQEVKRLSELLVVKTTEIDQLRKRLAECEFALQEFNLVQAKLQECEKNNSLLRQRIAELEALLNDENIKRSRGQNDLEISLRDRQALEEKLVHLTQQIEFLTRKVTQITEENNNLKIVVASYQQIFDEWQQISVRHGNFSQLLEQVRVRVQQLSISSSSSIITQSTSSYAVRGSNVVPK

SEQ ID NO: 3345 - protein, 764 aa, Tetrahymena thermophila
MSSYVRNNPHSSGVQNNTTSSPNRSISPIHYVKPSSVYYTSTISPSKSLQSTAKKSVQPVRPNIEASPNKNLTLAQQDEVDLWKSRCNELETSLCQVNTDLELASFKAKKAKDLESKVDDILKQNAQLLGENDQLSKQFSQKRTESDIWKSKYDAQMNTILSLKDNYEREIKRLQNELSQSRELYDGLQQERLKEAQETKQQLIHDNLTQIESLKRSHCSNVTLYEEQLRKMRDNLEEREKENLNLQGKLMDLKNYSESEQNRLNEDREKLRMKISQMELDQSKELENLKRRCDGLTLEQISALKKLHESELDVLESELNKLKNLLDIKNQEIGTLIQQNKSQKRNFDNELQSVRDENEALKDKILENNRCKEDEIDDIQNKLAKLHTTDIQNLKDRHDNQVKMLNDQINDLKRVIDLKQEEIENQIREKNNQRDAFNAKCDRLNSDIETQKLKYQVLEEDRKKDYDEATEALNRANSAHAEFSEQQRRQIQFLESEIEKLKQLLVHKNNEIDINIAQHRTIKNNLEEDIRQLKLDNSDLRKRLDQLEYSKNLQLEELRQKVVALDNNNSERTKKFEAQIDYLENELSRARDNLKIKTEETNIHQIHRNLLETENMKLNAEIDSLNNHMVMLEKLKAQEIQELRHKLESSNNYTIESIKASHNNQLEAMANEIEDLKNIIEMKDRQLGEKADQYQKLEKSLVDIQNNTDLSDYQMRISKLGAEVATTKNLYDVFVKTRQPSYGSGKKLMPNNSGVSPIKKVSQF

SEQ ID NO: 3346 - protein, 1088 aa, Oxytricha fallax
MNYPQSQQSQTQKLSQLGSQMQTNKYLIPQTQPLKVSQGLSNNNSYQSTGNSFIQNMKMAYHNNNSSQSSAQNNSNLSYSPPIKESSNKSSSSINLQSNYQHTNSVLGANMNILNMTDLNKSQLQNSQIYNPKQAQTFKPNTISSLNLTSTSQNGISSQFQNTKSNFEPVNSHNISISQQNHSQDRSVNIQTLYQERLNHMQSQLKNIYTRIANDDIANTMKENYVSQEFIYDRIKEIVEEALINEKEMQIEKSLQEIAQLKTELAQTQVVLQNQSSVPGQYQEILEKQDAKLKYFEQENQKLKENVVQLSTGFKQTDDHYSTILQQKEDELKFCKQQFKQSQAQIDNYEIQMMDKQKSQGQMQQELYQIKRLYEMLQEEFQKKIQKFDTVQNQYQEQNNELGIVKAQNFEMQLQIQKMISEFQQQQETSQIFDKEKQDLLEKFNNFGEQLQKQQLQELEKAKEQFQNKLSHYKSKINDLKSKHELYEQELEKERAVQYNLKSSFDIIIQQMKEDMRRIKDEWENRLHDEELEHQRHIVAQQSQHSIQIQNMKNECTLIFDQKVSQIQLESQKENERIRRECDDLKYTLDSKVKSIELEYIKISKHEEILNSELQNCESTLTDKIKKVKEQMQNEIVQRLEEKELEREKSSQSQLKAIKAQLEQDKTQALQEMELKMQKQFDWQLKELQEEHSHELRSVTKKAEIQREDIVSQNQKLLHEMSYLKQDLDHKSQLLQEVRGEIENQQQNEQQRIDELEQDNQALRNECERLSDIVEVNQNEFQNQLNEVERQNQKELRRQEIKWNNVLENIQKQVHIRVSDLKKQQNLLKSELINQFQTEFTKFTQKSFKNFIRVVRSNNYQEQLVQTLDQKEDYIQQLQKDKQYLEQELQNVQQTLDQTEDKLQRLRKDRENELQNQKREYFRVLETAKKEVQRKYSDELKNLKNYLREFKKRFLDQLLSKEKEIRQLHLQHQLEKTQLQENLQSSQSKIRQLQGQFQDFQLKHDQERQQLETQKKNWIEEFKKKYHFKEKEIEGLTSLISKSYMSINSSIDNIRVAAKLESDIEELTRKAQQKTGVLRSDSSQRSVV

SEQ ID NO: 3347 - protein, 891 aa, Geodia cydonium
GKRRQELEKEKRKLQQEIAELQEQLAQARQKIDELETVISRLQKELAAMTQKAEEEAAGRAKAEKEKRDLQAQLQETQDDLESEKEARTKAEKQKRQVNDEAGSSAESLEEGESSTVAQQEIRTQRENELAALKKTLEDEVVSHEEAIAAMRSKHSKAVEELNEQLGVCQEVQKHGEGENKLEGENEALQLDLRDSVQVCRGRQEEKDSRAQLSESQAKNTDDTALIQDLNSQNEKLKAELASVTAQLEELDGYRALLAERTVKDLKEQLEDAQERLTEENRAKISVSNKQKQAGDEVERLNQQLEDEEEAKAALQSKLTHLTQQLNEAKKKVDDDQVELEEVAERYEKVWTRKLKALQERLEELKAENAKLARGKKKVQGELDDVTVNLENNRADCRSGEEQRVDSQLSEQQALGGEDRQERDQAEARDRQRETKALSLTRELEAYQDKLDEVERLRKHWAGERFSGGEQDEAGRVHSLQAKSDLEAQLEEQKQLLEEVEDELQVCEDARLRLEINLQAAKTNYERELASKEEAAEELRRTLTKQVRELEAHLEDERKQRQTSRAARRNWRVTSRNLENQVEAEARGKEDANRTTRDLHAQLKECQLSADDALRAKENAANLRTERCAHEQTSTRLREYEMAERARRTAESERDELQDEVQSATSKANSLAEEKRRVENRLSTLEEDLEEEQMNSEAASDKARKAEQQADALATEVSQLQASLQKAESAKSQFEKQVKDMKERLEEAESMGVRRMKAQVQAMEGRVSSLEEQLDSATRERATAHRTLRRQDKKLKDLMQSVEDEREQAENYKAEADKALGRMRTLKRNMEESEEETARLQAAKRRLQRELDELTEQNEQLQRDIARKGTGASSSRRPYASGAQLQARSPP

SEQ ID NO: 3348 - protein, 431 aa, Girardia tigrina
RIKELEDHLLEEEDASAGLEETKKKMQGEIEELKKDVVDLESSLQKAEQDKAAKDQQIKSLQDQMARQEEEMNKMKKEKKAADELQKKTEESLLAEEEKVKNLNKVKAKLEQTIDEMEENLSREQKIRADVEKVKRKIEGELKQTPETVDDLERVKRELEEQLKRKEMELSSASSKIEDESGLVAQLQKKIRELQARIQELEEDLEAERQARSKAEKSRHQLEAELEELSDRLEEQGGATSAQMGLNKKREAELIELKRDLEEANVQHDQSVAQARKKQQDAVNEFSEQLDQLQKAKAKTEKEKNELKEDLNDFHGQLESLNKAKFNSDKRLKDLEAQNSDLQGKLDETNRHLNDASNTSGKSQQLNAELQARLEEAEFQINQLNKVKQQMQAQLEEARQNLEDESRTKAKLSSDIRNLNADLDNFREALG

SEQ ID NO: 3349 - protein, 1955 aa, Parascaris univalens
MEGTCSEEENLAKRVTPTAVTSGTYGTHVVDTTDLALSDVVIGCGSTIYETSDSIGSDVMLGLSSHGVSSVSGLDRDLNSFKKRIDANTEEQREHADMMVGLQRKIEEYRRRIVDAEKQVSIQKANDDVSFSIKETADTWLPDMKSDAADYEWASRLDEERRRNDELHMQITQQQVDLQRLQKYFEANMQEKEKIYQTREKNLAYYLNAEQRKMLDLWEELQRVRRQFADYKEQTERDLENQKNEVAKVTQSVGGMAGRLNTSSHGDSGLVQDVVLLEAMRRFRELQAVPVGASADDYNALMKKYEETVERVIELESHGDGSTAKMLSLEAELRRTKDKFIECSEFLRKLGDLAAGSYRGDERTSKIVSLSPGGMSLPSEIYRSVRNILRNHDSEMQHIQRKLKNSDTQVCELTTRLEGTEEARRRSDKQLVDAKREINIQQRAVDDANRELRRVEDRLHIMESEKIVAENARQQLEEEVRRLTLQVDQSKADGERRVVEEGEIQKRIVEDEYRSMISELTRRMNAFQDENKRLKNDLGCTKERLKNVEFEYNSTVRKLEDKDIALKHLEDTKLDLLKDLENQRTRYDAVTNELDTLQTTFETSTKNIAQLEANIKEINLMRDEISKEKDSLAQKLADVTHKLEIETVRREDIQRSCVGHSEDVEKQRLQIIEYEREVMALRRLNDELDTNVKTGQAKVTSLENSIISVQTEVTKLTTLNDKLQKEKQSIMSSKQKADTDVDLLKEKLRKLEQECDKLKEENKALHEDEQIARQMCKEEASRIHLLERDLKDAMTEVEELKKQLQKMDEENSERLESVLRTKISSDTVDTSEIAEYTEVKVKELREKYKADLERLQSNKDDLERRVQILEDELAERQRIVERQRTEMNDLKLEYQLESDRLRAEMATVELKYQSEVEDERDQRSRDADSWKVTSEELRSKISFMEKMLEEAKHRETVLREEATEWEEKHDIISNESLKLRNEIERIRSDAEEDIQKWKKDVHMAQNELKNLERVCETLRSQLTAANDRVASLNTTINEQTSKIRELNSHEHRLEEDLADSRATSSAIENDLGNATGRLRSSEEHNAILQSENRKSKTEIEALKHQIDTIMNTKESCESEVERLKKKIVQTTTITKEQNEKIEKLRIEHDHLERDYREKTKEVDRLKEVEKTFELKVNRARQELDEFSKKLIVTETERNAISGEAQKLDKEVQLVKEQLQYKSDEFHKALDELANAHRISEEGRVNAIHQLEARRFEIDDLKSRLENSEQRLATLQQEYVNADKERGALNDAMRRFQATISRSVVAEEHVDVSTIETQMQKLMSRIEAIERERNEYRDSLNRLKNRCSTSYSSVDRQETVYRTFEERVISAEDERRKVELKLSSMKEMLKSQEEKLKQRDEERRNLKSNIVTFELEARAKDAQIRHLNDLLKRVQAELENSQNDNRALRERQEQYETNRIHLEQRLPTDEGEPRVKALMAAFATERQSLSDSLKKLASQLQISETKNADLRDDAERLKRDLLKAERVEEDLRRNLVEQTEIMRENQQLRSQLGVAQSDLANASGRKQQLEGELAAVRAELRDHKQHLHDAISRIAELQRQLQDANAEKSRLTDRIIGLEKTIGTLRNTETELRAQLSTAADERKALNSELEEMRRRIVQMESEKKDVDNQLEEVNKARIIMTKKIEILETEKHSAELVISETASQREAIERSLNALERENKELYKNCAQLQQQIAQLEMDNGERLIALTTKQKEDHEKFVAAVKAEKVQVERIVENRDRAQKSRIRQLENQLSMMREQLDNERARSHQMSERFIVNETNRRVSSSSFRLSGDAAGVAAATILHPQTDRLDYVFANRSALSSYYTVPTEQHASRGKEAYRTSSTIKSSEGTTRESYTYQSRTVSSNIIEQANGMTSSASGEGMSRAYPPTEVNQGDVTGRKSRPATRKQQMKSTFSE

SEQ ID NO: 3350 - protein, 692 aa, Dermatophagoides farinae
MNKKRDSELAKLRKLLEDVHIESEETAHHLRQKHQAAIQEMQDQLDQLQKAKNKSDKEKQKFQAEVFELLAQLETANKEKLTALKNVEKLEYTVHELNIKIEEINRTVIELTSHKQRLSQENTELIKEVHEVKLQLDNANHLKTQIAQQLEDTRHRLEEEERKRASLENHAHTLEVELESLKVQLDEESEARLELERQLTKANGDAASWKSKYEAELQAHADEVEELRRKMAQKISEYEEQLEALLNKCSSLEKQKSRLQSEVEVLIMDLEKATRHAQQLEKRVAQLEKINLDLKNKLEEVTMLMEQAQKELRVKIAELQKLQHEYEKLRDQRDQLARENKKLTDDLAEAKSQLNDAHRRIHEQEIEIKRLENERDELSAAYKEAETLRKQEEAKNQRLIAELAQVRHDYEKRLAQKDEEIEALRKQYQIEIEQLNMRLAEAEAKLKTEIARLKKKYQAQITELELSLDAANKANIDLQKTIKKQALQITELQAHYDEVHRQLQQAVDQLGVTQRRCQALQAELEEMRIALEQANRAKRQAEQLHEEAVVRVNELTTINVNLASAKSKLESEFSALQADYDEVHKELRISDERVQKLTIELKSTKDLLIEEQERLVKLETVKKSLEQEVRTLHVRIEEVEANALAGGKRVIAKLESRIRDVEIEVEEERRRHAETDKMLRKKDHRVKELLLQ

SEQ ID NO: 3351 - protein, 1985 aa, Plasmodium yoelii yoelii
KRNDDNNQDNVMKNNIRYNSTNVDIPKHNNTNKIDLNMLYNNNVDKLNSNLSAYNDTNKLIELQEKYKNKYRYEKDIPNHTNDTRGKSNNNQIKDNNIYFNNAILYNNNANNNDINNIKTDYNNYNINMNINDGNEINSKNNLPSNKSNQNNYISEKGDMTEKELDHYSNFNFNNDNRNKGSNQNDIINKKYKKLESLMNINKNNDDEKRKINFNVNDIKNNYFDNFYKNKNTENNEYKTYKPRRSNSSNVHTRKHDTGKISNYLNYADDMQAKINYYNEGKNGNMRAYEKYIKMKNENIHMNNNTHNLTMNDLNGNANGTIEMGNNSEIKNVNNNKTNDNNLNNMNNNYNENTYQNRNESNSKVEHDLGKLRNFDLNDIRKKHLNLFNNKMENESTYTNKMDHIMNDKNENYNFSFINEKNITKNLTNNDDDALNFDKNFRKKMDVKSIVCVCQASKQMARLQLHIEESRQMLETEKMLLKKKKENFEKKVGMLADKEKEIDKIHSQIKEKELSINKKNNEIDEKEKYVNSIKSKYDNAQKELLDKMNECILIENKCKSKLYEYDEKFGQFNKKIKEIEEREKEIEQEKKNIEKKENMLNENRREIDEEKLMNMKEKNELEMLKKELESLEKEKKKIIDCEYNNLQNKEEELRRNERNNLIKENELKNRIDKYNELIDELNKNKKEIENDKMKMLNDIQDERIKLLNETNNIKKENEKEINYMKEEIKKERISMINDVEKMKRLMLEDIENTKNIMLEDMEKENTKIKEEIENDKRMMIKNIEDEKEKYKTYLEEKFNENLEKEKSELQKKYDDENNRLQAEINNEKKKINKERDNLEKQKKVYEDEFRNKCEKYEEDIRKKYNMLEEEENNMKYRIMKEQEELENYKKNVYLDIEEEKDKLYVQQEKINLEKENLLVEKEQIDIELKNFKNFKEKEENDIKIRIINLSQQKEDLNKEKENIEKEKDKLEKIKYDLDAREEGLNNDKIQMEKSRKLFDEQLEKIKKNKEELLNYDRELKTKEMDLIEKGTEIKNKENELNKKKEKLDSLDNELKSYSSKLQDREKKLKEKKTELQKVKDQLVDYKNSLKEKEIQFQMIEKREKELLDEQTVIQIDRNSLEAEKKQFLLIKEKHEKDTEYIQEQLKLLHEQLKNKDKSLKEKENEINLLNKLQDCRSKNGKGAIISLKNYDNRKLNMNLSRISVSKNRVKAKAIGKNKFDIIRRTRRKSINYNYNNLEINNSIQYIDSVINDNFKNKPFLKNKNNNLELSNENFMQEQGNNNMNFKYPNDTYDNSMVDKNNRNISNNSMKNITDYGNNVENNDEPERENRNQNISNENDYYENKNNDNKRNKKKYPPKPRANLEKDSYNVNNGNKSERNDNFNDLYNDNTTNYKKKEKYDNDNNYGDHMNYNNNNDNHNNTKNGNVYENNNNNGGYNNSYNINNMNTNIKMGKSDLNDTIKSKNGLRLNFQENKDQENNNMLGSLNVNNLIESDIIDTKSNYGYHPDNHNDKYGENESNRNIMCINKNINFIDNDVNNINNNISNINSKLYKMNSNVYEENDSFVGEHNNKNRNKHSCQNNNENGMSNKNPNEKPSLNRLDSLVNQNMQSVNQISNLMQSSKKANNNTMNKLNSNIKNYNSLKDTKRNNNDNYYDDNNESPKKEDNFNEFLEELNDGKSYNSNFIEKGDDDFYYNMEKSLNDKSMNETYDHKNRNNYNTSNKNMDRKVHTLKNNTNSTNFVTTNINTNHNNDNNTKINVHVNRNNGETRKDNINLSLMPGNNNKIGMDNNGYNSDSNIMRNQNYLTNENYNSRRMNSHAIEQDNYNKQRGHKNNNENDYTNYRKYGMENKKDELLGNNFNRAQIVRNHDNENKNVNIHKHNNSNDNNKMNTWNQNGNKNTNMVGIKGFMRELQNEKDSYNSGANATESNNNRNNVQNHKNYNTKYTNSANPSDSDAQANSNKIIEQLDKTLMNKSIVMNKNKKKY

SEQ ID NO: 3352 - protein, 1441 aa, Plasmodium yoelii yoelii
NDNIIYDDDDQVRETGHNFKEYELEDQLKETLKSITALSIKVKEYENKIEELENELKLEKEKQINKEYEKELNEKCEFIKREMELLKEKELNINIKENKINNKEIITLKKEEKLNDIENEYIEKNKEKEKLNYEITNIKMSLDKLSCEIQEKKENLEKINKKVVEKENNLRELKEFMKEKNEIIESLNKTIDDKKNAYEKLETNFEEKRKMIEMLDSKLIEKEKKFEIKKEKLEKENEVIMEKLKDIENKEEHFKNKEEKFKNKEEKFINLENELNKLKSDLSKNACQMEIYKMEIKDLSQSLVEKEREIFEIKNEYDDKINNMKNKLSNFNNDDNDDNTVKCSEEIINKKIEEAVNKLIKEKEMELNEIHKKYNLEIEKIKNEINEKEKELEQNKKKHNIEINDLTKEIQIREKKIEDVKEEYKIELSKLDSEKNNIKIENNELNNEVNSLNNEVNSLNNEVNSLNNEINSLNNDKQTLSKNNKLLNDLINNLKNEINNSDNKMNKMKEDIIMLNEELEGKCVVIDEIEKKYKNEIFIFEKKLKEKENYDDLNDEINILRNDISVKEKEFIEMKEFYENKINLYNKNFEEKTKYYENELNILRLKYNNEQDLIKQIDELNIQKLKTEEKYLQLYDDNIKMFKSICAKINTTYSENIKGSDLVNFVEAYIKHRDESRFDANSESGIKEVVAELEEKHREEVSRIREEHKKEVVRIGEEHKEEVVRIGEEHKEEVVKIGEQHREELGEKEEEHKKEVAKIGEQHKEEMVRIREEHKKEVSRIREEHKKEMAELEDGRTDVVAVLEEEHKKEVVRIGEEHKKEVSKIEEEHKKEVSRIREEHKKEMSELEKKHADVVAELEEQHKEEVVKIGEEHREEVSKIEEEHKKEVSRIREEHKKEVNMLEKRHAAVMTELEEHKKEMSELEKNSADVVTELEEKHREELGKMGEQHIEEMGKIEEKHREEVSRIEEQHKEEVAELEKKHTDVVVMLEEQHKEEVNVLEKRHADVVVVLEEKHREEVSKMGEQHKEEVAELEKNNASLLDVIEENHKSEVSRLKEEHKESTRELVETLSQKNEEIQNSNNKIEELTNVIKDLNDSIMCYKKKISEDVEKRNEYNEEIQKLNKRLNEMKDKSDKEIIKKEDEIKKLNKKISNYKIFEIKENTYKNSKMLINENKEEIIVDNICKEKISESDIEGKGKNLKMILSLKKKERSVFSVSDNKNENNELVDIVRNTYINKIEVYKKEIKDNNKNMEDLKNKIIDLSNELANLKNVKNVLTEENDNLRKEMEMKQNKVNENDEILNLNDDIIKLTKEISEWKEKNIKLENDIEQINKEYKIKEENLMIKINESINEVNNLKNQIEIEKKKKENLNTSNVNNKIVENNILENGNLKQNNSNKEIEDKTGNDDDNDDDDNDDDNDNDNNNDNNDNDNNDNSEEDNPY

SEQ ID NO: 3353 - protein, 1478 aa, Plasmodium yoelii yoelii
  unsure (1)..(1478): unsure at all Xaa locations
MNTNHLLFIKEIVIKFHHRTSRKSRESXVRENADDENLAIKERELINLQNELNNIISEKEMHSDAIKNMKHQLDEFQDQKNNYINELRILEKELDIKRDEIEKFNIKLEEINRREESLAYKENEFIQIKEEIMNRERDIIDREHEITEKVNELSYKEKELVEKEHELLNKESDILKNNEDFINNNNELARKREELNIEQIQIEELKNDLILKFEHLHNEQKDIKIKETKLKTIYKKLKNNNINDLLDVSNDENLFNSRTRSNINGNNNENENSNISSMRKIAELDNLENQSENLNLDSLEYTTYFNEFKKKIKNLKQDLQSREKELEFFEKTLEIEKREKEEYRNELDNLKNLLHAEQLNKKKLDDQLERYKNDDEHIIKSLKESEEIINEKNTLILELQQKLAQASYEISMIENKSNKKSNNNSYNGERNSEYEKKLEELNNITNSYEKEINELNKEKENITKQFMEKIMDDEEGINKLKEELNDANALIVNLKNKNNELYNVNIEMEQANKDMRDDIDILLANIDKLNDEKNVTENEKEQKELKYNELKINYEHKVKECNKFFNMLPPKMKKKIEYEKKHRNSKEGNINMSQFNSSVISKDHESLGNSSEEETCDIDKIVNVVENGQNGKRASIKINNILNEKDMVIESLNEKLLYYEKDNAKNHEIINDYKSKIDELLSKLNIFEGNMPFFIKINEIINENNYTHQYVLNLLNNAILYRKIITKIFIENQFYKEIIQIKEYIFDIISKNTSNKKKETLKLSMIKKKGSPKKGHHSVSHPNYPLHMSDAIHKYQNPXDEEQSMDGLDIEPETNMIIKAVNDEFDTFENICNELYNLNKSEEWDIMYKKLNVLEYSYNSIINIIINEIKKTNKISNIEKSELKKNMKLLKKKYNSLSNDFLQNVEDVDKLKLILVKESEQNELLVTENEELKNLYKELNDEYNEKLNLIKQNEYQIKNLQEQLIEKNENKTKTEEINEFLKTDLDYLNTSLEQANQSLTNLNSENEKNKIALKQLTEENIYLKNQIEDKEENIEYLTQKIKSNDQVISELKEFNEMLIKKVETYDSIEELNRKEGNNHTKGHIENNSTTELYDHNRFYEDIDKNELLGVISKLENDNNNLKEECDMLKNDFYILSEKNHELEEIIQKNDLPIKYNDELDIKNDIIEKENLINERNKYKIKCIQIIDICFNKDFSIIDIREKIVAIFENDDEEIINIINCHRSMLSNNTNEEFGYDKENNPIKNARHSRIIRGTKSVCSVADNNQYNENESMKDRLSNQRKDDAAKTHQENITHIEEMSKKNEELIKKNEQIWKLNKYIEDLNKEITNKDYIIMKSQQESADKNDVLEKNKQYIIFLKDQIKLLCNNIDENNLFDIDNVNLSPTLRSFIKRKSYNNRCSFVEVYDEKKSNHGHENENFASRQKRRETFDQSRKKRLSEFTSQEQYNFYDENEVKIEEMNLKMDELNDKLKQRNIKSRY

SEQ ID NO: 3354 - protein, 1527 aa, Plasmodium yoelii yoelii
  unsure (1)..(1527): unsure at all Xaa locations
GQKKKKRDIISYSSFYQCLIFCRFIYFVFSLISFFHLFRFFTYFKNDDGEPKPTVAHLGEENKFYYNKELKRWVVKGEEDKIETEEKIAPPPQMSALQNASSGYRSLIQQNKTRSARTMYAEIPGLKTINKKNTIVQGGIISPYMGSSNIDKNKNIPNDNKKELFAFNTFIPKSENEENKESREVEPNINKQNEKRHDGDIFKEEEFTNNLNKISDNVLDGNKNNIPFESNHINDKERTSLSKDNLFNLNEINKNKYDSKNDDNNNNLLFSENQTLIPAKVNEVTEIEASRTPNYEINRVPNYEINKSKGIHPNIPQFNNPAQLPTEINIKNNINYDNISPKINSKGVIENLENKNKEIKRISMDNFEFNNPISNHINKRNSTTVVRSVFNPQLEYNNVENNEIRKFNTIGNNYMNIGRENDILNISPKVIEKINRRNTHQLFNESSNISTDKLTIHKVTSPFLFDNINNDSNTNVSNEIPEKGGKMEKVEKMEKMEKMEKMEKVEKMEEFEKMEKSNEHVNSFSMFNLDKGVSVESTSNIIAMDENPIILNDSNTINKNNIIDAESDKLVQNILDMIKIKLQDDNKNNIDTIIKNESKRITSLLEEKTGSMEILCNKICQLKKKNEDVEDKNDTIREETHQINIDKDKENEINNLLYVINIKNKKIKEELEAFTNSFNVLKKLKMKNDEIINIYKNRENVFLTTINKLEEKRKLKYAEFKEKEKQYKELIMKKEELLKIXQINNKKNIETFKNQEQMLKDEIQKIELKTKEKIEELKQDFEKTQKINMENLEMEKESFINNNLENEINKMKEKLEEKYETQIKETEMKYKYQIKEEIEKTKQNAEQNFNSKFEKYKENLEKNKNDFINNLIIEKNNEIESFKNDIEQKKFKEMEKFKEENEKLLQNNFENMKNHFIEEQNKHIENIKKEYELIKNNEIEYLKEEMKKNKIQEIENVELKLADEKNKHIDDMKKELENIYNVEINNLKEKINAEQTLAQEMLETQRNEYEQKLEIQRNEYEQQLEIRRNEMENKLIEQRKESYDLGSKKESEIQILTDKIEKLKMEIEIINKEKIDLEHNISILNDERENILNQNKNLEDNLKNNEDIYNKKINILNDEKLKLEKEIEHIKENGAKESDQIREQFADLLQEEIDRIKKESKEKVNIYIQQYNEINEEYEEKKKEYNDLLEKANVSNKQLTEKCEENIQKINEYEDMIKMLENQTEVLVTKKIQELNEDFLKKKEAFDNEKNDLLKNYEHAITENKHIKEQLENFTNSNEEKISQIKNQYETQIKEMQIHFDELLNETKNKNNEMLEDIVKEQNDKEQSIQHMNSVNTELVTKNEQLNLNITEIKNELSNFQEKYDKLVKENNHLKNEEQTKFLDKILDLENVNKHLMEVTEKEREINIKNVNIIKSLQNQINEQTKLYKEYTDELKDEILQLKKQKKNSIDSNVPIDANSSINNALIEENKKLKLQNEVISTKNDTMSTVLDNLTKRLSFIESKIKEEKYGNDIIKQANDLQLQGFN

SEQ ID NO: 3355 - protein, 884 aa, Ciona intestinalis
FEDVVAEQRRKKELEDKERSRLSKQKREFFKKKFEIKKKKGNTENGKPVIEQTTVHPVQSIPTTVAADEQKKPKKEKPTKKVKATTPVSDPPAKVAKLEQSSAPVKEKQPKPEPKAKKVEPVIKPTVADNVQSKPAVKSSKKSAEPAKETKVEEPRKPRQHKVSFSEDVKSVDSGNQEQKSKKKKGRKQQEEHPIIQAVSSADIDDSTIYYLVELLNQRLQSASGDWATAGNDVSKQQYAELQRKYESKSVEMQNAVSQSKVQSQKIQQLNQALQEAKLQQKSEVQKSDEELLKTRKAFDEYQARIKTQMEEDKKMITIMQEKLKSVNSSGDALQKMKEENDILKMTIQANASQVAEKDRLAHEVSACQAKLKENEQIRVEMERKIAEYSGTYQDQAQLEQSYTKRLEDMAAKLKATEGKYGALESEFQEAQTHLQSTQAKSSQLISQVVLLTEQNDQRSALESEYGSLAETKQALEDRLTAMEANEQSTADEFARLQSQNNQLNLKATSLTEQLNKATEEVNKYKQGRSDEVTNVTKQLKEKEVALSELQKRFDDLTEQSQKAASQVEKLDKKNNDERDTAVLDTENQVKKSLSKSFPSVKVEGKDFECWLSNFLVKASESVVVTEVVDNEDKLQDLKQQLSEAKGKADKVDKYQSQVGALEKSLSAALQRNKETEEMINKQKKEIKGKSEEVLQFKEILKNTEGILDQLQSSVEKSEKDKQEQAAMWESKKQEEVSKLEKQLSKSNKELKEQTEMLVNMEKERDNLKECVAQRQSELDTCLRKCGELETSLSSEKVNDTQESRDSSVQENGHIDEIAKLKERLEKEKTLTKNLGAAAGKLQNVLKQTQEQLGKEREKNKELMQKKKEGSSSSSSSSSESDLD

SEQ ID NO: 3356 - protein, 681 aa, Canis familiaris
QLEAEYRRLQEDQQREGKLREEHEEEASFLQDKLKRLEKERAMAEGKITVKEVLKLEKDVATEREVGDLKRQYEDEEAKARANQREKTELLRKIWALEEENARVLVQEKVREIVRPDPEAEREVANLRLELVEQERKYRGAEEQLKSYQSELEALRRRGPQVEVKEVTKEVIKYKTDPEMEKELQRLREEIVDKTRLIERCDVEIYQLKQEIQSLKDTKPQVQTKEVVQEILQFQEDPQTKEEVQSLRARLSEEQKKQVDLERERASQEEKIKQKEEELSHVKEKVVQQEVVRYEEEPGLRAEVNAFTESIDAELRQIDTLRGELRRLQRRRAGARTQLEELEREKQARREAELEVQRLKQRLAELEEEGEAREKVTLKQKVVLQQDPQQAREHALLKVQLEEERHRRQVLESELETLRKKLVNLEKMEVKEKVVFSESVQVEKGDTEQEIQKLKSSLEEESRSKRELDAEVSRLEAKLSELEFCNSKSSKELDFLREENHRLDLERQSLQSETRRLQSEIEMAATETRDLRNVTAVDSGTNLNSRLWSLERELDDLKRLSKDKDLEIDELQKRLGSVAVKREQRRTTCGAPLWSSTLTHRVGLIDWNMFVKLRSQECDWEEISVKGPSGESSVILDRKSGRKFSIEEALQKGRLTPAQYDRYVNKDMSIQELAVLVSGQK

SEQ ID NO: 3357 - protein, 458 aa, Ovis sp.
LRRQERDRKFREEEQLLQEREEQLRRQERDRKFREEEQLLQEREEQLRRQERDRKFREEEQQLRLLEREQQLRQERNRKFREEQLLREREEQLRLQEGEPQLRQKRDRKFHEEEQLLQEREEQLRRQERDRKFREEEQLLQEREKLRRQEREPQLRQERDRKFHEEEQLLQEREEQLRRQERDRKFREEEQLLQEREEQLRRQERDRKFREEEQLLQEREEQLRRQERDRKFREEEQLLKESEEQLRRQERDRKFHEKEHLLREREEQQLRRQELEGVFSQEEQLRRAEQEEEQRRQRQRDRKFLEEGQSLQREREEEKRRVQEQDRKFLEQEEQLHREEQEELRRRQQLDQQYRAEEQFAREEKRRRQEQELRQEEQRRRQERERKFREEEQLRRQQQEEQKRRQERDVQQSRRQVWEEDKGRRQVLEAGKRQFASAPVRSSPLYEYIQEQRSQYRP

SEQ ID NO: 3358 - protein, 1549 aa, Ovis aries
MSPLLRSIFNITKIFNQYASHDCDGTTLSKKDLKNLLEREFGEILRKPHDPETVDLVLELQDRDRDGLIDFHEFLAIVFKVAAACYYALGQASGLNEKEAKCERKGNPLQDRRREDQRRFEPQDRQLEERRLKRQELEELAEEEELREKQVRREQRLQRREQEEYGGEEELQQRPKGRELEELLNREQRFERQEQRERQRLQVEQQQRQRGELRERQEEVQLQKRETQELQRERLEEEQQLQKQKRGLEERLLEQERREQELRRKEQERREQQLRQEQEEATQEEISERGESRTSRCQWQLESEADARQRKVYSRPHRQEQQSRRQEQELLERQQEQQISEEVQSLQEDQGRQRLKQEQRYDQNWRWQLEEESQRRRYTLYAKPAQREQVREEEQLRLKEEKLQREKRRQERERQYREVELQREEERLQREEEQLQREEREKRRRQEREKQYLEKVELWEEEQLQREEREKRRQEREKQYLEKVELREEEQLQRQEREKRRQERERQYLEKVELQEEEQLQREEREKRRQERERQYLEKVELQEEEQLQRQEREKRRQEREKQYLEKVELQEEEQLQRQERQKRRQEREKQYLEKVELQEEEQLQRQEREKRRQERERQYLEKVELQEEEQVQRQEREKRRQERERQYLEKELQRQEERLQEEEQLLREEREKRRQERERQYLEKVELQEEEQLQREEREKRRQERERQYLEKEELQRQEERLQREKEQLQREDREKRRQVRERKYLEEELQQEEDRLQREKQLLREDREKRQYLEKVELQREEEQLQREKRRQERERQYREEELLREEERLHRKEQQLQREECEKRRRQELERQLEEEELQRLDRKRQFRDDDQHQNEVRNSRVYSKHRENKEKSRQLDDSWVRESQFQQDLRPLQDEQEEKREREQEWRSRQKRDSQFPAEQLLEREQQKETERRDRKFREEEQLLKGQREEKIRYLEEDRKFREEEQQLRRLEREQQLRQERDRKFREELSRQERDRKFREEEQLLQEREEQLRRQERDRKFREEEQLLQEREEQLRRQERDRKFREEEQLLQEREEQLRRQERDRKFREEEQQLRLLEREQQLRQERNRKFREEQLLREREEQLRLQEGEPQLRQKRDRKFHEEEQLLQEREEQLRRQERDRKFREEAQILKEREEQLRRQERDRKFREEEQLLQEREELRRQEREPQLRQERDRKFREEEQLLQEREKLRRQEREPQLRQERDRKFHEEEQLLQEREEQLRRQERDRKFREEAQLLQEREEQLRRQERDRKFREEEQLLQEREEQLRRQERDRKFREEEQLLQEREEQLRRQERDRKFREEEQLLKESEEQLRRQERDRKFHEKEHLLREREEQQLRRQELEGVFSQEEQLRRAEQEEEQRRQRQRDRKFLEEEQSLQREREEEKRRVQEQDRKFLEQEEQLHREEQEELRRRQQLDQQYRAEEQFAREEKRRRQEQELRQEEQRRRQERERKFREEEQLRRQQQEEQKRRQERDVQQSRRQVWEEDKGRRQVLEAGKRQFASAPVRSSPLYEYIQEQRSQYRP

SEQ ID NO: 3359 - protein, 1407 aa, Oryctolagus cuniculus
MSPLLKSIIDIIEIFNQYASHDCDGAVLKKKDLKILLDREFGAVLQRPHDPETVDVMLELLDRDSDGLVGFDEFCLLIFKLAQAAYYALGQASGLDEEKRSHGEGKGRLLQNRRQEDQRRFELRDRQFEDEPERRRWQKQEQERELAEEEEQRKKRERFEQHYSRQYRDKEQRLQRQELEERRAEEEQLRRRKGRDAEEFIEEEQLRRREQQELKRELREEEQQRRERREQHERALQEEEEQLLRQRRWREEPREQQQLRRELEEIREREQRLEQEERREQQLRREQRLEQEERREQQLRRELEEIREREQRLEQEERREQRLEQEERREQQLKRELEEIREREQRLEQEERREQLLAEEVREQARERGESLTRRWQRQLESEAGARQSKVYSRPRRQEEQSLRQDQERRQRQERERELEEQARRQQQWQAEEESERRRQRLSARPSLRERQLRAEERQEQEQRFREEEEQRRERRQELQFLEEEEQLQRRERAQQLQEEDSFQEDRERRRRQQEQRPGQTWRWQLQEEAQRRRHTLYAKPGQQEQLREEEELQREKRRQEREREYREEEKLQREEDEKRRRQERERQYRELEELRQEEQLRDRKLREEEQLLQEREEERLRRQERERKLREEEQLLRQEEQELRQERERKLREEEQLLRREEQELRQERERKLREEEQLLQEREEERLRRQERARKLREEEQLLRQEEQELRQERERKLREEEQLLRREEQLLRQERDRKLREEEQLLQESEEERLRRQEREQQLRRERDRKFREEEQLLQEREEERLRRQERERKLREEEQLLQEREEERLRRQERERKLREEEQLLQEREEERLRRQERERKLREEEQLLRQEEQELRQERARKLREEEQLLRQEEQELRQERDRKLREEEQLLRQEEQELRQERDRKLREEEQLLQESEEERLRRQERERKLREEEQLLRREEQELRRERARKLREEEQLLQEREEERLRRQERARKLREEEQLLRREEQELRQERDRKFREEEQLLQEREEERLRRQERDRKFREEERQLRRQELEEQFRQERDRKFRLEEQIRQEKEEKQLRRQERDRKFREEEQQRRRQEREQQLRRERDRKFREEEQLLQEREEERLRRQERARKLREEEQLLRREEQLLRQERDRKFREEEQLLQESEEERLRRQERERKLREEEQLLQEREEERLRRQERARKLREEEQLLRQEEQELRQERARKLREEEQLLRQEEQELRQERDRKFREEEQLLRREEQELRRERDRKFREEEQLLQEREEERLRRQERARKLREEEEQLLFEEQEEQRLRQERDRRYRAEEQFAREEKSRRLERELRQEEEQRRRRERERKFREEQLRRQQEEEQRRRQLRERQFREDQSRRQVLEPGTRQFARVPVRSSPLYEYIQEQRSQYRP

SEQ ID NO: 3360 - protein, 356 aa, Mus musculus
CSSPTLLEQPPAPGRGGGGGPPAKRRLELGESGHQYLSDGLKTPKGKGRAALRSPDSPKTPKSPSEKTRYDTSLGLLTKKFIQLLSQSPDGVLDLNKAAEVLKVQKRRIYDITNVLEGIHLIKKKSKNNVQWMGCSLSEDGGMLAQCQGLSKEVTELSQEEKKLDELIQSCTLDLKLLTEDSENQRLAYVTYQDIRKISGLKDQTVILVKAPPETRLEVPDSIESLQIHLASTQGPIEVYLCPEETETHRPMKTNNQDHNGNIPKPTSKDLASNNSGHSDCSVSTANLSPLASPANLLQQTEDQIPSNLEGPFVNLLPPLLQEDYLLSLGEEEGISDLFDAYDLEKLPLVEDFMCS

SEQ ID NO: 3361 - protein, 335 aa, Mus musculus
EMPLQQQAKRRLELGESGHQYLSDGLKTPKGKGRAALRSPDSPKKKTRYDTSLGLLTKKFIQLLSQSPDGVLDLNKAAEVLKVQKRRIYDITNVLEGIHLIKKKSKNNVQWMGCSLSEDGGMLAQCQGLSKEVTELSQEEKKLDELIQSCTLDLKLLTEDSENQRLAYVTYQDIRKISGLKDQTVIVVKAPPETRLEVPDSIESLQIHLASTQGPIEVYLCPEETETHRPMKTNNQDHNGNIPKPTSKDLASNNSGHSDCSVSTANLSPLASPANLLQQTEDQIPSNLEGPFVNLLPPLLQEDYLLSLGEEEGISDLFDAYDLEKLPLVEDFMCS

SEQ ID NO: 3362 - protein, 334 aa, Mus musculus
MPLQQQAKRRLELGESGHQYLSDGLKTPKGKGRAALRSPDSPKKKTRYDTSLGLLTKKFIQLLSQSPDGVLDLNKAAEVLKVQKRRIYDITNVLEGIHLIKKKSKNNVQWMGCSLSEDGGMLAQCQGLSKEVTELSQEEKKLDELIQSCTLDLKLLTEDSENQRLAYVTYQDIRKISGLKDQTVIVVKAPPETRLEVPDSIESLQIHLASTQGPIEVYLCPEETETHRPMKTNNQDHNGNIPKPTSKDLASNNSGHSDCSVSTANLSPLASPANLLQQTEDQIPSNLEGPFVNLLPPLLQEDYLLSLGEEEGISDLFDAYDLEKLPLVEDFMCS

SEQ ID NO: 3363 - protein, 335 aa, Mus musculus
MAAAEPTSSAQPTPQAQAQPPPHGAPSSQPSAALAGGSSRHEKSLGLLTTKFVSLLQEAQDGVLDLKAAADTLAVRQKRRIYDITNVLEGIDLIEKKSKNSIQWKGVGAGCNTKEVIDRLRCLKAEIEDLELKERELDQQKLWLQQSIKNVMEDSINNRFSYVTHEDICNCFHGDTLLAIQAPSGTQLEVPIPEMGQNGQKKYQINLKSHSGPIHVLLINKESSSSKPVVFPVPPPDDLTQPSSQSSTSVTPQKSTMAAQNLPEQHVSERSQTFQQTPAAEVSSGSISGDIIDELMSSDVFPLLRLSPTPADDYNFNLDDNEGVCDLFDVQILNY

SEQ ID NO: 3364 - protein, 335 aa, Mus musculus
MAAAEPTSSAQPTPQAQAQPPPHGAPSSQPSRRSRGGSSRHEKSLGLLTTKFVSLLQEAQDGVLDLKAAADTLAVRQKRRIYDITNVLEGIDLIEKKSKNSIQWKGVGAGCNTKEVIDRLRCLKAEIEDLELKERELDQQKLWLQQSIKNVMEDSINNRFSYVTHEDICNCFHGDTLLAIQAPSGTQLEVPIPEMGQNGQKKYQINLKSHSGPIHVLLINKESSSSKPVVFPVPPPDDLTQPSSQSSTSVTPQKSTMAAQNLPEQHVSERSQTFQQTPAAEVSSGSISGDIIDELMSSDVFPLLRLSPTPADDYNFNLDDNEGVCDLFDVQILNY

SEQ ID NO: 3365 - protein, 410 aa, Mus musculus
MAEAGPQAPPPPGTPSRHEKSLGLLTTKFVSLLQEAKDGVLDLKLAADTLAVRQKRRIYDITNVLEGIGLIEKKSKNSIQWKGVGPGCNTREIADKLIELKAEIEELQQREQELDQHKVWVQQSIRNVTEDVQNSCLAYVTHEDICRCFAGDTLLAIRAPSGTSLEVPIPEGLNGQKKYQIHLKSMSGPIEVLLVNKEAWSSPPVAVPVPPPDDLLQSPPAVSTPPPLPKPALAQPQESSPPSSPQLTTPTPVLGSTQVSEVACQTSEIAVSGSPGTENKDSGEVSSLPLGLTALDTRPLQSSALLDSSSSSSSSSSSSSSSSSGPNPSTSFEPIKADPTGVLDLPKELSEIFDPTRECMSSELLEELMSSEVFAPLLRLSPPPGDHDYIYNLDESEGVCDLFDVPVLKL

SEQ ID NO: 3366 - protein, 410 aa, Mus musculus
MAEAGPQAPPPPGTPSRHEKSLGLLTTKFVSLLQEAKDGVLDLKLAADTLAVRQKRRIYDITNVLEGIGLIEKKSKNSIQWKGVGPGCNTREIADKLIELKAEIEELQQREQELDQHKVWVQQSIRNVTEDVQNSCLAYVTHEDICRCFAGDTLLAIRAPSGTSLEVPIPEGLNGQKKYQIHLKSMSGPIEVLLVNKEAWSSPPVAVPVPPPDDLLQSPPAVSTPPPLPKPALAQPQESSPPSSPQLTTPTPVLGSTQVSEVACQTSEIAVSGSPGTENKDSGEVSSLPLGLTALDTRPLQSSALLDSSSSSSSSSSSSSSSSSGTNPSTSFEPIKADPTGVLDLPKELSEIFDPTRECMSSELLEELMSSEVFAPLLRLSPPPGDHDYIYNLDESEGVCDLFDVPVLKL

SEQ ID NO: 3367 - protein, 443 aa, Mus musculus
MLRAPRTLAPATAQPTKSLPALNPTELWPSGLSSPQLCPATTATTYYTSLYTQTVPSSVALGTCLDATPHGPEGQIVRCAPAGRLPAKRKLDLEGIGRPTVPEFRTPKGKCIRVDGLPSPKTPKSPGEKTRYDTSLGLLTKKFIYLLSESEDGVLDLNWAAEVLDVQKRRIYDITNVLEGIQLIRKKSKNNIQWVGRELFEDPTRPSRQQQLGQELKELMNAEQTLDQLIQSCSLSFKHLTEDNANKKLAYVTYQDIRAVGNFKEQTVIAVKAPPQTRLEVPDRAEENLQIYLKSTQGPIEVYLCPEEGQEPDSPAKEALPSTSALSPIPDCAQPGCSTDSGIAETIEPSVLIPQPIPPPPPPPLPPAPSLVPLEATDNMLELSHPLLQQTEDQFLSPILAANSPLISFSPPLDQDEYLWGMDEGEGISDLFDSYDLGDLLIN

SEQ ID NO: 3368 - protein, 272 aa, Mus musculus
MSQQRTARRQPSLLVDPAQETVRRRCRDPINVENLLPSKIRINLEENVQYVSMRKALKVKRPRFDVSLVYLTRKFMDLVRSAPGGILDLNKVATKLSVRKRRVYDITNVLDGIELVEKKSKNHIRWIGSDLNNFGAAPQQKKLQAELSDLSAMEDALDELIKDCAQQLLELTDDKENERLAYVTYQDIHGIQAFHEQIVIAVKAPEETRLDVPAPREDSITVHIRSTKGPIDVYLCEVEQNHSNGKTNDGIGASPSKSSHPQCPEKEDEPPQ

SEQ ID NO: 3369 - protein, 272 aa, Mus musculus
MSQQRTARRLPSLLVDPAQETVRRRCRDPINVENLLPSKIRINLEENVQYVSMRKALKVKRPRFDVSLVYLTRKFMDLVRSAPGGILDLNKVATKLGVRKRRVYDITNVLDGIELVEKKSKNHIRWIGSDLNNFGAAPQQKKLQAELSDLSAMEDALDELIKDCAQQLLELTDDKENERLAYVTYQDIHGIQAFHEQIVIAVKAPEETRLDVPAPREDSITVHIRSTKGPIDVYLCEVEQNHSNGKTNDGIGASPSKSSHPQCPEKEDEPPQ

SEQ ID NO: 3370 - protein, 272 aa, Mus musculus
MSQQRTARRQPSLLVDPAQETVRRRCRDPINVENLLPSKIRINLEENVQYVSMRKALKVKRPRFDVSLVYLTRKFMDLVRSAPGGILDLNKVATKLGVRKRRVYDITNVLDGIELVEKKSKNHIRWIGSDLNNFGAAPQQKKLQAELSDLSAMEDALDELIKDCAQQLLELTDDKENERLAYVTYQDIHGIQAFHEQIVIAVKAPEETRLDVPAPREDSITVHIRSTKGPIDVYLCEVEQNHSNGKTNDGIGASPSKSSHPQCPEKEDEPPQ

SEQ ID NO: 3371 - protein, 237 aa, Mus musculus
MPSKIRINLEENVQYVSMRKALKVKRPRFDVSLVYLTRKFMDLVRSAPGGILDLNKVATKLGVRKRRVYDITNVLDGIELVEKKSKNHIRWIGSDLNNFGAAPQQKKLQAELSDLSAMEDALDELIKDCAQQLLELTDDKENERLAYVTYQDIHGIQAFHEQIVIAVKAPEETRLDVPAPREDSITVHIRSTKGPIDVYLCEVEQNHSNGKTNDGIGASPSKSSHPQCPEKEDEPPQ

SEQ ID NO: 3372 - protein, 385 aa, Mus musculus
MGKCFTQLQMVGLIFELMSAGLLQNLWLGSAHSCLLEVKRRLDLETDHQYLAGSSGPFRGRGRHPGKGVKSPGEKSRYETSLNLTTKRFLELLSRSADGVVDLNWAAEVLKVQKRRIYDITNVLEGIQLIAKKSKNHIQWLGSHTMVGIGKRLEGLTQDLQQLQESEQQLDHLMHICTTQLQLLSEDSDTQRLAYVTCQDLRSIADPAEQMVIVIKAPPETQLQAVDSSETFQISLKSKQGPIDVFLCPEESADGISPGKTSCQETSSGEDRTADSGPAGPPPSPPSTSPALDPSQSLLGLEQEAVLPRMGHLRVPMEEDQLSPLVAADSLLEHVKEDFSGLLPGEFISLSPPHEALDYHFGLEEGEGIRDLFDCDFGDLTPLDF

(The sequence listing continues in the following parts.)
